United States Patent Application Publication US 2014/0259212 A1 - sequence listing, part 42

SEQ ID NO: 151850 - protein, 722 aa, Artificial sequence
  consensus sequence
  Variant (2)..(4): Xaa in position 2 to 4 is any amino acid
  Variant (6)..(7): Xaa in position 6 to 7 is any amino acid
  Variant (9)..(14): Xaa in position 9 to 14 is any amino acid
  Variant (15)..(17): Xaa in position 15 to 17 is any or no amino acid
  Variant (20)..(27): Xaa in position 20 to 27 is any amino acid
  Variant (28)..(28): Xaa in position 28 is any or no amino acid
  Variant (30)..(40): Xaa in position 30 to 40 is any amino acid
  Variant (41)..(57): Xaa in position 41 to 57 is any or no amino acid
  Variant (60)..(61): Xaa in position 60 to 61 is any amino acid
  Variant (63)..(64): Xaa in position 63 to 64 is any amino acid
  Variant (66)..(68): Xaa in position 66 to 68 is any amino acid
  Variant (71)..(71): Xaa in position 71 is any amino acid
  Variant (75)..(82): Xaa in position 75 to 82 is any amino acid
  Variant (83)..(84): Xaa in position 83 to 84 is any or no amino acid
  Variant (86)..(88): Xaa in position 86 to 88 is any amino acid
  Variant (90)..(98): Xaa in position 90 to 98 is any amino acid
  Variant (99)..(101): Xaa in position 99 to 101 is any or no amino acid
  Variant (104)..(105): Xaa in position 104 to 105 is any amino acid
  Variant (107)..(109): Xaa in position 107 to 109 is any amino acid
  Variant (111)..(113): Xaa in position 111 to 113 is any amino acid
  Variant (115)..(116): Xaa in position 115 to 116 is any amino acid
  Variant (118)..(120): Xaa in position 118 to 120 is any amino acid
  Variant (121)..(121): Xaa in position 121 is any or no amino acid
  Variant (123)..(124): Xaa in position 123 to 124 is any amino acid
  Variant (128)..(128): Xaa in position 128 is any amino acid
  Variant (130)..(131): Xaa in position 130 to 131 is any amino acid
  Variant (133)..(133): Xaa in position 133 is any amino acid
  Variant (136)..(137): Xaa in position 136 to 137 is any amino acid
  Variant (139)..(141): Xaa in position 139 to 141 is any amino acid
  Variant (143)..(143): Xaa in position 143 is any amino acid
  Variant (147)..(147): Xaa in position 147 is any amino acid
  Variant (152)..(152): Xaa in position 152 is any amino acid
  Variant (155)..(155): Xaa in position 155 is any amino acid
  Variant (158)..(158): Xaa in position 158 is any amino acid
  Variant (162)..(167): Xaa in position 162 to 167 is any amino acid
  Variant (169)..(170): Xaa in position 169 to 170 is any amino acid
  Variant (172)..(174): Xaa in position 172 to 174 is any amino acid
  Variant (175)..(177): Xaa in position 175 to 177 is any or no amino acid
  Variant (180)..(180): Xaa in position 180 is any amino acid
  Variant (182)..(182): Xaa in position 182 is any amino acid
  Variant (183)..(184): Xaa in position 183 to 184 is any or no amino acid
  Variant (187)..(192): Xaa in position 187 to 192 is any amino acid
  Variant (194)..(196): Xaa in position 194 to 196 is any amino acid
  Variant (198)..(198): Xaa in position 198 is any amino acid
  Variant (200)..(204): Xaa in position 200 to 204 is any amino acid
  Variant (205)..(212): Xaa in position 205 to 212 is any or no amino acid
  Variant (214)..(215): Xaa in position 214 to 215 is any amino acid
  Variant (216)..(217): Xaa in position 216 to 217 is any or no amino acid
  Variant (219)..(221): Xaa in position 219 to 221 is any amino acid
  Variant (223)..(230): Xaa in position 223 to 230 is any amino acid
  Variant (231)..(257): Xaa in position 231 to 257 is any or no amino acid
  Variant (260)..(260): Xaa in position 260 is any amino acid
  Variant (262)..(266): Xaa in position 262 to 266 is any amino acid
  Variant (267)..(284): Xaa in position 267 to 284 is any or no amino acid
  Variant (290)..(290): Xaa in position 290 is any amino acid
  Variant (299)..(299): Xaa in position 299 is any amino acid
  Variant (304)..(304): Xaa in position 304 is any amino acid
  Variant (308)..(308): Xaa in position 308 is any amino acid
  Variant (311)..(312): Xaa in position 311 to 312 is any amino acid
  Variant (313)..(316): Xaa in position 313 to 316 is any or no amino acid
  Variant (318)..(321): Xaa in position 318 to 321 is any amino acid
  Variant (324)..(327): Xaa in position 324 to 327 is any amino acid
  Variant (328)..(329): Xaa in position 328 to 329 is any or no amino acid
  Variant (331)..(333): Xaa in position 331 to 333 is any amino acid
  Variant (335)..(335): Xaa in position 335 is any amino acid
  Variant (338)..(338): Xaa in position 338 is any amino acid
  Variant (341)..(341): Xaa in position 341 is any amino acid
  Variant (345)..(345): Xaa in position 345 is any amino acid
  Variant (347)..(348): Xaa in position 347 to 348 is any amino acid
  Variant (353)..(354): Xaa in position 353 to 354 is any amino acid
  Variant (356)..(357): Xaa in position 356 to 357 is any amino acid
  Variant (358)..(360): Xaa in position 358 to 360 is any or no amino acid
  Variant (364)..(364): Xaa in position 364 is any amino acid
  Variant (366)..(367): Xaa in position 366 to 367 is any amino acid
  Variant (369)..(371): Xaa in position 369 to 371 is any amino acid
  Variant (372)..(372): Xaa in position 372 is any or no amino acid
  Variant (374)..(374): Xaa in position 374 is any amino acid
  Variant (376)..(379): Xaa in position 376 to 379 is any amino acid
  Variant (381)..(382): Xaa in position 381 to 382 is any amino acid
  Variant (384)..(386): Xaa in position 384 to 386 is any amino acid
  Variant (388)..(388): Xaa in position 388 is any amino acid
  Variant (393)..(393): Xaa in position 393 is any amino acid
  Variant (395)..(395): Xaa in position 395 is any amino acid
  Variant (397)..(399): Xaa in position 397 to 399 is any amino acid
  Variant (400)..(400): Xaa in position 400 is any or no amino acid
  Variant (402)..(409): Xaa in position 402 to 409 is any amino acid
  Variant (410)..(416): Xaa in position 410 to 416 is any or no amino acid
  Variant (419)..(419): Xaa in position 419 is any amino acid
  Variant (422)..(422): Xaa in position 422 is any amino acid
  Variant (433)..(433): Xaa in position 433 is any amino acid
  Variant (436)..(439): Xaa in position 436 to 439 is any amino acid
  Variant (441)..(441): Xaa in position 441 is any amino acid
  Variant (442)..(445): Xaa in position 442 to 445 is any or no amino acid
  Variant (447)..(449): Xaa in position 447 to 449 is any amino acid
  Variant (452)..(452): Xaa in position 452 is any amino acid
  Variant (459)..(461): Xaa in position 459 to 461 is any amino acid
  Variant (463)..(463): Xaa in position 463 is any amino acid
  Variant (466)..(466): Xaa in position 466 is any amino acid
  Variant (468)..(471): Xaa in position 468 to 471 is any amino acid
  Variant (472)..(473): Xaa in position 472 to 473 is any or no amino acid
  Variant (479)..(480): Xaa in position 479 to 480 is any amino acid
  Variant (485)..(486): Xaa in position 485 to 486 is any amino acid
  Variant (488)..(490): Xaa in position 488 to 490 is any amino acid
  Variant (492)..(500): Xaa in position 492 to 500 is any amino acid
  Variant (501)..(509): Xaa in position 501 to 509 is any or no amino acid
  Variant (511)..(511): Xaa in position 511 is any amino acid
  Variant (513)..(517): Xaa in position 513 to 517 is any amino acid
  Variant (518)..(518): Xaa in position 518 is any or no amino acid
  Variant (521)..(523): Xaa in position 521 to 523 is any amino acid
  Variant (526)..(527): Xaa in position 526 to 527 is any amino acid
  Variant (529)..(529): Xaa in position 529 is any amino acid
  Variant (531)..(531): Xaa in position 531 is any amino acid
  Variant (532)..(533): Xaa in position 532 to 533 is any or no amino acid
  Variant (535)..(537): Xaa in position 535 to 537 is any amino acid
  Variant (540)..(541): Xaa in position 540 to 541 is any amino acid
  Variant (542)..(544): Xaa in position 542 to 544 is any or no amino acid
  Variant (546)..(546): Xaa in position 546 is any amino acid
  Variant (547)..(548): Xaa in position 547 to 548 is any or no amino acid
  Variant (551)..(551): Xaa in position 551 is any amino acid
  Variant (555)..(556): Xaa in position 555 to 556 is any amino acid
  Variant (559)..(559): Xaa in position 559 is any amino acid
  Variant (561)..(561): Xaa in position 561 is any amino acid
  Variant (564)..(564): Xaa in position 564 is any amino acid
  Variant (567)..(567): Xaa in position 567 is any amino acid
  Variant (574)..(574): Xaa in position 574 is any amino acid
  Variant (581)..(582): Xaa in position 581 to 582 is any amino acid
  Variant (586)..(586): Xaa in position 586 is any amino acid
  Variant (588)..(588): Xaa in position 588 is any amino acid
  Variant (591)..(592): Xaa in position 591 to 592 is any amino acid
  Variant (594)..(597): Xaa in position 594 to 597 is any amino acid
  Variant (598)..(607): Xaa in position 598 to 607 is any or no amino acid
  Variant (614)..(619): Xaa in position 614 to 619 is any amino acid
  Variant (622)..(625): Xaa in position 622 to 625 is any amino acid
  Variant (626)..(626): Xaa in position 626 is any or no amino acid
  Variant (628)..(628): Xaa in position 628 is any amino acid
  Variant (630)..(633): Xaa in position 630 to 633 is any amino acid
  Variant (634)..(655): Xaa in position 634 to 655 is any or no amino acid
  Variant (657)..(659): Xaa in position 657 to 659 is any amino acid
  Variant (661)..(663): Xaa in position 661 to 663 is any amino acid
  Variant (666)..(667): Xaa in position 666 to 667 is any amino acid
  Variant (670)..(671): Xaa in position 670 to 671 is any amino acid
  Variant (673)..(673): Xaa in position 673 is any amino acid
  Variant (675)..(681): Xaa in position 675 to 681 is any amino acid
  Variant (682)..(682): Xaa in position 682 is any or no amino acid
  Variant (701)..(704): Xaa in position 701 to 704 is any amino acid
  Variant (705)..(709): Xaa in position 705 to 709 is any or no amino acid
  Variant (713)..(713): Xaa in position 713 is any amino acid
  Variant (717)..(718): Xaa in position 717 to 718 is any amino acid
  Variant (720)..(720): Xaa in position 720 is any amino acid
YXXXYXXSXXXXXXXXXFWXXXXXXXXXWXXXXXXXXXXXXXXXXXXXXXXXXXXXXWFXXGXXNXXXNCXDRHXXXXXXXXXXAXXXEXXXXXXXXXXXXTYXXLXXXVXXXAXXLXXXXGXXKGDXVXXYXPMXXEXXXAXLACXRIGAXHSXVFXGFSXXXXXXRXXDXXXXXXITXDXXXRGXXXXXXKXXXDXAXXXXXXXXXXXXXVXXXXVXXXTXXXXXXXXXXXXXXXXXXXXXXXXXXXXXXXXXXXRDXWXXXXXXXXXXXXXXXXXXXXXXXEDPLFXLYTSGSTGXPKGVXHTTXGYXXXXXXTXXXXFDXXXXXXDXXXCXADXGWXTGHXYXXYGPLXXGXXXXXFEGXPXXPXXXXRXWXXXXKXXVXXXYXAPTAXRXLXXXXGXXXXXXXXXXXXXXXLRXLGXVGEPINPEAWXWYXXXXGXXXXXCXXXDTXWQTETGXXXIXPLXGXXXXXXKPGSAXXPFFGXXPXXXDXXXXXXXXXXXXXXXXXXGXLXXXXXXWPXXXRTXXGXHXXXRXXXTYXXXXXGXXXYFXGDGXXRDXDXGYXWIXGRVDDVXNVSGHRXXTAEXEXALXXHXXXXXXXXXXXXXXEAAVVGXXXXXXGQXXXXXVXLXXXXXXXXXXXXXXXXXXXXXXXXXXLXXXLXXXVRXXIGXXAXPXXXXXXXXLPKTRSGKIMRRILRKIAXXXXXXXXXLGDXSTLXXPXVV

SEQ ID NO: 151851 - protein, 40 aa, Artificial sequence
  protein pattern
  Variant (2)..(2): Xaa in position 2 is Asp, Glu or His
  Variant (3)..(3): Xaa in position 3 is Ala, Pro, Ser or Thr
  Variant (6)..(6): Xaa in position 6 is any amino acid
  Variant (15)..(15): Xaa in position 15 is any amino acid
  Variant (20)..(20): Xaa in position 20 is any amino acid
  Variant (22)..(22): Xaa in position 22 is any or no amino acid
  Variant (24)..(24): Xaa in position 24 is any amino acid
  Variant (26)..(26): Xaa in position 26 is any or no amino acid
  Variant (28)..(30): Xaa in position 28 to 30 is any amino acid
  Variant (31)..(31): Xaa in position 31 is Ala, Ser, Thr or Val
  Variant (32)..(33): Xaa in position 32 to 33 is any amino acid
  Variant (34)..(34): Xaa in position 34 is Ser or Thr
  Variant (35)..(38): Xaa in position 35 to 38 is any amino acid
  Variant (40)..(40): Xaa in position 40 is Ala, Asp, Gly, Asn or Gln
EXXLFXLYTSGSTGXPKGVXHXTXGXYXXXXXXXXXXXFX

SEQ ID NO: 151852 - protein, 19 aa, Artificial sequence
  protein pattern
  Variant (3)..(3): Xaa in position 3 is any or no amino acid
  Variant (5)..(5): Xaa in position 5 is any amino acid
  Variant (8)..(8): Xaa in position 8 is Ile or Val
  Variant (12)..(12): Xaa in position 12 is Ser or Thr
  Variant (14)..(15): Xaa in position 14 to 15 is any amino acid
  Variant (19)..(19): Xaa in position 19 is Leu or Met
TAXDXGWXTGHXYXXYGPX

SEQ ID NO: 151853 - protein, 19 aa, Artificial sequence
  protein pattern
  Variant (2)..(2): Xaa in position 2 is any or no amino acid
  Variant (4)..(4): Xaa in position 4 is any or no amino acid
  Variant (7)..(7): Xaa in position 7 is any amino acid
  Variant (10)..(10): Xaa in position 10 is Ile, Leu, Met or Val
  Variant (13)..(13): Xaa in position 13 is any amino acid
  Variant (14)..(14): Xaa in position 14 is Ile, Leu, Met or Val
  Variant (16)..(16): Xaa in position 16 is Ile or Val
GXYXWIXGRXDDXXNXSGH

SEQ ID NO: 151854 - protein, 12 aa, Artificial sequence
  protein pattern
  Variant (2)..(2): Xaa in position 2 is any amino acid
  Variant (3)..(3): Xaa in position 3 is Ile, Leu or Val
  Variant (4)..(4): Xaa in position 4 is any amino acid
  Variant (7)..(7): Xaa in position 7 is any or no amino acid
  Variant (9)..(9): Xaa in position 9 is any or no amino acid
CXXXDTXWXQTE

SEQ ID NO: 151855 - protein, 19 aa, Artificial sequence
  protein pattern
  Variant (3)..(3): Xaa in position 3 is Ala, Gly or Ser
  Variant (4)..(5): Xaa in position 4 to 5 is any amino acid
  Variant (7)..(7): Xaa in position 7 is Ser or Thr
  Variant (8)..(8): Xaa in position 8 is Ile, Leu or Val
  Variant (9)..(11): Xaa in position 9 to 11 is any amino acid
  Variant (13)..(13): Xaa in position 13 is any amino acid
  Variant (15)..(17): Xaa in position 15 to 17 is any amino acid
WPXXXRXXXXXHXRXXXTY

SEQ ID NO: 151856 - protein, 13 aa, Artificial sequence
  protein pattern
  Variant (3)..(3): Xaa in position 3 is any amino acid
  Variant (5)..(5): Xaa in position 5 is Ala, Cys, Gly, Ser, Thr or Val
  Variant (6)..(6): Xaa in position 6 is Ile, Leu or Val
  Variant (8)..(8): Xaa in position 8 is Leu, Met or Val
  Variant (11)..(12): Xaa in position 11 to 12 is any amino acid
GDXVXXYXPMXXE

SEQ ID NO: 151857 - protein, 16 aa, Artificial sequence
  protein pattern
  Variant (2)..(2): Xaa in position 2 is Ala or Ser
  Variant (7)..(8): Xaa in position 7 to 8 is any amino acid
  Variant (9)..(9): Xaa in position 9 is Asp or His
  Variant (10)..(12): Xaa in position 10 to 12 is any amino acid
  Variant (14)..(14): Xaa in position 14 is Ala, Glu, Asn, Gln, Ser or Thr
  Variant (15)..(15): Xaa in position 15 is any amino acid
  Variant (16)..(16): Xaa in position 16 is Ala, Ile, Leu or Val
EXAVVGXXXXXXGXXX

SEQ ID NO: 151858 - protein, 28 aa, Artificial sequence
  protein pattern
  Variant (2)..(2): Xaa in position 2 is any or no amino acid
  Variant (4)..(4): Xaa in position 4 is any or no amino acid
  Variant (6)..(6): Xaa in position 6 is any or no amino acid
  Variant (9)..(9): Xaa in position 9 is Ala, Pro or Ser
  Variant (10)..(10): Xaa in position 10 is Ala, Asp, Glu, Gly, Asn, Gln, Ser or Thr
  Variant (11)..(11): Xaa in position 11 is Ala or Ser
  Variant (12)..(12): Xaa in position 12 is Ile, Leu or Val
  Variant (13)..(13): Xaa in position 13 is any amino acid
  Variant (14)..(14): Xaa in position 14 is Ala, Asp, Glu, Gly, Asn, Gln, Ser or Thr
  Variant (16)..(17): Xaa in position 16 to 17 is any amino acid
  Variant (19)..(19): Xaa in position 19 is Ala, Cys, Gly, Ser or Thr
  Variant (20)..(23): Xaa in position 20 to 23 is any amino acid
  Variant (24)..(24): Xaa in position 24 is Ile, Leu or Val
  Variant (25)..(25): Xaa in position 25 is Ile, Leu, Met or Val
  Variant (27)..(27): Xaa in position 27 is any amino acid
  Variant (28)..(28): Xaa in position 28 is Asp, Asn, Ser or Thr
VXFXGXFSXXXXXXRXXDXXXXXXXTXX

SEQ ID NO: 151859 - protein, 11 aa, Artificial sequence
  protein pattern
  Variant (3)..(3): Xaa in position 3 is Ser or Thr
  Variant (7)..(7): Xaa in position 7 is any amino acid
  Variant (8)..(8): Xaa in position 8 is any or no amino acid
  Variant (10)..(10): Xaa in position 10 is any or no amino acid
YFXGDGXXRXD

SEQ ID NO: 151860 - protein, 11 aa, Artificial sequence
  protein pattern
  Variant (2)..(2): Xaa in position 2 is Ala, Gly or Pro
  Variant (3)..(3): Xaa in position 3 is Gly or Ser
  Variant (4)..(4): Xaa in position 4 is Ala, Cys, Ser or Thr
  Variant (6)..(7): Xaa in position 6 to 7 is any amino acid
KXXXAXXPFFG

SEQ ID NO: 151861 - protein, 16 aa, Artificial sequence
  protein pattern
  Variant (2)..(2): Xaa in position 2 is Phe or Tyr
  Variant (3)..(3): Xaa in position 3 is any amino acid
  Variant (4)..(4): Xaa in position 4 is Asp, Glu, Gly or Asn
  Variant (5)..(5): Xaa in position 5 is Ala or Gly
  Variant (6)..(7): Xaa in position 6 to 7 is any amino acid
  Variant (9)..(9): Xaa in position 9 is any amino acid
  Variant (10)..(10): Xaa in position 10 is Ala, Cys, Ser or Thr
  Variant (11)..(11): Xaa in position 11 is any amino acid
  Variant (14)..(14): Xaa in position 14 is Ile, Leu or Val
WXXXXXXNXXXNCXDR

SEQ ID NO: 151862 - DNA, 567 bp, Saccharomyces cerevisiae
  CDS (1)..(567)
atgggcaaaaccgcggataatcatggtccagtacgttctgagacagcacgtgaaggaagagaaaaccaggtttactcacccgttacaggtgcaagattagttgctggctgcatatgtttaacacccgacaagaagcaagttctcatgattacttcttctgcacacaagaaaagatggattgtccccaaaggtggcgttgagaaagacgagcctaattacgagacgactgcccaacgagaaacttgggaggaagctggttgcataggtaaaattgtcgccaatttgggtacagttgaagacatgagaccccctaaggactggaacaaagacattaagcaattcgagaactctcgaaaagattcagaagtagcaaagcacccgccaagaaccgaatttcatttttatgaattagagattgaaaatctccttgataaatttccggaatgtcacaaaagacatagaaagctatactcttatacagaagctaaacaaaacttgatagacgccaagaggcctgaattgttggaggcccttaataggtctgctatcattaaagacgacaaatag

SEQ ID NO: 151863 - protein, 188 aa, Saccharomyces cerevisiae
MGKTADNHGPVRSETAREGRENQVYSPVTGARLVAGCICLTPDKKQVLMITSSAHKKRWIVPKGGVEKDEPNYETTAQRETWEEAGCIGKIVANLGTVEDMRPPKDWNKDIKQFENSRKDSEVAKHPPRTEFHFYELEIENLLDKFPECHKRHRKLYSYTEAKQNLIDAKRPELLEALNRSAIIKDDK

SEQ ID NO: 151864 - DNA, 615 bp, Oryza sativa (japonica cultivar-group)
  CDS (1)..(615)
atgtcgtcgccggacaaggtggtggccaggacgggccgcctcaggcagcgctacgacaacgagtaccgcctcgtcgcaggctgcgtgccgtaccgggtgaagaaagacgaggccaaccctcgcatcctcggcgacgttccgggccaggtggaggtgctcatggtctccacccccaaccgcgccgacatggtcttccccaagggtggatgggaggacgacgaggaggtgtacgaggcggcgtcccgcgaggccatggaggaggccggcgtcaagggcatcgtcaataggactaccttgggacactgggtgttcaagagcaagagcagccagaacagcagcagcccaaggggagcttgcaagggctacatcttcgccatggaggtcactgaggagctcgagtcgtggccggagcaggcgacccatggccgtcgatgggtctcccccggtgaagcctaccagctctgccggtacgaatggatgcgcgaggcgctcaccgctctgctggagcggttgtcgatgatcgagccggtgccgtctgcgcaggaactgtctgatcaaactagcatgtacatgatgctgcaggcatcatctgatagcgcggtcgcgctgtgctga

SEQ ID NO: 151865 - protein, 204 aa, Oryza sativa (japonica cultivar-group)
MSSPDKVVARTGRLRQRYDNEYRLVAGCVPYRVKKDEANPRILGDVPGQVEVLMVSTPNRADMVFPKGGWEDDEEVYEAASREAMEEAGVKGIVNRTTLGHWVFKSKSSQNSSSPRGACKGYIFAMEVTEELESWPEQATHGRRWVSPGEAYQLCRYEWMREALTALLERLSMIEPVPSAQELSDQTSMYMMLQASSDSAVALC

SEQ ID NO: 151866 - DNA, 552 bp, Oryza sativa (japonica cultivar-group)
  CDS (1)..(552)
atgtgtgaccttgtggcccgaacgggtcggcatcagcagcggtacgaggatggccggcggctggtggccggatgcataccgttcaggtatagaactagtaatgatgaaacttctgatgatgaaccgaagaaaattgttgaagttctcatgataaactctcaaagtggtccaggtctcctgtttccaaagggaggatgggagaatgatgaaactgttgagcaggcagctgctcgagaggctgtagaagaagctggagttcgtggagatatagtgcaatttctgggtttctacgacttcaaaagcaagacgcatcaagatgcgtgctgccccgagggtatgtgcagagccgcggtgtttgcgctgcatgtgaaggaagagctggactcatggcctgagcagagcacccgcaggaggacctggttgacagttcctgaagccacgtcgcagtgccggtatcagtggatgcaagaggctttgcttactggcttctctgactggcatgacaactggagcaaaggtggcggtggcgacaccaactatgactctctctag

SEQ ID NO: 151867 - protein, 183 aa, Oryza sativa (japonica cultivar-group)
MCDLVARTGRHQQRYEDGRRLVAGCIPFRYRTSNDETSDDEPKKIVEVLMINSQSGPGLLFPKGGWENDETVEQAAAREAVEEAGVRGDIVQFLGFYDFKSKTHQDACCPEGMCRAAVFALHVKEELDSWPEQSTRRRTWLTVPEATSQCRYQWMQEALLTGFSDWHDNWSKGGGGDTNYDSL

SEQ ID NO: 151868 - DNA, 507 bp, Oryza sativa (japonica cultivar-group)
  CDS (1)..(507)
atggcggcggtgatggtggcgaggcaggggagggagctgcagaggtacagcgacaacacgggggggaggatggtggtggggtgcatcccgtacagggtgaggggcgacggcggcggggtggaggtgctcgtgatcagctcgcagaagaagggcgccgccgccggcgacgtggtgatgttccccaagggcgggtgggagctggacgagtccgtggacgaggcggcgcggcgggaggccctggaggaggccggggtgctcggcgagatcggcgcctcgctggggcggtggtgctaccggagccgccgctacgacgccacctacgagggcttcgtcttcccgctccgggtcaccgacgagctcgaccggtggccggagatggcggccaggcgccgcagctgggtctccccgcagcaggccatggaccggtgcccgcactggtggatgcgcgaggccctccagcgattcgccgacctcttcccccaacccacgccgttgtccctcttgtag

SEQ ID NO: 151869 - protein, 168 aa, Oryza sativa (japonica cultivar-group)
MAAVMVARQGRELQRYSDNTGGRMVVGCIPYRVRGDGGGVEVLVISSQKKGAAAGDVVMFPKGGWELDESVDEAARREALEEAGVLGEIGASLGRWCYRSRRYDATYEGFVFPLRVTDELDRWPEMAARRRSWVSPQQAMDRCPHWWMREALQRFADLFPQPTPLSLL

SEQ ID NO: 151870 - DNA, 507 bp, Magnaporthe grisea 70-15
  CDS (1)..(507)
atggctgcttcaggaagcagtaatagcagtacacggaccatgcagtcccgtactgggaggagcaagcaacggtataacagcaagggcgaacgcctggtcgctggtgtagtggcgctttcagaagacaaagagtacgtgctactcactcaatcaactcgccggaagggctgggtattgcccaaaggtggctgggagacggacgaagaatgcaccgaggccgcggagcgtgaagcctgggaggaggctggaattgttgtcaccatcgattacgaccttggccagatcgaggagactagggttaaaacctcttctaaatctgccaagtctggcaagcgcgagaaagccatctaccacttctacgaggcgaccgtcacaagcgaagagcaggactggcccgagaaggacaagcgccaacgcaagtggatgacgtttgtcgacgcgtgggagtcgctcaaagatagacccgagcttcaggaggccctcaaccggtcaaccatgaagagatag

SEQ ID NO: 151871 - protein, 168 aa, Magnaporthe grisea 70-15
MAASGSSNSSTRTMQSRTGRSKQRYNSKGERLVAGVVALSEDKEYVLLTQSTRRKGWVLPKGGWETDEECTEAAEREAWEEAGIVVTIDYDLGQIEETRVKTSSKSAKSGKREKAIYHFYEATVTSEEQDWPEKDKRQRKWMTFVDAWESLKDRPELQEALNRSTMKR

SEQ ID NO: 151872 - DNA, 495 bp, Gibberella zeae PH-1
  CDS (1)..(495)
atgtcgagttctgcctctggcgactcaggcggtggccgttcgatggagtcacgagtgggtagaagcaagcaacgctacaacactaagggtgaacgactcgtcgctggcattgtgcctcttacgtccgatcaaaattatgtgctattaatccaatcaacacgacgcaaaggttgggttttgcctaagggcggctgggaatcggacgagacctgccaagaggctgccgaacgagaggcttgggaagaagctggcatcactgtgcaaataagttacgaccttggcgacattgatgaaaagcgtgcgccaaaatcgtcgtcaaaagatcggtcaagataccacttcttcgaaggcacagtgaccggcgagtttgacgaatggcccgaatcccataaacgagaacgccagtggttcacgtttacacaagcttgggaggcattgtcaacgagaccggagctccaggaagcattgcagcggtcaactgtgaaacgtcaataa

SEQ ID NO: 151873 - protein, 164 aa, Gibberella zeae PH-1
MSSSASGDSGGGRSMESRVGRSKQRYNTKGERLVAGIVPLTSDQNYVLLIQSTRRKGWVLPKGGWESDETCQEAAEREAWEEAGITVQISYDLGDIDEKRAPKSSSKDRSRYHFFEGTVTGEFDEWPESHKRERQWFTFTQAWEALSTRPELQEALQRSTVKRQ

SEQ ID NO: 151874 - DNA, 531 bp, Candida glabrata CBS 138
  CDS (1)..(531)
atgtctctgtcaatggaggccagaagcggtcgtgctaaccaggtctatggtgaagatggtgctaggctggttgcgggctgtgtgtgtttgacgagtgatagacatcatgttcttatgatcagctcttctgccaacagaaataagtggatacttcctaaaggtggtattgaaactgatgagccagactataaacagactgcgatccgtgaaacctgggaagaagcagggtgtaccggggagatagtttcctcgctgggtgtagtaaaggatatgagaccaccaaaggctaagacgatggacagagctacttttgaaagggcgaagagcgatgccgaagtgaacaagaatccgcctaggtcggaatttcatttctatgaattgataataggaaaactagaggacaattttccagagatgcataaacgagatcgcaagctgtttacataccgtgaggctaaacagaatctagtagaggcaaagagaccagaactcctggaggctctcacaaggtctagcatcatcaaggattaa

SEQ ID NO: 151875 - protein, 176 aa, Candida glabrata CBS 138
MSLSMEARSGRANQVYGEDGARLVAGCVCLTSDRHHVLMISSSANRNKWILPKGGIETDEPDYKQTAIRETWEEAGCTGEIVSSLGVVKDMRPPKAKTMDRATFERAKSDAEVNKNPPRSEFHFYELIIGKLEDNFPEMHKRDRKLFTYREAKQNLVEAKRPELLEALTRSSIIKD

SEQ ID NO: 151876 - DNA, 540 bp, Kluyveromyces lactis NRRL Y-1140
  CDS (1)..(540)
atgtcagactttatcaagaccgacacctcaagagtaggacgtgagaatcagttgtattcaagtgtcactggtgctagactcgttgcaggatgtataatactggatgaaagccgagagaatgtcttaatggtccagtcatccgctcataagaagagatgggtgttgccaaagggtggtattgaaagtgatgaacctgactttgagtccgctgcaagaagagagacctgggaagaagctggtgccacaggcgatatagtgaaagcacttggttccattgaggatatgagacctccaaaggactggaacccagatttggaagcattcgagagttcgaatgacgaaactgttaacaaatggcctcccaggtccgaattccatttcttcgagatgattaatgttaaattggaggacaattatcctgaagtgaagacaagaaaccgtcaatggttctcctacgaacaggccaaagaaaacttgacccgtgccaagaggccagagctcattgaggctctgaatagaagtagcatcaagaaaagttag

SEQ ID NO: 151877 - protein, 179 aa, Kluyveromyces lactis NRRL Y-1140
MSDFIKTDTSRVGRENQLYSSVTGARLVAGCIILDESRENVLMVQSSAHKKRWVLPKGGIESDEPDFESAARRETWEEAGATGDIVKALGSIEDMRPPKDWNPDLEAFESSNDETVNKWPPRSEFHFFEMINVKLEDNYPEVKTRNRQWFSYEQAKENLTRAKRPELIEALNRSSIKKS

SEQ ID NO: 151878 - DNA, 585 bp, Debaryomyces hansenii CBS767
  CDS (1)..(585)
atgagtgacgatacagggtcagtaagttccaatttacctagtaaatctaatgaatctagggttgggagggaaaatcagagatataacccggaaactaatgcaagaatggtggcaggatgcatttgcatgaatgctaccaaagataaggtcataatgattctgtctacggcccataagaatagatgggtatttcctaaaggaggaattgagcttgatgaaggggatgactttgttgttagtgccgcaagagaaacctgggaggaggcagggtgtgaaggaaagatattgaataagttaccaattgccttagattcgagaggtaagaaagcaccaatcttagagaaaggaaaagaatttgagccaagtggggttatacccaagtcagagtttcatttctatgaaatggtggttgataaacttagttccaaatggccagaatcgaaaaagagacagagaaggtggtgcacctactcagaagctaaacatgaattgttaaaagcaaaaaggcccgaattggttgaagcattagacaactcctgtatcatcaaggatgtcgagggaatcgctggtgtcgacgaatattaa

SEQ ID NO: 151879 - protein, 194 aa, Debaryomyces hansenii CBS767
MSDDTGSVSSNLPSKSNESRVGRENQRYNPETNARMVAGCICMNATKDKVIMILSTAHKNRWVFPKGGIELDEGDDFVVSAARETWEEAGCEGKILNKLPIALDSRGKKAPILEKGKEFEPSGVIPKSEFHFYEMVVDKLSSKWPESKKRQRRWCTYSEAKHELLKAKRPELVEALDNSCIIKDVEGIAGVDEY

SEQ ID NO: 151880 - DNA, 540 bp, Yarrowia lipolytica CLIB122
  CDS (1)..(540)
atgggcaaagacaccaaagaggccaaagacggtaaagacaagaaggaaaagaaggaaaagtcgatgaaggcccgagagggacgagacaaccaggtgtactcagcctcggggtcgcgggtcgtggctggctgtgtctgtgtcaataatgactcatctcaggtgctcatgatttcgtcggcggcccaccccaacagatggattcttcccaagggaggcgtggagaaggacgaattgagcgtggagggcgatttcagtgagtctgccgtgcgagaaacgtgggaagaggccggagtcacgggcaagatctcaaaatacctcggcaagtacgacgacatgcgaaaacccatcgagtacaaggacagcctgattcccaagacggagttccacttttacgaaatggaggtcgagaacctggcagatgtgtggcccgaaaaccgaaagcgaaagtgggcagggtttgaagaggccaaggctgatctgaccaaggccaaacgtctggagctcatcgaagctttgaaggacagttccctgaagagatag

SEQ ID NO: 151881 - protein, 179 aa, Yarrowia lipolytica CLIB122
MGKDTKEAKDGKDKKEKKEKSMKAREGRDNQVYSASGSRVVAGCVCVNNDSSQVLMISSAAHPNRWILPKGGVEKDELSVEGDFSESAVRETWEEAGVTGKISKYLGKYDDMRKPIEYKDSLIPKTEFHFYEMEVENLADVWPENRKRKWAGFEEAKADLTKAKRLELIEALKDSSLKR

SEQ ID NO: 151882 - DNA, 480 bp, Aspergillus nidulans FGSC A4
  CDS (1)..(480)
atggtggaccaggttcgttcaatggagtcccgcgtagggcgaaaaaaccaacggtatggatcgaagggcgaacggctcgtggccggcgtcgtcccattatcaaaagataaaagcttagtgatgatgattcagtcagctggtcgaggtggttgggtgcttccgaaaggcggatgggagacagacgaagcaagtgcccaacaggcggcttgcagagaagcctgggaagaagccggagtaatttgcactgttctccgggatttggggacgatatcagacatgcgtccttcgacaatgctgacgtccaattcaccaagagcctcataccagttctttgaggttaccgtggatcgcgaggaggaccgatggcctgaaatgcacaagcggaggcggcagtgggtaacttatacccaggctgcagccgcacttgcgagtcgcccagagcttttagaggcgttaaaccgaagttccatgaagagatag

SEQ ID NO: 151883 - protein, 159 aa, Aspergillus nidulans FGSC A4
MVDQVRSMESRVGRKNQRYGSKGERLVAGVVPLSKDKSLVMMIQSAGRGGWVLPKGGWETDEASAQQAACREAWEEAGVICTVLRDLGTISDMRPSTMLTSNSPRASYQFFEVTVDREEDRWPEMHKRRRQWVTYTQAAAALASRPELLEALNRSSMKR

SEQ ID NO: 151884 - DNA, 579 bp, Candida albicans SC5314
  CDS (1)..(579): transl_table=12
atggaacagctgcagaactacaacaacccaaatttaccagtaaagtcacaaacagccagagaaggtcgtgagaatcagcgttataattcagaaacaggggcaaggatagttgctgggtgtatgtgtctcaatgaaaccaaagacaaaattattatgatatcatcttcgaaacataaaaaccgttggatagtccccaaaggtggcaatgaattggacgagtctgaattggaaactgctgttagagagacttgggaagaagctggggtagaaggaataatcataaagaaattgccagttgttttggactctagagggagtcaagcaccagttattaagggtgaatttgatcctgatgttgctactcctaaatccgaatttcatttttttgaattgcaagtcgatcaattgagtacatcttggccagagatgaagaaaagacaaagaaggtggtgtacttattctgaggcaaaacacgagttgctaaaactgaaaagaccagaattagttgatgcattgaacatgtcatctattttaaaagacactattgacgacgaaaaccctaaacaagataattattag

SEQ ID NO: 151885 - protein, 192 aa, Candida albicans SC5314
MEQSQNYNNPNLPVKSQTAREGRENQRYNSETGARIVAGCMCLNETKDKIIMISSSKHKNRWIVPKGGNELDESELETAVRETWEEAGVEGIIIKKLPVVLDSRGSQAPVIKGEFDPDVATPKSEFHFFELQVDQLSTSWPEMKKRQRRWCTYSEAKHELLKSKRPELVDALNMSSILKDTIDDENPKQDNY

SEQ ID NO: 151886 - DNA, 450 bp, Tribolium castaneum
  CDS (1)..(450)
atggtcaaagaaaaaccaaattccatccgtatttacgacgaagaaggcttccggcgacgtgcggcttgcatttgcgtccgctccgatgccgagactgaggtcctgctggtgacgtcttctcgcagaccggaaaaatggatcgttccggggggcggcgtcgagccggaagaagagccgagcgtgaccgccaccagagaggtcctcgaggaggcgggcgtcatcggcaagctgggacgtagcttgggagtttttgaaaatttagaacacaaagacaggactgaagtgtatgtcatgacagtaactgaagaattagacgaatgggaagactcaaagaccataggaaggaagcgacagtggttcacgatagaagaggctctagaacagctcgcgctgcataaaccggtgcaacgcaattacctccaacagttacgacgctcgaaactaacatga

SEQ ID NO: 151887 - protein, 149 aa, Tribolium castaneum
MVKEKPNSIRIYDEEGFRRRAACICVRSDAETEVLLVTSSRRPEKWIVPGGGVEPEEEPSVTATREVLEEAGVIGKLGRSLGVFENLEHKDRTEVYVMTVTEELDEWEDSKTIGRKRQWFTIEEALEQLALHKPVQRNYLQQLRRSKLT

SEQ ID NO: 151888 - DNA, 501 bp, Rhodobacter sphaeroides 2.4.1
  CDS (1)..(501): transl_table=11
atgggcgaaggccgtcatatcgggctgaccagcaacggatccggcgaggtccggccgcagtgcggcgccatctgctggcgtctcgaggggggcgagctccaggtgctgctcatcaccagccgcgataccggccgctgggtgatcccgaagggcggccgcatcgagggcctcgacgatgcggactcggccgcgcaggaagcctgggaagaggccggcattcagggcgagatcgcgccgcagcccctcggccgcttcacctaccagaagatcgccaggaacgccgccagcatcgcctgcgaggtcgtggtgttcccgctggcggtcgaggacatgtcggacgtctttcccgagcgcggtcagcgcaagcgcaagtggttcacgccggacaaggccgcgcgcaaggtggcggaacccgggctgcgcgagatcctcgtgcgcttcgatcccgcccccgagcccgaccccgaacgcgacgacggattgccgctgggcgactattga

SEQ ID NO: 151889 - protein, 166 aa, Rhodobacter sphaeroides 2.4.1
MGEGRHIGLTSNGSGEVRPQCGAICWRLEGGELQVLLITSRDTGRWVIPKGGRIEGLDDADSAAQEAWEEAGIQGEIAPQPLGRFTYQKIARNAASIACEVVVFPLAVEDMSDVFPERGQRKRKWFTPDKAARKVAEPGLREILVRFDPAPEPDPERDDGLPLGDY

SEQ ID NO: 151890 - DNA, 468 bp, Silicibacter sp. TM1040
  CDS (1)..(468): transl_table=11
atgcaacagttactgcataaaatctggtcccagacctttcagcccatgttgtcgcgcccgcgcagattgcaagtggcagcgctatgctatcgccgtgacaagtcggggtgcgaagtcctgttgatcaccagccgggacaccggtcgctgggtggtaccaaaaggctggccaatggagggcaaatccagcgccgagagtgccgctcaggaagcctgggaagaagctggcgtgcgctgtggccgttttgaggaaactcctgtcgggcgctttgaatatgacaagcgcctgaacaacggagcactggagcctctggagacactggtctacgcgatcgaagtgcaggagttgcgagacgacttccccgaagcccatgaacgtacccgaaaatgggtcagccccaaggacgccgcagagatggtgcgcgagcctcaactccaggaccttttgcgcggtttcagcccatcttga

SEQ ID NO: 151891 - protein, 155 aa, Silicibacter sp. TM1040
MQQLLHKIWSQTFQPMLSRPRRLQVAALCYRRDKSGCEVLLITSRDTGRWVVPKGWPMEGKSSAESAAQEAWEEAGVRCGRFEETPVGRFEYDKRLNNGALEPLETLVYAIEVQELRDDFPEAHERTRKWVSPKDAAEMVREPQLQDLLRGFSPS

SEQ ID NO: 151892 - DNA, 459 bp, Sulfitobacter sp. EE-36
  CDS (1)..(459): transl_table=11
atgaaacagttgcccatatcactgcaaggtgcccgcaagggagaggtgcgaacacagttcgccgcgctgtgttaccgtgtgcgccaaggcaaggtgcaggtgctgttgatcacgtctcggggggcgaaacgctggattgtgccgaaaggctggccgatggatgccaaaacccccggtgccgccgccgcgcgcgaggcatgggaagaagcgggcgtgcgcgggcgggtcacgggtggctgccttggcgtctattcctacacaaaggaaatggacgacggagagatgctgccggtggtggccatgctctatcccgtagaggtcaagatcaccgccgataaataccccgaagccggccagcgccggcgcaagtggatgtcgcgcaagaaggccgccaaaatggtgtcagagcccgagctggcgcgcatgatccgggacttcgatccgcgcgggcggagttga

SEQ ID NO: 151893 - protein, 152 aa, Sulfitobacter sp. EE-36
MKQLPISLQGARKGEVRTQFAALCYRVRQGKVQVLLITSRGAKRWIVPKGWPMDAKTPGAAAAREAWEEAGVRGRVTGGCLGVYSYTKEMDDGEMLPVVAMLYPVEVKITADKYPEAGQRRRKWMSRKKAAKMVSEPELARMIRDFDPRGRS

SEQ ID NO: 151894 - DNA, 480 bp, Aspergillus oryzae
  CDS (1)..(480)
atggtggatcaaactcggtcaatggagtcccggacaggacggaaaaaccaacgatatggatcgaaaggcgaacgtcttgtagccggtgtggttcccttgtcgaccgataaatcacaggtgcttatgatccaatctgcgggacgaggtggctgggtgcttcccaaaggtggatgggaaacagatgaagaaactgcccaacaagccgcttgcagagaggcctgggaagagggcggcataatctgcacagtgctcagagatctggggatgatccctgacatgcgcccctctactctactgacgtcgcatgcacccaaggcatcttaccaattctttgaggtcatcgttgaccgtgaggaagcgcaatggccagaaatgcataaacgaaagcgtcaatgggtctcttatgcgcaagccgcagctgctcttgcgagccgtccagagctcttagaggcattgaatcgcagctccatgaaacggtag

SEQ ID NO: 151895 - protein, 159 aa, Aspergillus oryzae
MVDQTRSMESRTGRKNQRYGSKGERLVAGVVPLSTDKSQVLMIQSAGRGGWVLPKGGWETDEETAQQAACREAWEEGGIICTVLRDLGMIPDMRPSTLLTSHAPKASYQFFEVIVDREEAQWPEMHKRKRQWVSYAQAAAALASRPELLEALNRSSMKR

SEQ ID NO: 151896 - DNA, 633 bp, Schizosaccharomyces pombe
  CDS (1)..(633)
atgcttgaaaataacggaagtgtgattttaatggagccggatcatctacggacggcagtgaaccgctcaatgacttctcgtgaaggtcgaacgaaaaatcgattcaatcctattacaggagccagacttgctgcgggtgttgttgctttatctgcagacaaaaggaaagtcctattagtttcttctgctaaaaaacatccttcttgggtagttcctaagggtggatgggaggctgatgaatctgttcagcaagctgcccttcgtgaaggttgggaagaaggcggactagtgggtcatatcactagatcccttgggtctttcaaggataagcgtcctactgatactattgacagaaggaaaaaatatttgaagcaattaatgtcaaaaagtagcggaaatgacgtctcaaccaataccgagttaggagccgaagcagagaaattattacttccacctagagccgaatgtgaattttttgaagttattgttgaaagattagaagacaattacccagagatgaggaagcgtcgccgaaaatggatgtcttatcaagaagcaaaggaagcgttgacaagtcgtaaagatattttggcagctcttgagaagagctctatcattaaagaggaaaactga

SEQ ID NO: 151897 - protein, 210 aa, Schizosaccharomyces pombe
MLENNGSVILMEPDHLRTAVNRSMTSREGRTKNRFNPITGARLAAGVVALSADKRKVLLVSSAKKHPSWVVPKGGWEADESVQQAALREGWEEGGLVGHITRSLGSFKDKRPTDTIDRRKKYLKQLMSKSSGNDVSTNTELGAEAEKLLLPPRAECEFFEVIVERLEDNYPEMRKRRRKWMSYQEAKEALTSRKDILAALEKSSIIKEEN

SEQ ID NO: 151898 - DNA, 543 bp, Arabidopsis thaliana
  CDS (1)..(543)
atgtgtgatttggtcgcgcgtacgggtcgtctccagcagcggtacgaggatggctctcgtctcgtcgccgggtgtattccgtttaggtatgtaaattctgacaaagatggtaattctgaatctgggaaagtgattcaagtgttgatgatcagctcgtctagtggacctggacttttgtttcccaagggaggatgggagaatgatgagacagtcagggaggctgcagcgagggaagcagtggaagaagcaggagtccgtgggattcttatggattttttggggaattatgagttcaagagcaaatcacaccaagatgagtttagcccagaaggtttatgtaaagcggcaatgtacgcgttgtatgtgaaagaagagctagcgacgtggccggaacatgagacgagaacacgtaaatggctgacaattgaagaagcggtagagagttgcaggcacccttggatgaaggacgcattggtggaaggattctgtaaatggcataaggagaagatggttaaaggagaggagataactggtgaacattga

SEQ ID NO: 151899 - protein, 180 aa, Arabidopsis thaliana
MCDLVARTGRLQQRYEDGSRLVAGCIPFRYVNSDKDGNSESGKVIQVLMISSSSGPGLLFPKGGWENDETVREAAAREAVEEAGVRGILMDFLGNYEFKSKSHQDEFSPEGLCKAAMYALYVKEELATWPEHETRTRKWLTIEEAVESCRHPWMKDALVEGFCKWHKEKMVKGEEITGEH

SEQ ID NO: 151900 - DNA, 562 bp, Arabidopsis thaliana
  CDS (1)..(531)
atggtgtgtttggtctcccgtacgggtcgtcaatcccaaagatacaacaagggacggcgtcaagtcgtcgggtgtattccatacagactcaagatttcgagtgatggcacaattagcgacgaatttgaggttcttgttatttcatcacaaaagggtcacgctctgatgttcccaaagggtggttgggagcttgatgaatctgtagaagaagctgcgtcaagagaatctctagaagaagctggagttgttggaaacgttgagagacaacttggaaaatgggatttcttaagcaaaagcaaaggaacattctatgaaggattcatgttcccaatgcttgtgaaagaagagcttgagctttggcctgaacaacatcttcgtcaaagaatttggatgaaagttgatgaagcaagagacgcttgtagagattggtggatgaaggaagcgttagatgttttggtccaaaggctttctttactatcattgaagcctatggaagaagacgagaaccttccactgatctctatctactgatcaaaaaaaaaacaatcagacgtgttcttga

SEQ ID NO: 151901 - protein, 176 aa, Arabidopsis thaliana
MVCLVSRTGRQSQRYNKGRRQVVGCIPYRLKISSDGTISDEFEVLVISSQKGHALMFPKGGWELDESVEEAASRESLEEAGVVGNVERQLGKWDFLSKSKGTFYEGFMFPMLVKEELELWPEQHLRQRIWMKVDEARDACRDWWMKEALDVLVQRLSLLSLKPMEEDENLPLISIY

SEQ ID NO: 151902 - DNA, 597 bp, Arabidopsis thaliana
  CDS (1)..(597)
atgatttctctattcatctcaaacttttcaaacttatcaaacttatctccgacctttgataacatgaacatgaacatcccatcgaagaagatcgtaccggtaccgacaccgagtgagaaagttgtctctttggtatctcgaaccggacgagatctccaacgttacaacaccgcagggtatcgtcaagtcgtcggatgtgtaccatatagatacaagaaacacggaggaggagaaattgaagtgcttttgataagtgcacagaagaaagggaaaggaatgttattaccaaaaggaggttgggagattgatgaatcaatagaagaagctgctttaagagagacaattgaagaagctggtgttacgggtcagcttgaagaatcacttgggaaatggcaatacaaaagcaaaagacatactatgattcatgatggtcatatgtttcctttgcttgttagtcagcagtttgagatatggcctgaatctgaattcagacaacgcaaatgggtttctttgtctgaagcgattgagttgtgtcagaattcgtggatgagagaagctttggaagctttcattaaccggaaatgccagacccaataa

SEQ ID NO: 151903 - protein, 198 aa, Arabidopsis thaliana
MISLFISNFSNLSNLSPTFDNMNMNIPSKKIVPVPTPSEKVVSLVSRTGRDLQRYNTAGYRQVVGCVPYRYKKHGGGEIEVLLISAQKKGKGMLLPKGGWEIDESIEEAALRETIEEAGVTGQLEESLGKWQYKSKRHTMIHDGHMFPLLVSQQFEIWPESEFRQRKWVSLSEAIELCQNSWMREALEAFINRKCQTQ

SEQ ID NO: 151904 - DNA, 624 bp, Arabidopsis thaliana
  CDS (1)..(624)
atgacagggttctctgtgtctctttttgtgtcaaacttgtcaaatgtggcctcgtatttgtcgcccatcttcgagaacatcccctccaccaaggttgttcccgcacagatcgagaaagttgtctctttggtctctcgtaccggtcgcgatttgcagcgttacgatcacgctggctatcgtcaagtcgtcggatgtgtaccgtatagatacaagaaacaagaagtcaatggagttgaaacccaagtaatccaagttcttcttgtcagtgctcaaaagggcaaaggaatgttatttccaaaaggaggttgggagacggatgaatcaatggaggaagctgctttgagagagacgatcgaagaagcgggtgtaacaggagagctcgaagaaaagcttgggaaatggcaatacaaaagcaaaagacatagcataattcacgatgggtatatgtttgctttgcttgtcagtcaagagttcgagcgatggcctgaggcggaaatgagacaacgcagatgggtaagtttggatgaagcaagagaagtatgtcagaattggtggatgagagaagctcttgaagcattcattaacctgaaatgtctagctgacgatgatgaaagtgggaactga

SEQ ID NO: 151905 - protein, 207 aa, Arabidopsis thaliana
MTGFSVSLFVSNLSNVASYLSPIFENIPSTKVVPAQIEKVVSLVSRTGRDLQRYDHAGYRQVVGCVPYRYKKQEVNGVETQVIQVLLVSAQKGKGMLFPKGGWETDESMEEAALRETIEEAGVTGELEEKLGKWQYKSKRHSIIHDGYMFALLVSQEFERWPEAEMRQRRWVSLDEAREVCQNWWMREALEAFINLKCLADDDESGN

SEQ ID NO: 151906 - DNA, 24 bp, Artificial sequence
  primer
atgggcaaaaccgcggataatcat

SEQ ID NO: 151907 - DNA, 26 bp, Artificial sequence
  primer
ctatttgtcgtctttaatgatagcag

SEQ ID NO: 151908 - protein, 199 aa, Artificial sequence
  consensus sequence
  Variant (2)..(2): Xaa in position 2 is any amino acid
  Variant (5)..(7): Xaa in position 5 to 7 is any amino acid
  Variant (8)..(8): Xaa in position 8 is any or no amino acid
  Variant (10)..(13): Xaa in position 10 to 13 is any amino acid
  Variant (14)..(15): Xaa in position 14 to 15 is any or no amino acid
  Variant (17)..(19): Xaa in position 17 to 19 is any amino acid
  Variant (21)..(30): Xaa in position 21 to 30 is any amino acid
  Variant (31)..(44): Xaa in position 31 to 44 is any or no amino acid
  Variant (47)..(49): Xaa in position 47 to 49 is any amino acid
  Variant (51)..(58): Xaa in position 51 to 58 is any amino acid
  Variant (59)..(63): Xaa in position 59 to 63 is any or no amino acid
  Variant (68)..(68): Xaa in position 68 is any amino acid
  Variant (70)..(70): Xaa in position 70 is any amino acid
  Variant (72)..(77): Xaa in position 72 to 77 is any amino acid
  Variant (78)..(82): Xaa in position 78 to 82 is any or no amino acid
  Variant (84)..(84): Xaa in position 84 is any amino acid
  Variant (87)..(88): Xaa in position 87 to 88 is any amino acid
  Variant (93)..(94): Xaa in position 93 to 94 is any amino acid
  Variant (95)..(95): Xaa in position 95 is any or no amino acid
  Variant (97)..(101): Xaa in position 97 to 101 is any amino acid
  Variant (102)..(102): Xaa in position 102 is any or no amino acid
  Variant (105)..(123): Xaa in position 105 to 123 is any amino acid
  Variant (124)..(161): Xaa in position 124 to 161 is any or no amino acid
  Variant (163)..(169): Xaa in position 163 to 169 is any amino acid
  Variant (172)..(172): Xaa in position 172 is any amino acid
  Variant (173)..(174): Xaa in position 173 to 174 is any or no amino acid
  Variant (176)..(176): Xaa in position 176 is any amino acid
  Variant (178)..(178): Xaa in position 178 is any amino acid
  Variant (180)..(184): Xaa in position 180 to 184 is any amino acid
  Variant (186)..(194): Xaa in position 186 to 194 is any amino acid
  Variant (195)..(198): Xaa in position 195 to 198 is any or no amino acid
RXGRXXXXYXXXXXXRXXXGXXXXXXXXXXXXXXXXXXXXXXXXVLXXXSXXXXXXXXXXXXXPKGGXEXDXXXXXXXXXXXAXREXXEEAGXXXGXXXXXXLGXXXXXXXXXXXXXXXXXXXXXXXXXXXXXXXXXXXXXXXXXXXXXXXXXXXXXXXXXVXXXXXXXPEXXXRXRXWXXXXXAXXXXXXXXXXXXXL

SEQ ID NO: 151909 - protein, 13 aa, Artificial sequence
  protein pattern
  Variant (2)..(2): Xaa in position 2 is any amino acid
  Variant (5)..(5): Xaa in position 5 is Ala, Ser, Thr or Val
  Variant (6)..(6): Xaa in position 6 is any amino acid
  Variant (11)..(12): Xaa in position 11 to 12 is any amino acid
  Variant (13)..(13): Xaa in position 13 is Cys, Gly or Val
AXREXXEEAGXXX

SEQ ID NO: 151910 - DNA, 1062 bp, Saccharomyces cerevisiae
  CDS (1)..(1062)
atgtcattaccacaatggtgtccaccgcattccaccttaaaaagaaatccaactacaggagaggacgtatactgcatatgtaaaaggccagactatggggagctgatggtgggatgtgatggttgtgatgactggtttcatttcacctgccttcatattcctgagcagtttaaggacctggtgttctctttttattgtccttactgtcaagcggggattactggtaagaataaggacgccataatcaatggtgaagggagcttgccaaaaaccttatggaaaagaaaatgtaggataagtgattgctacaaaccatgtttacaggatagtaaatactgttctgaggaacatggtagagaatttgtgaatgatatttggtcgcgattgaaaacagatgaggatagagcagtcgtcaagaaaatggtcgaacaaacaggacacatagataaattcaagaaatttggacaactggatttcattgataacaatatagttgtaaaaacagatgacgaaaaggaaatattcgatcaaattgttgtacgagacatgacgttaaaaactcttgaagatgatctgcaagaggttcaagagatatcgctaccattattcaaaaaaaagctagaacttttggaagtatatttgggatggttagacaacgtatataccgaaatgcgcaagctggacgatgatgctgcaagccatgtggaatgtggtaaagaagattccaaggggacaaaaaggaagaagaagaaaaatagcagcaggagtagggctaggaaaaatatatgtggctattgttctacatacgagcgaataccctgctctgtggaagaatttgtcagagattttggaagtaatgaggaagccaccaaaatacatgaggtatgcacgaagtggaagtgtaacagacatttggattgggtgtctactaatcaggaacaatacctccagcagattgactctttagaatctatgcaagaaaggttgcaacatctgatacaggccaggaaaaagcaactaaatatacaatactatgaggaaattttaagaagaggtttgtaa

SEQ ID NO: 151911 - protein, 353 aa, Saccharomyces cerevisiae
MSLPQWCPPHSTLKRNPTTGEDVYCICKRPDYGELMVGCDGCDDWFHFTCLHIPEQFKDLVFSFYCPYCQAGITGKNKDAIINGEGSLPKTLWKRKCRISDCYKPCLQDSKYCSEEHGREFVNDIWSRLKTDEDRAVVKKMVEQTGHIDKFKKFGQLDFIDNNIVVKTDDEKEIFDQIVVRDMTLKTLEDDLQEVQEISLPLFKKKLELLEVYLGWLDNVYTEMRKLDDDAASHVECGKEDSKGTKRKKKKNSSRSRARKNICGYCSTYERIPCSVEEFVRDFGSNEEATKIHEVCTKWKCNRHLDWVSTNQEQYLQQIDSLESMQERLQHLIQARKKQLNIQYYEEILRRGL

SEQ ID NO: 151912 - DNA, 1083 bp, Candida glabrata CBS 138
  CDS (1)..(1083)
atgtctaatttattgcctgaatggtgtccgccatactctacaaccaaaatagatactaacactggtgaggatgtctattgtatatgtaagaaacctgattatggtgagttaatggtgggatgtgacggatgtgatgactggtttcactttgagtgtatgaagatacctgaaacatacaggaatttagtcgagtctttcatatgtccgtattgccgtgtaggcataactggtcctggatctaaaggtgatggtgaatgccccaaatcattatggaagaaaaagtgtaggctccaggattgctatgagccttgcgaatctggtagcaaatactgttccaaagagcatgggaaagagtatatgtctcgattactaaataaggtaaaaatcaaaaacgaccttaataatagatacgctaatgagtctgatgataagctgttgaaagatgtttatcacgctaccaagaataatgtagagaagtttaaaacctttggttcctcatcatttatcgattccgatatcgatagagttgataggcatggtgagatttacgacaagataatcaatgatgataaatactataaagatctgttaacagaaaaagataacataacgaacaatcaaattgagggcttaaaaaagaaagtagaagagcttgataaatacttagactggattagctcagtcaataaactaatcaatggagaggataatactattgaacaagaagagaatgtgaatgataccattaagaccaagaaaaagaaaaagaaatctcaaaaaagaagatcaaagaaggctatctgcggttattctctcaacctagccaagataccttgcaatccagaagagttttacaacaaatattccgaaataacgacaagtacaccagattgtaatgaaatagaaggtatttgcattaaattaagatgtaacaagcactccgactggtctaccatgacctcagatcagtacacaaggcaaatcatttctcttgagactcatttgaagcgcttagacctatcaatatcgacaaggaaaaggcaacttaatatcaattattttgagcatataatgagatcatag

SEQ ID NO: 151913 - protein, 360 aa, Candida glabrata CBS 138
MSNLLPEWCPPYSTTKIDTNTGEDVYCICKKPDYGELMVGCDGCDDWFHFECMKIPETYRNLVESFICPYCRVGITGPGSKGDGECPKSLWKKKCRLQDCYEPCESGSKYCSKEHGKEYMSRLLNKVKIKNDLNNRYANESDDKLLKDVYHATKNNVEKFKTFGSSSFIDSDIDRVDRHGEIYDKIINDDKYYKDLLTEKDNITNNQIEGLKKKVEELDKYLDWISSVNKLINGEDNTIEQEENVNDTIKTKKKKKKSQKRRSKKAICGYSLNLAKIPCNPEEFYNKYSEITTSTPDCNEIEGICIKLRCNKHSDWSTMTSDQYTRQIISLETHLKRLDLSISTRKRQLNINYFEHIMRS

SEQ ID NO: 151914 - DNA, 1029 bp, Kluyveromyces lactis NRRL Y-1140
  CDS (1)..(1029)
atgtcattacctagttggtgccccaggtatgacagcaggaaacacgacccaaaaactggggaagaagtttattgtatatgtaagaaaccagacactggggagttgatggtaggatgtgatggatgtgatgattggtttcatttttcctgtttaaagatccccgagaaatatagagatctcgttttttcattctactgttcgtattgtagtgctggaattacaggaccggcattgataaatggcggcaaactaccgaaaactctttggaagaggaaatgcaggctccctgaatgctatacagagtgtgatgccaattcaagaagcaaatattgttcaaagaaacatgctgttcaatacgttcaaagcattgttgataagttaaatctacctggcgtagataagattgcattgttgagacagcttctaaacgagacaacatcattggaggaatttaaaacgctaggacgagacaagcttccagaagtcacgtcacctttatccaaagatcaatattccaagttgctagaaaatgatcagcatttaaacaaattaattaacgaacacgatgagttggtttcggtcaagctttcaaaactaaatgaagaagatgcagtaatagagaaatacgtcaactggatcggtgaagttaacgagagattatccccacatttcaatcagcctacaggtcgaaagaagtcgaaaagtgcaagtaaagttacaatatgcggctaccataatgagttcacgatccctcggtcagttgaggagtttttagataagctacttcagttgaaagaagacgaaaacagtaatatcacatcagttgacggtgtttgtgtaaagacaaaatgtgctaagcatcaggattggattacattgtcccaaaacgatctctcggaacagaaggactctctagaaaacgtcaaaagaagactcgatttactaattagcgtcagaacgaaccaattgagaatctcattcttcgaacaagagatgtccaatcgcgtcctacccggtgttaagacctag

SEQ ID NO: 151915 - protein, 342 aa, Kluyveromyces lactis NRRL Y-1140
MSLPSWCPRYDSRKHDPKTGEEVYCICKKPDTGELMVGCDGCDDWFHFSCLKIPEKYRDLVFSFYCSYCSAGITGPALINGGKLPKTLWKRKCRLPECYTECDANSRSKYCSKKHAVQYVQSIVDKLNLPGVDKIALLRQLLNETTSLEEFKTLGRDKLPEVTSPLSKDQYSKLLENDQHLNKLINEHDELVSVKLSKLNEEDAVIEKYVNWIGEVNERLSPHFNQPTGRKKSKSASKVTICGYHNEFTIPRSVEEFLDKLLQLKEDENSNITSVDGVCVKTKCAKHQDWITLSQNDLSEQKDSLENVKRRLDLLISVRTNQLRISFFEQEMSNRVLPGVKT

SEQ ID NO: 151916 - DNA, 1425 bp, Debaryomyces hansenii CBS767
  CDS (1)..(1425)
atggatatttattcagaagtacaagaaatgtcaacttcacttcatgaacatataaaactgccaccagaagacaataaaactaaattgaaggatctatctgcatctacttcaaccttggataaaggtttatctggaaatatggaaaacgagcaaggcaaaaaaagacgatctgcatcaccagcaatttcgaacaaagagttcaagaaaaataaacttgaaaaagaagattcacaagatgactatagcggctctccatctgggctttctaatagatatccaacagaggaaatagaagacgagtcgtacgaagaaatagccaaacaatataagaaattttctaatgcacctaagtttaatctcaacagtgaagaattattctgtatctgtcgaaagccagactatggaggagagttaatgatttcatgtgacaattgtgatgaatggtttcacttcaaatgtatgaagttgaatgaagatcattccaagttaatagccaaattctattgcaagttctgtcgctggaaaggaatcagtagtacaaaatggaaaagaaaatgccgtttagattggtgctgggaacctattagagctgattctaaatcaaaatattgttgcgatgaacatggtgtaacttttattaaagaaaatttattaaggaaaactggaattaatgatttgaacccaacagatattaaatcaatatttaattattgtatctcatcgggtaatagctataaaaatctagttcaattgggttcagatttccctgaattaccagaaatttcttcacttaaagaggatggatctgacatttcacagttgcctggagatcttgaaaataggttgactaagataaattcaaatctagatagaattaattcaattactgatttgtgcaagctcaagagtgattatttactcaagattaaggaaaaaattaagattattaatgaaaggttacaggcatcttatcaagatgaagaacaagttgaaaaatgtgaagaatcgcttaaaagtaaaagatcgacgaaagaatctaaaagtaagaagtccaagaaatttgacctttgttgctacgacaaatctctaaatcaaggaatacaaacagatgtgcagtcgaaaaacgcctttgaaaagttcattaattctgctgatatatacactgattataaagaacaaattgatagtctaataagtttttatcgtgacaatatggatgatatcgattcaaattcattgtttaataactctatgtgtatacaggataaacgaaagtgtccaaggcataatggttggtggaacttaataaatgatgaacttgttaaaaggttcaatgaattatcccttactgcaaaaaaattggaagatgagaaattgatgattttaagaaattatagcatcaagatatatgaactgcgaacgtag

SEQ ID NO: 151917 - protein, 474 aa, Debaryomyces hansenii CBS767
MDIYSEVQEMSTSLHEHIKLPPEDNKTKLKDLSASTSTLDKGLSGNMENEQGKKRRSASPAISNKEFKKNKLEKEDSQDDYSGSPSGLSNRYPTEEIEDESYEEIAKQYKKFSNAPKFNLNSEELFCICRKPDYGGELMISCDNCDEWFHFKCMKLNEDHSKLIAKFYCKFCRWKGISSTKWKRKCRLDWCWEPIRADSKSKYCCDEHGVTFIKENLLRKTGINDLNPTDIKSIFNYCISSGNSYKNLVQLGSDFPELPEISSLKEDGSDISQLPGDLENRLTKINSNLDRINSITDLCKLKSDYLLKIKEKIKIINERLQASYQDEEQVEKCEESLKSKRSTKESKSKKSKKFDLCCYDKSLNQGIQTDVQSKNAFEKFINSADIYTDYKEQIDSLISFYRDNMDDIDSNSLFNNSMCIQDKRKCPRHNGWWNLINDELVKRFNELSLTAKKLEDEKLMILRNYSIKIYELRT

SEQ ID NO: 151918 - DNA, 1464 bp, Yarrowia lipolytica CLIB122
  CDS (1)..(1464)
atgtcttctaacgacgcgacttcggacgatacagacgccacggtcgaagaagacttcaaacgggagcccgagacagctgccaacctcgagagcaaccctcctagcgatccgccggttgagaatgaagaggcgagtgacagtgacgagcctagtggtggattttcatactctttgttgaagaagagtgttcctatgaaagagaaccaagcggagacagcaaagcccgaatctgtgatgaaatccgacccggttgtcaaagctgagctgctcacgtccgaggcaggatcagccacgccctcggctactgaatcgcctcgagaaacgccctccgatctgatgtctcccgaccccgatcacattcccagcaagtcttccaagcggcgtcaaccgaaacccaagagccgtcctgctccgaaaaagaagctgaaagtcgccgttgcgaaggactacaagttgccccccggtgctccacccgttgacaccagtcaccatggcgacgaagatcaccaggatctattttgtgtgtgcagacgacctgacgacggaaagtggatgattggatgcgattactgcgaagaatggatccatggaagctgtgtgggtataactccagccagagcaaaactcatgcacaagttctgctgtccttactgcacacacaaggccgaaaagatgcgtcccggcgaagaggccacggtggcccatcagatgacgctgaaacacggcacagaaaccacctggaagcgcgtttgtcgactggaagagtgccacaaggctgtctcataccccagcaagtactgctgcagagaacacggtctggagtacatgaagggcagagtggctgctctcagcaccaacagcaactcaagtgtggctgacgacactgaggagccgtttggaaagctttccgaggaacgtctagctgccatcgtccaacagactcccaacctggctgcgttcaagactctaggctcgactactcccgtcgaagcgtctcctgtgactcctaaacaaccctccacgcagctcaagtttgtggaacaaaagctcaagtacatgactctggtcaaggaccgaaccaagagtctcagtgaagaggccgctacagccgcgggagtaagaaagaaggatttatgtggctacgattcgcgtctggacaaggatcatgacatctgggcgaatgaatttgctgcccaggatgaactggtgggtattgccatgagtgatgatactagtaagacagtcactccttcccacgacgctctacacaacaaggaacacatttgcttgcaggacaagcggaaatgctataaccatctaggctgggctgctctgattaccgaccggctgaatttgcagctggctattctccagcgggaaatggagagaagcgaaggcgacgaggccgatctgaaggagattgagcggctgagaagcgttgagagtaagacgtggatcaagtga

SEQ ID NO: 151919 - protein, 487 aa, Yarrowia lipolytica CLIB122
MSSNDATSDDTDATVEEDFKREPETAANLESNPPSDPPVENEEASDSDEPSGGFSYSLLKKSVPMKENQAETAKPESVMKSDPVVKAELLTSEAGSATPSATESPRETPSDLMSPDPDHIPSKSSKRRQPKPKSRPAPKKKLKVAVAKDYKLPPGAPPVDTSHHGDEDHQDLFCVCRRPDDGKWMIGCDYCEEWIHGSCVGITPARAKLMHKFCCPYCTHKAEKMRPGEEATVAHQMTLKHGTETTWKRVCRLEECHKAVSYPSKYCCREHGLEYMKGRVAALSTNSNSSVADDTEEPFGKLSEERLAAIVQQTPNLAAFKTLGSTTPVEASPVTPKQPSTQLKFVEQKLKYMTLVKDRTKSLSEEAATAAGVRKKDLCGYDSRLDKDHDIWANEFAAQDELVGIAMSDDTSKTVTPSHDALHNKEHICLQDKRKCYNHLGWAALITDRLNLQLAILQREMERSEGDEADLKEIERLRSVESKTWIK

SEQ ID NO: 151920 - DNA, 24 bp, Artificial sequence
  primer
atgtcattaccacaatggtgtcca

SEQ ID NO: 151921 - DNA, 27 bp, Artificial sequence
  primer
ttacaaacctcttcttaaaatttcctc

SEQ ID NO: 151922 - protein, 428 aa, Artificial sequence
  consensus sequence
  Variant (3)..(4): Xaa in position 3 to 4 is any amino acid
  Variant (5)..(39): Xaa in position 5 to 39 is any or no amino acid
  Variant (42)..(44): Xaa in position 42 to 44 is any amino acid
  Variant (46)..(57): Xaa in position 46 to 57 is any amino acid
  Variant (59)..(61): Xaa in position 59 to 61 is any amino acid
  Variant (65)..(66): Xaa in position 65 to 66 is any amino acid
  Variant (69)..(69): Xaa in position 69 is any amino acid
  Variant (71)..(71): Xaa in position 71 is any amino acid
  Variant (75)..(75): Xaa in position 75 is any amino acid
  Variant (79)..(79): Xaa in position 79 is any amino acid
  Variant (82)..(82): Xaa in position 82 is any amino acid
  Variant (87)..(87): Xaa in position 87 is any amino acid
  Variant (89)..(90): Xaa in position 89 to 90 is any amino acid
  Variant (92)..(92): Xaa in position 92 is any amino acid
  Variant (94)..(97): Xaa in position 94 to 97 is any amino acid
  Variant (99)..(101): Xaa in position 99 to 101 is any amino acid
  Variant (103)..(103): Xaa in position 103 is any amino acid
  Variant (105)..(105): Xaa in position 105 is any amino acid
  Variant (108)..(114): Xaa in position 108 to 114 is any amino acid
  Variant (115)..(133): Xaa in position 115 to 133 is any or no amino acid
  Variant (135)..(135): Xaa in position 135 is any amino acid
  Variant (143)..(144): Xaa in position 143 to 144 is any amino acid
  Variant (146)..(152): Xaa in position 146 to 152 is any amino acid
  Variant (154)..(155): Xaa in position 154 to 155 is any amino acid
  Variant (159)..(160): Xaa in position 159 to 160 is any amino acid
  Variant (164)..(173): Xaa in position 164 to 173 is any amino acid
  Variant (174)..(208): Xaa in position 174 to 208 is any or no amino acid
  Variant (210)..(214): Xaa in position 210 to 214 is any amino acid
  Variant (215)..(218): Xaa in position 215 to 218 is any or no amino acid
  Variant (220)..(241): Xaa in position 220 to 241 is any amino acid
  Variant (242)..(242): Xaa in position 242 is any or no amino acid
  Variant (244)..(271): Xaa in position 244 to 271 is any amino acid
  Variant (272)..(275): Xaa in position 272 to 275 is any or no amino acid
  Variant (277)..(281): Xaa in position 277 to 281 is any amino acid
  Variant (283)..(296): Xaa in position 283 to 296 is any amino acid
  Variant (297)..(321): Xaa in position 297 to 321 is any or no amino acid
  Variant (324)..(369): Xaa in position 324 to 369 is any amino acid
  Variant (370)..(375): Xaa in position 370 to 375 is any or no amino acid
  Variant (377)..(377): Xaa in position 377 is any amino acid
  Variant (378)..(379): Xaa in position 378 to 379 is any or no amino acid
  Variant (381)..(381): Xaa in position 381 is any amino acid
  Variant (384)..(385): Xaa in position 384 to 385 is any amino acid
  Variant (387)..(388): Xaa in position 387 to 388 is any amino acid
  Variant (390)..(399): Xaa in position 390 to 399 is any amino acid
  Variant (401)..(403): Xaa in position 401 to 403 is any amino acid
  Variant (405)..(409): Xaa in position 405 to 409 is any amino acid
  Variant (412)..(423): Xaa in position 412 to 423 is any amino acid
  Variant (425)..(427): Xaa in position 425 to 427 is any amino acid
MSXXXXXXXXXXXXXXXXXXXXXXXXXXXXXXXXXXXXXLPXXXPXXXXXXXXXXXXEXXXCICXXPDXGXELMXGCDXCDXWFHFXCXXIXEXXXXLXXXFXCXYCXXXXXXXXXXXXXXXXXXXXXXXXXXTXWKRKCRLXXCXXXXXXXSXXKYCXXEHGXXXXXXXXXXXXXXXXXXXXXXXXXXXXXXXXXXXXXXXXXXXXXFXXXXXXXXXDXXXXXXXXXXXXXXXXXXXXXXXLXXXXXXXXXXXXXXXXXXXXXXXXXXXXXXXXLXXXXXVXXXXXXXXXXXXXXXXXXXXXXXXXXXXXXXXXXXXXXXKKXXXXXXXXXXXXXXXXXXXXXXXXXXXXXXXXXXXXXXXXXXXXXXXXXXXXCXXXKXKCXXHXXWXXXXXXXXXXQXXXLXXXXXRLXXXXXXXXXXXXIXXXE

SEQ ID NO: 151923 - protein, 40 aa, Artificial sequence
  protein pattern
  Variant (2)..(2): Xaa in position 2 is any amino acid
  Variant (4)..(4): Xaa in position 4 is any or no amino acid
  Variant (8)..(8): Xaa in position 8 is Ile or Val
  Variant (9)..(9): Xaa in position 9 is Gly or Ser
  Variant (12)..(12): Xaa in position 12 is Gly or Asn
  Variant (15)..(15): Xaa in position 15 is Asp or Glu
  Variant (20)..(20): Xaa in position 20 is any amino acid
  Variant (22)..(22): Xaa in position 22 is Leu or Met
  Variant (23)..(23): Xaa in position 23 is His or Lys
  Variant (24)..(24): Xaa in position 24 is Ile or Leu
  Variant (25)..(25): Xaa in position 25 is Asn or Pro
  Variant (27)..(27): Xaa in position 27 is any amino acid
  Variant (28)..(28): Xaa in position 28 is Phe, His or Tyr
  Variant (29)..(30): Xaa in position 29 to 30 is any amino acid
  Variant (32)..(32): Xaa in position 32 is Ile or Val
  Variant (33)..(34): Xaa in position 33 to 34 is any amino acid
  Variant (36)..(36): Xaa in position 36 is any amino acid
  Variant (38)..(38): Xaa in position 38 is any amino acid
  Variant (39)..(39): Xaa in position 39 is Phe or Tyr
DXGXELMXXCDXCDXWFHFXCXXXXEXXXXLXXXFXCXXC

SEQ ID NO: 151924 - protein, 20 aa, Artificial sequence
  protein pattern
  Variant (3)..(3): Xaa in position 3 is any or no amino acid
  Variant (5)..(5): Xaa in position 5 is any or no amino acid
  Variant (8)..(8): Xaa in position 8 is Ile or Leu
  Variant (9)..(9): Xaa in position 9 is Asp, Pro, Gln or Ser
  Variant (10)..(10): Xaa in position 10 is any amino acid
  Variant (12)..(12): Xaa in position 12 is Trp or Tyr
  Variant (13)..(13): Xaa in position 13 is any amino acid
  Variant (14)..(14): Xaa in position 14 is Glu or Pro
  Variant (15)..(16): Xaa in position 15 to 16 is any amino acid
  Variant (17)..(17): Xaa in position 17 is Ala, Gln or Ser
  Variant (18)..(18): Xaa in position 18 is Asp, Gly or Asn
  Variant (20)..(20): Xaa in position 20 is Lys or Arg
WKXKXCRXXXCXXXXXXXSX

SEQ ID NO: 151925 - protein, 51 aa, Artificial sequence
  protein pattern
  Variant (2)..(2): Xaa in position 2 is any amino acid
  Variant (3)..(3): Xaa in position 3 is Lys or Arg
  Variant (5)..(5): Xaa in position 5 is Ala, Asn or Pro
  Variant (6)..(6): Xaa in position 6 is Lys or Arg
  Variant (8)..(8): Xaa in position 8 is any amino acid
  Variant (9)..(15): Xaa in position 9 to 15 is any or no amino acid
  Variant (17)..(18): Xaa in position 17 to 18 is any amino acid
  Variant (19)..(19): Xaa in position 19 is Ser, Thr or Val
  Variant (20)..(22): Xaa in position 20 to 22 is any amino acid
  Variant (23)..(23): Xaa in position 23 is Asp, Glu or Asn
  Variant (24)..(24): Xaa in position 24 is Asp, Glu or Gln
  Variant (25)..(27): Xaa in position 25 to 27 is any amino acid
  Variant (28)..(28): Xaa in position 28 is Gln or Thr
  Variant (29)..(31): Xaa in position 29 to 31 is any amino acid
  Variant (34)..(34): Xaa in position 34 is Asp, Asn, Ser or Thr
  Variant (35)..(38): Xaa in position 35 to 38 is any amino acid
  Variant (39)..(39): Xaa in position 39 is Ile or Leu
  Variant (40)..(43): Xaa in position 40 to 43 is any amino acid
  Variant (44)..(44): Xaa in position 44 is Gln or Ser
  Variant (45)..(45): Xaa in position 45 is any amino acid
  Variant (46)..(46): Xaa in position 46 is Lys or Arg
  Variant (47)..(48): Xaa in position 47 to 48 is any amino acid
  Variant (49)..(49): Xaa in position 49 is Glu or Gln
  Variant (51)..(51): Xaa in position 51 is Asn or Arg
KXXCXXHXXXXXXXXDXXXXXXXXXXXXXXXLEXXXXXXXXXXXXXXXXLX

SEQ ID NO: 151926 - protein, 9 aa, Artificial sequence
  protein pattern
  Variant (2)..(2): Xaa in position 2 is Asp or Glu
  Variant (3)..(3): Xaa in position 3 is Leu or Val
  Variant (4)..(4): Xaa in position 4 is Phe or Tyr
  Variant (8)..(8): Xaa in position 8 is any or no amino acid
EXXXCICXK

SEQ ID NO: 151927 - DNA, 447 bp, Saccharomyces cerevisiae
  CDS (1)..(447)
atgttagtaaagacgattagccgaactattgaatcagaatctggatttctacagccgacgctggatgttattgctactctacctgcagacgatcgttctaaaaaaatacctattagtctggtagtgggatttaaacaagaggcctcgctgaattcatcttcatccttatcatgttattactacgccattcccttaatgagggatagacatattaacctcaaatcaggcggaagcaacgttgtggggataccgttattagatactaaagatgaccggattcgtgatatggctagacacatggccacaataatatctgaaaggttcaataggccgtgttatgtaacgtggtcatcgctgcctagtgaagatccctctatgctagtagcaaaccatttatatatcttaaagaagtgtctcgatctcttgaaaactgaactcggtgagtaa

SEQ ID NO: 151928 - protein, 148 aa, Saccharomyces cerevisiae
MLVKTISRTIESESGFLQPTLDVIATLPADDRSKKIPISLVVGFKQEASLNSSSSLSCYYYAIPLMRDRHINLKSGGSNVVGIPLLDTKDDRIRDMARHMATIISERFNRPCYVTWSSLPSEDPSMLVANHLYILKKCLDLLKTELGE

SEQ ID NO: 151929 - DNA, 25 bp, Artificial sequence
  primer
atgttagtaaagacgattagccgaa

SEQ ID NO: 151930 - DNA, 25 bp, Artificial sequence
  primer
ttactcaccgagttcagttttcaag

SEQ ID NO: 151931 - DNA, 327 bp, Saccharomyces cerevisiae
  CDS (1)..(327)
atgcaagcggcatcacctgtcatcctggcccttaccgctccaattgccttgacaacaggaccattatcttctttggtggttgcatctgtcagtgggctaaccaatttgttttggttgttgccctggacccataaagttaaagaacaaagaaagaatattgcgaagaaatacacgggtagtgaattggaagcaaaggatgctatattacgtaaagaatttggcaagtcgcacggattgagtcttttgttcaatctttctaatgtttgcgggatgcttgcgtacggtgtttgtttgtcaggtggtttgttaagaaaaattccaaaataa

SEQ ID NO: 151932 - protein, 108 aa, Saccharomyces cerevisiae
MQAASPVILALTAPIALTTGPLSSLVVASVSGLTNLFWLLPWTHKVKEQRKNIAKKYTGSELEAKDAILRKEFGKSHGLSLLFNLSNVCGMLAYGVCLSGGLLRKIPK

SEQ ID NO: 151933 - DNA, 787 bp, Unknown
  Unidentified
  CDS (71)..(655)
  misc_feature (767)..(767): n is a, g, c or t
  misc_feature (784)..(784): n is a, g, c or t
accttccagcagagttgaagaccatcagttttcttcaattcgcactcacaaagtgaaggcgatagcaacgatgtcaagcacagcaaaggccgtggccttgtccccggctccctaccatatcatcacctacggaacacttctaggaacgacctttttccactccttcgtcaatggcatcgtagcgttcagggcggtcgatcgtgccagcttctctgctatccagcaaaagctcttccctatctacttcggccttcaaactgtcctacccggtgttctcgccctgactttccccggaaactctctgattggtcttgccaatggtcccgccggtctggtgtcggaatttgcccgctggcactccttgttgcctatcagtgtcatgggtatcactggtgctatcaatctgcttgttctcctaccaatgacagttgacattatcaagaagcgacgtggacaagtcaagcgggatggtaaggagtactacgctgagggtcctcactcagaccagatgaaggctctcaacaagaagttcggcatgctccacggcatctcatctcttctcaaccttgctacctttgtggctgctgtcggatacggcttcactctaggcggtcgggttctgtccgtcgcggaccttgcttggacgattcaatgataaagatgcaattcttattcatgctctaaaatgctagtggtgcaaagaatcttcctgatagcctagcgtctactttccatcgtacaatagcgaaaatctctagtatgtctanacaaaaaaaaaaaaaanaag

SEQ ID NO: 151934 - protein, 194 aa, Unknown
  Unidentified
MSSTAKAVALSPAPYHIITYGTLLGTTFFHSFVNGIVAFRAVDRASFSAIQQKLFPIYFGLQTVLPGVLALTFPGNSLIGLANGPAGLVSEFARWHSLLPISVMGITGAINLLVLLPMTVDIIKKRRGQVKRDGKEYYAEGPHSDQMKALNKKFGMLHGISSLLNLATFVAAVGYGFTLGGRVLSVADLAWTIQ

SEQ ID NO: 151935 - DNA, 555 bp, Magnaporthe grisea 70-15
  CDS (1)..(555)
atggcagaacgttcactcattttctcgcctgctccgtaccatataatctcatatggcacgctactggggaccacctttttccagtctttcgtcaatggaatagttgcattcagagcgttgccgagaccgcagttctcgattcttcaacagaagatattcccagtttatttcgtcattcaatcggtgcttccagtcacactcgccttgacttggcctggatccaggaatggtctcctgagtacggcatcgggcatcgccggtgtacttgatgagcaaaaccgctggggcgtgctggtgcctataggcaccatgtttgtaacaggtgtagcgaatttgctttggttgcttccggcgacaacaggatgcatgttggagagacgggtgcaggagaagaaggatgggaaacgtagttacgatcccgctcctcactcagaggagatgaaggcactgaacaagaagtttggcatccttcacggcatatcatcgctgctgaacctcggcacttttatcgccctcatttgctatggcttcactttggcaggccatctgcactga

SEQ ID NO: 151936 - protein, 184 aa, Magnaporthe grisea 70-15
MAERSLIFSPAPYHIISYGTLLGTTFFQSFVNGIVAFRALPRPQFSILQQKIFPVYFVIQSVLPVTLALTWPGSRNGLLSTASGIAGVLDEQNRWGVLVPIGTMFVTGVANLLWLLPATTGCMLERRVQEKKDGKRSYDPAPHSEEMKALNKKFGILHGISSLLNLGTFIALICYGFTLAGHLH

SEQ ID NO: 151937 - DNA, 573 bp, Gibberella zeae PH-1
  CDS (1)..(573)
atgtcaagcacagcaaaggccgtggccttgtccccggctccctaccatatcatcacctacggaacacttctaggaacgacctttttccactccttcgtcaatggcatcgtagcgttcagggcggtcgatcgtgccagcttctctgctatccagcaaaagctcttccctatctacttcggccttcaaactgtcctacccggtgttctcgccctgactttccccggaaactctctgattggtcttgccaatggtcccgccggtctggtgtcggaatttgcccgctggcactccttgttgcctatcagtgtcatgggtatcactggtgctatcaatctgcttgttctcctaccaatgacagttgacattatcaagaagcgacgtggacaagtcaagcgagatggtaaggagtactacgctgagggtcctcactcagaccagatgaaggctctcaacaagaagttcggcatgctccacggcatctcatctcttctcaaccttgctacctttgtggctgctgtcggatacggcttcactctaggcggtcgggttctgtccgtcgcggaccttgcttga

SEQ ID NO: 151938 - protein, 190 aa, Gibberella zeae PH-1
MSSTAKAVALSPAPYHIITYGTLLGTTFFHSFVNGIVAFRAVDRASFSAIQQKLFPIYFGLQTVLPGVLALTFPGNSLIGLANGPAGLVSEFARWHSLLPISVMGITGAINLLVLLPMTVDIIKKRRGQVKRDGKEYYAEGPHSDQMKALNKKFGMLHGISSLLNLATFVAAVGYGFTLGGRVLSVADLA

SEQ ID NO: 151939 - DNA, 354 bp, Candida glabrata CBS 138
  CDS (1)..(354)
atgttccctatgttcttcaagctgcagagcgtctcgcccgtggtgctgggcctcactgctccgtttgcgctgtccagctgggcgctgtcgagtcttgccgtggcctcgctgggcgggctcacgaacctgctgtggctgatgccctggacgcgccggatcaaggagcaaaggtgggaagtcaaggagaagtacaaggacgacgcggagaagctggaggagctggacgctccgctacgcaaggagttcggcaagagccacggcctgagcctgctgttcaatgtgacacacatcaccggcctgctcgcctacgggatcatcctctccagaaacattgccagatacatccccaagtag

SEQ ID NO: 151940 - protein, 117 aa, Candida glabrata CBS 138
MFPMFFKLQSVSPVVLGLTAPFALSSWALSSLAVASLGGLTNLLWLMPWTRRIKEQRWEVKEKYKDDAEKLEELDAPLRKEFGKSHGLSLLFNVTHITGLLAYGIILSRNIARYIPK

SEQ ID NO: 151941 - DNA, 339 bp, Kluyveromyces lactis NRRL Y-1140
  CDS (1)..(339)
atgttcttccaaatgcaagcaatttctccgatcattcttgggttaactgcaccaatcgcccttaccaccggagccattacctctctagtagctgcatccatcagtggtgccgttaactattttgtcttgttgccagtaactcaggggatcaaggaagagagaaagaaggtcgccaaggaatattctggtgacgaattggaattgaaagacgcaccgttacgtaagagtttcggccaaagtcacggattaagtttgttgttgaatatgaccaatgtcttggggaccttggcttacggtatctatttatcgaaggggattttcaaatacatccctaaatga

SEQ ID NO: 151942 - protein, 112 aa, Kluyveromyces lactis NRRL Y-1140
MFFQMQAISPIILGLTAPIALTTGAITSLVAASISGAVNYFVLLPVTQGIKEERKKVAKEYSGDELELKDAPLRKSFGQSHGLSLLLNMTNVLGTLAYGIYLSKGIFKYIPK

SEQ ID NO: 151943 - DNA, 507 bp, Debaryomyces hansenii CBS767
  CDS (1)..(507)
atgcttaccagattaggattaaacactacagcaccataccattttttgttctactctatcgttttcggaggttcagtgttccattcatttattgtctccccaattgcgttcaagcatttatcgagaccagaattcagtaatcttcagaataagatctttccaacatatttccttggacaagcattatcacctttagtattaggtttaacgaccccattaaagttatgcccattcacgattggattattggccttatcaagtgccaccggtgccctcaactattttgttttattgccttggtgccaacaaattaaagaccagagaaacaaattggttagcgacaagttacacgaggtcattgaaaatggtgaagtaaagccttcggaagagatggttagattaaacaagcaattcggtaaataccatggtatttcttctttggttaatattttatccattctttctctcggggcatatggggttatcttatccaagagattactctga

SEQ ID NO: 151944 - protein, 168 aa, Debaryomyces hansenii CBS767
MLTRLGLNTTAPYHFLFYSIVFGGSVFHSFIVSPIAFKHLSRPEFSNLQNKIFPTYFLGQALSPLVLGLTTPLKLCPFTIGLLALSSATGALNYFVLLPWCQQIKDQRNKLVSDKLHEVIENGEVKPSEEMVRLNKQFGKYHGISSLVNILSILSLGAYGVILSKRLL

SEQ ID NO: 151945 - DNA, 513 bp, Yarrowia lipolytica CLIB122
  CDS (1)..(513)
atggtcgcatcaattctcgccacagtcgcaccttaccatctctggacctactcgctgctcttcggagccacggcctaccagtccttctacaatggcataatggcctaccgagctctgccccatgagcacttttccaatctccaggccaagttgttcccgggctactttgcgttccaggcgctggcctcaggcattctgctattgacgccaccatttgtggctggccccgccttctactggccgctgggcatctgtctggtgggcggtctgctcaacacgctgattctgggccccgctaaccgacgggtcatggcccagcgaaaggcccagctcgacaaggaggggttgtcccaccacaaggaccccaaggcgtcggccgagctcaaggccatcaacaaggagtttgccaaggtccatggagcctcggtgctggtcaacctgatcgctttcggagccatgaccttttacggagctactcttaccggagggctgctcaagaccattcccaagtga

SEQ ID NO: 151946 - protein, 170 aa, Yarrowia lipolytica CLIB122
MVASILATVAPYHLWTYSLLFGATAYQSFYNGIMAYRALPHEHFSNLQAKLFPGYFAFQALASGILLLTPPFVAGPAFYWPLGICLVGGLLNTLILGPANRRVMAQRKAQLDKEGLSHHKDPKASAELKAINKEFAKVHGASVLVNLIAFGAMTFYGATLTGGLLKTIPK

SEQ ID NO: 151947 - DNA, 492 bp, Aspergillus nidulans FGSC A4
  CDS (1)..(492)
atgctcgacccccgccctttccacattttaagctacggcacccttctcggtgtccagctctaccagagctttgtctccggcattattgccttccgcgcccttccgcgccctcagttttcagctctccaagccaagatattccctacctacttcgctctccagaccgcgctccctgtcgtagtcgcacttactgcctcccgcggcggccagccgcttggtatttcggggctcctggaacgagagaaccaattcagtgtcctcctcccgctcgcggcggcattcatcactggtctggtcgttaggatcactgacatgctcggcgaagaaacccgcgacggcaagaagagctacgaccccccacctcactccaaggagatgattgctctaaacaagaagtttggtcgtctacatggactgtccagcttggtcaacctggtgacccttggcgctactattttttatggtgttgtgcttagcaagaagcttgagtag

SEQ ID NO: 151948 - protein, 163 aa, Aspergillus nidulans FGSC A4
MLDPRPFHILSYGTLLGVQLYQSFVSGIIAFRALPRPQFSALQAKIFPTYFALQTALPVVVALTASRGGQPLGISGLLERENQFSVLLPLAAAFITGLVVRITDMLGEETRDGKKSYDPPPHSKEMIALNKKFGRLHGLSSLVNLVTLGATIFYGVVLSKKLE

SEQ ID NO: 151949 - DNA, 510 bp, Candida albicans SC5314
  CDS (1)..(510): transl_table=12
atgctttgtcaagtcggtttaaacgttaaagttccatttcattttttgttttattcccttacttttgggggttctgctttttattccttcattgtttccccactagtgtttaaaaaattaccaagagaagaatttagtaatttacaaaacaaagtattcccaacttatttcactggtcaaacattggctccaattattttaggtttggctcaaccatttgcttattgtccatttacccttggattattagcattgtcttctgttggtggtgctttgaactatttatggttattgcctgtttgtcaaaagattaaagaagacagaaacaagttgattgctgataagaaagatgtaggtgctgatggtcaaccaactgaagaacttaaagctttgaataaacaatttggcaaataccatggtatttccactttggtcaatatcacctcaattctttctcttggtgtttatggtgttgttttagccaaaggtttaagtaaaattaagttttaa

SEQ ID NO: 151950 - protein, 169 aa, Candida albicans SC5314
MLCQVGLNVKVPFHFLFYSLTFGGSAFYSFIVSPLVFKKLPREEFSNLQNKVFPTYFTGQTLAPIILGLAQPFAYCPFTLGLLALSSVGGALNYLWLLPVCQKIKEDRNKLIADKKDVGADGQPTEELKALNKQFGKYHGISTLVNITSILSLGVYGVVLAKGLSKIKF

SEQ ID NO: 151951 - DNA, 513 bp, Aspergillus oryzae
  CDS (1)..(513)
atgattgaccctcgcccgtatcacattctaagctatggcactctactcggtgttcaagtgtatcagaccttcgtttccgggattgtagcttttagggcccttccccgacctcagtttgcttcgttgcagactgccacattccccatttatttctctcttcagacggcacttccagtgctagttgctttgacagccagcaacaatgggcagccgctcggcatctccggactcctggagaaccccaagactttgctccccatggccgcggctgctgtgactgggcttgtcaacatggtcgtacttcgtcctctgactgttaacaccatgcgtgaaagaaagcaccaggaaacccgtgatggcaagaagagttacgacccccctccccactctaaggagatggtagctcttaacaagaagttcggccgactccacggcttctcgagcttgatcaacctggtctgtctcggtgctaccatttattatggtgctttacttggcaagcgactggcttag

SEQ ID NO: 151952 - protein, 170 aa, Aspergillus oryzae
MIDPRPYHILSYGTLLGVQVYQTFVSGIVAFRALPRPQFASLQTATFPIYFSLQTALPVLVALTASNNGQPLGISGLLENPKTLLPMAAAAVTGLVNMVVLRPLTVNTMRERKHQETRDGKKSYDPPPHSKEMVALNKKFGRLHGFSSLINLVCLGATIYYGALLGKRLA

SEQ ID NO: 151953 - DNA, 23 bp, Artificial sequence
  primer
atgcaagcggcatcacctgtcat

SEQ ID NO: 151954 - DNA, 28 bp, Artificial sequence
  primer
ttattttggaatttttcttaacaaacca

SEQ ID NO: 151955 - protein, 129 aa, Artificial sequence
  consensus sequence
  Variant (3)..(4): Xaa in position 3 to 4 is any amino acid
  Variant (6)..(6): Xaa in position 6 is any amino acid
  Variant (7)..(7): Xaa in position 7 is any or no amino acid
  Variant (9)..(11): Xaa in position 9 to 11 is any amino acid
  Variant (13)..(14): Xaa in position 13 to 14 is any amino acid
  Variant (16)..(16): Xaa in position 16 is any amino acid
  Variant (19)..(19): Xaa in position 19 is any amino acid
  Variant (21)..(37): Xaa in position 21 to 37 is any amino acid
  Variant (38)..(55): Xaa in position 38 to 55 is any or no amino acid
  Variant (57)..(58): Xaa in position 57 to 58 is any amino acid
  Variant (60)..(62): Xaa in position 60 to 62 is any amino acid
  Variant (64)..(64): Xaa in position 64 is any amino acid
  Variant (66)..(73): Xaa in position 66 to 73 is any amino acid
  Variant (75)..(92): Xaa in position 75 to 92 is any amino acid
  Variant (93)..(99): Xaa in position 93 to 99 is any or no amino acid
  Variant (101)..(101): Xaa in position 101 is any amino acid
  Variant (103)..(103): Xaa in position 103 is any amino acid
  Variant (106)..(107): Xaa in position 106 to 107 is any amino acid
  Variant (110)..(110): Xaa in position 110 is any amino acid
  Variant (112)..(112): Xaa in position 112 is any amino acid
  Variant (114)..(114): Xaa in position 114 is any amino acid
  Variant (116)..(124): Xaa in position 116 to 124 is any amino acid
  Variant (127)..(128): Xaa in position 127 to 128 is any amino acid
FPXXFXXQXXXPXXLXLTXPXXXXXXXXXXXXXXXXXXXXXXXXXXXXXXXXXXXGXXNXXXLXPXXXXXXXXRXXXXXXXXXXXXXXXXXXXXXXXXXLXKXFGXXHGXSXLXNXXXXXXXXXYGXXL

SEQ ID NO: 151956 - protein, 18 aa, Artificial sequence
  protein pattern
  Variant (2)..(2): Xaa in position 2 is any or no amino acid
  Variant (4)..(4): Xaa in position 4 is Asn or Arg
  Variant (6)..(6): Xaa in position 6 is any amino acid
  Variant (9)..(10): Xaa in position 9 to 10 is any amino acid
  Variant (13)..(13): Xaa in position 13 is Phe, Ile or Leu
  Variant (15)..(15): Xaa in position 15 is any amino acid
  Variant (17)..(17): Xaa in position 17 is Phe, Ile, Leu or Val
AXLXKXFGXXHGXSXLXN

SEQ ID NO: 151957 - protein, 19 aa, Artificial sequence
  protein pattern
  Variant (2)..(2): Xaa in position 2 is Ala or Leu
  Variant (3)..(3): Xaa in position 3 is any amino acid
  Variant (5)..(5): Xaa in position 5 is any amino acid
  Variant (6)..(6): Xaa in position 6 is Phe, Leu or Val
  Variant (7)..(7): Xaa in position 7 is any amino acid
  Variant (9)..(9): Xaa in position 9 is any amino acid
  Variant (11)..(11): Xaa in position 11 is any amino acid
  Variant (12)..(12): Xaa in position 12 is Cys, Asn or Thr
  Variant (13)..(18): Xaa in position 13 to 18 is any amino acid
GXXNXXXLXPXXXXXXXXR

SEQ ID NO: 151958 - DNA, 1869 bp, Saccharomyces cerevisiae
  CDS (1)..(1869)
atgaacagacaggaatccataaattcgtttaattcagacgaaacatcttcgttgtctgatgtagaaagtcagcagccgcaacaatatatcccttcagagagtggatctaaatccaacatggctcctaatcaactgaagttgacccggacggaaaccgtgaagtcattgcaggacatgggtgtgagctccaaagcccccgttcctgatgttaatgctcctcaatctagcaagaataagatttttcctgaagaatatactttagaaacccctacaggtttagttcctgtcgccactctacattccataggtagaacttctactgcgatttcccgtacgagaactagacagatcgatggcgcttcttcgccttcttctaatgaagatgctttagaaagtgataataacgaaaagggtaaagaaggcgactctagtggtgcgaatgacgaagctccagatctagatccggaaattgaattcgttacctttgtgactggcgatccagaaaacccccataactggcctgcatggatccgttggagttacactgtcctactgtcaatcttagttatttgtgtcgcctacgggtctgcttgtatcagtggtgggttgggaaccgttgaaaagaaataccatgtaggtatggaagccgctattttatcggtttctttaatggttattgggttctcgctgggtcctttgatttggtctcctgttagtgatctttacggtagaagagttgcttactttgtttctatgggtctttatgtcatcttcaatatcccttgcgccttagctccaaatctaggtagtcttttagcttgtagatttttatgtggtgtttggtcatcatctggtttgtgtttagttggtgggtctattgccgatatgttcccaagtgaaacaagaggtaaggctattgctttcttcgcttttgctccttacgttggtcccgttgttggtccactagttaacggttttatttccgtttctaccggacgtatggacctgattttctgggtcaatatggcctttgcaggtgttatgtggatcatatcttctgccatcccagaaacgtacgctccagttatcttgaagagaaaggctgctagattaagaaaggaaactggtaatcccaagattatgactgagcaggaagcgcaaggtgtcagtatgggtgaaatgatgagggcttgtctgttgagacctttgtacttctctgtcactgaacctgttctagttgctacttgtttctacgtgtgtttgatttactctctactatatgcgttcttctttgccttccctgtcattttcggtgaactatatggctacaaagacaaccttgtgggtttgatgtttattcctattgttatcggtgctctttgggcgttagccacaactttctactgtgaaaacaagtatttacaaattgtcaaacagcgtaaacctactcctgaagatcgtttgctaggtgctaagatcggtgctccatttgctgcaattgctttatggatcctgggtgctaccgcttataaacatattatttgggttggtccagcttcagctggtttagcttttggtttcggtatggtgttgatttattattcattgaataattacattattgattgctacgtccaatacgcatccagtgctctggctacaaaggttttcttaagatccgccggtggtgctgccttccccttgtttaccattcaaatgtaccacaaattgaatctgcactggggttcttggttgttggctttcatctccactgctatgattgctttaccttttgcattttcttactggggcaaaggtttgagacataagttatccaagaaggattattccatagatagtattgaataa

SEQ ID NO: 151959 - protein, 622 aa, Saccharomyces cerevisiae
MNRQESINSFNSDETSSLSDVESQQPQQYIPSESGSKSNMAPNQLKLTRTETVKSLQDMGVSSKAPVPDVNAPQSSKNKIFPEEYTLETPTGLVPVATLHSIGRTSTAISRTRTRQIDGASSPSSNEDALESDNNEKGKEGDSSGANDEAPDLDPEIEFVTFVTGDPENPHNWPAWIRWSYTVLLSILVICVAYGSACISGGLGTVEKKYHVGMEAAILSVSLMVIGFSLGPLIWSPVSDLYGRRVAYFVSMGLYVIFNIPCALAPNLGSLLACRFLCGVWSSSGLCLVGGSIADMFPSETRGKAIAFFAFAPYVGPVVGPLVNGFISVSTGRMDLIFWVNMAFAGVMWIISSAIPETYAPVILKRKAARLRKETGNPKIMTEQEAQGVSMGEMMRACLLRPLYFSVTEPVLVATCFYVCLIYSLLYAFFFAFPVIFGELYGYKDNLVGLMFIPIVIGALWALATTFYCENKYLQIVKQRKPTPEDRLLGAKIGAPFAAIALWILGATAYKHIIWVGPASAGLAFGFGMVLIYYSLNNYIIDCYVQYASSALATKVFLRSAGGAAFPLFTIQMYHKLNLHWGSWLLAFISTAMIALPFAFSYWGKGLRHKLSKKDYSIDSIE

SEQ ID NO: 151960 - DNA, 1842 bp, Penicillium chrysogenum
  CDS (67)..(1761)
atctggcagaccattctaatactcccaaaaatccttccactgccataggctctcatatttattattatgtcttcgacgataccagaagaaggctcggagaccccggagcccttgcatgcccagcacctatctatggccgaaacgcaagagagcctccgcaaccggggcatcgcagaaactcctcaagcattggattacaactacccggctattggacatgacaaagaccctgtatttcccgaggagtacaccgttgagacgagtactggtcttgttccccaaagaaccctggagcagatccgatctcatggttctatctcatcgacgaagatcggaacaccaacaaacgaggtcaacgccgacatcgaaaaaggaggaaagggccctacggagttcgtgacattcaccatcggcgatcctgaacacccctacaattggtcccgtgcttatcgctggtatatcactcttgtcgcctcggcacttgtggtatgtgtcgcattcgggtcctccattgtcaccggaggattgggtttgattgaagaacaatacaacgtctctctcgaagttgcaatcctaacatgttcaatcatggtctgcggattcgcagttggccctctactctggtctcccctctctgagatcatcggtcgaaggcctgtatacatcatctctctcgttttatatgtgattttcaacatcccatgcgctctatccccaaacatcggtggcttgctcgtctgccgattcctatgcggtgtcttctctagttcaggcctttccctcgctggtggcaccattgccgatatttggagcattgaggagcgcgggatggccattgcatactttgctgctgcaccatactgcggccctgtactcggccctatcgtgacaggttggatcaatgttggaacgggccgcctcgacctcttcttctgggtgaacctagctttcgccggtgccatcatggtcatgatcggccttgtcccggagacatatgctccagtgatcctgaagcggcgtgccgcaaaactccgcaaagaaaccggaaaaaacatcatcaccgagcaagaaaaaacgaagctcacattccgagaaatcgctcgcacaagcctgatcagacccatcactatgattatgacagagcccgtcctcgaccttatgtgcatgtatattgttctgatctatgcaatgctctacgccttcttcttcgcatacccggtcatcttcaccaagctctatggctacaacgacggccagatcgggctcatgtttattcccattctgatcggcgccggtttcgcccttgttgtcacacccgccatcgagggcaagttccggaaaatctgtagcacgaggtctccaacaccagaggaccgactccacgctgcactgattggtgcaccttttatcccaatcgccttcttcatcctgggcgctacctcctacaagcatattatctgggttggacctgcttcgtcggggattgcctttggcttcggcatggtgttgtgctactatgcagtgaataactatatcatcgactcgtaccagaagtacgctgcgtcggctttggcggccaaggtcttcctccgctctggtggtggcgcggctttcccgctgttcactacgcagatgtatgatcgtcttgggttgcagtgggcttcttggctgcttgctttcattggcgttgccatggtcttcattccatatatcttctacttctttggggcgggcctgcgcgcaagacttacccgggattaggagaattgctgctcctgctgtttctttcttttttcttcatggaaaaaggttagaacgttcgggagcataagatcggttgat

SEQ ID NO: 151961 - protein, 564 aa, Penicillium chrysogenum
MSSTIPEEGSETPEPLHAQHLSMAETQESLRNRGIAETPQALDYNYPAIGHDKDPVFPEEYTVETSTGLVPQRTLEQIRSHGSISSTKIGTPTNEVNADIEKGGKGPTEFVTFTIGDPEHPYNWSRAYRWYITLVASALVVCVAFGSSIVTGGLGLIEEQYNVSLEVAILTCSIMVCGFAVGPLLWSPLSEIIGRRPVYIISLVLYVIFNIPCALSPNIGGLLVCRFLCGVFSSSGLSLAGGTIADIWSIEERGMAIAYFAAAPYCGPVLGPIVTGWINVGTGRLDLFFWVNLAFAGAIMVMIGLVPETYAPVILKRRAAKLRKETGKNIITEQEKTKLTFREIARTSLIRPITMIMTEPVLDLMCMYIVLIYAMLYAFFFAYPVIFTKLYGYNDGQIGLMFIPILIGAGFALVVTPAIEGKFRKICSTRSPTPEDRLHAALIGAPFIPIAFFILGATSYKHIIWVGPASSGIAFGFGMVLCYYAVNNYIIDSYQKYAASALAAKVFLRSGGGAAFPLFTTQMYDRLGLQWASWLLAFIGVAMVFIPYIFYFFGAGLRARLTRD

SEQ ID NO: 151962 - DNA, 1644 bp, Schizosaccharomyces pombe 972h-
  CDS (1)..(1644)
atggattacattttcttaataactgggtataagtaccgacatttaaatctcgaggcatacaatgcaaaatctcgtgcaattgaaaatgagaagaggtatcttggtaatgatcgaaacttgccatttcacagagaacgtgagaaggttgaatccaatccgaattctagtgacgaggaagatttaacttctactaacaatactcgatcttcagataatactacctcggatactgaagatgatagtggagaggatagttatcaggtcgaatgggaatctggtaaggatcctttagcccctaagaattggccaatgtggaaaaaaatctatacacttttggttgcatcctttatcgctattgtcattacagccaactctagtatcttttctgacggtggtggcattgctgcacaacaatatcatgttggtgctactgtgggagatctctgctcggctacctttttgcttggttttgcagctggttctgttttatttgcacctttaagtgaagtgtatggtagacttcctctttactcagttacgttagttatttttgttgttttccaaattggtggtggatgttccaaaaatatttggagtcttgttattttccgcttttttcacggatttttcggttgtacacctatgtcagcctgtggtggtactattagcgatctcttcaacccaattcagcgaactggtgcccttttagtgttctgtgctgccgcatttgttggtcctttagttggtcccgtaatgggtggatatattacagaaagcaagcttggttggcgctgggatttttggatcaacatgatttgggctggtttgacatgggtaatcgtttgtttcacgatgccagaaacccatagtgaaacgttgttggatttcaaggctcgttacttgcgtaaaaaaacaaattgtgacaaatggtacaacgagcatgagcatcaaagggatcctgcctatgcaattaggacggctttgacgagaggtgtgcgattgttgtgtactgaacccattgtccaagcattttgcatgtacttggtattcatcaatattcttttgtatatttgcatggttggttacccccttattttttaccaatacggttttaacgccggtgaagttggtttggctattcttggaattctggtcggcattttacttggtcttgctttaactcctattatttatgttcattacagacgtcgttatgaaatgagagatggaaatatttgtccggaagatagactgtttcctctattcttcggttcattctttattcccattgcgttgttttggttaggctggacgtgctacccttcggttcattgggctgcacccatggttagtggtatttttctgggatggggctttttgtatgttcttgctgtatgctatagttatttggtggattgctaccatgagatggcggctagtgcattatccgtagctacatttactcgttatgccgctggcggtggaatgacgattgttgctcgaccaatgtataataatttgaattaccattgggctacttctcttctggcatttgttggttgtggcttagttcctattcctttcatatttttcttttggggaaggaggattcgtcagcgtagtcctcatgcttataaaggataa

SEQ ID NO: 151963 - protein, 547 aa, Schizosaccharomyces pombe 972h-
MDYIFLITGYKYRHLNLEAYNAKSRAIENEKRYLGNDRNLPFHREREKVESNPNSSDEEDLTSTNNTRSSDNTTSDTEDDSGEDSYQVEWESGKDPLAPKNWPMWKKIYTLLVASFIAIVITANSSIFSDGGGIAAQQYHVGATVGDLCSATFLLGFAAGSVLFAPLSEVYGRLPLYSVTLVIFVVFQIGGGCSKNIWSLVIFRFFHGFFGCTPMSACGGTISDLFNPIQRTGALLVFCAAAFVGPLVGPVMGGYITESKLGWRWDFWINMIWAGLTWVIVCFTMPETHSETLLDFKARYLRKKTNCDKWYNEHEHQRDPAYAIRTALTRGVRLLCTEPIVQAFCMYLVFINILLYICMVGYPLIFYQYGFNAGEVGLAILGILVGILLGLALTPIIYVHYRRRYEMRDGNICPEDRLFPLFFGSFFIPIALFWLGWTCYPSVHWAAPMVSGIFLGWGFLYVLAVCYSYLVDCYHEMAASALSVATFTRYAAGGGMTIVARPMYNNLNYHWATSLLAFVGCGLVPIPFIFFFWGRRIRQRSPHAYKG

SEQ ID NO: 151964 - DNA, 1620 bp, Schizosaccharomyces pombe 972h-
  CDS (1)..(1620)
atgcctttggaaaagacaaatactcatgactccactgctacagtggaggatcaggaagccactgacaaccccatgcacttgacccagtcaagaatacagtcggaaacccttttccccaacggtgtcgatcttaactatcctttcactaccactcgtggacctcctgatgttgctgaatacaacttggaaactgccgaaggtgtgtaccgtgaccccaccatcaatgagggtgaggaagagttggttacttgggaacttaatgaccccgaaaacccccacaactggtctagattgtggaaatggtacattactattgtaaactccttacttgtcgtttgtagtgcttttggttcttccgttattgctggtgatcttgaggatgttagtcgtgatttgaaagtcggccctgaagttgctaacttatcttgttctttgatggtcgtcggttttggtatcggtcccttggttatttcgcctctaagtgaaatgattggtcgtcgtattgtttatttggttactttgatgatttatattgttttgcaaatcccttgtgctttggctccaaatatcgcttgtttgcttatcgttcgtttcttctgtggttgctttggctgcacacctcttaccttggctggtggtgtaatttcggatgtctgggaaactcgtgaacgtggtctggctattgctttctttgccgctggtccttatgccggccctactcttggtccattagtaggtggttggattggtgtcggtactggtgatttccgttggattttctgggtcaacatgatctacatgtttgtcatgtatcttactttgcttcccgttcctgaaacttatgcccctgtacttttgcgttggcgtgctcaaaggattcgtaaggaaacaggtcgtcaagtgtttaccgcccaagagaaacaaatgctttccttcaaagaaatcgttcaagttaaccttacgcgtccccttacccttctacttaccgaacccattcttgtttgtatttctggttatattgccttgatttatgccctgttgtatggttatttctttgcatatcccaacgtgtttgtcaagggtaagggttacaacgagggtattactggcttgatgtttattcccattttggtaggtgtcgtcggtgctttgagtactactcccttccttgaaaaacaatatatggccaagttagatgcaaacaatggtaagtctgttcctgaatggcgtttggtcggtatgtgtatcgcttctcctttcattcctactggtcttttgatttttgcatggacaagtttccccagacttatttggattggtcctgcttttagtggtgctcctttcggttatggtatggtgttgttttactttagtgccaacaattatcttatcgatgtatatcaaaattactgtgcgtcagcattggctgctaaaacaatggttcgttccgcaggtggtgccgctttccctcttttcattgattatatgatggatggtatgactcgtcaatgggccttctttttgttgggtatggttgccgttgccgctattcccattcctttcaccttttacttgtttggtgataagattcgggctagatccaaggccgctattgtttaa

SEQ ID NO: 151965 - protein, 539 aa, Schizosaccharomyces pombe 972h-
MPLEKTNTHDSTATVEDQEATDNPMHLTQSRIQSETLFPNGVDLNYPFTTTRGPPDVAEYNLETAEGVYRDPTINEGEEELVTWELNDPENPHNWSRLWKWYITIVNSLLVVCSAFGSSVIAGDLEDVSRDLKVGPEVANLSCSLMVVGFGIGPLVISPLSEMIGRRIVYLVTLMIYIVLQIPCALAPNIACLLIVRFFCGCFGCTPLTLAGGVISDVWETRERGLAIAFFAAGPYAGPTLGPLVGGWIGVGTGDFRWIFWVNMIYMFVMYLTLLPVPETYAPVLLRWRAQRIRKETGRQVFTAQEKQMLSFKEIVQVNLTRPLTLLLTEPILVCISGYIALIYALLYGYFFAYPNVFVKGKGYNEGITGLMFIPILVGVVGALSTTPFLEKQYMAKLDANNGKSVPEWRLVGMCIASPFIPTGLLIFAWTSFPRLIWIGPAFSGAPFGYGMVLFYFSANNYLIDVYQNYCASALAAKTMVRSAGGAAFPLFIDYMMDGMTRQWAFFLLGMVAVAAIPIPFTFYLFGDKIRARSKAAIV

SEQ ID NO: 151966 - DNA, 1854 bp, Magnaporthe grisea 70-15
  CDS (1)..(1854)
atggcggaaaagatcgacttgaagagcagtcccgaaaaggggcaggcagaagaaaattcagtgggctcaactcaacaacatcctacgatatctagtgccaaccccaaggcagagtcagggaccagccttcatcgactcagccatgcaacccctacaagcgaacatcttcctcccacagcaaacacccattctccccagcaagtcggatttgatccacagcctgccgtcacactgccataccgcacgctcaactcgaccgccaacattgatgagtacgtcaccgaggcgccgtcgggtgagattgacggcccgcccgagaatgacgggagcggacgccggtacaagctagtcacatttctgcccgacgacccagagaaccccaagaactggtccaaggccttcaagtggtacgtgactatggtggtggcccttacctgcttcgttgtcgccctggcatcaagtgtcatcaccgccgatattgccggcgtcgtggaggagtttggcgtcagtgaggaggttgcgctcctcagcatcactgtctttgtcattgggtttggtattggccccatgatatttgctcccttgtcagaagtttacggcagacggatcatctatggctcaactctcctcgtcgccgttatcttcatcatcccttgcgctgtagcccaaaacattgaaacccttctcgtctgccgagccatcgacggcatcgccttctccgcgccaatgaccctagttggaggaacgcttgccgacctctggcgtaatgaggagcgtggagttcccatggccgctttcagtgcagccccctttataggcccagctattggtcccttggttggtggttacctctctgacgcaacaggatggcgctggctatactggatccagcttatcgtctcctttgttgtctgggtccttatcaccttcaccgtgcccgagacttacgcgccgactattcttgcccgccgggcacgtcagatccgaaagaagacgggggagcaggaccacgtcacggaacaggacctcgatctgcgtccggcgtcggagcggcttgctatatttctcatccggcccttccagctgctgtttggcgagctcattgtcttcctcatttcgatctacatgagcgttttatatgggctgctgtacatgttcttcgttgccttcccaatcatctatcaagaagggaaaggttactcggcaggaactactggcctcatgtttattccctgtgctgtcggcgttatactatccgccttctgcgcacccttcgtgaacaagaactacatgaatcaggtgcgcaagcacaacggcaagccgcctgccgaggtccggctgatccccatgatgtgctcatgctggttcatccccattgggctcttcatcttcgcctggacgtcctacaaggagctgtcgtgggcgggcccggcaatgggcggcttctcagtcggattcggcttcatcttcctctacaactcggccaacaactacctcgtcgactcctaccaacaccaggccgcctcggccctcgccgccaagacctttatccgcagcttctggggcgccgccgtcgtgctcttcacctcgcaaatgtacgaccgccttggcaaccagtgggcctcgaccctgctggccttcatcagcgtcgcgtgctgcgccattccgttcctgttctggcgctacggcgcccgcatccgcaggaggagcaagtacgcctacgccggtgacgacgacgacgacgcgcagaatgacgagaagtcttcggtcgacctggagaaaggccacaacaaggatcctgagagggacatggaggatttgaggagggcgcagagctacgtcagcaatccttag

SEQ ID NO: 151967 - protein, 617 aa, Magnaporthe grisea 70-15
MAEKIDLKSSPEKGQAEENSVGSTQQHPTISSANPKAESGTSLHRLSHATPTSEHLPPTANTHSPQQVGFDPQPAVTLPYRTLNSTANIDEYVTEAPSGEIDGPPENDGSGRRYKLVTFLPDDPENPKNWSKAFKWYVTMVVALTCFVVALASSVITADIAGVVEEFGVSEEVALLSITVFVIGFGIGPMIFAPLSEVYGRRIIYGSTLLVAVIFIIPCAVAQNIETLLVCRAIDGIAFSAPMTLVGGTLADLWRNEERGVPMAAFSAAPFIGPAIGPLVGGYLSDATGWRWLYWIQLIVSFVVWVLITFTVPETYAPTILARRARQIRKKTGEQDHVTEQDLDLRPASERLAIFLIRPFQLLFGELIVFLISIYMSVLYGLLYMFFVAFPIIYQEGKGYSAGTTGLMFIPCAVGVILSAFCAPFVNKNYMNQVRKHNGKPPAEVRLIPMMCSCWFIPIGLFIFAWTSYKELSWAGPAMGGFSVGFGFIFLYNSANNYLVDSYQHQAASALAAKTFIRSFWGAAVVLFTSQMYDRLGNQWASTLLAFISVACCAIPFLFWRYGARIRRRSKYAYAGDDDDDAQNDEKSSVDLEKGHNKDPERDMEDLRRAQSYVSNP

SEQ ID NO: 151968 - DNA, 1839 bp, Gibberella zeae PH-1
  CDS (1)..(1839)
atggatcaaccaaactcaagtagatcctcgacaaccctcgaaaatggaactcatccagacgaagcaacattcgctcccttaaacacccaccagagcacaatgtcccgtgtccgccgctccctctctcacagccactcaagagacggttctcagaaggaacatcgggatccagacctcgacatcgacctcccctaccgtaccctcagcgcaaatgccaacctcgatgaataccgtgttgaagtccccggcggtgccatccccggtcccgtccagcctgaggagatcgctcgaaagtccacaaaccacgagcccggaactgaacgccgctacaagctcgtcacttttacaccgggagaccctgagaacccgaagaactggagcaaggcgtacaagtggtggtgcactatgtgcgttgcgctgacatgcttcgtcgtcgccttttgctcgtccgtcatcactgctgatatcgtgggtgtgaccaatgatctcaatgtcagcaacgagcttgcccttgcgagtatcagtctgtttgttgtgggctttggtgttggacctatggcttttgcgcctttgtctgagatttacggacgaaggattatctacggttctactctcttcattgctttcatcttcatcattccttgcgccgtggccaagaatatcgagactcttctcgtctgccgtgccattgacggtattgctttctctgcgcccatgacccttgtcggtggtacgcttgccgatatgtggaggaatgaagagcgtggtgttcccatggctgcgttctctgccgctccctttatcggtccagctattggtcctcttgttggtggtttcctctccgatgctgctggctggcgatggctctactggatccaactcatcttggcttttgttgtctggattctcatcaccttcaccgtccccgagacctatgccccaactatcctggcccgtcgcgcccgcaagctccgagccgaaactggagaaactgaccacgtaactgagcaggagctcgatctgcgccccatctctgaacgtcttcgaatcttcctcattcgacctttccagctcctctttggcgagctcatcgtgtgtcttatctccttgtacatgagtgtcctctacggtcttttgtacatgttcttcgtcgcctaccccattgtctaccaaaagggcaagggatactctgctggaaagactggtcttatgttcattcccattgcagtcggtgtcctcatgtctgctttctgcgccccctttgtcaacaagcactacctcacccttgtcaagaagcacaacggtaatcctcccgctgaagtccgtctaattcccatgatgatttcatgctggtgcatccccatcgggctcttcatttttgcctggacctcgtactcagacctctcctgggccggtccggccatgggtggtttccctgtcggatttggtttcatattcctctacaactctgccaacaactaccttgtcgattcttaccagcaccaagccgcttctgctctcgccgcaaagacttgtatccgaagtttctggggtgctgccgtcgttctcttcactgagcagatgtacgagcgtctcggcgaccagtgggcttcgtcccttctagccttcctgggtcttgcatgctgtgcgattcctttcatgttctggaagtatggtgccaagatccgagagcgcagcaagtacgcttacgctggtgaggacgagagcgtcgatgatattgaaaaggtcaagagccacaacgcctcgagcggtcaggttcgcaatgattctgatgacgaagacttgcgccgtgctcgaagctacgtgagcaatccttaa

SEQ ID NO: 151969 - protein, 612 aa, Gibberella zeae PH-1
MDQPNSSRSSTTLENGTHPDEATFAPLNTHQSTMSRVRRSLSHSHSRDGSQKEHRDPDLDIDLPYRTLSANANLDEYRVEVPGGAIPGPVQPEEIARKSTNHEPGTERRYKLVTFTPGDPENPKNWSKAYKWWCTMCVALTCFVVAFCSSVITADIVGVTNDLNVSNELALASISLFVVGFGVGPMAFAPLSEIYGRRIIYGSTLFIAFIFIIPCAVAKNIETLLVCRAIDGIAFSAPMTLVGGTLADMWRNEERGVPMAAFSAAPFIGPAIGPLVGGFLSDAAGWRWLYWIQLILAFVVWILITFTVPETYAPTILARRARKLRAETGETDHVTEQELDLRPISERLRIFLIRPFQLLFGELIVCLISLYMSVLYGLLYMFFVAYPIVYQKGKGYSAGKTGLMFIPIAVGVLMSAFCAPFVNKHYLTLVKKHNGNPPAEVRLIPMMISCWCIPIGLFIFAWTSYSDLSWAGPAMGGFPVGFGFIFLYNSANNYLVDSYQHQAASALAAKTCIRSFWGAAVVLFTEQMYERLGDQWASSLLAFLGLACCAIPFMFWKYGAKIRERSKYAYAGEDESVDDIEKVKSHNASSGQVRNDSDDEDLRRARSYVSNP

SEQ ID NO: 151970 - DNA, 1734 bp, Candida glabrata CBS 138
  CDS (1)..(1734)
atgtcctccactagtagcgatagaccatatgatcctctagcgcccgagaatgagggcgttgcttcgtcagatgtggagagcaccgacagtggggaaataagaagttatggtcctgaggaagtcttgaagaatggctcacagattaaagataaaggacccgctctatcgaaaaactccacccaaacatcagctgttgagtcagcagtcgcagcaaacaggcggttatccaagattttgactaatactgtagatgaaccggatgtgcttgaagtagattactccaaatgtccccccatggggggaggaagaccatttcctcctacattaccagagaaaactcagtttgaagttacattcgatggccctaatgatcctttacacccttttaattggcccctacgaaagaaagttatgctatgtatcatcctgtgtttgaattgtattagtataacgatgggctcatccatcttcgctaccggtattcgacaaatatgtgaaatttatcatgtgattccagtggtagcaattttaggaattaccttatacgttcttggttttgctgcttcgccagttatctatgcaccattgtcggaaatttacggaagaagaggtgtcctagtgatatcctccttcgggttcgctctttttaacttcgctgtcgcaacagcaaaggatctgcagacaatcatgatttgcagattttttgcaggttttatcggagccgctcctctagcggtcgtgcctgcggcgtttgcagatatgtttgatacgaacatcagaggtaaagctatctgtttattctcactgggtgttttcgttggtccaatcttagcgccagtgatcggttcatacattactcaacacacaacatggagatggttagaatatgtcattgcctgctttgcctctgcgatttttgttgcaattttgtttttctttgaagaatcccaccacccttcgattttagtcggcaaggccaaggaactacgtaaactcacaggcaactggggtattcatgccgctcatgaagatgtggaattgtccgtcaaggagattgcagaaaagactatcacgagaccaatcattatgttattcactgaaccactactgttaattgttactatctacaactcctttgtgtatggtattctttacttgttactggaggcatatccgattgtctttgaacaaggctatggattccacactaatggtgaactaccttatatctctttaattattggtatggcaatttgtggtgcatttatctggtggatggatgaagactatttgagaagatatagaaagaaaggtggtctagtgccagaagcaagactgctaccaatggtcgttgcaggtattgtgttccctattggtattctatggttttgttggactggtaattaccctcacaaaatacactggattgttccaaccattgcaggtgcatttacagggtttggtctgattggtattttcttaccatgtttgaactatatcattgagtcatacttattaattgcagcatctgctgttgctgcaaacacctttatgagatctggtttcggtgctgcattcccactatttgcaggttatatgtttaacggtatgggtgtcaattatgcaggtctattactaggtctcttagctgtggccatgataccagtcccattgctgttcctaaagtacggtccaggaattagaaagagatcaaagtacgcatattcgttataa

SEQ ID NO: 151971 - protein, 577 aa, Candida glabrata CBS 138
MSSTSSDRPYDPLAPENEGVASSDVESTDSGEIRSYGPEEVLKNGSQIKDKGPALSKNSTQTSAVESAVAANRRLSKILTNTVDEPDVLEVDYSKCPPMGGGRPFPPTLPEKTQFEVTFDGPNDPLHPFNWPLRKKVMLCIILCLNCISITMGSSIFATGIRQICEIYHVIPVVAILGITLYVLGFAASPVIYAPLSEIYGRRGVLVISSFGFALFNFAVATAKDLQTIMICRFFAGFIGAAPLAVVPAAFADMFDTNIRGKAICLFSLGVFVGPILAPVIGSYITQHTTWRWLEYVIACFASAIFVAILFFFEESHHPSILVGKAKELRKLTGNWGIHAAHEDVELSVKEIAEKTITRPIIMLFTEPLLLIVTIYNSFVYGILYLLLEAYPIVFEQGYGFHTNGELPYISLIIGMAICGAFIWWMDEDYLRRYRKKGGLVPEARLLPMVVAGIVFPIGILWFCWTGNYPHKIHWIVPTIAGAFTGFGLIGIFLPCLNYIIESYLLIAASAVAANTFMRSGFGAAFPLFAGYMFNGMGVNYAGLLLGLLAVAMIPVPLLFLKYGPGIRKRSKYAYSL

SEQ ID NO: 151972 - DNA, 1893 bp, Candida glabrata CBS 138
  CDS (1)..(1893)
atggtggatcaagaatcattggtttcgttttcttcagagacttcgcagtccatcaacagtgatatcgacatcgagtcgcagcaacagccaagacaatatattcctagcaatgaaaaagatggtaacaaagaaagactacatctaacacgtaccgaaacggtaaaatcattgcaagaaatgggtatgactcaggatgctccaatccctgatgttaacgcccctcaaactaccaccaaaaacgctatcttcccagaagagtacacaatggagacaccaacaggtttggttcccgtggctactttgcaatcgctgggtagaacatctacagctatctctaaatctaggacaagacagatcgagaggtctgtctctcgtcgtagtcagaatatcgcagcttcaagcaactcgtcaaacaaggaagaacttgaagatgaggaagaagtctctagcgatatgtcaaatcaacaacctgaacttgacccagagattgagtttgttacatttgtgaccggtgatccaacaaaccctcataactggccactgtggatccgttgggcttacacagtcatcttatcctgcctggtcatctgtgttgcttacggttctgcttgtatcacaggtggtctatttactgttcaagagcaataccacgttggtttagaagctgctattctatcttgttccttaatggttatcggtttctccttgggtccattgatctggtcgccagtcagtgatctttacggtagacgtttggcttacttcatctctatgggtctatacactatctttaacattccatgcgctttatcgcctaatttgggtggtctattggtttgtagatttttatgtggtgtgttctcttcctcaggtttgtgtctagttggtggttccattgccgatatgttcccaagtgaaacgagaggtagagctattgctttcttcgctttcgctccatacacaggccctatcatcggtccacttgttaacggatttgtttcagtttgtaccagaagaatggatttgattttttggatcaacatggccttcgctggtgttatgtggatcattgtcgcattcattcctgaaacatacgctcctgttatcttgaaatggcgtgcagctaaattaagaaaggaaactggtaatccaaagattatgacagaacaagaagcacaaggtgtttccgtcaatgaaatgatgaaagcttgtttgatcagaccactatattttgcagtcactgagcctgttctagacttaacttgtttctacgtctgtctaatttactctctactgtatgctttcttctttgcattcccagtggtcttcggtgaactttatggttacaaagataatttaatcggtttaatgtttatcccaattctaatcggtgctaccatggcattagcaactacattctattgtgaaaacgagtacctgaaattggtgaaaaagagaaagcctacgccagaagatcgtttgttcggtgccatgattggtgcacctttcgctgctgctgcattgtggatccttggtgctacttcttataagcatattatatgggttggtcctgcttcttctggtctagcttttggttatggtatggtgttgatttactattccttgaacaactacattattgattgttatgttcaatatgcctcaagtgctttggctactaaggttttcttaagatccgccggtggtgctgctttcccattatttactaatcagatgtaccataaattgggtcttcaatgggcaagttggttgttggcttttatttcaactgctatgattttgctaccattcggtttctattattacggtaagacgttgagacacaaactttcaaagaaagactactctatcgataccattgaaggatactaa

SEQ ID NO: 151973 - protein, 630 aa, Candida glabrata CBS 138
MVDQESLVSFSSETSQSINSDIDIESQQQPRQYIPSNEKDGNKERLHLTRTETVKSLQEMGMTQDAPIPDVNAPQTTTKNAIFPEEYTMETPTGLVPVATLQSLGRTSTAISKSRTRQIERSVSRRSQNIAASSNSSNKEELEDEEEVSSDMSNQQPELDPEIEFVTFVTGDPTNPHNWPLWIRWAYTVILSCLVICVAYGSACITGGLFTVQEQYHVGLEAAILSCSLMVIGFSLGPLIWSPVSDLYGRRLAYFISMGLYTIFNIPCALSPNLGGLLVCRFLCGVFSSSGLCLVGGSIADMFPSETRGRAIAFFAFAPYTGPIIGPLVNGFVSVCTRRMDLIFWINMAFAGVMWIIVAFIPETYAPVILKWRAAKLRKETGNPKIMTEQEAQGVSVNEMMKACLIRPLYFAVTEPVLDLTCFYVCLIYSLLYAFFFAFPVVFGELYGYKDNLIGLMFIPILIGATMALATTFYCENEYLKLVKKRKPTPEDRLFGAMIGAPFAAAALWILGATSYKHIIWVGPASSGLAFGYGMVLIYYSLNNYIIDCYVQYASSALATKVFLRSAGGAAFPLFTNQMYHKLGLQWASWLLAFISTAMILLPFGFYYYGKTLRHKLSKKDYSIDTIEGY

SEQ ID NO: 151974 - DNA, 1830 bp, Kluyveromyces lactis NRRL Y-1140
  CDS (1)..(1830)
atgaacaacgaggaactacaatcgatagactcgtatgaggaacagtttcctcagtcatacgtgcctgaaccggcaccttacgatggtgctggcactgcaagtggtggggaagcaggtagcagcaatttgaagttggtcccaactgaaactgctaaatcgttacaggacatgggtcttacctcggaggttccgatccctgattttaacgctccaaccacatctgtcgctaaaaacgctattttccctgaagaatataccttggagacagcaacagggttggttccagtggctaccttacattctcttggtagaacgccgacagctatctcaaggactaggactagacagatggataggcaagacgcttcgagtagcgaagagaaaaacgacgaggagcccgatgaggaattgccaagtcatatcgataaagaagttgagtttgttacctttgtcactaacgatccagaaaatcctcataattggcctctgtggatccgttggtcatacacaattttgatgtctgttcttgttatcgctgtcgcttacggttctgcatgtatcaccggtggtttgttcactgtagaagaaaaattccatgtgagtcaagaagttgccattttgtcatgttcattaatggttattgggttctcattgggtccattaatctggtctcctgtttctgatctttatggtagacgtgttgcctatttcatctccctaggactttacgttatcttcaacattccatgtgctcttgcgaaaaatatcggtactcttttggtttgccgtttcttatgtggtgtttggtcctcttctgggttatgtcttgttggtggttctatcgctgatatgttcccagctgaaactcgtggtagagccattgcatttttcgcttacgctccatactgtggtccagttttcggacctttggtcaacgggtttattgccatttctaccaatagaatggatttgatcttctgggttaacatggccttcgccggtgttatgtggattatcgtttcctgtattcctgagacttatgcaccagtcatcttgaagaaaagagctaagcgtttaagaattgaattgaacaaccctaagattatgactgaacaagaagctcaaggtatgtctgtgtcagaattggtccgtgcctgtttattaagaccattgtattttgcagtcactgaaccagtcttggatttaatgtgcttctacgtgtgtttaatttactccttactatatgctttcttcttcgcctacccagtcatttttggtaagttgtatggttacaaggataacatcatcggtctaatgttcattccaatcttaattggtgcatctggtgctttagccactacttcatggtgtgaatctcgttacgtcgcattgactcacaaacgtaagccaacgcctgaagatcgtctattgggtgccatgattggtgctccatttgctgctattgctctttggattctaggtgctacgtcatacaagcacattatttgggtcggtccagcttcttctggtcttgccttcgggtatggtatggtccttatctattactccttgaacaactacatcatcgactgttacgctatgtacgcttctagtgctttggctaccaaggtcttcttacgttctgctggtggtgctgctttcccattgttcaccagtcaaatgtacgaccgtttgggattacaatgggcttcatggttacttgctttcatctcaactgccatgattctgattccattcgccttctattactacggtaaggcactaagagctaagttatccaagaaggactactctgctgacgccatgtga

SEQ ID NO: 151975 - protein, 609 aa, Kluyveromyces lactis NRRL Y-1140
MNNEELQSIDSYEEQFPQSYVPEPAPYDGAGTASGGEAGSSNLKLVPTETAKSLQDMGLTSEVPIPDFNAPTTSVAKNAIFPEEYTLETATGLVPVATLHSLGRTPTAISRTRTRQMDRQDASSSEEKNDEEPDEELPSHIDKEVEFVTFVTNDPENPHNWPLWIRWSYTILMSVLVIAVAYGSACITGGLFTVEEKFHVSQEVAILSCSLMVIGFSLGPLIWSPVSDLYGRRVAYFISLGLYVIFNIPCALAKNIGTLLVCRFLCGVWSSSGLCLVGGSIADMFPAETRGRAIAFFAYAPYCGPVFGPLVNGFIAISTNRMDLIFWVNMAFAGVMWIIVSCIPETYAPVILKKRAKRLRIELNNPKIMTEQEAQGMSVSELVRACLLRPLYFAVTEPVLDLMCFYVCLIYSLLYAFFFAYPVIFGKLYGYKDNIIGLMFIPILIGASGALATTSWCESRYVALTHKRKPTPEDRLLGAMIGAPFAAIALWILGATSYKHIIWVGPASSGLAFGYGMVLIYYSLNNYIIDCYAMYASSALATKVFLRSAGGAAFPLFTSQMYDRLGLQWASWLLAFISTAMILIPFAFYYYGKALRAKLSKKDYSADAM

SEQ ID NO: 151976 - DNA, 1761 bp, Debaryomyces hansenii CBS767
  CDS (1)..(1761)
atgagcatgcaaagttcaaaactcagggacgattctcaaactttcatagatgatacaagtatcaatagtgaaaaggttcatgcattcgaaggacataatgcggatgtgcaaccagtgatacgccaaagaagtaatagcaaaattgaagacagagaaagcttgagcaaattgatttccaataataaaggtgtcgaaagaatagtttcagaactagaagaaggtgctggtaaattaggagggttagaagaaccacttgatctaaagagaattgaaactcacccggatccaaactcaagctttaatgagaaagatccgtggaaataccctattgatcaagaaacgggtctaagactagttgagtttgtccctggtgataaaaaaaatccattaaatatttcaaaagctagaaaatggttttatacctttctcttgggtataatttgttttgttgttgctttaggctctgcgattgtaaccggtgatatcagtggaccaaaggagtattttggcgttaccgaagaaattattattttggcatcggttactatgtttgttcttggatttgggttcgggccttgtttatttgcaccactctcagaagaaataggtagacaacctgtttatgtgggaacattattcctaggcgtcatattcattattccttgcgcattagctcaaaacattgaaacattaatcatttgtagattgattgatggtttagcgttttccgctcctatgtgccttataggtggttcattagcagacatatgggaggcatcggaaagaggggctgcaatggctgtcttttcagccgccccatttttgggtccagtcgtaggtccaatttttggtggtttacttggtgataatgcccctacttggagatggatttattggtgtttcttaattatagcgggatttttttacgttatatttgcgttagcagttcccgagactcatcataacactatattaaaacgcagagcaaaaaaattaagaaagaatactggtgatgatagatacagagcaatcgtcgaattgaagattaaaaatttcaaacaagtctgtaatgaatcgcttttacgtccattcattttattaagtgaattaattattttcttgataactttgtatatgtcggtcatctatggtttgttgtatatgtttttctttgcttatcctatggtgtatggtgaaggtaagggatggagtgattctatggtcggtgttatgtttattccaatcggagtcggtgtggtcatttcttctcttatagctccatttgtcaatcgggattataataaaagggctcaagtatatagagataaaggagagttaccaccagctgaattaagattaattccaatgatgtatagttgttggttcgttcctgctggtttattctcgtttgcatggtcgtcgtatccatctgtttcgtgggctggtccgtgctttagtggtcttgccgtcggttttggatttacttgtttgtataacccagcgaataactatattgttgattcatatcaacacttcgcagcaagtggtttagctgcaaagacgttcgtcagatcaatgtggggtgcttgtgtcccattatttactattcaaatgtaccacagattgggctatgaatgggcctcatcattaatggcattcatttccttggcatgttgtgcaatcccatttggattctactattatggagcaagaattagaacatactcaaagtatgcttattcccccgactctataaattaa

SEQ ID NO: 151977 - protein, 586 aa, Debaryomyces hansenii CBS767
MSMQSSKLRDDSQTFIDDTSINSEKVHAFEGHNADVQPVIRQRSNSKIEDRESLSKLISNNKGVERIVSELEEGAGKLGGLEEPLDLKRIETHPDPNSSFNEKDPWKYPIDQETGLRLVEFVPGDKKNPLNISKARKWFYTFLLGIICFVVALGSAIVTGDISGPKEYFGVTEEIIILASVTMFVLGFGFGPCLFAPLSEEIGRQPVYVGTLFLGVIFIIPCALAQNIETLIICRLIDGLAFSAPMCLIGGSLADIWEASERGAAMAVFSAAPFLGPVVGPIFGGLLGDNAPTWRWIYWCFLIIAGFFYVIFALAVPETHHNTILKRRAKKLRKNTGDDRYRAIVELKIKNFKQVCNESLLRPFILLSELIIFLITLYMSVIYGLLYMFFFAYPMVYGEGKGWSDSMVGVMFIPIGVGVVISSLIAPFVNRDYNKRAQVYRDKGELPPAELRLIPMMYSCWFVPAGLFSFAWSSYPSVSWAGPCFSGLAVGFGFTCLYNPANNYIVDSYQHFAASGLAAKTFVRSMWGACVPLFTIQMYHRLGYEWASSLMAFISLACCAIPFGFYYYGARIRTYSKYAYSPDSIN

SEQ ID NO: 151978 - DNA, 2124 bp, Debaryomyces hansenii CBS767
  CDS (1)..(2124)
atgacttcgtcaagtgacctaacgaataaggatagttcattcttgcaggaggattccaactatgatgaacctaataaacaagatagactcgaactgaagagcataaatctgttggcatcatcgttaaactcaagtcgagaaggatctcctctcagggagccaatagtatatgataatgatgtacatgattcgaattcaagaatcaggagaaggtctagtgtaggaagtaaatcagatagaggaagatcgcattcctttattacattggggactgattatttacatggatcaagacattccatgggaagtcaacatagcttgagtaggtattctaccagttactgcgtgaaggaaatttatggagacatgccggaggaggacattatgatccaaagaactgctaccaagtcgactattttaaattctctttcaaaaagagtggagaacgctaatattgaagctgaaagaggtgaaaatttggacaaagaaagcaaagtggaagaggatgtttcagaagaagataggttataccaggaagttccagacattcctgtgcccaccacaaagtttgggggtgagttcagcagtattgatcctgagttagttacgtgggaaggtacagatgatcctgaatacccaagaaattggccagttagatcaaagatcttgcaaacagctattgtttctatttacactttggttcctccaatgtcatcatcagtttgttcaccagcgatgcctgatatcgccgaaagtcttggaatgaattctcaattccttcaatcattttctgtttcaataatggttctagcatgggctttgggcccaatcatcattgcgcctttatctgaatctgacaaaattggtaggcgatgggtcctaaacatctctgtttggatcagttttatatttaatctcgcatgtgcctttgcaaaaacaacaacacaattatgtgtttttaggttcttaggaggccttgggggagccgctccgttgaatgttggggcaggcaccattgccgatttgtgggatgatagaggtagacaattcgcaatggctgcatattccataagtccttcgttaggacctgtgatttcaccaatcatgtcgggctttattgttgaaaatacacattggaaatgggtatttatcgttttggctatattgaatggtgttgtcgctgctgttggcacattattattcaaagagacatactcgccgaaattactaagccttaaggctaagaggttgagagaagagacaggcaatagccatttacatacaattttcgaaattgctaacggtgaaactacatctgaaaaagtaatgagcactgtgacaaggcccttacagctactcttttctcatccaatgtgtttcggtttaggatcgttcatggcattcatttacggcttcatgtatttgatggtcgttacattcccaagtgtatttgaacgaaattatggattttcggttggcatttctggtttaatgttcttgccaatgggaattggttatgttgttggtattgcattctggacatggcttattgactatttttatatcaaattaacagaaaagaataatggggtgagtaaaccagaataccggttaccatgcttgtgcttcgcagggattggtataccgattggtcttgtgtggtatggttggtcagctgagaaaaaaatacattggataatgccggcaattggaagtgctatattcgctttctcgtacattcctgtgttccagacgatccaaaattatttgattgatatgaacactcgtctatcagcgtcgtctattgcttcttgttcgatttataggtcggtttttgggttcgccttgcctcttgctgctaatccaatgtacgaaaaactcaactatggatggggtaatactatgtgtgcattcattgcatttgccttgggaataccattcccaatattctgtcttatttacggcgaaagactcagagactgggccaacagaagactcgataagaagcaagccgctagggatgccagaaacttgaaaagattgcaacagcaaaacgaaatggagtttgccaaaatggacaagtctcaacttgtcaccgactcctcattcctgaagacagactag

SEQ ID NO: 151979 - protein, 707 aa, Debaryomyces hansenii CBS767
MTSSSDLTNKDSSFLQEDSNYDEPNKQDRLELKSINLLASSLNSSREGSPLREPIVYDNDVHDSNSRIRRRSSVGSKSDRGRSHSFITLGTDYLHGSRHSMGSQHSLSRYSTSYCVKEIYGDMPEEDIMIQRTATKSTILNSLSKRVENANIEAERGENLDKESKVEEDVSEEDRLYQEVPDIPVPTTKFGGEFSSIDPELVTWEGTDDPEYPRNWPVRSKILQTAIVSIYTLVPPMSSSVCSPAMPDIAESLGMNSQFLQSFSVSIMVLAWALGPIIIAPLSESDKIGRRWVLNISVWISFIFNLACAFAKTTTQLCVFRFLGGLGGAAPLNVGAGTIADLWDDRGRQFAMAAYSISPSLGPVISPIMSGFIVENTHWKWVFIVLAILNGVVAAVGTLLFKETYSPKLLSLKAKRLREETGNSHLHTIFEIANGETTSEKVMSTVTRPLQLLFSHPMCFGLGSFMAFIYGFMYLMVVTFPSVFERNYGFSVGISGLMFLPMGIGYVVGIAFWTWLIDYFYIKLTEKNNGVSKPEYRLPCLCFAGIGIPIGLVWYGWSAEKKIHWIMPAIGSAIFAFSYIPVFQTIQNYLIDMNTRLSASSIASCSIYRSVFGFALPLAANPMYEKLNYGWGNTMCAFIAFALGIPFPIFCLIYGERLRDWANRRLDKKQAARDARNLKRLQQQNEMEFAKMDKSQLVTDSSFLKTD

SEQ ID NO: 151980 - DNA, 1845 bp, Debaryomyces hansenii CBS767
  CDS (1)..(1845)
atgacaaataattcgttatcaagtctggcttcatttgatgaagaggcctacaatccaaacccacttacagataatgcaacaaacgatgcacaatcagaattatctccaataaattcaagatatactactacgtcggaccgtcaatcattgagaataagtagaagcgagacgaggaaatcattacaggaattgggtttatcgtcagaaatacctactccagatctagtacatcctccagtgacggacccaatctttccagaagaatatacattagaaacagatacgggattagtgcaagtacagacattgcagtcgttgggtaggcggaaaacgataaattcgagtaataatttgcatttaataaaatcagaagattcatccactacagagaaagtggatgattacgatcctagtataaagcacgaacatgcattggatccagagatcgagttcgtgacatttactgttggagatccagagaacccccacaactggccgatgtggatcaaatggtcttacacggctttgttctccatatttgttatttgtgcagcatacgggtcgtcatgtttggctacgggcttgcccacaattaataagaaatttggtgtttccaccgaagtttctacgttaacggtgtctctatttgtcatcggttttggggtaggttccatgttttggtctcccctttctgagcaaccaaggtttggaaggagagtagtctacattgtttcctttggtctctacgtgatattcaatatcccttgtgctttagcaaagaatattggcacagttttagtttgcagatttttatgtggtgtattctcatcctctgctttagcaaatgtgggtgcaagtttagttgatatgcacaacgaaacaagaggtttggcaattgcattcttcagtttttgcccttattcgggacctgttcttggtggtattgtcaacgggttcatcagtgttaatacaggaagatacgaattaatggtttgggttaatatggcattcgcaggagtaatgtggatcataatttcatttattccagaaacatatgctcctaccatattgaaaaatagagctgcaaaattaagaaaagagactggtaacccaaagatcatgacagagcaagaagcaaccccaatggaatttaaggaaattgttaatactcatttgttgcgcccaatcaagtttatcgttcaagaaccagctttggttatagtatgtgggtatgtgatgttgatctattccttgctttacgcgtttttctttgcataccctgttattttcaatacattgtacggatatgaagacgataaaattggcttaatgtttattcctatcttaattggagctgctttggccgttatgtctaccattattttggaaaaaaattacaaaaagctttgcatgagaagaactccaacaccagaagatagattaataggtgcaatggtaggatctccatttccatgtattgccttgtttattttaggagctacttcgtacaaacatattatctgggtcggaccagcttcctctggtatcgcgtttgggtacggtatggtacttatttattattcattaaacaactacattatagacacatatgctagggtggtagcatctgctttaggaacgaaggttataactcgtctgtgtggtggcgcagcttttccattattcattacccaaatgtataatggtttaggattacaatgggccagttggttacttgcgttcgtttcattggcaatggttttaattccatttttattttacgcatatgggaaggccttaagagccaagttatgtaaagaagattattcagccgtgcatcattaa

SEQ ID NO: 151981 - protein, 614 aa, Debaryomyces hansenii CBS767
MTNNSLSSLASFDEEAYNPNPLTDNATNDAQSELSPINSRYTTTSDRQSLRISRSETRKSLQELGLSSEIPTPDLVHPPVTDPIFPEEYTLETDTGLVQVQTLQSLGRRKTINSSNNLHLIKSEDSSTTEKVDDYDPSIKHEHALDPEIEFVTFTVGDPENPHNWPMWIKWSYTALFSIFVICAAYGSSCLATGLPTINKKFGVSTEVSTLTVSLFVIGFGVGSMFWSPLSEQPRFGRRVVYIVSFGLYVIFNIPCALAKNIGTVLVCRFLCGVFSSSALANVGASLVDMHNETRGLAIAFFSFCPYSGPVLGGIVNGFISVNTGRYELMVWVNMAFAGVMWIIISFIPETYAPTILKNRAAKLRKETGNPKIMTEQEATPMEFKEIVNTHLLRPIKFIVQEPALVIVCGYVMLIYSLLYAFFFAYPVIFNTLYGYEDDKIGLMFIPILIGAALAVMSTIILEKNYKKLCMRRTPTPEDRLIGAMVGSPFPCIALFILGATSYKHIIWVGPASSGIAFGYGMVLIYYSLNNYIIDTYARVVASALGTKVITRLCGGAAFPLFITQMYNGLGLQWASWLLAFVSLAMVLIPFLFYAYGKALRAKLCKEDYSAVHH

SEQ ID NO: 151982 - DNA, 1749 bp, Debaryomyces hansenii CBS767
  CDS (1)..(1749)
atgtcagttccaacagaaaatatcaataaggaggtaagtaatgctttagagagctcttcttcgtcgttcgtcacacctgtggacagagacggtgtttctgaaggtttagcacaggaggagccagaaccattcacaggggatttagagaatggtaaagaggattgtgttccacaaggcggagatgaattgagtcgttatgaatctagtgtggaagcatcgagaacattaagtcaacggttgacaggatcagaaagtttgatgagcaaagccaatgagactgatgaaccgatgcctcctatgggtggaggtaaagaatatccaccaccgttaggctcaagagagccatacatggttgaatataatggtccggatgatcctatacatccgcataattggccgtcagtcaaaaaggtatattcctgtgtggttgtagggcttaccgctctttcggtttctcttggttcagctatgttttccgcagctaatcctatcatcatggaaacttaccatgttgggacaagtgttgcggcattgggggtgtcgttgttcgtgttgggttttgctgccggtcctgttgtgtggggtcctttgtctgaactttatggtagaaaggttgtgatggtaccttcgtgtcttggctacgtctgcttttcatttgcagttgctacggcaaaggatattcaaaccatcatgatttgtagattctttgctggtcttattggtgctgctccattagtcgttgttccagcttctatcgctgatatgtatggagccgcgaagagagggcaagctatggccatttttgccatggttttatttggtggtccaatgttggcaccaatttttggtggtttcattattaagaatccacgcttaggctggagatggacctcatatttcagtggtatagtcggagttattgcattgataggggttgttttcttttatgaagaaactcaccacccgataattttggtcaagaaggctgaagttttaagaagaagaaccggaaactggggtattcaagcacctcatgatgaggtttctttatccgtgaaagaaatttgtgaaaacaccatatccagaccattagtcatgttgctcaaagaacctatcttattattgatcactatctacaatgcatttatttacggtttgttatatttgtttttaactgccgttcctttgatcttcgccggtaattatcatttctccctgggtgtcagtgaattaccttatctttctatgttgataggtatcgttataggaggatttgtttgcgtcttcttcgatggtagatatacaagaattatgaatgaaaataatggtaaaccagttcctgaagaaagattaccagctatgatgataggttctttcgcattcgctggcggtttgttctggttaggttgggctggtgattatcccgataaagtccactggatcgttccaactattggtgctgcgccaatcggctttggtttgattgtcattttcttaccctctatcaactacatcattgagtgttacttagtccttgccgcttctgcattagctggtaatgccttcttgagatccgcctttgctgcagctttcccactttttgctaagcaaatgtttgtcaatatggaaatcaaatgggccagtacattgttaggttgcctcgctgctgtaatgattccagtcccatttatgttctacatatatggcgctcgtattagacataagtctaagtacgcatttgtcttataa

SEQ ID NO: 151983 - protein, 582 aa, Debaryomyces hansenii CBS767
MSVPTENINKEVSNALESSSSSFVTPVDRDGVSEGLAQEEPEPFTGDLENGKEDCVPQGGDELSRYESSVEASRTLSQRLTGSESLMSKANETDEPMPPMGGGKEYPPPLGSREPYMVEYNGPDDPIHPHNWPSVKKVYSCVVVGLTALSVSLGSAMFSAANPIIMETYHVGTSVAALGVSLFVLGFAAGPVVWGPLSELYGRKVVMVPSCLGYVCFSFAVATAKDIQTIMICRFFAGLIGAAPLVVVPASIADMYGAAKRGQAMAIFAMVLFGGPMLAPIFGGFIIKNPRLGWRWTSYFSGIVGVIALIGVVFFYEETHHPIILVKKAEVLRRRTGNWGIQAPHDEVSLSVKEICENTISRPLVMLLKEPILLLITIYNAFIYGLLYLFLTAVPLIFAGNYHFSLGVSELPYLSMLIGIVIGGFVCVFFDGRYTRIMNENNGKPVPEERLPAMMIGSFAFAGGLFWLGWAGDYPDKVHWIVPTIGAAPIGFGLIVIFLPSINYIIECYLVLAASALAGNAFLRSAFAAAFPLFAKQMFVNMEIKWASTLLGCLAAVMIPVPFMFYIYGARIRHKSKYAFVL

SEQ ID NO: 151984 - DNA, 1782 bp, Debaryomyces hansenii CBS767
  CDS (1)..(1782)
atgacaagctcagaatttcatgataataattcaacgactattgatgatgcaagtatcagtagtgagaaagtgaatagatttgaaggtaatgatgtacaacctaattcgctcaaaaacaggagcagaagtaacagtagaggtgaagacaaggaaagtttagaaaggttaatcactaataacagaggtgtggaaagaattataacagaattagaagcaggtgcaggtaaattaggtgacttagaagagccttatgatataaagaagatcgaaacacatccagatccaaattctactctcaatgagcaagatccatggaaatatcctattgaccaagaaactggcttaaggttggtggaatttgtacccggtgatgaaaagaacccgatgaataaatcaaaccctttgaaatggtgttatactgcagttttgggtgcaatttgtttcgttgttgctttaggttctgctattgtcaccggtgatattggcggccaagtagaatatttccaagttagtgaagaagttgttattttagctacagtaaccatgtttgttcttggatttggatttggaccatgtgtattcgctcctgtttcagaagaacttggtagacaaccagtttatgttgtaacattattccttggcctcgttttcattattccttgtgctttggcgaagaacattggaaccatgattgtctgtagattaattgatggtttagcattttcggctccaatgtgtcttattggtggatcgttagctgatatctgggatgccaaggagagaggtgctgcgatggccattttctcagccgctccatttttaggcccagttatgggtccaatttttggtggtttacttggtgactatgcagatacttggagatggatctactggactttcttgatcattgctggttttttctatattatttttgttgctgtccttcctgagactcaccaccaaacactcttaaaaaggagagctaagaagttgagaaaggatactggggatgacagatacagagcaatttcggaattaaagatcaagacgttcaagcaagtttgtaatgattcctttttacgtccattcatattattgtccgaattaattgtgtttttgatgaccttatatatgtcagtcatttacggattattgtacatgttcttctttgcataccctattgtcttcggtgaaggtaagggctggagtgattccaagattggcattatgtttattccaatcggcgttggtgtgcttattgctacagcttgtgccccattgattaataaagattacaataagagagctcaagtctatagagacagaggagaattaccaccacccgaattaagattaattcctatgatgatcagttgttggttcgtgcctgctagtttgttttcatttgcatggtcctcttatcctagtatttcgtgggcaggaccttgtttcagtggtattggtgctggatttgggttctgctgcttgtataacccagccaataattatattgttgattcttatcaacattatgctgctagtggattagcagctaaaacattagtcagatcgatttggggtgcgtgtgttcctttattcaccattcaaatgtatcacagattaggttatcaatgggctagtagtttaatggcatttatctcattagcatgttgtgccattccatatggattctacttctacggtgcaaagatcaggacttattccaaatatgcttacactcctgaagatacaggtgtaaaggatagcgaaaatcaaaaataa

SEQ ID NO: 151985 - protein, 593 aa, Debaryomyces hansenii CBS767
MTSSEFHDNNSTTIDDASISSEKVNRFEGNDVQPNSLKNRSRSNSRGEDKESLERLITNNRGVERIITELEAGAGKLGDLEEPYDIKKIETHPDPNSTLNEQDPWKYPIDQETGLRLVEFVPGDEKNPMNKSNPLKWCYTAVLGAICFVVALGSAIVTGDIGGQVEYFQVSEEVVILATVTMFVLGFGFGPCVFAPVSEELGRQPVYVVTLFLGLVFIIPCALAKNIGTMIVCRLIDGLAFSAPMCLIGGSLADIWDAKERGAAMAIFSAAPFLGPVMGPIFGGLLGDYADTWRWIYWTFLIIAGFFYIIFVAVLPETHHQTLLKRRAKKLRKDTGDDRYRAISELKIKTFKQVCNDSFLRPFILLSELIVFLMTLYMSVIYGLLYMFFFAYPIVFGEGKGWSDSKIGIMFIPIGVGVLIATACAPLINKDYNKRAQVYRDRGELPPPELRLIPMMISCWFVPASLFSFAWSSYPSISWAGPCFSGIGAGFGFCCLYNPANNYIVDSYQHYAASGLAAKTLVRSIWGACVPLFTIQMYHRLGYQWASSLMAFISLACCAIPYGFYFYGAKIRTYSKYAYTPEDTGVKDSENQK

SEQ ID NO: 151986 - DNA, 1653 bp, Yarrowia lipolytica CLIB122
  CDS (1)..(1653)
atgtctgatcctgcccctctttcacgaactcatacttcctactcgctgagacgaacagaaacagcctcgtcactgagacgagaactgtccaacgtccccagtgagcccgacattaacgctcctattgtcgatggcactgcagagtttcccgaggagtacaccatggagaccgaaaccggtcttgtgccccagagatctcttcgagaacttagaggaacagactcagatgagctggagaagggagactcgtcgtctggaagcgaaattgagtacgtcaccttcactgtcaatgaccccgataacccccaaaactggaacaacaagacaagatggttgtacaccctctgtgccacactcaccgtggtctgtgtggccttcggatcagcttgtcctgctggagcagtcaatgtaattgctcgagaactccatgttggtcccgttcctgctattctgtcggtctcaatgatggtaattggcttcatgctgggtcctctgctgtggtctcctctctctgaacagattggtcgacgacccgtctacgccgtcaccatgctcatctacgttatcttcaacatcccctgtgccctcgccaagaacattggtaccatgcttgtatgtcgattcctgtgtggtgtctttgctgcctctggtctctctaacgctggaggaaccattgctgacctgtggagcattgatgagcgaggaaaggctatcgctttctttgcggctgctccttactgtggacctgttctgggacccatcgtgtcaggatggatcgctgtgggaaccgacaagttcgagctcgtcttctgggtcaacatggcgtttgctggattcaccaccatcgtcattgctcttgttcccgagacttacgctcctgtgattctcaagcaccgagccaagaagctccgaaaggaaacaggcaattccaatatcatgactgaacaggaggccaagaaggctaccctgtctgatgtgatcaaggaggtgcttctgcgacctctctatctgtgtgctaccgaggtaatcctcgatttgatgaatctctacgtcgttctcatctatgctcttctgtacgccttcttctttgcctttcctgtcatctttgatgagctttatggctacaacgacggtattgttggtctcatgttcattcccattctcatcggtgccgcatttgccctatgtgttactccttggtgtgagagcaagttcaaggccatctgcaaggttcgaaagccaactcccgaagaccgtcttctcggagccctcatcggagccccttttattcccatctcactgttcattctcggagccacctcctacaagcatatcatctgggtcggccccgcctcttccggaatcgccttcggtttcggcatggtactggtctattatgccgtcaacaactacatcatcgattcgtacgccaaatacgcagcttcggcccttgcagccaaagtatttgtgcggtctggaggaggagctgctttccctctgtttactacccagatgtacaaagccatgggcctgcaatgggcctcgtggatgctggcctttgtagctcttgccatggtcgctatcccatatgcctttttcttctttggagcccgtcttcgagctcggtttgtcaaggtaaactacaccgaataa

SEQ ID NO: 151987 - protein, 550 aa, Yarrowia lipolytica CLIB122
MSDPAPLSRTHTSYSLRRTETASSLRRELSNVPSEPDINAPIVDGTAEFPEEYTMETETGLVPQRSLRELRGTDSDELEKGDSSSGSEIEYVTFTVNDPDNPQNWNNKTRWLYTLCATLTVVCVAFGSACPAGAVNVIARELHVGPVPAILSVSMMVIGFMLGPLLWSPLSEQIGRRPVYAVTMLIYVIFNIPCALAKNIGTMLVCRFLCGVFAASGLSNAGGTIADLWSIDERGKAIAFFAAAPYCGPVLGPIVSGWIAVGTDKFELVFWVNMAFAGFTTIVIALVPETYAPVILKHRAKKLRKETGNSNIMTEQEAKKATLSDVIKEVLLRPLYLCATEVILDLMNLYVVLIYALLYAFFFAFPVIFDELYGYNDGIVGLMFIPILIGAAFALCVTPWCESKFKAICKVRKPTPEDRLLGALIGAPFIPISLFILGATSYKHIIWVGPASSGIAFGFGMVLVYYAVNNYIIDSYAKYAASALAAKVFVRSGGGAAFPLFTTQMYKAMGLQWASWMLAFVALAMVAIPYAFFFFGARLRARFVKVNYTE

SEQ ID NO: 151988 - DNA, 1635 bp, Aspergillus nidulans FGSC A4
  CDS (1)..(1635)
atgagtgatatcaacaacctccacccaggtgacggacccgggcacgatgcgccgtcttccagcacaactctacgttcagaatcccgttccagtctagggtacggtgagaaggccatgcagtcttcgcctgatacggtttctgagaagggagaagaccgtgatatcgaaagtggcaaccatgacgcacaaaagccatcagccgatgaaaagccgaaggaactggagtccaaggatcccaatctgatcgagtggaatggacctaacgaccccgagaacccgcagaacatgccccattggaggaaatgggtcatcacaatgaccatgtcctcgatgacaatgtggctcactttcgcgagtagtgtgttctcgacggcgacgctggtgacggcgcagcagttcggcgtatctaccgaggttatgatcctcgcgaccagtttagtggtgtttgggtttgctgctggccctttggtctggtcacctatgtcggagctgtatggccggaaataccccctgtttcttggatatgctttgttcgctatcttccaaatccctgttgccgtggccaagaacgtgcagactattcttgtgtgtcgatttttgatgggctttctggggtgctcgcctctggctgttgttggaggtgcaatggcagacttttgggatcctgttgatcgcgccatagcgattgcgctgttttcagcagctaccttcgtcggacccgtgctcggtccaattgttggcggatttctcactgattcctatctcggctggcggtggactgcttggatcaccctgattgcatcaggatcgtttggcggcatcgcctggtttgtagtgcccgaaacgtatcacccggtgctcctgcagaggcgcgctgccaaactccgtaaggagactggcaatcaagatctgtatgctttcctcgatcaccacagaccgacttttggcgacatcgtccgcaaatacctgttccgtcccgttcagatgctcatgctcgagcccattctcatcctgattactctctaccttgcactcgtgtacggaatcctctaccttttcttcgaagcctatcccgtttcgttccaagaggagcgcggctggaccaacgggggtattgctggtctcccgttcatcggaatcatgattggagtgctctgcggcgtggccctcatcgtctggcaaactaagactcgctttgcccgtaagctcgccaagcacggcagagttatccctgaagaacgtttggtccccatgatggtcgcctccgtactcctgcctggtgggcttttctggtttggatggacgtccagtccgaacgtgcactggctggcccaggtcgccgctggtgttcctatcggcgccggtatcctcgtgatcttcatgcagggcctcaactacatcattgatgtgtacatgatgtttgcaaattctgcgattgcagccaacactctgattcgaagctccctaggcggtgctttcccactcttcgcaacacagatgtatcataagctgggcgtgccatgggcgtccagtctgctcgggttcatcaccgttgcaatgattcctatccccatcgtcttttatatctatggcaaaaagattagggcgctcagcaagttctcacctaatttctag

SEQ ID NO: 151989 - protein, 544 aa, Aspergillus nidulans FGSC A4
MSDINNLHPGDGPGHDAPSSSTTLRSESRSSLGYGEKAMQSSPDTVSEKGEDRDIESGNHDAQKPSADEKPKELESKDPNLIEWNGPNDPENPQNMPHWRKWVITMTMSSMTMWLTFASSVFSTATLVTAQQFGVSTEVMILATSLVVFGFAAGPLVWSPMSELYGRKYPLFLGYALFAIFQIPVAVAKNVQTILVCRFLMGFLGCSPLAVVGGAMADFWDPVDRAIAIALFSAATFVGPVLGPIVGGFLTDSYLGWRWTAWITLIASGSFGGIAWFVVPETYHPVLLQRRAAKLRKETGNQDLYAFLDHHRPTFGDIVRKYLFRPVQMLMLEPILILITLYLALVYGILYLFFEAYPVSFQEERGWTNGGIAGLPFIGIMIGVLCGVALIVWQTKTRFARKLAKHGRVIPEERLVPMMVASVLLPGGLFWFGWTSSPNVHWLAQVAAGVPIGAGILVIFMQGLNYIIDVYMMFANSAIAANTLIRSSLGGAFPLFATQMYHKLGVPWASSLLGFITVAMIPIPIVFYIYGKKIRALSKFSPNF

SEQ ID NO: 151990 - DNA, 1746 bp, Candida albicans SC5314
  CDS (1)..(1746): transl_table=12
atgtcacacgctacagactccacattagataacgcaagtgttgattcagaaaaagttagagatttcggtgacgacttacaaaaccacccagtccaaccaacaagaagcatcctcagcaagatccgctcaagagatgacgacgctagaagcttggtgtccaacaacaaaggggtagagagaatcatctcagacttacaagaaggcgcaggtcaattaggaccattagaacagccatacgatataaaaaagatcgaaacccatccagacccccacactgactacaatgaagccgacccttggaagtacccaatcgacctggaatctggtttacgtttggttgaatgggtcgatggcgacaaacacaacccaaaaaacatctccaaagctaaaaaatggttatacaccttggtcttgggtgcagtttgttttgttgtggccttggggtcagcaatcgttactggggatatggaacgtccagcagagtactttggtgtttcggaagaagtgataatcttggcttcagtaacagtatttgtcattggttttggtgttgggccgttggtgtttgcccccatgtcagaagaagttggtagaaagcctatttatgtggtcaccttatttattgcagtggtatttatcgttccttgtggcgccgctaaaaacatcgccacattaattgtttgtcgtttgatcgatggtattgcatttagtgcaccaatgacattgattggtgggtcgttagccgatatctgggaaggtcctgaaagaggtacggccatggccattttttctgctgctccgtttttagggccagtatgtggaccaatttttggtggtttgttatgtgaccacgctccaacttggagatggatatactggacattcttaattgttgctggtgtattttatgctatatttattgccatagtcccagaaacccaccacggaatattgttgaagaaacgtgccaaaaagttgagaaaagagacaggagactcccgctacagatcattcaacgaattgcagatcagatcatttggagaagtcgccaaaacctcccttttacgtccctttgtcttgctcagcgagctcatcgtcttcctcatgacaatatacatggccatctgctacggtttgctttacatgttcttctttgcctacccagtggtctaccaacaaggtaaaggatggtcagcctccttgactggtgtcatgtttattcccattggtgttggtgtgattatcgctactattgccgctcctttctttaacaaagactacaacagacgtgcccaggtctacagagatagaggagagttgccaccaccagaactcagattaatccccatgatgattgcatgctggtttgttcctgttggtctttttgcatttgcctggtcttcatacacttgggtatcctgggccggtccatgcttttcaggattggctgcaggttttggcttctgctgtttgtacaacccggccaacaactatatcgtcgactcctaccaacactacgctgcttctgcattagctgccaaaacatttgtcagatccatttggggtgcgtgtgtgcccctcttcactatccaaatgtaccacagattaggcgaccagtgggccacctcccttatggccttcatctccttagcatgctgtgccatcccatatttattcttctttttcggggcaagagtcagaacattctctagatacgcctataccccggaaactaataccaaatag

SEQ ID NO: 151991 - protein, 581 aa, Candida albicans SC5314
MSHATDSTLDNASVDSEKVRDFGDDLQNHPVQPTRSILSKIRSRDDDARSLVSNNKGVERIISDLQEGAGQLGPLEQPYDIKKIETHPDPHTDYNEADPWKYPIDSESGLRLVEWVDGDKHNPKNISKAKKWLYTLVLGAVCFVVALGSAIVTGDMERPAEYFGVSEEVIILASVTVFVIGFGVGPLVFAPMSEEVGRKPIYVVTLFIAVVFIVPCGAAKNIATLIVCRLIDGIAFSAPMTLIGGSLADIWEGPERGTAMAIFSAAPFLGPVCGPIFGGLLCDHAPTWRWIYWTFLIVAGVFYAIFIAIVPETHHGILLKKRAKKLRKETGDSRYRSFNELQIRSFGEVAKTSLLRPFVLLSELIVFLMTIYMAICYGLLYMFFFAYPVVYQQGKGWSASLTGVMFIPIGVGVIIATIAAPFFNKDYNRRAQVYRDRGELPPPELRLIPMMIACWFVPVGLFAFAWSSYTWVSWAGPCFSGLAAGFGFCCLYNPANNYIVDSYQHYAASALAAKTFVRSIWGACVPLFTIQMYHRLGDQWATSLMAFISLACCAIPYLFFFFGARVRTFSRYAYTPETNTK

SEQ ID NO: 151992 - DNA, 1758 bp, Candida albicans SC5314
  CDS (1)..(1758): transl_table=12
atggtgtctcacgacgatagctcagattcagaaatcactgctcaagagtttaacccaactgcattccagccagatcttgaagcacaatcaataaattcttcggatacacaacattccgagaaaagtacagaacctcaattgactgtaacaagaacagaaaccaaaaaatcccttcacgacttgggattaacatcatctatacctcatccagaattaaatggtccaattattgaaaatcctatattccctgaagaatatactttggaaaccactaccgggttggttccagtggtgacgttacaatccataggaagagtgaaaactattcaagaagaagagaaactagcaggcttggattcagaaatagaatttgtcacttttaaagtaggtgatccagaaaatccacacaattggccaatgtggttgaaatggtggtacacctttataatttccatgtttgtcatttctgctgcttatggttcatcttgtttatctggaggactttccactgttaataacaaataccacgtgctgactgaagtttctactttaacagtttccttaatggttattgggttctgtgttggtcctttgctttgggccccaatgtcagaagagtacggaagaagacccacttactttatatcattcggtttgtacgtcattttcaacatcccctgtgccttgtctccaaatattggaggattattggtttgccgtttcttgtgtggtgtttttgcatcatctgctctttcaattgctggtgcaagtttggtagatatgcataatgataccagaggtcttgccttatcatttttcagtttttgtccttattctggtcctgtcatttcattgatcgtcaatgggtttattgcaaccaacacagaaagaatggatttgattatttgggtcaatatggcctttgctggtgtaatgtggattatggtgagtttaatgccagaaacctatgctccagttatcttgaaaagaagagccaaaaaattaagaaaggaaacaggaaacgacaagataatgactgaacaagaagctacaccattgtcatttaaagaaatggtaaatgaatgtttgattagaccattaaaatttgttgtaacagaaccattattggatttggtttgtgcttttgttgctttaatttatgcttatttatatgcttttttctttgcttatccatacatctttagtacattgtacggatttggtgatgataaaatcggtttaatgtttattccaattcttattggtgcaggctttgctgttatcacaacatatgttttagaagtcgaatattcaaaattggtgaaaagaagaaaaccagaaccagaagatagattatggggtgccatggttggagctcctttcccatgtattgcattattcattttaggtgctacatcttacaaacatattatttgggttggtccagcctcatcaggtattgcctttggttacggtatggttttgatttattactctttaaataactacatcattgatacctacgccaaatatgcagcttcagctttagccaccaaagtgtttttgagatctgccggaggtgctgcattcccattgtttgttactcaaatgtacgaaggcttaggtttacaatgggctagttggttattggcctttgttgcattagctatggttttgattccatttacattttacaaatggggtaagacagtgagactgaaactttgtaaagaggattattctgctgccttgatttaa

SEQ ID NO: 151993 - protein, 585 aa, Candida albicans SC5314
MVSHDDSSDSEITAQEFNPTAFQPDLEAQSINSSDTQHSEKSTEPQLTVTRTETKKSLHDLGLTSSIPHPELNGPIIENPIFPEEYTLETTTGLVPVVTLQSIGRVKTIQEEEKLAGLDSEIEFVTFKVGDPENPHNWPMWLKWWYTFIISMFVISAAYGSSCLSGGLSTVNNKYHVSTEVSTLTVSLMVIGFCVGPLLWAPMSEEYGRRPTYFISFGLYVIFNIPCALSPNIGGLLVCRFLCGVFASSALSIAGASLVDMHNDTRGLALSFFSFCPYSGPVISLIVNGFIATNTERMDLIIWVNMAFAGVMWIMVSLMPETYAPVILKRRAKKLRKETGNDKIMTEQEATPLSFKEMVNECLIRPLKFVVTEPLLDLVCAFVALIYAYLYAFFFAYPYIFSTLYGFGDDKIGLMFIPILIGAGFAVITTYVLEVEYSKLVKRRKPEPEDRLWGAMVGAPFPCIALFILGATSYKHIIWVGPASSGIAFGYGMVLIYYSLNNYIIDTYAKYAASALATKVFLRSAGGAAFPLFVTQMYEGLGLQWASWLLAFVALAMVLIPFTFYKWGKTVRSKLCKEDYSAALI

SEQ ID NO: 151994 - DNA, 1341 bp, Candida albicans SC5314
  CDS (1)..(1341): transl_table=12
atgtggttgaaatggtggtacacctttataatttccatgtttgtcatttctgctgcttatggttcatcttgtttatctggaggactttccactgttaataacaaataccacgtgctgactgaagtttctactttaacagtttccttaatggttattgggttctgtgttggtcctttgctttgggccccaatgtcagaagagtacggaagaagacccacttactttatatcattcggtttgtacgtcattttcaacatcccctgtgccttgtctccaaatattggaggattattggtttgccgtttcttgtgtggtgtttttgcatcatctgctctttcaattgctggtgcaagtttggtagatatgcataacgataccagaggtcttgccttatcatttttcagtttttgtccttattctggtcctgtcatttcattgatcgtcaatggatttattgcaactgacaccgaaagaatggatttgattatttgggtcaacatggcctttgctggtgtaatgtggattatggtgagtttaatgccagaaacctatgctccagttatcttgaaaagaagagccaaaaaattaagaaaggaaacaggaaacgacaagataatgactgaacaagaagctacaccattgtcatttaaagaaatggtaaatgaatgtttgattagaccattaaaatttgttgtaacagaaccattattggatttggtttgtgcttttgttgctttaatttatgcttatttatatgcttttttctttgcttatccatacatctttagtacattgtacggatttggtgatgataaaatcggtttaatgtttattccaattcttattggtgcaggctttgctgttatcacaacatatgttttagaagtcgaatattcaaaattggtgaaaagaagaaaaccagaaccagaagatagattatggggtgccatggttggagctcctttcccatgtattgcattattcattttaggtgctacatcttacaaacatattatttgggttggtccagcctcatcaggtattgcctttggttacggtatggttttgatttattactctttaaataactacatcattgatacctacgccaaatatgcagcttcagctttagccaccaaagtgtttttgagatctgccggaggtgctgcattcccattgtttgttactcaaatgtacgaaggcttaggtttacaatgggctagttggttattggcctttgttgcattagctatggttttgattccatttacattttacaaatggggtaagacagtgagactgaaactttgtaaagaggattattctgctgccttgatttaa

SEQ ID NO: 151995 - protein, 446 aa, Candida albicans SC5314
MWLKWWYTFIISMFVISAAYGSSCLSGGLSTVNNKYHVSTEVSTLTVSLMVIGFCVGPLLWAPMSEEYGRRPTYFISFGLYVIFNIPCALSPNIGGLLVCRFLCGVFASSALSIAGASLVDMHNDTRGLALSFFSFCPYSGPVISLIVNGFIATDTERMDLIIWVNMAFAGVMWIMVSLMPETYAPVILKRRAKKLRKETGNDKIMTEQEATPLSFKEMVNECLIRPLKFVVTEPLLDLVCAFVALIYAYLYAFFFAYPYIFSTLYGFGDDKIGLMFIPILIGAGFAVITTYVLEVEYSKLVKRRKPEPEDRLWGAMVGAPFPCIALFILGATSYKHIIWVGPASSGIAFGYGMVLIYYSLNNYIIDTYAKYAASALATKVFLRSAGGAAFPLFVTQMYEGLGLQWASWLLAFVALAMVLIPFTFYKWGKTVRSKLCKEDYSAALI

SEQ ID NO: 151996 - DNA, 1926 bp, Ustilago maydis 521
  CDS (1)..(1926)
atggacaacttgcaccaccaatccgacgccaactcaccaacgcatcgaccaaagctgcaccatgctcgtccatatgccttgccatggtaccaggacacattctggggctctctggtcaacaggctgtctaagggcaagttgattccgtatccagaggaaagggatgactttgtgccgcccgaagagtatctgcccggatttaagaccaagcgcgctcagagcaaccacacttgcggatgcacacaggctgctcggtcgccgtcgtccgcaacgtccgaggcaacacatgtcggtgacggtgctgcatcgactgcggaaaagcctgctaagccgtctatggttgagtcgagctcgatgaactcacaacgtcgttcgactggtagcgatcaagagcagcttgaaacagcacctgactcgctcgaagacgactcggacccttacctggtcgattggaacggcgagtcggacccagataatccgcagaactggcggatgccacgcaaagctttcgtcacagctctactttgtctgcttacggtctcagtgtacatgggatcggcgatttacacgcctggcgtcgagctcttttcttcgtggttcggcatcggcgtggtgcctgccactttgggcttgtcgcttttcgtctttggctacggtctgggtccgatgatcggcttctcagcagcgtctgagatccccgctatcgggcgtttgctaccttatctattgacgctgttcatctttgtcatcttgcaagtgcctacggcgctggtgactaacgttgccggattcatgatcttgcgtttcctggcaggattgttcggctcgcctccgctggcgacgggtggagcgagtattggcgatttgtactcggcgcgcaatcgaccgcttgcactgggagtgtggggtctgtcagccgtgtgtggtccagtgttgggtcccttaattggtggatttgccgcgcagagtttcggtgccgagggttggagatggaccatctggccgctgctcatgctgtccggtttcacattggtggtgctcgtcgtgacacttcccgagacgtcaagcgccaacattctctaccgtcgagctaagaggctacgcaaggtaacgggaaacccaaacttgcgcaccaaaggcgagatcatgtccgccaacttgaccagtaaggagctcgctatgatgaccttcgtccgacctttcgtgctgtcgttcacggaacctatcgtcctcggtatcaactttcatatcggtctggtctatggaatcctctatatttggctagaagcctttccgattgtctttgtgcaaacgtatggcttcaactctggcgaactcggtcttgcattcatgggcatttttgtaggagccattttgacttatatccccttcgttctctggcacaagtactcgtatggaccgctgttcgatcgaaacggtggcaaggtggctccggagaagtggctggaacctgccatcttgggggcgtgggctatccctatctgcatgtttggctttggttggacagccaacgctagcatccactggatcgtgcctatcattctctcttcgtttttcgcggtcggaactttcctgctctttcaatccggtctctcgtacctgggtgactgttatccggaatccatcgctagtgtctatgcgggaaacgacttttttcgagcctcgatcggcgcagcactcccactcgtcgccagagccatgttcaacaacctccaggcaaacggccctaaagctttccccgtcgcttggggttgcgttctcatcggctccatctccatcatcatggctcctattccttttgtactctacaagttcggtcctaaactgcgttccatgtccaagtacgccgtcgacccttccgcaagcgcctccagccagaagcacaaccccaacgaaaagaagtaa

SEQ ID NO: 151997 - protein, 641 aa, Ustilago maydis 521
MDNLHHQSDANSPTHRPKLHHARPYALPWYQDTFWGSLVNRLSKGKLIPYPEERDDFVPPEEYLPGFKTKRAQSNHTCGCTQAARSPSSATSEATHVGDGAASTAEKPAKPSMVESSSMNSQRRSTGSDQEQLETAPDSLEDDSDPYLVDWNGESDPDNPQNWRMPRKAFVTALLCLLTVSVYMGSAIYTPGVELFSSWFGIGVVPATLGLSLFVFGYGLGPMIGFSAASEIPAIGRLLPYLLTLFIFVILQVPTALVTNVAGFMILRFLAGLFGSPPLATGGASIGDLYSARNRPLALGVWGLSAVCGPVLGPLIGGFAAQSFGAEGWRWTIWPLLMLSGFTLVVLVVTLPETSSANILYRRAKRLRKVTGNPNLRTKGEIMSANLTSKELAMMTFVRPFVLSFTEPIVLGINFHIGLVYGILYIWLEAFPIVFVQTYGFNSGELGLAFMGIFVGAILTYIPFVLWHKYSYGPLFDRNGGKVAPEKWLEPAILGAWAIPICMFGFGWTANASIHWIVPIILSSFFAVGTFLLFQSGLSYLGDCYPESIASVYAGNDFFRASIGAALPLVARAMFNNLQANGPKAFPVAWGCVLIGSISIIMAPIPFVLYKFGPKLRSMSKYAVDPSASASSQKHNPNEKK

SEQ ID NO: 151998 - DNA, 1965 bp, Ustilago maydis 521
  CDS (1)..(1965)
atgagtcgtgagggttgctctgctgagcatgttgtgctagaaccgatgtgcgaggttagtcaacagcatagagaagagcgcaagcttgccgaacatccaaccaattcatcacgaatcatcccccgcgcccccacgcccccacgcccccacgccgtccacggcatttgcgacagtcaaaagcccattccactcaatcagaccggctctttcgtctcagcgccgctcatatacatagagagctcgtcgctagcctctttggtacccttggtcgaccttaaaaatcctaacgttatcctcaccaccattcattcattctatacgctgtacgcgtgcctcccgatcgccatggaaacgtccgcgttcccgtcacagcgcaccagcatgtcggaaacggctcgtgctagcatcagctcgcacacctcgattctcttgaatgcttctccctcaaaaccgtctccgaccgcttcgcaactagagcagcgcggcgctgtcatcgaaaagcctcaacaagactcttcacaaccacaaccgtttacatctgcccgtaccaccgaccacaagctcctcgacgccaacttggtaacatgggccaccgacgacccctccaacccattcaactggccctatcgtcgcaagatcatgctgctctctgtggtcacggcttgtgccttttgtgtcacaaacacctcctccatcatcagcaatgcttaccaaggcatccaggacgaattccacatttctcgaacagtcgccatcctcggtctctcgctcttcgtcatcggccttggaatcggacccatgcttcttggcccgctctcggaattctacggtcgtcgtcctgtctacttggtctcgtacaccgcattcaccttgctcggattgccggtgagctttgcgaacaacctcgctgtctttctagtctttcgcttcctcaccggcttctgtggttccgccttcctgagcgtagcaggcggcagtgtcagcgacatctttgcgcccaccgacatctttgttcccatgtctatctacaccaacggccccttcttgggtccggttgcaggtccactgttgagtggcttcatcaaccaacataccaattggagatggacattttggaccatcaacatctggtcgagcgtgatgctggctatccttgtcttgttcggtccggaaacatatgctcctgctttactcgccgcgcgagccaagagatcacgcaagcagacgggtaaccaagagctgtatgccgagcacgaacgaatcgttgccagtaaatccctggtcaggaccatcgtaatttccacgaccagacctttccaacttctcgtccgtgaagtgatgcttttgctcctctgtctttggtcggccttgttgctgggagttctctacctcttcttcgtcgcttttcccatcgtgtttgaagcgcacggattcaacctgcaagaaatcgggctgtccttcctcggcatcggaatcggcatggtcatcgccgtcctgaccatgccctattgggcacgtcactacacccacctcgtgcagaccaaaggtaacggtgttgccgaacccgaattccgtctacctgtcgctatggtcggagccgtgtgtctgccgatcggcatgttctggtttgcattcaccacgtacgcttccatccactggatcgtcccgatcctcggaacggtcgtgttcggattcggaattagctacatatacacttcagtgtttacctataccacgcatgcctacagaccagtcgctgcaagcgctatggctgccaacagcttctgcaggagctcttgggctgctgcgttcccgttgatcgccaaaccaatgtatgatcgcatgaccacgcccggtgccaccgcgttcttggctggtctcaacgtcttgatgatccctgtcccgttcgtcttttatcggtacggtaaaaagatccgcgccaaaagtcagttcactcatacctag

SEQ ID NO: 151999 - protein, 654 aa, Ustilago maydis 521
MSREGCSAEHVVLEPMCEVSQQHREERKLAEHPTNSSRIIPRAPTPPRPHAVHGICDSQKPIPLNQTGSFVSAPLIYIESSSLASLVPLVDLKNPNVILTTIHSFYTLYACLPIAMETSAFPSQRTSMSETARASISSHTSILLNASPSKPSPTASQLEQRGAVIEKPQQDSSQPQPFTSARTTDHKLLDANLVTWATDDPSNPFNWPYRRKIMLLSVVTACAFCVTNTSSIISNAYQGIQDEFHISRTVAILGLSLFVIGLGIGPMLLGPLSEFYGRRPVYLVSYTAFTLLGLPVSFANNLAVFLVFRFLTGFCGSAFLSVAGGSVSDIFAPTDIFVPMSIYTNGPFLGPVAGPLLSGFINQHTNWRWTFWTINIWSSVMLAILVLFGPETYAPALLAARAKRSRKQTGNQELYAEHERIVASKSLVRTIVISTTRPFQLLVREVMLLLLCLWSALLLGVLYLFFVAFPIVFEAHGFNLQEIGLSFLGIGIGMVIAVLTMPYWARHYTHLVQTKGNGVAEPEFRLPVAMVGAVCLPIGMFWFAFTTYASIHWIVPILGTVVFGFGISYIYTSVFTYTTHAYRPVAASAMAANSFCRSSWAAAFPLIAKPMYDRMTTPGATAFLAGLNVLMIPVPFVFYRYGKKIRAKSQFTHT

SEQ ID NO: 152000 - DNA, 2004 bp, Ustilago maydis 521
  CDS (1)..(2004)
atgtcgcagcacactccgccagctgtggatgtcgacaaccaagaccagaatgctcccaagcataagcgcagcctgcacacacccaagcatggatggctccatgaggcaagcaagcgcttcatggggcagacaccaaaaggcacgccgacagcaccacctcaaacgtccagcacggaaacgaatctcgcaaggcccacttctgcagagcttgatcgcgaagctgaaaccatctttcgcaggacagcacggtacggcggctcggatccccgcgaccctgaagatcgcgccttcgagcctgttagcatctcggacgacagcgacagcggtacatgcgtaccttcttctcccacgcagaccaaatcaaagaatcagcaaagcgaccataatggtgaagatgacaaccgtgattccgagcaaggtcgaccccgaggtaacccagacgaatctcaagatccaaatcaggtagagtgggacggaccaaaggatcctgaaaatccgcaaaattggtcgcaaaggaagaagtgggcgctcaccgtgcttgcttcgatgctcactgtcaacgtcacctttgcctcttccgctccctcagctgctactcaacaattgacacaagaattccagattggcactgtcacagcaacgctcatcacttcgatcttccttgccggctactgcttgggccccattctttggtccacggcatccgagctcgtgggccgaaaggtcgtacttagcatcgccatgctcatgtacacgctcttcatcctcggacaggcgctagcaaagaatgtcgagacgctcttcgtaactcgcttcatcagtggggtctgtgcagccgcacctctgaccatctgtggaggcatcatcgccgacatgtgggatcctattggacgcggctttgccatgagcctcttctcgtgcgccgtctttatcggccccgtgtttggtcccatcattggcggattcgtcactcaatcttatcttggatggcgatgggtgttttgggtcatgatcatttttgctgcggtttgctggctcgttctcatcatctttttacctgagacctttgcgccggttctgctcatgcgaaaagcaaagcgactccgcaaactcgatccggaagccaacaaaaacctctatgcgccccacgaaaagagcgattggtctatcggcggcatcgcccatcgaacgttgctcaggcctttccaaatcttgacacaggaacccatcttggtactcatcacaatctacctctcgattgtctacggtatcctctacggcctctttgaggcggtccctatcatctttgagatgaagcgaggcttcaacctgggcgagtcgggcctgattttcattgcggtcggcttgggtacgaccattggcggtatcatcaacgtgttcatgtctcttcgatacaagtcgctcacaccgttctggcataacttgccgcctccagaggagaggctgtggggatcaatgatcgccggtcccgtcctggtagcgggtgccttttggttcggctggacgggagagtatgcatcagtgccttggtacgtgccagcactggcactgattccgattggaatcagcttcacgctcgtctttatttctttgcttgcttacatcgtagattgctacacggtctatgcggcatctgcactggctgccaacaccattgttcgatcggctgttggtgcagctttcccgctgttcgtgcggagcatgtatctgggattgggcgcaaattgggcttcttcgctgctcggctttgtggcattggtcttgacgccattcccgtacatcttctacgtctatggaagcaaaatccgcagctggagcaagtttgcgcccgccatggatctcaaagtgcgctcagcgctcgagaaggaaggcaagcttcccgaggacagtcttaacaccacgagcgcctttggccgaaacggactcagccaggccaagaaggagatggcagccaagaaggatcccgagaagcaggagcagtag

SEQ ID NO: 152001 - protein, 667 aa, Ustilago maydis 521
MSQHTPPAVDVDNQDQNAPKHKRSLHTPKHGWLHEASKRFMGQTPKGTPTAPPQTSSTETNLARPTSAELDREAETIFRRTARYGGSDPRDPEDRAFEPVSISDDSDSGTCVPSSPTQTKSKNQQSDHNGEDDNRDSEQGRPRGNPDESQDPNQVEWDGPKDPENPQNWSQRKKWALTVLASMLTVNVTFASSAPSAATQQLTQEFQIGTVTATLITSIFLAGYCLGPILWSTASELVGRKVVLSIAMLMYTLFILGQALAKNVETLFVTRFISGVCAAAPLTICGGIIADMWDPIGRGFAMSLFSCAVFIGPVFGPIIGGFVTQSYLGWRWVFWVMIIFAAVCWLVLIIFLPETFAPVLLMRKAKRLRKLDPEANKNLYAPHEKSDWSIGGIAHRTLLRPFQILTQEPILVLITIYLSIVYGILYGLFEAVPIIFEMKRGFNLGESGLIFIAVGLGTTIGGIINVFMSLRYKSLTPFWHNLPPPEERLWGSMIAGPVLVAGAFWFGWTGEYASVPWYVPALALIPIGISFTLVFISLLAYIVDCYTVYAASALAANTIVRSAVGAAFPLFVRSMYLGLGANWASSLLGFVALVLTPFPYIFYVYGSKIRSWSKFAPAMDLKVRSALEKEGKLPEDSLNTTSAFGRNGLSQAKKEMAAKKDPEKQEQ

SEQ ID NO: 152002 - DNA, 1746 bp, Ustilago maydis 521
  CDS (1)..(1746)
atgcaaagtggtacagtggcaagccagccctatactgtggacctggctgcgggaaatggtcaactggaggcgagtggcgccaagggggcatcttcatacgcttcatcacagacagccactacaccagacgtgcacagctacgaaccttccacttctggagtcgcagagatcaacactccctttgacccgcaaagtgattgcggtctagacagagatcgccaagcttctgatcttgacgacgaacacaaggctgccgcggcgccggatgacctcgaggttgctggtcatcaggtcgcatccaaagtggctgacagcagcctcgatgagaagttgccaccgcagctggtgggctgggagggccctgacgatcctgaccatccgcacaagtggtctgtggtccttcgtgtatacctcacctttctagcatgcgtggtggtgctggcatctacgttcacctcttcgatctcctctggtatcgctgagagtctgatgaagcactacagcttcggcaaagaggtcgctgcactcaccatctcggtcttcgtcgcgggttatatcctgggaccctggttgtggggtccactctcggaacgaatcggtcgccgcaaggtatttgcggcttcgctgctcatctatactggctggaacgtgggctgcgctctggcacccaacacaggtgcgctactgacgttccgcttcctcgccggcaccgctgccgctgcgccgctgagcaactcaggtggtctaatcgccgacctgtggccgacacgcgttcgtggtatcgccaccggtctatacgcctgtgcgcccttcgccgggcccgcactaagccctatcgtcagcggctttattcagagctcgggcgccaatttccgatgggcattttgggtttgcgctatattttccggtgtctgctggttgctagtagttctcacgctcccagagacatacgcgcctgtgctcctcaagcgcaaagcggaccaacttcgtcgacagactggcagcgcaagctactgcgcgccgatagagcaggccaaactgacaccgtcgacgtttctgcgagatgttctgatcaagccgctgatcatgtcaattcaggagacaatgctgctcgcctcgatcttgtttatggcgtttctgtacggtgttgtctacctgctcttcgaagccttgcccatcgtgtttggcgagggctacggcttcagcgcaggcgttgtgggcctcatgtttattcctttcgctctaggggcgtgtgttggcgtgctattctacattgttgtctttttccctcgctatgcccacaaggtcgacaatgcgccgggcaaccaggtagcaccagaggaacgtcttcctatggctatgcttggagcacctgttctgaccatcggcttcttttggttcgcgtggaccagcgacccgaatatcagcttctgggcgcccatgctctccactgccctgctgggctttggcatcttttttgtcttccaggggctgttcaactttatgattgacgcctacaccgtcaatgcagcctcggcgttggctgccggcgtgattgtgcgcagctgctttggcgctgcatttccgcttatcgcgagacaattgtatgctcggctgggcaccaaatgggggtccagcttgctcggctttctcgcgttggctatgacgccgatcccattcctgctgtatcactacgggcctcgtctcagggccagatcccgaagtgccaagcatactgccgcctag

SEQ ID NO: 152003 - protein, 581 aa, Ustilago maydis 521
MQSGTVASQPYTVDLAAGNGQLEASGAKGASSYASSQTATTPDVHSYEPSTSGVAEINTPFDPQSDCGLDRDRQASDLDDEHKAAAAPDDLEVAGHQVASKVADSSLDEKLPPQLVGWEGPDDPDHPHKWSVVLRVYLTFLACVVVLASTFTSSISSGIAESLMKHYSFGKEVAALTISVFVAGYILGPWLWGPLSERIGRRKVFAASLLIYTGWNVGCALAPNTGALLTFRFLAGTAAAAPLSNSGGLIADLWPTRVRGIATGLYACAPFAGPALSPIVSGFIQSSGANFRWAFWVCAIFSGVCWLLVVLTLPETYAPVLLKRKADQLRRQTGSASYCAPIEQAKLTPSTFLRDVLIKPLIMSIQETMLLASILFMAFLYGVVYLLFEALPIVFGEGYGFSAGVVGLMFIPFALGACVGVLFYIVVFFPRYAHKVDNAPGNQVAPEERLPMAMLGAPVLTIGFFWFAWTSDPNISFWAPMLSTALLGFGIFFVFQGLFNFMIDAYTVNAASALAAGVIVRSCFGAAFPLIARQLYARLGTKWGSSLLGFLALAMTPIPFLLYHYGPRLRARSRSAKHTAA

SEQ ID NO: 152004 - DNA, 1587 bp, Cryptococcus neoformans var. neoformans B-3501A
  CDS (1)..(1587)
atgctggaaccagtagaagccgagttcgccaacccgcccatcttcagcaaccagcaagaagagatcttgcatgaagaagaaatcgaagagcctaacgccatttccaacgctggcaagcaagtcactagcggttctgacgactcaacccttcatggacagcaatcttccgaaaaggtcaacgagaaggacgttgaaaaaggcacggacgaacggattattgttcattttgacgagggggagggaccaaagcagtggtccaaaagacgaaagtggtgggccaccactaccgcctccattctctgtcttgctgttgccctcggtagtgctatgcctacgggtgaccttcccggcaccgctgagactcttcatgtttctgacgaggtcatttacatctccatctccctcttcgtcgctggtttcggtattggtccccttatctttgcacctttaagcgaagttgtcgggcgtcgacccatttacgccgtcagcatgctcttctactttctcttcaccttgcccagctgtctcgccaagaacattgctaccatgttggctggtcgtatgattgccggtcttgcttcctctgccccattcaccaacgtcggcggtaccatttccgacgtttgggccgtcgaggaacgaggtttccccatggctgtctttagttctacactttttatggggccttgtcttggacctttgtttggcggatggatcgccgaaaaaaccggccagtggcgatggatttactgggtcctcttcattctttgcggtgcttgtgtcatcctttgcatcttcactcccgagactcttgcccctgtccttctccgcaagaaggctgcccggctcaacaaggagaataacaccaccgtttacgtctctgagcacgacctccataggccccccttcaaggaaactatcaaggtcgctttgactaggcctctcgtatttatgttccaggaagttatcatcatcttcttcaccgtttatctctccttcatctatgctttgctctattctaccttctttgccttccctatcgcgtttgaggagatccgaggctggagtatgggtatgactggtgtctctttcgtgtctatcatcattggtatcgcaattgccaacctatgtatgcctatccaagaaaggctgtacaagaagcattgcgagaagcatggtgttgtcccagagggtcgtctttatcccatgatgcttggtgcacttacccttcctgtctccatgttcatcctcgctttcacttcgtatcctggcatcatttgggtggggccttgcgtgggtggtatcattttcggtttctctatggtcattatctacatctccggtaacacgtacatcgtcgacagttattccaactacgctgcttctgccatcagtgccaagaacatgactcgttctctcattggtgcttccgttcctctctggattacccagcttctccacaatctcaagttccagtacggtatgctcttccttgccttattctctgtggtcatcgcccccatcccctttgtcttctacgtgaagggtggtgccgtcaggaggaggtccaaaagggcgacggcttaa

SEQ ID NO: 152005 - protein, 528 aa, Cryptococcus neoformans var. neoformans B-3501A
MLEPVEAEFANPPIFSNQQEEILHEEEIEEPNAISNAGKQVTSGSDDSTLHGQQSSEKVNEKDVEKGTDERIIVHFDEGEGPKQWSKRRKWWATTTASILCLAVALGSAMPTGDLPGTAETLHVSDEVIYISISLFVAGFGIGPLIFAPLSEVVGRRPIYAVSMLFYFLFTLPSCLAKNIATMLAGRMIAGLASSAPFTNVGGTISDVWAVEERGFPMAVFSSTLFMGPCLGPLFGGWIAEKTGQWRWIYWVLFILCGACVILCIFTPETLAPVLLRKKAARLNKENNTTVYVSEHDLHRPPFKETIKVALTRPLVFMFQEVIIIFFTVYLSFIYALLYSTFFAFPIAFEEIRGWSMGMTGVSFVSIIIGIAIANLCMPIQERLYKKHCEKHGVVPEGRLYPMMLGALTLPVSMFILAFTSYPGIIWVGPCVGGIIFGFSMVIIYISGNTYIVDSYSNYAASAISAKNMTRSLIGASVPLWITQLLHNLKFQYGMLFLALFSVVIAPIPFVFYVKGGAVRRRSKRATA

SEQ ID NO: 152006 - DNA, 1788 bp, Cryptococcus neoformans var. neoformans B-3501A
  CDS (1)..(1788)
atgtcttcccccaacacgattactacctctacaacattaccaccttctccagtctcttctagaatagggaccatctccataaccgacagcaacgatgatcatgaccacattacacgaatccctaccagtactagtcatcgaacagccgattatggccatcctcttcagcgaaccatgacaactgctagccgtcgagctcctccggatcttgccttcccatatcttaccaccgatatgtctcgaggtggcattactcaagaatatcggatcgaaacacgggaaggcttcattccggcaaatgatgccgaatacggacttcagcctatgcgttcccgagctacgactatacatggggaccgatttgttctccacgataaggagaagggcggaatgggcgagaagaagctagttacctttcaagaaggtgatcctcagaaccctaggaactggagcaagtcacgccgatggattattactggcatcgtctcctgcgctgttattcaagtggccctctcttctgctatcgttactggtgacttccccgatcaagaagagtactttggcgtctcctcagaagtaattgccctcaccgtgtcgttaactgtctgcggcttcgggaccggtcccttattatggtcaccactttcggaactgctcggtcgacgatggctttgggctataccgactgccatctacatcatcttcaacattccatgtgctcttgctcccaatattggatgccttcttgcttctcgatttctctgtggattctttggctctgcacctcttaccctagctggtggtactattgcagatgtctggggtcctgaagagcgaggctttgccatcgctatcttcgcggctgctccttatacaggacccgtgattggacctttgattgggggttttatcggaaaatacgctggttggaggtggatttattgggttaacatgatttctgccggcgtggtctggcttgcctccctcatcattcccgagactttcgcccctgctatattgaagaaacgcgctaagcaaatgcgttacgattctcaagatgattcttatgttaccgaacaagaaattttccgaaagcccttgaacgagatcgttatcgagacccttatccgaccttttgaaatgcttgcaacggagcccgttttactttgcatgtctctctatatctcccttgtctacggtcttctttacgccttctttttctccttccctgtcgttttcaacgaggattacggatgggatgacgccaagaccggtcttactttcatccctgtatttattggtgttggccttgccttgtgtgtgaccccatggctggagaaaaaatacgttgccaaaggcgacaaagctgagcctgaagatcgtcttcctggtatgctcatcggtggcccgtttgtcccgatctctctctttatcttcggctggacttcccctccatatgtcgctcccggcggtggttcgtgggttggtcctgtgagcgccggtattccttttggtctcggaatggtcttggtttactttagtgccaacgcatatttgattgaagcctttcccgattatgttgctagtgcacttgctgccaagactgtcgtccgatctgctgcaggtgctgccatgcctcttttcattcctcaaatgtttcacggtcttggtaacgggggggcagcttctcttttagccggtatcgccatcattatggcttgtatcccattcgcatttgccaaatggggtaaaaagatccgggcaaggtcgaaaagggctgctctctaa

SEQ ID NO: 152007 - protein, 595 aa, Cryptococcus neoformans var. neoformans B-3501A
MSSPNTITTSTTLPPSPVSSRIGTISITDSNDDHDHITRIPTSTSHRTADYGHPLQRTMTTASRRAPPDLAFPYLTTDMSRGGITQEYRIETREGFIPANDAEYGLQPMRSRATTIHGDRFVLHDKEKGGMGEKKLVTFQEGDPQNPRNWSKSRRWIITGIVSCAVIQVALSSAIVTGDFPDQEEYFGVSSEVIALTVSLTVCGFGTGPLLWSPLSELLGRRWLWAIPTAIYIIFNIPCALAPNIGCLLASRFLCGFFGSAPLTLAGGTIADVWGPEERGFAIAIFAAAPYTGPVIGPLIGGFIGKYAGWRWIYWVNMISAGVVWLASLIIPETFAPAILKKRAKQMRYDSQDDSYVTEQEIFRKPLNEIVIETLIRPFEMLATEPVLLCMSLYISLVYGLLYAFFFSFPVVFNEDYGWDDAKTGLTFIPVFIGVGLALCVTPWLEKKYVAKGDKAEPEDRLPGMLIGGPFVPISLFIFGWTSPPYVAPGGGSWVGPVSAGIPFGLGMVLVYFSANAYLIEAFPDYVASALAAKTVVRSAAGAAMPLFIPQMFHGLGNGGAASLLAGIAIIMACIPFAFAKWGKKIRARSKRAAL

SEQ ID NO: 152008 - DNA, 1734 bp, Pichia guilliermondii
  CDS (1)..(1734)
atggtgtctacggagagtagtacgctcagctctatcagagggtctgataaagtgcccaaatcttatcacaaaaatgatgcttttgattccgatgaaaaagttgatgcggaagcgtacctggccaagaatatagagcgaaccataagtgaatccagaagtatccaaaaggtcgtttctggtctcgaagaaaaaggtggagccttgggtgagttggaacagccgtacgacttgaaaaaatttcactctagagcagacccctcttctgactacaacgaaaacgatccatggaagtacccaatagaccaacaaaccgaacttcgtattgtggagtttgtagagggtgacaaggaagatcctaaaaacatgggctatggaagaaagtggctccttacattaattttaggttccatttgttttgttgtggctctcggttctgcaattgtgactggtgatctcgaggggcctcgaaatgaattgggtgtttcagaagaggtgattattgtggcttctgttaccacctttgtgcttggttttggatttggaccatgtatatttgctccaatgtcagaagaagtgggcaggaaaccggtgtacacggtaacgttggcattgggactcatatttatcattccttgtgctttggccaagaatattgaaacacttttaatttgtcgtcttatagatggaattgcattttccgctccaatgactttaatcggtggatctttgtcagatatttggcacagcagtgagagaggacaagccatggctattttctctgcagctccataccttggacctgtcatgggtccgatttttggaggtcttttgggcgactatgcaccaacttggagatggatttattggacctttttgatcgtggcaggtttcttttacgctgttcttactatatttgttcctgaaactcaagccagtactcttcttaaacgcagagcaataaagttaaggaaagaaactggtgatcaacgttacaagaccattggagaattaaaagtgagaacttttagccaagttgccctggactctttattgagacctttcttattattgagtgagcttattgtgtttctaatcaccatttttatggctgtcatttatggattgttgtacatgtttttctttgcctatccaattgtctacatgaaggacaaaggttggtctgcttccaaaacaggaattatgttcattcccattggagtgggagtgatcctcgccaccttaattgcaccttatgtcaacagagactacaatagaagagcacaagtgtatcgtgatagaggtgagttaccgccagctgagttaagattgattcctatgatggttgtatgctggtttattcccattggtttgttttgctttgcatggtcctcatatacgagaatctcatgggcaggtccttgcttcagtggactcgcagcagggtttggcttctgtgctctgtataatccagccaataattacatcgtggactcttaccaacactacgctgcaagtgcattggctgcgaaaactttggtgagatctatctggggtgcttgtgtccccttattcaccattcagatgtacaataggttgggaaaccagtgggcatcatcattaatgggatttattgctttggcatgttgcttcattccgttcttgttctacaaattcggtgcccgaattagaaagttttcaaggtatgcttattcaccagagtcggaaaaacactga

SEQ ID NO: 152009 - protein, 577 aa, Pichia guilliermondii
MVSTESSTLSSIRGSDKVPKSYHKNDAFDSDEKVDAEAYLAKNIERTISESRSIQKVVSGLEEKGGALGELEQPYDLKKFHSRADPSSDYNENDPWKYPIDQQTELRIVEFVEGDKEDPKNMGYGRKWLLTLILGSICFVVALGSAIVTGDLEGPRNELGVSEEVIIVASVTTFVLGFGFGPCIFAPMSEEVGRKPVYTVTLALGLIFIIPCALAKNIETLLICRLIDGIAFSAPMTLIGGSLSDIWHSSERGQAMAIFSAAPYLGPVMGPIFGGLLGDYAPTWRWIYWTFLIVAGFFYAVLTIFVPETQASTLLKRRAIKLRKETGDQRYKTIGELKVRTFSQVALDSLLRPFLLLSELIVFLITIFMAVIYGLLYMFFFAYPIVYMKDKGWSASKTGIMFIPIGVGVILATLIAPYVNRDYNRRAQVYRDRGELPPAELRLIPMMVVCWFIPIGLFCFAWSSYTRISWAGPCFSGLAAGFGFCALYNPANNYIVDSYQHYAASALAAKTLVRSIWGACVPLFTIQMYNRLGNQWASSLMGFIALACCFIPFLFYKFGARIRKFSRYAYSPESEKH

SEQ ID NO: 152010 - DNA, 1803 bp, Pichia guilliermondii
  CDS (1)..(1803)
atgtatgtttgtttttcgagtcgtatggtatatgcctcaaatctcatttcgcagtctgtaaatacctcaatttgcagccgaccttgcttcaactttaaatataaaagaagcaccgtctatatgtttaaaccaacaagaatgatagacactttatcatcaacatcttcgggatctcacacctcggaaataaaagaagaaaatgaaattcagcggtacatcaccacgaacaataatgttggtcacctcgtgcgtgaattactgagagatgctggttccttgggtcccttggaacagccatatgacctcaaaacctacgagtctcacccgcttccagactctagttttaatgaaaatgatccatggaagatccccatcgatgcagagacttcacttcgattggtggaatttgttgaaaacgacaaagaaaacccaaagaatatgggaactgcaagaaaatgggttattacaggtatccttggctccatctgtttcgtggtagctctcggttcagccattgtcacaggtgacttggaacgaccacgagattatttcggagtgtcggaagaggtaatcatcttggcatcagttacaatgtttgttttaggttttggttttggtccttgtctctttgcaccgctttcggaagaggtaggaagaaaaccagtttaccttgtaactctttttcttggcataattttcattattccctgtggcctcgcgaagaatattgcaaccttacttgtatgccgtttaattgatggtcttgcattttctgctcccatgacgttgattgggggatctttggcggatatctggaaagattcagaaagaggaatggccatggcaattttttctgctgctccatttcttggtccagtcaccggtcccattttcggtggactcataggcgactacgcttcaacttggagatggatatactggtgctttttgatcattgcagcttttttttatgttctccttgccttgtttgttccagaaacccatacaaatactttgctcaaaaagagagcaaaaatattaagaaagaagaccggcgacaacaaatataaagcactttgtgagctcaaagttagaagcatccaaaccgtggccaaggactcgttattgcgtccttttgctcttttaagtgaactcatcgtgttccttatgacattgtacatggcagtcgtctatggtcttctttatatgttcttctttgcatatcctgtcatctacatggaaggtaaaggctggtccgcatcgaagacaggaatcatgttcattcctattggagttggagtgcttattgcaaccgccgcagctccttttttcaacaaggattataatagaagagcccaaccttatcgtgatagaggagagttggcaccaccagaattgagacttattccaatgatggtttcatgctggtttgttcctatcggattgttctgcttcgcatggacttcttatgaaagaatatcatgggctggaccttgtttcagtggtcttgctgctggtttcgggttctgtgctttatacaacccagctaacaattatatcgttgattcttaccagcattatgcagcaagtgcattggctgcgaaaactttggttaggtcaatttggggagcttgcgttcctcttttcaccatccaaatgtaccacagattaggttatcaatgggcaagcagtttgatggcattcatcagtcttggttgttgtatcattccattcttgttttatatctttggtgcaaaaatccggaaattttccagatacgcatttcaccaagaaactcactaa

SEQ ID NO: 152011 - protein, 600 aa, Pichia guilliermondii
MYVCFSSRMVYASNLISQSVNTSICSRPCFNFKYKRSTVYMFKPTRMIDTLSSTSSGSHTSEIKEENEIQRYITTNNNVGHLVRELLRDAGSLGPLEQPYDLKTYESHPLPDSSFNENDPWKIPIDAETSLRLVEFVENDKENPKNMGTARKWVITGILGSICFVVALGSAIVTGDLERPRDYFGVSEEVIILASVTMFVLGFGFGPCLFAPLSEEVGRKPVYLVTLFLGIIFIIPCGLAKNIATLLVCRLIDGLAFSAPMTLIGGSLADIWKDSERGMAMAIFSAAPFLGPVTGPIFGGLIGDYASTWRWIYWCFLIIAAFFYVLLALFVPETHTNTLLKKRAKILRKKTGDNKYKALCELKVRSIQTVAKDSLLRPFALLSELIVFLMTLYMAVVYGLLYMFFFAYPVIYMEGKGWSASKTGIMFIPIGVGVLIATAAAPFFNKDYNRRAQPYRDRGELAPPELRLIPMMVSCWFVPIGLFCFAWTSYERISWAGPCFSGLAAGFGFCALYNPANNYIVDSYQHYAASALAAKTLVRSIWGACVPLFTIQMYHRLGYQWASSLMAFISLGCCIIPFLFYIFGAKIRKFSRYAFHQETH

SEQ ID NO: 152012 - DNA, 1752 bp, Pichia guilliermondii
  CDS (1)..(1752)
atgagtagctcagatgaagcatctattgcatcagaggatattcctcaagcatataatcaaccagagaatcctgtagctcttacaaaaacagaaactgcagcaactttacatcaattaggactttctcaagtaccgtctgtgtctggtccggatttgaccaatccaccagtagaagatcccattttcccagaagagtatactctcgaaactgacaccggacttgtccccgtaagaactttacaatcgattggaagagtcaagtctcggattctggaagaggcttctcgtcaaagtactaggcaaagttttctcgcggaaaagaataatgaagaaggtgaaaaggatattgacccagatattgaatttgtgacctttgtcaagggtgatcccgaaaatcctcataattggaacgaaactttgaaatggttctacacatttttgttctccattttcgtcattagtgctgcctatggctcctcctcattggccggcggacttccattgatcaacgaaaaatttggagtatctacagaagtctccacattatctgtgtcgttgatggttcttggattctctgtaggtcccttgatttgggcaccattgtctgaacaaattggaagacgtcccgtctacatcatctcgtacggtttgtacgtcattttcaacattccttgtgccgtcgcaaaaaatattggtactgtcttggtgtgtcgtttcctttgtggagttttctcgtcttctgccttaaccaatgttggtgccagtttggtggatcttcatagggaatccagagggttagccattgcctttttcagtttcagtccttactctggacctgtctttggaggtattgttaatggattcatcagtgtcggttctggaaggtacgaccttatggtttgggtcaatatggcgttcgcaggagtgatgtggatcgttattggtttgattcccgaaacttactcgccagtcattttgaaaaatagggcaaagagacttagaaaagaaacaggaaacaacaaaatcatgactgaacaagaagccactccattatctttcaaagaaatgctcaacaacaatttgtatcgtccacttaaatttgtgattcaagaacctgttcttgatcttgtttgtggtttcgttgccctcatctattcgttgttgtatgcatttttctttgcatatccggtaatcttcatggacttgtatggttacaaagataacttgatcggattgatgtacgttccaattttaatcggtgcgttgttggctcttgttaccactccaatattggaaaagagatatcaagcactctgcaaaagacgtactccagtcccagaagatagacttgttggtgctatggttggtgccccattcccttgtattgcattgttcattttgggtgctacctcgtataagcacattatttgggttggtccggcctccagtggtattgcttttggatatggtatggtgttgatttactattcgttgaacaactatatcattgacacttacgccaagtatgctgccagtgccttggctaccaaagttttcttaagatcagctggtggtgctgctttcccacttttcgtcacccaaatgtaccatggccttggtctccaatgggccagttggttgcttgcatttgtttccttggcaatggttctcattccattcagtttctaccgttttggtggggctgtgagagccaagctttgtaaggaagattataccattcactacgactaa

SEQ ID NO: 152013 - protein, 583 aa, Pichia guilliermondii
MSSSDEASIASEDIPQAYNQPENPVALTKTETAATLHQLGLSQVPSVSGPDLTNPPVEDPIFPEEYTLETDTGLVPVRTLQSIGRVKSRILEEASRQSTRQSFLAEKNNEEGEKDIDPDIEFVTFVKGDPENPHNWNETLKWFYTFLFSIFVISAAYGSSSLAGGLPLINEKFGVSTEVSTLSVSLMVLGFSVGPLIWAPLSEQIGRRPVYIISYGLYVIFNIPCAVAKNIGTVLVCRFLCGVFSSSALTNVGASLVDLHRESRGLAIAFFSFSPYSGPVFGGIVNGFISVGSGRYDLMVWVNMAFAGVMWIVIGLIPETYSPVILKNRAKRLRKETGNNKIMTEQEATPLSFKEMLNNNLYRPLKFVIQEPVLDLVCGFVALIYSLLYAFFFAYPVIFMDLYGYKDNLIGLMYVPILIGALLALVTTPILEKRYQALCKRRTPVPEDRLVGAMVGAPFPCIALFILGATSYKHIIWVGPASSGIAFGYGMVLIYYSLNNYIIDTYAKYAASALATKVFLRSAGGAAFPLFVTQMYHGLGLQWASWLLAFVSLAMVLIPFSFYRFGGAVRAKLCKEDYTIHYD

SEQ ID NO: 152014 - DNA, 1830 bp, Pichia guilliermondii
  CDS (1)..(1830)
atgtccacgagtgtgaagagtgaaaccttaaactcatctcatgagttatcagcttcgtcttcgaatgagacggtgcaaccgatggcatttactggtcaaccacaaaaagatggttttcgtcgaggatctactgcttctagaaaatcgtatgaaagtacgagatccttagggtattccgagaaagatatttattgtgacttggattctgaagaaataaggatccagagagaattgacaagaaaaactattctttctgaactcgaacaaaaagcacaaaatgaagcatttgatttcccaaacttaccagaatcagcagtccctgtagacaatgccggcgaagagtttgccgatatagatcccgagcttgtgacttgggacgggtatgacgaccctgaagatcctagaaactggtcaattgcaactaaactgtacctcatagcatttgtgtctctctacaccgttgtatcgccaatgtcatcgtcaatgccttctcccgcagtggaacacatatccaaagactttggtatcacctcaaacgttgttcaggctatgatgatatctatacaaattcttgcatgggcaatgggtcctttaattattgccccacttagtgaaaatgatttattcggaagaaaagtggttctcgatgtttcgatttggatgtcattattcttcaacattggctgtgctttctctcagaacactgctcagatgatggtattcaggtttgttggcggtctcttcggttctagtcctatcaatgttggtgctggagtgatttctgatctctttgaagccaaacagagaaccacagccttagcagggttctcccttgcaccgctattgggacctgttatagcaccagttattgctgggtttattgtggaccataaagactggagatgggtgttctacattttgtgcattttcaacggtgctgtggccattgttggaaccattttctatcgcgagacttactcaccgaccttactcaaacaaaaagctcgcaggttaagaaaggaaacaggaaacaaaaacctacacacgatatatgaaatcgctgatggagagacctttcttagcaaagtcatgctcacgatgactcgtccagtcatgttgttgttcacacaccccatgattatagggcttggatcgttcatggcatttacctatgggttcatgtacttgatgattgttacatttcccgaaatattcaaggtcaaatacgggttttctctgagcattactggcctcatgtacatcccaatgggcgtagggttcatgctcggtgtcgttgtgtggactcttcttatcaacaagacttacactagattgtgtgaaaagaatggaggagagcaaaaacccgaatacagacttccatgtttgtttgcaacttccatcattatccccattggattggtttggtacggatggtcggcccagtacaaattgcactggataatgcccggaattggatctgcgatttttgcttttggtcttgttggtgtatttcagtcgcttcaaggttacttgatagacatgaatccccgattcgcagcctcatctgttgcggcagcagcattatttcggtcactctttgggtttgcgttcccacttttcgcatcaaagatgtacgctagactcaactacgggtggggtaacacgatgtgtgcatttattggcttggtgcttggagtcccatttccaatcttctgctacatctatggcgaaagagtgcgactttgggccaatcagagaatggagcaaagtcaagccaaacgagaccaaaaaaacttgcagcgcttaaagaggaaactcaaacaacaatag

SEQ ID NO: 152015 - protein, 609 aa, Pichia guilliermondii
MSTSVKSETLNSSHELSASSSNETVQPMAFTGQPQKDGFRRGSTASRKSYESTRSLGYSEKDIYCDLDSEEIRIQRELTRKTILSELEQKAQNEAFDFPNLPESAVPVDNAGEEFADIDPELVTWDGYDDPEDPRNWSIATKLYLIAFVSLYTVVSPMSSSMPSPAVEHISKDFGITSNVVQAMMISIQILAWAMGPLIIAPLSENDLFGRKVVLDVSIWMSLFFNIGCAFSQNTAQMMVFRFVGGLFGSSPINVGAGVISDLFEAKQRTTALAGFSLAPLLGPVIAPVIAGFIVDHKDWRWVFYILCIFNGAVAIVGTIFYRETYSPTLLKQKARRLRKETGNKNLHTIYEIADGETFLSKVMLTMTRPVMLLFTHPMIIGLGSFMAFTYGFMYLMIVTFPEIFKVKYGFSLSITGLMYIPMGVGFMLGVVVWTLLINKTYTRLCEKNGGEQKPEYRLPCLFATSIIIPIGLVWYGWSAQYKLHWIMPGIGSAIFAFGLVGVFQSLQGYLIDMNPRFAASSVAAAALFRSLFGFAFPLFASKMYARLNYGWGNTMCAFIGLVLGVPFPIFCYIYGERVRLWANQRMEQSQAKRDQKNLQRLKRKLKQQ

SEQ ID NO: 152016 - DNA, 1698 bp, Candida albicans
  CDS (1)..(1698): transl_table=12
atgcattacagatttttgagagttagttttgttggtagagtgacttatcatttatcgaaacataaatactttgcccatccagaagaagctaaaaattatattatccccgagaaatatttagccgattacaaaccaactcttgctgatgatacaagtataaattttgaaaaagaagaaatagataatcaaggtgaacccaattcaagtcaatcatcatcttctaataacacaatagtcgacaacaacaacaataataatgataatgatgttgatggagataaaatagttgtcacttgggatggtgatgatgatcccgaaaaccctcaaaattggccaactttacaaaaagcatttttcattttccaaatttcatttttgacaacttcagtttatatgggatcagcagtttatacccctggtattgaagaattaatgcatgattttggtattggaagagtcgtagctacattacctttaacattatttgttattggttatggtgttggcccattggttttcagtccgatgtcagaaaatgctatatttggtcgtacatccatatatatcataacattatttttatttgtcatactacaaattcccactgctttggttaataatattgctggtttatgtatattgagattcttgggtggattctttgctagtccttgtttggctactggtggtgcaagtgttgctgatgtggttaaattttggaatttaccagttgggttagccgcttggagtttgggtgccgtttgtggtcctagttttggtccattctttggttcaattttaactgtcaaagccagttggagatggactttttggttcatgtgtatcatttctgggttttcatttgttatgttgtgtttcactttacctgaaacttttggcaaaacattattatatcgcaaggctaaaagattgagagccatcaccggtaacgacagaatcacaagtgaaggagaaattgaaaatagcaaaatgacaagtcatgaattgatcattgatacattatggaggccattagaaatcaccgttatggaaccagttgttcttttaattaacatttacattgccatggtgtacagtattctttacttgtttttcgaagttttcccaatttatttcgttggagttaaacatttcaccctcgttgaattgggtaccacatatatgtcgattgttattggtattgtcattgctgccttcatttatattccagttattagacaaaaattcaccaaaccaattttgcgtcaagaacaggttttccccgaagtgtttattccaattgccattgttggtggtatcttgttaacttcaggtcttttcatttttggttggtcagcaaatagaaccactcattgggtgggtccattgtttggtgctgctactactgcttctggtgcatttttgattttccaaacattattcaatttcatgggtgcttcatttaagcctcattatattgcttcagtttttgcatcaaatgatttgttcagatcagtcattgcatcagtgttcccattatttggtgctcctttgtttgacaatttggctacccctgaatatccagttgcttggggtagttccgtgttgggtttcatcacccttgttatgattgctattccagttttgttttacttgaacggaccaaaattgagagcaagatctaagtatgctaattag

SEQ ID NO: 152017 - protein, 565 aa, Candida albicans
MHYRFLRVSFVGRVTYHLSKHKYFAHPEEAKNYIIPEKYLADYKPTLADDTSINFEKEEIDNQGEPNSSQSSSSNNTIVDNNNNNNDNDVDGDKIVVTWDGDDDPENPQNWPTLQKAFFIFQISFLTTSVYMGSAVYTPGIEELMHDFGIGRVVATLPLTLFVIGYGVGPLVFSPMSENAIFGRTSIYIITLFLFVILQIPTALVNNIAGLCILRFLGGFFASPCLATGGASVADVVKFWNLPVGLAAWSLGAVCGPSFGPFFGSILTVKASWRWTFWFMCIISGFSFVMLCFTLPETFGKTLLYRKAKRLRAITGNDRITSEGEIENSKMTSHELIIDTLWRPLEITVMEPVVLLINIYIAMVYSILYLFFEVFPIYFVGVKHFTLVELGTTYMSIVIGIVIAAFIYIPVIRQKFTKPILRQEQVFPEVFIPIAIVGGILLTSGLFIFGWSANRTTHWVGPLFGAATTASGAFLIFQTLFNFMGASFKPHYIASVFASNDLFRSVIASVFPLFGAPLFDNLATPEYPVAWGSSVLGFITLVMIAIPVLFYLNGPKLRARSKYAN

SEQ ID NO: 152018 - DNA, 1698 bp, Candida albicans
  CDS (1)..(1698): transl_table=12
atgcattacagatttttgagagatagttttgttggtagagtgacctatcatctatcaaaacataaatatctcgcccatccagaagaagctaaagattatattgtccccgagaaatatttagccgattacaaaccaactcttgctgatgatacaagtataaattttgaaaaagaagaaatagataatcaaggtgaacccaattcaagtcaatcatcatcttccaataacacaatagtcgacaacaacaacaataataatgataatgatgttgatggagataaaatagttgtcacttgggatggtgatgatgatcccgaaaaccctcaaaattggccaactttacaaaaagcatttttcattttccaaatttcatttttgacaacttcagtttatatgggatcagcagtttatacccctggtattgaagaattaatgcatgattttggtattggaagagtcgtagctacattacctttaacattatttgttattggttatggtgttggcccattggttttcagtccgatgtcagaaaatgctatatttggtcgtacatccatatatatcataacattatttttatttgtcatactacaaattcccactgctttggttaataatattgctggtttatgtatattgagattcttgggtggattctttgctagtccttgtttggctactggtggtgcaagtgttgctgatgtggttaaattttggaatttaccagttgggttagccgcttggagtttgggtgccgtttgtggtcctagttttggtccattctttggttcaattttaactgtcaaagccagttggagatggactttttggttcatgtgtatcatttctgggttttcatttgttatgttgtgtttcactttacctgaaacttttggcaaaacattattgtatcgcaaggctaaaagattgagagccatcaccggtaacgacagaatcacaagtgaaggagaaattgaaaatagcaaaatgacaagtcatgaattgatcattgatacattatggagaccattagaaatcaccgttatggaaccagttgttcttttgattaacatttacattgccatggtgtacagtattctttacttgtttttcgaagttttcccaatttatttcgttggagttaaacatttcaccctcgttgaattgggtaccacatatatgtcgattgttattggtattgtcattgctgcctttatttatattccagttattagacaaaaattcaccaaaccaattttgcgtcaagaacaggttttccccgaagtatttattccaattgccattgttggtggtatcttgttaacttcaggtctctccatttatggttggtcagcaaataaaaccactcattgggtgggtccattgtttggtgctgctactactgcttctggtgcatttttgattttccaaacattattcaatttcatgggtgcttcatttaagcctcattatattgcttcagtttttgcatcaaatgatttgttcagatcagtcattgcatcagtgttcccattatttggtgctcctttgtttgacaatttggctacccctgaatatccagttgcttggggtagttccgtgttgggtttcatcacccttgttatgattgctattccagttttgttttacttgaacggaccaaaattgagagcaagatctaagtatgctaattag

SEQ ID NO: 152019 - protein, 565 aa, Candida albicans
MHYRFLRDSFVGRVTYHLSKHKYLAHPEEAKDYIVPEKYLADYKPTLADDTSINFEKEEIDNQGEPNSSQSSSSNNTIVDNNNNNNDNDVDGDKIVVTWDGDDDPENPQNWPTLQKAFFIFQISFLTTSVYMGSAVYTPGIEELMHDFGIGRVVATLPLTLFVIGYGVGPLVFSPMSENAIFGRTSIYIITLFLFVILQIPTALVNNIAGLCILRFLGGFFASPCLATGGASVADVVKFWNLPVGLAAWSLGAVCGPSFGPFFGSILTVKASWRWTFWFMCIISGFSFVMLCFTLPETFGKTLLYRKAKRLRAITGNDRITSEGEIENSKMTSHELIIDTLWRPLEITVMEPVVLLINIYIAMVYSILYLFFEVFPIYFVGVKHFTLVELGTTYMSIVIGIVIAAFIYIPVIRQKFTKPILRQEQVFPEVFIPIAIVGGILLTSGLSIYGWSANKTTHWVGPLFGAATTASGAFLIFQTLFNFMGASFKPHYIASVFASNDLFRSVIASVFPLFGAPLFDNLATPEYPVAWGSSVLGFITLVMIAIPVLFYLNGPKLRARSKYAN

SEQ ID NO: 152020 - DNA, 1695 bp, Candida albicans
  CDS (1)..(1695): transl_table=12
atgcattacagatttttaagagatagttttgttggtagagtgacttatcatttatcgaaacataaatactttgcccatccagaagaagctaaagattatattgtccccgagaaatatttagccgattacaaaccaactcttgctgatgatacaagtataaattttgaaaaagaagaaatagataatcaaggtgaacccaattcaagtcaatcatcatcttccaataacacaatagtcggaaacaacaacaataatgataatgatgttgatggagataaaatagttgtcacttgggatggtgatgatgatcccgaaaaccctcaaaattggccaactttacaaaaagcatttttcattttccaaatttcatttttgacaacttcagtttatatgggatcagcagtttatacccctggtattgaagaattaatgcatgattttggtattggaagagtcgtagctacattacctttaacattatttgttattggttatggtgttggcccattggttttcagtccgatgtcagaaaatgctatatttggtcgtacatccatatatatcataacattatttttatttgtcatactacaaattcccactgctttggttaataatattgctggtttatgtatattgagattcttgggtggattctttgctagtccttgtttggccactggtggtgcaagtgttgctgatgtggttaaattttggaatttaccagttgggttagccgcttggagtttgggtgccgtctgtggtcctagttttggtccattctttggttcaattttaactgtcaaagccagttggagatggactttttggttcatgtgtatcatttctgggttttcatttgttatgttgtgtttcactttacctgaaacttttggcaaaacattattgtatcgcaaggctaaaagattgagagccatcaccggtaacgacagaatcacaagtgaaggagaaattgaaaatagcaaaatgacaagtcatgaattgatcattgatacattatggagaccattagaaatcaccgttatggaaccagttgttcttttgattaacatttacattgccatggtgtacagtattctttacttgtttttcgaagttttcccaatttatttcgttggagttaaacatttcaccctcgttgaattgggtaccacatatatgtcgattgttattggtattgtcattgctgcctttatttatattccagttattagacaaaaattcaccaaaccaattttgcgtcaagaacaagttttccccgaagtatttattccaattgccattgtcggtggtatcttgttaacttcaggtcttttcattttcggttggtcagcaaatagaaccactcattgggtgggtccattgtttggtgctgccactactgcttctggtgcatttttgattttccaaacattattcaatttcatgggtgcttcatttaagcctcactatattgcttcagtttttgcatcaaatgatttgttcagatcagtcattgcttcagtgttcccattatttggtgctcctttgtttgacaatttggccacccctgaatatccagttgcttggggtagttccgtgttgggtttcatcacccttgttatgattgctattccagttttgttttacttgaacggaccaaagttgagagcaagatctaagtatgctaattag

SEQ ID NO: 152021 - protein, 564 aa, Candida albicans
MHYRFLRDSFVGRVTYHLSKHKYFAHPEEAKDYIVPEKYLADYKPTLADDTSINFEKEEIDNQGEPNSSQSSSSNNTIVGNNNNNDNDVDGDKIVVTWDGDDDPENPQNWPTLQKAFFIFQISFLTTSVYMGSAVYTPGIEELMHDFGIGRVVATLPLTLFVIGYGVGPLVFSPMSENAIFGRTSIYIITLFLFVILQIPTALVNNIAGLCILRFLGGFFASPCLATGGASVADVVKFWNLPVGLAAWSLGAVCGPSFGPFFGSILTVKASWRWTFWFMCIISGFSFVMLCFTLPETFGKTLLYRKAKRLRAITGNDRITSEGEIENSKMTSHELIIDTLWRPLEITVMEPVVLLINIYIAMVYSILYLFFEVFPIYFVGVKHFTLVELGTTYMSIVIGIVIAAFIYIPVIRQKFTKPILRQEQVFPEVFIPIAIVGGILLTSGLFIFGWSANRTTHWVGPLFGAATTASGAFLIFQTLFNFMGASFKPHYIASVFASNDLFRSVIASVFPLFGAPLFDNLATPEYPVAWGSSVLGFITLVMIAIPVLFYLNGPKLRARSKYAN

SEQ ID NO: 152022 - DNA, 2007 bp, Aspergillus oryzae
  CDS (1)..(2007)
atggacccagaaaatcaatccgaatggaccaagccagcttgtgaacggcacatacccttttggcgccaagtgatagaccaaggagcaattactcaggatgttctgcatcataattatcctgggtcggggacggaaacagaacccttcctagtctcctggctgccagatgaccccagaaaccctatgctcttcacaacattcaagaaggtcggcatcacagtcgtcgtctccacagcaacattggccgttgccctcgcttcctcagcatattctggatctaccaaacaagtgatggagggcttggacgtcggcacggaggttgcaacgctgggactatcgctttttgttatcggctttgcactcggaccattgttctgggccccgctaagcgagttcattggtcgccaatatcccttcattgtctcatttggcgcgatgacagtctttttggctggatgtgccggcgcacagaatatacagaccttgttggttctgcgttttctagcaggcacagcgggatcatctccactgacaaatgccgggggtgtgatcagcgatatgtttcgagctgagcaacggggacttgctctatgcctctttgcagcagcacccttcatggggcctgttattggaccggtcattggtggatttctgggaatgaatgctggatggaaatgggtggaaggcttcctggctgcgctttcaggagttttgtggcttatgatggcatgcttcgtccctgaaacgtacgcgccagttcttctccgccaaagagcaaagcgtctttcacagaaaactggcatggtttatcgctcaaagctagatgtcgagaatgaaggttccgtttctttgaaacggatgttcgccacctctttattgagaccttgggttctgctatttcgggagcctattgtatttatgttatctatatacatcgctatcatttatggtgcactcttcatgatgttcgccgcgtttccgattgtgtaccaacgtggccggggctggaaccaaggcgtgggaggactcgccttcatgggcattgctgtgggtatgattgtcggaacaatctacacaattccagacaacagacgctacacgcgaacggtcaaaagacatggagggttcgcgcctccagagtcacgcctgccaccggtgatgctctctgcagtgtgtattcctgtcggtctcttttggttcgcatggaccaactccccgtccgttcattggatggccagtatagcagccggcgttcctttcggctgtgggatcgttcttctatacctaggcatcatgggctaccttatcgattcttatacaattttcgcggcgtctgtcttggcggctaatgcggttctgcgatctctgtttggagggattttcccgctcttcacggcgtacatgtatgaaggactggggattcattgggcctcctcaatccccgcctttcttacggtcgcatgtatgccttttccatttattttctaccgatacggggaagcgattcgcaagcgatgtccgtattctgcccagtcagaagtgtacgtgcgaaagttacaggtggcagcgcagcagagcgaaaatgtctccgtcgcagacgcagacaccgacgccgtccacgccgccatcgacggccgagtctggttcttcccggagtccgacgtcgcgaacggatgggatacgcctgctggtaacggcagtgaactatggtaccagatcagcttcgagtcttcaaccaagactgcgagcgcggagattgcctttttcgctaatagcacgcaaggctttgatgctcctgagaaatatagtattcaggtcaacgtatccggcgagtgggcagaagtgtcaaacgcgaattatagttccccggttgcgaacggaattacccgggccacttgggatggcgtcgacgcggataagatccgacttgttttcgcgccgcaagaggagaaaaaggttcggctggtggagttcaaggttttcggggaggttgtggctgagaattga

SEQ ID NO: 152023 - protein, 668 aa, Aspergillus oryzae
MDPENQSEWTKPACERHIPFWRQVIDQGAITQDVLHHNYPGSGTETEPFLVSWLPDDPRNPMLFTTFKKVGITVVVSTATLAVALASSAYSGSTKQVMEGLDVGTEVATLGLSLFVIGFALGPLFWAPLSEFIGRQYPFIVSFGAMTVFLAGCAGAQNIQTLLVLRFLAGTAGSSPLTNAGGVISDMFRAEQRGLALCLFAAAPFMGPVIGPVIGGFLGMNAGWKWVEGFLAALSGVLWLMMACFVPETYAPVLLRQRAKRLSQKTGMVYRSKLDVENEGSVSLKRMFATSLLRPWVLLFREPIVFMLSIYIAIIYGALFMMFAAFPIVYQRGRGWNQGVGGLAFMGIAVGMIVGTIYTIPDNRRYTRTVKRHGGFAPPESRLPPVMLSAVCIPVGLFWFAWTNSPSVHWMASIAAGVPFGCGIVLLYLGIMGYLIDSYTIFAASVLAANAVLRSLFGGIFPLFTAYMYEGLGIHWASSIPAFLTVACMPFPFIFYRYGEAIRKRCPYSAQSEVYVRKLQVAAQQSENVSVADADTDAVHAAIDGRVWFFPESDVANGWDTPAGNGSELWYQISFESSTKTASAEIAFFANSTQGFDAPEKYSIQVNVSGEWAEVSNANYSSPVANGITRATWDGVDADKIRLVFAPQEEKKVRLVEFKVFGEVVAEN

SEQ ID NO: 152024 - DNA, 1830 bp, Aspergillus oryzae
  CDS (1)..(1830)
atggcttccgaagactgtatccacgaagccccccagccccagggaataccgtattggcgcctactcaccgaccaaggcgtcgtcacctccgaaataatcgactacccttacaagggttccggcacagatgatgacccctacatcgtggaatggatccccaatgatccccgcaatccgatgttgcttaacaagtccctgaaatgggcttacactatcaccgttgcatttgccacgttcggtgtttcgctttcctcctccgcctatgcaggcggcatccaagaagtcatcaagcacttcggaatcggcgaggaagtggccacgctcggcgtgtcactgttcgtcctgggctttgcagttggcccgttagtatgggcgcctctgagtgaactgatcggtcgccagatcgttttcttcgtctcatatggcgctcttgcattcttctgtgccggcgccgccggtgcacaaaatagctggacgttgatcatcctgcgcttcttcgctggctcattcggatcctcaccgttaacaaacgccggaggcgtcatcgccgatatcttcccagcagaagaacgaggtctagcaacaagtctattcgccggcgcgccgttcctaggtccaaccctaggccccgtaataggcggcttcctcggtgaaaacgccggctggcgctgggtacaaggcttcctcgcaaccttcaccggcctaatctggatcgtggaatcgctcctggtgcccgaaacctacgcaccactactcctccgcaaacgcgccgcccgcctcacaaccctaaccggcaaagtccaccgaagcaaactcgagctcgaacgcggtaaagtaaccatgacaagcgctttcggcgccgcccttctccgcccctggatcctcctcttcgccgaacccatcgtcctccttctctcaacctacatggccatcatctacggcaccctctacatgctcttcgacgccttcccaatcgtcttccaacagctccgcggctggtccgaaggcgtcggttctctccccttcctcggcgtcatgatcggcatgatgctcgccgtcgctctaaacatgtacgacaacaaacgctacgtcgcaatccacaaagcccaccacggcttcgcgccccccgaagcccgtctcccccccaccatgctcggtagcatcgccatccccatcggcctcttctggttcgcctggactaacgcaccccccgtccactggatagtcagtatcatcgccgccgcccccttcggcttcggtatggttcttgtcttcctcaatatcatgtcctatcttatcgatgcatatactatctacgctgctagcgtgctggccgcaaactcaattatcagatcctgtttcggtgccggattccccctcttcacgacttacatgtatcgcaatctgggcgtccattgggcttcctgcattcctgcttttctggctcttgcttgtgtgccttttccctttgttttttataagtatggggctgttatacggaggaagtgtaaatatgccgccgaggcggatgattttatgaggaggttggcggagaagacggtctctctgggggaggaggagaaggctgttgatgaggaggttagggtccaggctgaggggagggggagtgctgatggaggacaggatttggggaggttggagtctgggggtaggagctcgctgtcgactatgcgtgacgggaatgcgggttatgaggctaatccgtatgatatcgatcgtgttaatacgaggaattcggccatctcgagacggtccaggtccaggtctaggtctgctaaggggaggaagagggggtttttggggctttga

SEQ ID NO: 152025 - protein, 609 aa, Aspergillus oryzae
MASEDCIHEAPQPQGIPYWRLLTDQGVVTSEIIDYPYKGSGTDDDPYIVEWIPNDPRNPMLLNKSLKWAYTITVAFATFGVSLSSSAYAGGIQEVIKHFGIGEEVATLGVSLFVLGFAVGPLVWAPLSELIGRQIVFFVSYGALAFFCAGAAGAQNSWTLIILRFFAGSFGSSPLTNAGGVIADIFPAEERGLATSLFAGAPFLGPTLGPVIGGFLGENAGWRWVQGFLATFTGLIWIVESLLVPETYAPLLLRKRAARLTTLTGKVHRSKLELERGKVTMTSAFGAALLRPWILLFAEPIVLLLSTYMAIIYGTLYMLFDAFPIVFQQLRGWSEGVGSLPFLGVMIGMMLAVALNMYDNKRYVAIHKAHHGFAPPEARLPPTMLGSIAIPIGLFWFAWTNAPPVHWIVSIIAAAPFGFGMVLVFLNIMSYLIDAYTIYAASVLAANSIIRSCFGAGFPLFTTYMYRNLGVHWASCIPAFLALACVPFPFVFYKYGAVIRRKCKYAAEADDFMRRLAEKTVSLGEEEKAVDEEVRVQAEGRGSADGGQDLGRLESGGRSSLSTMRDGNAGYEANPYDIDRVNTRNSAISRRSRSRSRSAKGRKRGFLGL

SEQ ID NO: 152026 - DNA, 1560 bp, Aspergillus oryzae
  CDS (1)..(1560)
atggaatccgccgactgtaaggaatcaaactcaagcgccacaaccatgacggagaaggagcccggacgtgaacagccggacctggagcagggcaagacacagatggcagaaacatctcacctctaccctgaaacagacctcgaccgcggagttgtgggatgggaaggacaagatgatcctgcgaatccgctcaacttcgcccccggcaagaaatgggctctactggggctcatcagcgcatttaccttcgttagtccgcttgcgtcgagcatgttctccccagccgtcagctatatggctgccgacttcaaagaaaccgatgaaacgatcatttcatttaccgtcagcatctaccttctgggttatgtgttcggtcccctagttctagccccgctaagtgagatctacggacgacggatcgtcctcagcatatcgaactggttctttgtcgtctggcaaattggatgtgcgctcgccccgaatattgcatctttgatcgtgtttcggctcttcgcaggggtcggaggatcagcatgcctaacgttaggtgcgggggtcatcgcagatctctttgagccccagcaacgaggaaaggcaacatccatttggggggtgggacctctgatcggtccggtcgcgggtcccatagccggaggctttctcggtgaagaagtcggctggcggtgggtgttttgggtgctgttgattgtgggaggggctacggcattgggaattgagatcctcaaccgggagacgtacgcccccgtcatcatccggcggaaaaccgccaagctatccaaggagctggggcgaacggacctacgcagcgcatacgagctcaatagagggcaagcctccacaggtcaatttctgaaacaaagtctggtgcggcctatgttgctgttagtcaagtcgccaattgtgttactgctgtcgacgtatatgtctctcatctatggccttctctatctgttcttcacgaccatttcgagcgtcttcacggaacagtatgggttctcaaccggcctgtctggcttggcttatttgggtatcggtgtcggctttatgcttggtcttgtctttgtagcgggcacgaacgaccggatcatgctgaagctcgcagctcgaaatggaggcaagactgagccggagatgcgactccccttgatgatcatcttctcctgtatcctgcctatcagcttcttctggtatggctggacggccgacaagcatgtccactggattgtacccattattggaatggcaccgtttggcatcggaatgatgggtgtttatcttcctatccagacatacatcatcgattcctatcccgcctacgccgcatcagcgaacgcaaccttgacggcgacacgatctctcgtgggtgcattgcttcccttggccggaccgtcgatgttcgaagcgcttggccttggctgggggaattccctcctcggatttctggcactggctttcgttccgatccctatcgtgtttaccaagtggggcaagctcatcagagagaaataccccgtaaatttcgacaaggccaacgcttga

SEQ ID NO: 152027 - protein, 519 aa, Aspergillus oryzae
MESADCKESNSSATTMTEKEPGREQPDLEQGKTQMAETSHLYPETDLDRGVVGWEGQDDPANPLNFAPGKKWALLGLISAFTFVSPLASSMFSPAVSYMAADFKETDETIISFTVSIYLLGYVFGPLVLAPLSEIYGRRIVLSISNWFFVVWQIGCALAPNIASLIVFRLFAGVGGSACLTLGAGVIADLFEPQQRGKATSIWGVGPLIGPVAGPIAGGFLGEEVGWRWVFWVLLIVGGATALGIEILNRETYAPVIIRRKTAKLSKELGRTDLRSAYELNRGQASTGQFLKQSLVRPMLLLVKSPIVLLLSTYMSLIYGLLYLFFTTISSVFTEQYGFSTGLSGLAYLGIGVGFMLGLVFVAGTNDRIMLKLAARNGGKTEPEMRLPLMIIFSCILPISFFWYGWTADKHVHWIVPIIGMAPFGIGMMGVYLPIQTYIIDSYPAYAASANATLTATRSLVGALLPLAGPSMFEALGLGWGNSLLGFLALAFVPIPIVFTKWGKLIREKYPVNFDKANA

SEQ ID NO: 152028 - DNA, 1710 bp, Aspergillus oryzae
  CDS (1)..(1710)
atggcacggttgcagaattggtggactacgtgggacgagattcatgacaggctggctccactggaagatactactagctatagacccggcgcggccttcccaggtgataaggacacaagtgcggtatcgatgccaagtagcgacaaagggagacatgacgaggtggaggctgggccttccataatgtccaagatgagcagtaatagagcagacgagcattacaagttggtcaaattgtcggagcaggagacacttgttgaattcaaagaggggtcatcagcgaacccgaacaattgggactttaataaaaaggtgtacaatgttctcatagcgttgttcgttgttctcaatagcggtgtatcatcctctctacctagcaatgcggtccctgctatcatggaagatttcgaccagcccggtgatggacagaaggtcttaccaacagccatattccttatcggatatgttgtaggtcctctagcctttagcccattaagtgagactattggtcggaagccggttctcacttggactttcactgtctttgtcctggcaactcttgcctgtgctttggcaccgaattggccctcactcctagtttttcgagctatctgcggcactatgggtgcggcgccacagacagtgatcggtggagtatacgcggatatgttttcagacctacggagccggggacgggtgatggctttctatatgtcggctgcaagcttcggtccaattgttggaccgataatctctgggtgttcagtccagtacggatggcgatggacctttcgcattgacctaatcttcgccggtatttcctggatagggcttatgtttatgtcagaaacctttgcacccgtcattctgaagcaacgggctgccaggctaagaaaggagtcggggtgcaattcttatctgtctcggcaagagctgcagaatggaggctttcgatacagcactactcagatcatcacccgtccaatcactatgcttgtctttgaacccatcattctgttcacggctctctacatctctctcgcatacagtctggtctttttctacttccaggcgtatcccattatctttgaaggtacatacaacttcgacgtccaaaccacatccctcacctacatccccaaccgaaaaaaaaaagtcggcatcggcgccgcctcctcaggcctaatctcactatactacgacacaatctacgaaaaagccaaaaaagccggaaaatcctggaccaccagcccggaactgcaccgactccccatatcctgcatcgccggtccctgcctaacaatcagtctattctggctcggctggaccgcaaaccgcaacatccactggatcgcacccgtgctatccggcctcctcttcggcgtcggctaccaaatgatcttcatttcgctactcacgtacgtcacagacgcgtacaagatttattcagcgagcgctctcgccgcatcggttatcatgcggagtatagtgggtgcgctgttcccgcttgctgcggatccgttgtattcgactttgggtgttgggtgggctacctctgtcttggggtttgctagtttggcgtgtattccgattccctttgcgttgctttatgcggggccttggattaggaagaggagtccgttttgtcagcggttgttggaggaggattctttgaaggagagggcggagaggtcggcgggggatgtttag

SEQ ID NO: 152029 - protein, 569 aa, Aspergillus oryzae
MARLQNWWTTWDEIHDRLAPLEDTTSYRPGAAFPGDKDTSAVSMPSSDKGRHDEVEAGPSIMSKMSSNRADEHYKLVKLSEQETLVEFKEGSSANPNNWDFNKKVYNVLIALFVVLNSGVSSSLPSNAVPAIMEDFDQPGDGQKVLPTAIFLIGYVVGPLAFSPLSETIGRKPVLTWTFTVFVLATLACALAPNWPSLLVFRAICGTMGAAPQTVIGGVYADMFSDLRSRGRVMAFYMSAASFGPIVGPIISGCSVQYGWRWTFRIDLIFAGISWIGLMFMSETFAPVILKQRAARLRKESGCNSYLSRQELQNGGFRYSTTQIITRPITMLVFEPIILFTALYISLAYSLVFFYFQAYPIIFEGTYNFDVQTTSLTYIPNRKKKVGIGAASSGLISLYYDTIYEKAKKAGKSWTTSPELHRLPISCIAGPCLTISLFWLGWTANRNIHWIAPVLSGLLFGVGYQMIFISLLTYVTDAYKIYSASALAASVIMRSIVGALFPLAADPLYSTLGVGWATSVLGFASLACIPIPFALLYAGPWIRKRSPFCQRLLEEDSLKERAERSAGDV

SEQ ID NO: 152030 - DNA, 1569 bp, Aspergillus oryzae
  CDS (1)..(1569)
atgagtctcccactatggagcgagagcagtgagagaggctctcagacagataacactgtggaaatcagcgacatcgaggcgcagagtaatatttccgagaagaggtcagagccaagtagacctttgtcgatgggagaagggaaagctttccctccactattaccaaacgaagatgattatatcgtcacattcgacggcccggacgacccggaacatccgtttaactggagctttacagtgaagctctatacctcggttatggtgtgctttggcacatttatctcatcgtttgctagcgcggtgtttgccccagggaccgctggcgtagccaaggcatttggagtgagtaccgaggtcgggattcttggtaccactcttttcgttctcgggtttgcatcgggcccattgatatgggcgccatcttcagaattaataggacggcggttacccttgactgtgggcatgttcggtgttgcggttttcagcattgcatcggctgtggcgaaagatattcaaactgttatcatctgtcgcttttttgctgggctatttggcgccagccagctctcggtagttcctgccgttctatcggaccttttcaataatattcatcgtgggcctgctatcacggtttactcgctggccgtgtttgtaggcccctttagcggcccattcattggggggttcatctcctccagcttcctcggctggcgatggacactctatattcctgctttcatgggcttcgcatgttgcagtgtattcgtacttttcttgaaagaaacatatgctccatgcatcctcatcccaaaggcagaagctctccgacaacagacctccaattggggggtccatgctaagcaagagatggttaaagtcgactttcaagagttgcttgaaaagtattttacgcggccattgcgaatgctggtcaccgagccgattatcttggttgtctctctctacatgtccttcatctatggactcgtgtacgcgctgctggtagcctatccttacgtatttgagtcagtctacggaatgaatcccggactcagcggcctcaccttttttgggcttatcattggtcaagtgctagcatgcggatttgttctgtctcaacagtccatctacgtgaagaagctaatagcaaacaaaaacgtacctgtccccgaatggcggttgccgcctgccattatcggtgctccaattttcaccgtgggagtattctggttcagttggacaggctttacgtcgtcaattcactggcttgctccaactgcctcaggagttctgatcgggttcgggatcctgtgtatcttccttccctgtttcaactacttggtcgattcgtaccttccgctcgccgcatccaccgttgctgcgaatattattctccgatctagcgtcgccgccgggtttcccttgtttgccaagcagatgtttaagaatctcggggtacagtgggcaggtaccctgataggatgtttggcggccattatgattccgatccctgtggtgttcaagaagtatgggccgcgactgaggggaaagtcgaaactgatgccctaa

SEQ ID NO: 152031 - protein, 522 aa, Aspergillus oryzae
MSLPLWSESSERGSQTDNTVEISDIEAQSNISEKRSEPSRPLSMGEGKAFPPLLPNEDDYIVTFDGPDDPEHPFNWSFTVKLYTSVMVCFGTFISSFASAVFAPGTAGVAKAFGVSTEVGILGTTLFVLGFASGPLIWAPSSELIGRRLPLTVGMFGVAVFSIASAVAKDIQTVIICRFFAGLFGASQLSVVPAVLSDLFNNIHRGPAITVYSLAVFVGPFSGPFIGGFISSSFLGWRWTLYIPAFMGFACCSVFVLFLKETYAPCILIPKAEALRQQTSNWGVHAKQEMVKVDFQELLEKYFTRPLRMLVTEPIILVVSLYMSFIYGLVYALLVAYPYVFESVYGMNPGLSGLTFFGLIIGQVLACGFVLSQQSIYVKKLIANKNVPVPEWRLPPAIIGAPIFTVGVFWFSWTGFTSSIHWLAPTASGVLIGFGILCIFLPCFNYLVDSYLPLAASTVAANIILRSSVAAGFPLFAKQMFKNLGVQWAGTLIGCLAAIMIPIPVVFKKYGPRLRGKSKLMP

SEQ ID NO: 152032 - DNA, 1686 bp, Aspergillus oryzae
  CDS (1)..(1686)
atgagtcacggccttgtggaaaaggcttcgaaggagacggtcagcgcgacctctggggggtatctggctccctttccgcctcgaactgtcgacctcgagtcgcagcgccgtcctagtaccctccatgatagtgtcgagctcgagcgtatcaacacatctcgtctacagcagcaacttaccgttggatcgaatcgaagccgcatacctcgagagcaatggctgccgatgggagcaggaaaagactatcctcctccgctaccggacgctgaggaatacgtggtcgagttcgaaggatcggacgaccctatgcatccccagaactggcctatgagaaggcgggttcttatagggtcgctcttgacgttctgtgcacttgtcacggcgtatgttagtgctattttcgccacggcctcggagggtgttatgaaggagttcggattcggcaaagaagtggctgcgttgggtacaacgctatatgtgctggggttctctgccgggccgacgatatgggcgccggcgtctgagttgatcggacgacgatggcccatgttgattggcatgttcggattcgatatcttcacgatcgcctgcgcgacggcgaaagacacgcaaacgattatgttgacacgcttcttcgcggggttttgcgccgctagtgtcatcgctcttgttccggccagtctgtcggacctgttcaataaccatcatcgaggtgtcgcgatcgctgtgtatacgatgtctgtgtttaccggtcctttcaccgcacctttcatcggcgggttcactgcagagagctatttaggctggcggtggacgttctatataccggcctttgtcgggttctttagcttgatcttgatggcgctgtttgcacaggagacgtacgtgcccgttgtattaatgcaaaaagcagccatcctgcgccgtcaaaccaggaactggggtatccacgcacggcaggatgaacacgagatcgatttccgggagctggtgaccaagaaccttgcgcggcctttcctgatcttgttcaccgagcccatcgccttccttctgaccttgtacatgtccttcatttatggactggcttatgcgctgctgtcggcctacccaattgtcttccaaggcacctatggcatgaccggtggtgtgagcggattaccattcataggattgattattggcgaaatagcgggcagtagtttcgttctttctcttcagaaatcgtactcgcgcaagttggaggccaatagtaatgtgcccgtacctgaatggcgcttacccccttgcatcgtgggtggtgttgcatttgcaggagggctcttctggtttggctggacaggctggaatccatcgattcattggatggctcccacggcggctggagtgatggtcggattcggcatcacgtcgatattcatgcaaggattcaattacctactggattcgtatctcaatttcgcggcatcggcgttcgcagcgaacaccatgatgcgatccatggtgggagcctgtttcccacttttcacgcgccagatgttcaacgacttgggcattcaatgggccggcactctgctcgggtgtatcgccgtagtgatgattccgatcccggtgcttttcctcgtattcgggcctcgactacgtcagaggagccggttggcaccagccatgggggtaaaacaggcgtag

SEQ ID NO: 152033 - protein, 561 aa, Aspergillus oryzae
MSHGLVEKASKETVSATSGGYLAPFPPRTVDLESQRRPSTLHDSVELERINTSRLQQQLTVGSNRSRIPREQWLPMGAGKDYPPPLPDAEEYVVEFEGSDDPMHPQNWPMRRRVLIGSLLTFCALVTAYVSAIFATASEGVMKEFGFGKEVAALGTTLYVLGFSAGPTIWAPASELIGRRWPMLIGMFGFDIFTIACATAKDTQTIMLTRFFAGFCAASVIALVPASLSDLFNNHHRGVAIAVYTMSVFTGPFTAPFIGGFTAESYLGWRWTFYIPAFVGFFSLILMALFAQETYVPVVLMQKAAILRRQTRNWGIHARQDEHEIDFRELVTKNLARPFLILFTEPIAFLLTLYMSFIYGLAYALLSAYPIVFQGTYGMTGGVSGLPFIGLIIGEIAGSSFVLSLQKSYSRKLEANSNVPVPEWRLPPCIVGGVAFAGGLFWFGWTGWNPSIHWMAPTAAGVMVGFGITSIFMQGFNYLLDSYLNFAASAFAANTMMRSMVGACFPLFTRQMFNDLGIQWAGTLLGCIAVVMIPIPVLFLVFGPRLRQRSRLAPAMGVKQA

SEQ ID NO: 152034 - DNA, 1815 bp, Aspergillus oryzae
  CDS (1)..(1815)
atggcagatacaggcgagcccgtcaagcctactcgcattccacactggcgccttatcgtcgaccaagggatacttactcaggaagttattgaccacccttacgcgggctccggcactgaagatgacccttatctcgtcacctggcttcccaatgatccacgaaatcctatgacttttccagatagccgaaaatggttctacacagtaacagtggcctgggcgaccttagcggtatcgctagtatcttctgcatacaccggcggtgtggaccaaattatggaacaatttaactgcggtacagaagtagccacactaggagtatccttattcgtggtgggattcgccatcggtccgttactctgggcgcccatgagcgagctatatggacgacagtatcttttcatcggcagttattgtgggttgactgtgttcaacgctgcttgtacagggtcaaagaatatctggtcccttatcatcttccgcttcttcgcaggttcttttggatcgtcgccgctaaccaacgctggcggcgtgattgcagatatgttcccagccagccagcgtggtatagcaatgagcgtgtttgcagctgccccattcttaggcccagtgcttggcccaattattggagggttcctaggcatgaaggaaggttggaagtgggtgatggggttcctagccatcttctcgggtgctctctggattgctggggcagtctgtgtcccggagacttacgcccctgtccttctgcagcggcgggcagcaaaactctctaaagttaccgggaaagtctaccaaagtaagatcgaggtagaccaaggaaaaaaaacacccaaggaagccttcaagatcgccctatctcgaccatggatcctattattccgtgaaccgatcgtgctcttgttgtcgatctatatggccattatttatggtaccctatatatgatgtttgcagcctttcccattgtttaccaaggccagcgaggatggaaccagggtgtttctggcctggctttcttgggaattatggttggaatgctccttgcggtagcctacacactctgggataataaacgttatattaatacccaggcacggcacaatggattcgcgccccccgaggctcgcctgcctccttgcctgattgcctcgattgtcatcccaattggtcttttctggtttgcctggacgaattacccatcaattcatttcatggccagtatcgcagcgggtgcgccattcggatttggtatggtgctggttttcctcagcttgatgaattatttgattgatgcctatacaatctttgctgcgtccgtgttggctgccaattccgtgcttcgttcaatcttcggtgctgttttcccgctcttcaccacatacatgtacaacgacctaggtgtgcactgggcctccagtatccctgcatttttagcactcgcgtgcgtcccgtttccgtttctcttttataaatacggcccggcgattaggacgcgatgcaagtatgcagcgcaatctgatgcttttatgaagaagttgatggaacaaactcgcgatgttcctgacgagacagatactgagaagaagtccgagaacaatgctacagaagggttgaaggaggtggatgacactgtgtctgagcccaccccagcaagctcgcaactggatgatctcccgtctgcctccaagtatgaccgaagaaagtctatagcatcacaggcgtcacgccggtctgagggggtaaattctcagactgtgtatgatgctaacccgtacgacattgatcgagtcaacacccgggagtccttcaaatag

SEQ ID NO: 152035 - protein, 604 aa, Aspergillus oryzae
MADTGEPVKPTRIPHWRLIVDQGILTQEVIDHPYAGSGTEDDPYLVTWLPNDPRNPMTFPDSRKWFYTVTVAWATLAVSLVSSAYTGGVDQIMEQFNCGTEVATLGVSLFVVGFAIGPLLWAPMSELYGRQYLFIGSYCGLTVFNAACTGSKNIWSLIIFRFFAGSFGSSPLTNAGGVIADMFPASQRGIAMSVFAAAPFLGPVLGPIIGGFLGMKEGWKWVMGFLAIFSGALWIAGAVCVPETYAPVLLQRRAAKLSKVTGKVYQSKIEVDQGKKTPKEAFKIALSRPWILLFREPIVLLLSIYMAIIYGTLYMMFAAFPIVYQGQRGWNQGVSGLAFLGIMVGMLLAVAYTLWDNKRYINTQARHNGFAPPEARLPPCLIASIVIPIGLFWFAWTNYPSIHFMASIAAGAPFGFGMVLVFLSLMNYLIDAYTIFAASVLAANSVLRSIFGAVFPLFTTYMYNDLGVHWASSIPAFLALACVPFPFLFYKYGPAIRTRCKYAAQSDAFMKKLMEQTRDVPDETDTEKKSENNATEGLKEVDDTVSEPTPASSQLDDLPSASKYDRRKSIASQASRRSEGVNSQTVYDANPYDIDRVNTRESFK

SEQ ID NO: 152036 - DNA, 1620 bp, Aspergillus oryzae
  CDS (1)..(1620)
atgcaagacaatcacttacgacgctcaagcgatgcagctcggaccctctcagggtccgggcaagacaccgattacttggatttacctgtacgccaagtcacccgcgatgccaatctagaagaatacacaacagaaaccgctgcgggtcaaatcatcaagcccgttcggtctgctgcttcagggaaaatggaggattggaagctagtaacatttactatcgacgacccggaaaatccgaagaattggtccaaggcgttcaaatggtattgtactatggtggttgcttttacttgcttcgtcgtcgcattcgcaagtagtgttattacggccgatatagaaggaccagctgaagagtttggtgtctctcgagaagtcagtctggttgtcgtcacggtctttgtcattggttttggtgttggtccaatggcgttcgcacccatgtcagagatgtttggccgtagaccggtctatgccctcacactcctcatagcggttatcttcatcattccttgtgcggtgtcgaagaatatcgggactctcatcgtgtgcagagcaattgacggcattgcttttagcgccccgatgactctggttggtggtactttagcggatctgtggaaaaatgaagagcgcggtgtccctatggcggccttctctgcaagccccttccttggtccggccattggtccgctcgcgggtggctacctggctgatgcggccgggtggagatggctctactggctgatgttgatccttgcattcgtcgcctgggtgctgatcaccttcactgtgcccgaaacctatgctccaacgatcctgaaacggagagccaagaaactcaggaagacgcagaacgactccaagtacgtgaccgaaacggaactagattctcggccgctgggtgagaaactgcgcatattcttcttccgcccgttccagctcttgtttctggaacccatcgtcttgttcatctcgatctacatgtccgtgctgtatggcctgctgtacatgttcttcgttgcgtacccaatcgtgtatcaaggtggaaaaggctggagtgccggatcgactggtcttatgttcattcccttggccatcggtgtcatcatgagcgcggcttgctctccatttattaacaagcactatctatcgctgtacgcaaagtatggcggaaagcccccagcagaggcacgcctgatccctatgatgttctcgtgctggtttattcctattggactttttatcttcgcatggacatcgtacccgcagatccactggttcggacctgccgtcggtggctggccggtaggtttcggctttattttcctgtacaactcggcgaacaactaccttgtcgatacgtaccagcatcaagcagcatctgcccttgccgcaaagacctttctccggtctatatggggagcgtccacagtgctctttactgagcagatgtatgaccgattgggtgaccaatgggctagtacattgctggctttcattgcgttggcctgctgcgccattccttatgttttctatttcaagggcgagtctattcgccgcttctcgcgatatgcctacaacgaagatgaagagaataccgggaaggtcgagaagagctaa

SEQ ID NO: 152037 - protein, 539 aa, Aspergillus oryzae
MQDNHLRRSSDAARTLSGSGQDTDYLDLPVRQVTRDANLEEYTTETAAGQIIKPVRSAASGKMEDWKLVTFTIDDPENPKNWSKAFKWYCTMVVAFTCFVVAFASSVITADIEGPAEEFGVSREVSLVVVTVFVIGFGVGPMAFAPMSEMFGRRPVYALTLLIAVIFIIPCAVSKNIGTLIVCRAIDGIAFSAPMTLVGGTLADLWKNEERGVPMAAFSASPFLGPAIGPLAGGYLADAAGWRWLYWLMLILAFVAWVLITFTVPETYAPTILKRRAKKLRKTQNDSKYVTETELDSRPLGEKLRIFFFRPFQLLFLEPIVLFISIYMSVLYGLLYMFFVAYPIVYQGGKGWSAGSTGLMFIPLAIGVIMSAACSPFINKHYLSLYAKYGGKPPAEARLIPMMFSCWFIPIGLFIFAWTSYPQIHWFGPAVGGWPVGFGFIFLYNSANNYLVDTYQHQAASALAAKTFLRSIWGASTVLFTEQMYDRLGDQWASTLLAFIALACCAIPYVFYFKGESIRRFSRYAYNEDEENTGKVEKS

SEQ ID NO: 152038 - DNA, 1650 bp, Aspergillus oryzae
  CDS (1)..(1650)
atgagcgccaccaatcgagatggtgcaacgcagcatgatttacaaagctcagctcgtctagacaaagaaaatgagggaccgatgcagtcttctgacatcaccttgcggtcagagtcctcctcttcgatcggtgaagaccccgaaaaggatgctgggggtactcggaacacagatctggacatgctggagagatcgatgtcaacaccacattcaagaaagggacacgaagagaaggcaccggagaaggacccgaatctggtagaatgggacggcccagatgatccagagaacccccagaacatgccaaaatggagaaaatgggttctaaccatgactctgtcctccttgacaatgtggatcactttcgccagcagtgtgttctcaacggcaaccttggtgacagctaaggagtacaacgtttcaaccgaagttatgactctagcgactagtttggtggtgttcggattcgcagttgggcctttgatgtggtcgcctctctcagaattatatggacggagaatcccattgttttctggctatgccatcttcgcgattttccaaataccggttgcagtggcacagaatgttgagacaattatgctgtgccgttttctcatgggggtgtttggttgctctcctctggctgtggtgggtggcgcaatggccgatttctgggaccctgtggatcgtgccgtggccattgcttgtttctcggctgcaacttttgttggacctgttatcggacctattgtgggtggtttcattacagaatcgcatcttggctggcggtggacagcttggatcactttgatagcctctgcttcgttcggtacctttgcgctgttaaccgtccccgaaacctatggcccagtcattcttcagaagcgtgctgctcgcctgcggcgggagactggtaactgggctttacattcgttcctggacgagcatcgcccaacagcatcagaaatcgtcacaaaatatcttctgcgcccgctccaaatgcttttcctcgaaccgatcctgttagctatgacgatctacctggcttttatctacggtattttgtatctgttcttcgaggcctacccggtctccttccaagaagttcgaggttggacgaatgggggtgtggcagggctaccattccttggtattatgattggagttctttgcggtgtcgccttgatcatctggcagacgaagacacgctttgcacgcaaactggagaaacatggcagggttgtgcccgaagagcgcctggttcccatgatgattgcttctgttctattgccagctggtctcttctggttcggatggacctcggatcccagtatctcatgggtgccccaggtaattgcaggtgtccccatcgggatgggtatcctggttatcttcatgcagggtcttaactacatcatcgacgtgtacatgatgtttgccaactcagctatcgccgccaacactctcgttcggagtggcctgggcggtgctttccccctctttgccgtgcagatgtaccatagattgggcgtagactgggcgtccagtctacttggattcctcacggttgctatgatacccattccggttgtctttttcttttacggcgcgaagattcgtgccatgagcaagttttcgccgaagttctga

SEQ ID NO: 152039 - protein, 549 aa, Aspergillus oryzae
MSATNRDGATQHDLQSSARLDKENEGPMQSSDITLRSESSSSIGEDPEKDAGGTRNTDLDMLERSMSTPHSRKGHEEKAPEKDPNLVEWDGPDDPENPQNMPKWRKWVLTMTLSSLTMWITFASSVFSTATLVTAKEYNVSTEVMTLATSLVVFGFAVGPLMWSPLSELYGRRIPLFSGYAIFAIFQIPVAVAQNVETIMLCRFLMGVFGCSPLAVVGGAMADFWDPVDRAVAIACFSAATFVGPVIGPIVGGFITESHLGWRWTAWITLIASASFGTFALLTVPETYGPVILQKRAARLRRETGNWALHSFLDEHRPTASEIVTKYLLRPLQMLFLEPILLAMTIYLAFIYGILYLFFEAYPVSFQEVRGWTNGGVAGLPFLGIMIGVLCGVALIIWQTKTRFARKLEKHGRVVPEERLVPMMIASVLLPAGLFWFGWTSDPSISWVPQVIAGVPIGMGILVIFMQGLNYIIDVYMMFANSAIAANTLVRSGLGGAFPLFAVQMYHRLGVDWASSLLGFLTVAMIPIPVVFFFYGAKIRAMSKFSPKF

SEQ ID NO: 152040 - DNA, 1791 bp, Aspergillus oryzae
  CDS (1)..(1791)
atgagtatagatgaaggccatattggtcatggcgcatcactggaaaagaagaactcggatgtgtaccgtgagaatcggcctctgatggtgacggaagaggaagcattcgcacgagcaagaaatagcccagatgaggcattgccactgtgtatcactttttcgcataacgatcgggaaaacccacgatgctggccaaaatggcggaaatggtacatcactatcttcgtgagtatgctcaatgtcatcacaacgtggtgcgcaggtagcatatcgtctggtgcgaccgctatccagtcggaatttggggtatccgaggaggttactacgttatgcctatcgctatatgttcttggttacgctgtcggtcctgtcctactcgcccccctatccgaatacttcggccgtcagcctgtgtatgtcgtgtcgtggtttctcctatttatctttcaacttccgatcgccctcgcaccgaatattggtactatcatcgtttgccgatttatcgccggctttgcaggtggtgcgccactgaccaacactggcggatcaatcagtgatctatgggagaggaaccatagtggtggcccaatggctatctacggtctgagcagtacctttggaccgcccatggcactcgtcgtcagcgggtatatggccctcgatctcggctggcggtggatcttctggatcatgatggccatttccggcggatggtgggttctacttgttctcacaatacccgaaacgcgccacacgatcattctgcagcgcaaggccaagagggtacgggcgttgatgagaaaagagaacttaaaatccgccgagacagtcaccgatgccagtgcgagcgggcgaaaggggctggacgagctgtttaagattaccctcactcgtccattccgcttcctatttaccgagcctattacaacgttttctgcgatttacaatggcttcctctacggtctggtctatctcttcaatgaatccttcccactggttttcggccccggaaagggccacggcttcaacgtcggccagcaaggccttagcttcctcggcatggctatcggcccgatcatcgcgttctgcttttatcccctgcaagaacgatattatctgcgtcgagtcaaggagcacgacggcaagggtgtcccagaagcacgcatgtggatggcccggcttggtgcgatatttatcccgatcagtttgttttggtttggctggaccagctaccgctccgtccactggatcgtgcccatcattgcctcagctttcttcggtgctggtatctacatcgtcatattaagtatccttaactatgtcgtggacagctatcagacctattccgcctcggctctggcgggcgtgatcctcgttaggaatttagttggcgctgggtttcctttgttcgcgacgcagatgtatgaacgcttgggctatgagtgggcttccagcttgctgggctttttggctattctattggtgcctattccttttatcttcttctacatggggcgggctattcggttgaggagtccaaagcaatctatatcagaagcgcatttgatttctttaatattaactattgtaagtaacagcgaaaatccacaaagtcagcatctacaacatactcagaacccccaagagctgagtcccgcagcactcacatcaactacacaacccgggttcaccaaaacggtcttctgctcccttggcatcgccattttatcttcatctgggaaacaactctacgtaatgaatgcggatatacaggcaggctaccgtgagtga

SEQ ID NO: 152041 - protein, 596 aa, Aspergillus oryzae
MSIDEGHIGHGASLEKKNSDVYRENRPLMVTEEEAFARARNSPDEALPLCITFSHNDRENPRCWPKWRKWYITIFVSMLNVITTWCAGSISSGATAIQSEFGVSEEVTTLCLSLYVLGYAVGPVLLAPLSEYFGRQPVYVVSWFLLFIFQLPIALAPNIGTIIVCRFIAGFAGGAPLTNTGGSISDLWERNHSGGPMAIYGLSSTFGPPMALVVSGYMALDLGWRWIFWIMMAISGGWWVLLVLTIPETRHTIILQRKAKRVRALMRKENLKSAETVTDASASGRKGLDELFKITLTRPFRFLFTEPITTFSAIYNGFLYGLVYLFNESFPLVFGPGKGHGFNVGQQGLSFLGMAIGPIIAFCFYPLQERYYLRRVKEHDGKGVPEARMWMARLGAIFIPISLFWFGWTSYRSVHWIVPIIASAFFGAGIYIVILSILNYVVDSYQTYSASALAGVILVRNLVGAGFPLFATQMYERLGYEWASSLLGFLAILLVPIPFIFFYMGRAIRLRSPKQSISEAHLISLILTIVSNSENPQSQHLQHTQNPQELSPAALTSTTQPGFTKTVFCSLGIAILSSSGKQLYVMNADIQAGYRE

SEQ ID NO: 152042 - DNA, 1809 bp, Aspergillus oryzae
  CDS (1)..(1809)
atggaccatactcggggtgacatcccgacttaccaagaagatcaccgcaagtgtccatctcttgatgaaaccgacactgatagcgaggacttatccgatgaaacggcaaaccatgttaactctttagagctcgagcgcataaacacatatcgccttcagcaaaagacaaccgttggctcgaccagaggccccctgccgcgggagcaatggctaccaatgggtgcagggaaagaatatcctccattactccctgatcctgagcaatatgtggttgagtttgatggaccagacgatccattacatccctacaactggtccatgctgagaagagctttcctcgtatgcatcctgtgctacgcaacctttgccggctccttcgctagtgccgtcttctccgctgccattggttccgtgagcgagcagtttaatatcggtacggaggctgcatcgctaggtgtcacattatacgttttaggtttcgctgccggtccgacgatctgggcgccggcatctgagcttatcggacgacgctggccgttgtccgttggcctctttggatgtggtgtcttcagcattgcctgcgccactgcaaaggatgtacagactattatgataagccgtttctttgctggactgtttgccgccagccccatctccatcgtccctgctgtatttgctgatctattcaacaacgcacaacggggtatcatcatgtcgatcttctgcatggctgtctttatcggaccctttgccgcccctttcgtgggcggattcatcgccatgagctccctcggatggcgctggactatgtacatatccgccatcatggtgttcctgggcttcattctcgtccttatattcctggatgagtcctaccctcccgtgattctagtccgcaaggcctcggagcttcgccggcaaacccataactggggaatccacgccaaacaagacgaagtggaggttgacttcaaggagctcatccggaacaacttcacgcgcccaattaccatgctattcacagagcctattctcctccttatctccatttacatcgcattcatctacggcctcatgtatgccttactcggtgcatacccggtcgtcttccagggtgtttacggtatgaacatgggtgttggtggtcttgcgtttgtcggccttattctgggtgaactgctcggcggctgctatgtgctcttcctccagggcgcttataaacggaagcttgcagcaaatggagacaaaccgatccctgaatggcgtctctcccctgccatactaggtgctgtactctttacaggaggaatgttctggttcggctggaccggctacacatcctccatccactggatggcacccatggcctccggagtcctcaccggcgccggaatcttcctcatcttcctacaatgtttcaactacatcgttgactgctaccccacacttgcggcctccaccatagcagcaaacacaatcctccgctcagcagtcgggtgtgcattccctctcttttcgagacaaatgatgcagaatctcggtgtccaatgggccggaaccatgctcggctgtattgcggctgtgatgattcctatccctgttgtgtttaagttgtatggtccttggctgagggctaggagtaggttggcgtgttcgccggtttatgatgttgagaagaaggcttatgatagccctgcaaaagattcttttcgagagatgtatgctcttgcagccaacgcttcgcgcagttgtcgtacacctcacaaagtcggtcgaggccaacagtgccctcgtgattgtggtgggtga

SEQ ID NO: 152043 - protein, 602 aa, Aspergillus oryzae
MDHTRGDIPTYQEDHRKCPSLDETDTDSEDLSDETANHVNSLELERINTYRLQQKTTVGSTRGPLPREQWLPMGAGKEYPPLLPDPEQYVVEFDGPDDPLHPYNWSMLRRAFLVCILCYATFAGSFASAVFSAAIGSVSEQFNIGTEAASLGVTLYVLGFAAGPTIWAPASELIGRRWPLSVGLFGCGVFSIACATAKDVQTIMISRFFAGLFAASPISIVPAVFADLFNNAQRGIIMSIFCMAVFIGPFAAPFVGGFIAMSSLGWRWTMYISAIMVFLGFILVLIFLDESYPPVILVRKASELRRQTHNWGIHAKQDEVEVDFKELIRNNFTRPITMLFTEPILLLISIYIAFIYGLMYALLGAYPVVFQGVYGMNMGVGGLAFVGLILGELLGGCYVLFLQGAYKRKLAANGDKPIPEWRLSPAILGAVLFTGGMFWFGWTGYTSSIHWMAPMASGVLTGAGIFLIFLQCFNYIVDCYPTLAASTIAANTILRSAVGCAFPLFSRQMMQNLGVQWAGTMLGCIAAVMIPIPVVFKLYGPWLRARSRLACSPVYDVEKKAYDSPAKDSFREMYALAANASRSCRTPHKVGRGQQCPRDCGG

SEQ ID NO: 152044 - DNA, 1809 bp, Aspergillus oryzae
  CDS (1)..(1809)
atgtctaacgagaagggggctcctggcgagtcgcccatgagccgaaagatcccatattggcgcatggttatagatcagggggccgtgacccaggaagtcatcgatcatccgtatcccggttcaggaactgaagaggatccatatgctgtcacctggctccctaatgatccaaggaatcctatgcagttcgccaatagcaccaaatggttcattactatgcttgctgctatttcgaccctggccgttgcgctagtttcatcagcctataccggtggtgtggctcagatcagacaacaattccacgtcggcaccgaagtttctactctgggtgtttcgcttttcgtccttggtttcgccatcggacctctgctctgggctcctctgagtgaaatgttcggccgtcagatcattttctttgtcacttatctcgctttgactgccttcaactgtggaagtgctggcgcccagaacatccagactctgatcattcttcgatttttcgccggatcgtttggctcctccccccttaccaatgcgggaggtgtcattgccgacatgttctctgctaaagagagaggtgttgcgacgagtctttttgcggctgctccatttctgggccccgtcctcggccctatcatcggaggtttccttggaatgaacgccggatggagatgggtgatgggtttcttgggagccttttctggctttgtttggatcgtggcctccctgctcacacccgaaacatatgcaccggttcttcttcgtcgccgcgccgagagactgtctaagattaccggcaaggtttatcgcagcaaattggacatcgaccagggcaaggtcagcctcaagcaagcgttcggcaccgcattgtcgcgtccctggattctactcttccgggagcctattgtgttcttgctgtctctgtacatggctatcgtgtatggcaccttgtatatgctcttcgctgcctacccaattgtgtttcaaggggtccgtggttggaaccagggtgttggcagtcttccattccttggtattatgatcggaatgctggctgctgtggcctacagcattatcgacaacaagcgatacgtcaagaccgacgaaaaacacggaggatttgctcctcccgaagcacgtctcccaccatgcatggtcgcctctctcgctattcccatcggtctgttctggtttgcatggacgaactacccatctatccactggatggcctgcgtcgcggcaggagcccccttcggttttggaatggtcctggtgttcctgagtatcctgacctacctcattgacacatataccatctttgctgcgtctgtcttggcagcaaactcggttctgcgatcgatttttggtgccgtcttcccgcttttcacgacctatatgtacagtgaccttggcattcactgggcttccaccattcctgccttcctggctcttgcatgtgtaccgttcccgttcctattctatatttacggacctaagatccgcttgcgctgcaagtacgcagccgaatccgatgcctttatgcgcaagatggcgcagcaaattaaacaacagcagggtgagcctgaagacaaggaacttgagccggcctatgaccgcacggaagcgcctggtgttgaggtttccgatagtagtgacgatgaaagcggctcgcatgttggcgagctgccgccggtgcaacaagttcgcactaaatcatcggttcgaaccgccggttctgcacgtcagtcgatctatgacgggaacccgtacgatattgaccgcgttcatactcgcgagtccttcaaatga

SEQ ID NO: 152045 - protein, 602 aa, Aspergillus oryzae
MSNEKGAPGESPMSRKIPYWRMVIDQGAVTQEVIDHPYPGSGTEEDPYAVTWLPNDPRNPMQFANSTKWFITMLAAISTLAVALVSSAYTGGVAQIRQQFHVGTEVSTLGVSLFVLGFAIGPLLWAPLSEMFGRQIIFFVTYLALTAFNCGSAGAQNIQTLIILRFFAGSFGSSPLTNAGGVIADMFSAKERGVATSLFAAAPFLGPVLGPIIGGFLGMNAGWRWVMGFLGAFSGFVWIVASLLTPETYAPVLLRRRAERLSKITGKVYRSKLDIDQGKVSLKQAFGTALSRPWILLFREPIVFLLSLYMAIVYGTLYMLFAAYPIVFQGVRGWNQGVGSLPFLGIMIGMLAAVAYSIIDNKRYVKTDEKHGGFAPPEARLPPCMVASLAIPIGLFWFAWTNYPSIHWMACVAAGAPFGFGMVLVFLSILTYLIDTYTIFAASVLAANSVLRSIFGAVFPLFTTYMYSDLGIHWASTIPAFLALACVPFPFLFYIYGPKIRLRCKYAAESDAFMRKMAQQIKQQQGEPEDKELEPAYDRTEAPGVEVSDSSDDESGSHVGELPPVQQVRTKSSVRTAGSARQSIYDGNPYDIDRVHTRESFK

SEQ ID NO: 152046 - DNA, 1989 bp, Aspergillus oryzae
  CDS (1)..(1989)
atgaccggtttagccggggccgacgaggtgcctctatcctccaagataccctactggcgtttagtcctcgaccaaaaggttgttacacccgaagtggttaattatccttatgctggatcaggaaccgaagatgacccttacgttgtcagttggatccctaatgacccgcgcaacccaatggagttcagtgagatccaaaaatggtcctatactgttctagtctcttttgtcaccctcaccgttgcattggtttcctctgcatactcaggcggcatgggtcagattgtcaaggatttcgactgtgaacaggaagtcgctatcctcggaatttccctctttgtcctgggatttgcctttgggccattgatctgggcaccaatgagtgagaccttcggtcgtcgacatatcttcactagcacattcttcctcctcactgctttcaatgcgggagctgcgggagctcagaatattcaaacccttattattctacggttcctcgcaggatttttcgggtcatcccctttcggaaatgcaggaggtacgattgcagatatgtttccggctgcaaagcgtggtattgcaatcagtctcttcgctgcagcaccgctctgtggtccgacgtttgggccggtgattgggggcttcctcggctctgccgcgggctggcgttgggtggaaggctttctagcggcgttagcaggcgtggtgtggctggctatgggcatattactaccagagacatacgctccagtcctcctgcgtcgtcgagctgaaaagctttctgagctgaatggtcaagtctaccgtagcaaactggatatcgaacgaggtagagcgacgttgacaaagacactgactacggctctctcccgcccttggcttctgctctttaaagagccaattgtgcttctgttctgtatatatatggctatcatatatgggacattgtacatgttgtttgcagcctatccgatcgtcttccaggaagtccgtggctggagtgaaggtattgggggcttggctttcatgggaattctagtaggaatgatcatcgcagtggcttgcacctttccggacaatttccgttatgctaagctgtgtgggcaaagtacgggtcgtcttgcacccgaggtccgtcttccgcccagtattgttggaggaatcgctctgcctatcggccttttctggttcgcatggacgaactccccaaccatccactggatagcgccggttgctgcaggcgtaccatttgggtttggattagtcttggtcttcctcagtgtcttcaactatctgatcgatgcctacacgatctattcagcatcggtccttgcagctaactcagctctccggtctttattcggcttcgcctttcctctattcaccacctacatgtatcgcaacctaggcattcactgggcctcttccattccagctttcttggccgttgcgtgtgtgccattccctattctcttctatctttacggggctcagattcgtaagcgttgtgtttacgctgctgaggccgaggcattcatgcagcgtctcgcagccaaacagaatccacccccgcgtcaagagcaagagccagctcaagagaagacgactgtggctgagaaagccgagtctgtctatatgagcagtgacagtgatgactccgatagcctttccaccattccatcccaggttgcacttgaccgacgaggttctcgggcctctaggaagtctggacattctttaggtcgcacagcgacacagtatgaggaaaatccctacgacattgaccggagctcatggaggggttccgtatgcttctggataaaaggccagatatccaaatcctatggaaaatcaagccaagttccggtacaactttcgaggatacacctttacccgacaatcttcgtactgccgtcgcagagggacaagtccgtgttgagtcgtggctggcagtggagcctatttgcattctcacgagtggccatgtaa

SEQ ID NO: 152047 - protein, 662 aa, Aspergillus oryzae
MTGLAGADEVPLSSKIPYWRLVLDQKVVTPEVVNYPYAGSGTEDDPYVVSWIPNDPRNPMEFSEIQKWSYTVLVSFVTLTVALVSSAYSGGMGQIVKDFDCEQEVAILGISLFVLGFAFGPLIWAPMSETFGRRHIFTSTFFLLTAFNAGAAGAQNIQTLIILRFLAGFFGSSPFGNAGGTIADMFPAAKRGIAISLFAAAPLCGPTFGPVIGGFLGSAAGWRWVEGFLAALAGVVWLAMGILLPETYAPVLLRRRAEKLSELNGQVYRSKLDIERGRATLTKTLTTALSRPWLLLFKEPIVLLFCIYMAIIYGTLYMLFAAYPIVFQEVRGWSEGIGGLAFMGILVGMIIAVACTFPDNFRYAKLCGQSTGRLAPEVRLPPSIVGGIALPIGLFWFAWTNSPTIHWIAPVAAGVPFGFGLVLVFLSVFNYLIDAYTIYSASVLAANSALRSLFGFAFPLFTTYMYRNLGIHWASSIPAFLAVACVPFPILFYLYGAQIRKRCVYAAEAEAFMQRLAAKQNPPPRQEQEPAQEKTTVAEKAESVYMSSDSDDSDSLSTIPSQVALDRRGSRASRKSGHSLGRTATQYEENPYDIDRSSWRGSVCFWIKGQISKSYGKSSQVPVQLSRIHLYPTIFVLPSQRDKSVLSRGWQWSLFAFSRVAM

SEQ ID NO: 152048 - DNA, 1815 bp, Aspergillus oryzae
  CDS (1)..(1815)
atggtctatgatccgaatcgggacgaggccatggcccagagcaaagaacgattggagtcttccgactacgccgagagacccccaacttccgatacaaccgattcgacctccaccaccagctccgtggattatgatcctcagttgcacaccctccgttcgcgcgccaccgaagttgatctcgaacgccataccaccagggcctcggatgccctgagtcgcattcacacccagcgccttcaacatgccctcaccgtcggtgaaagcgtcaagtctcatccctccaaggctccattgcccccatttggcgccggaaagccctatccaccccctttaccggcacgggaggactacgtggtggagttcgatgggaaagacgatcccttatacccccagaactggcccttgaagagaaaagtctatattagtgccatcctcgcctttaccagtatttgctccaccttcgactccgccatcttcagctcctccagcaaaagtgtcgcgaatgcgttcggcgtcggtctcgaagtctccacgctgtcgagttccctgtacatcatcggttatgcgtccggacccttgatctgggcccccatgtcggaactgcaaggccgtcgcttacccatcgtcattgcgatgatgggatttggtatcttcaatatcgctgttgccgtcgcgaaggacttgcaaaccctcatgatctctcgtttcttctgtggtatcttcggcagttgtcccctggccgtcgtcgccgccgtcttctccgatatttacgacaatcgcacccgtggtgtcgccatcgccgttttctcaagcaccgttttcttaggcccacttatcgcgccgttcattggtgggtttatcaatatgtcctatctgggctggcggtacactgcgtatatcccggcattcatggggttctttgcgttcgccctgaacgtcttcttcctaaaggaatcatatccccccgtcatcctgattagcaaggcctcggaactacgccgccgcaccaagaactggggcatccatgccaagcaggaggagatcgaggtcgacttaaaagacctgatcatcaacaatttctcccgtcccttgcggttgctgatcaacgaaccgctaatcctcgccgtgacggtctacctcagttttatctatggcttgctctactgtttcctgacggcctacacgctggtgttccaaggggtccacggcatgaacgcgggtgtgggtggactgcccctgtttggcatggtcgtgggcttgtttattgcggcgggatacatcattctatccagcggatcgtacaacaaaaagctcgaagccaacgggggcatccccgttcccgaatggcgtcttccgccggtgatcctcgcgggagcgctctttgcggcaggcttgttctggttcggctggacgggctttactgatagcatccactggattgtcccgaccctgagcggtctctttaccggctttgggcttctgatcatcttcatccagctgttcaactacctcattgatacgtatttgatgttcgccgcctccgccatcgccgccaacaccttcgttcgttccttggtcgcgtccagctttcccctcttctctcgtcaaatgtttaacaacatggggatccaatgggcctctacgctcctcggctgtctggccgcgatcctggtacccattcccgttgctttcttcttcttcggcaagcggctgcgaatgaagagcaagtatgcgcccatctacgagaaagccgaggagccgatgagtgacgagaatgaaattgccgccgagaccaatgggcccctgagggaataa

SEQ ID NO: 152049 - protein, 604 aa, Aspergillus oryzae
MVYDPNRDEAMAQSKERLESSDYAERPPTSDTTDSTSTTSSVDYDPQLHTLRSRATEVDLERHTTRASDALSRIHTQRLQHALTVGESVKSHPSKAPLPPFGAGKPYPPPLPAREDYVVEFDGKDDPLYPQNWPLKRKVYISAILAFTSICSTFDSAIFSSSSKSVANAFGVGLEVSTLSSSLYIIGYASGPLIWAPMSELQGRRLPIVIAMMGFGIFNIAVAVAKDLQTLMISRFFCGIFGSCPLAVVAAVFSDIYDNRTRGVAIAVFSSTVFLGPLIAPFIGGFINMSYLGWRYTAYIPAFMGFFAFALNVFFLKESYPPVILISKASELRRRTKNWGIHAKQEEIEVDLKDLIINNFSRPLRLLINEPLILAVTVYLSFIYGLLYCFLTAYTLVFQGVHGMNAGVGGLPLFGMVVGLFIAAGYIILSSGSYNKKLEANGGIPVPEWRLPPVILAGALFAAGLFWFGWTGFTDSIHWIVPTLSGLFTGFGLLIIFIQLFNYLIDTYLMFAASAIAANTFVRSLVASSFPLFSRQMFNNMGIQWASTLLGCLAAILVPIPVAFFFFGKRLRMKSKYAPIYEKAEEPMSDENEIAAETNGPLRE

SEQ ID NO: 152050 - DNA, 1659 bp, Aspergillus oryzae
  CDS (1)..(1659)
atgccgcaagagtcgtccgatgaaacccaaagagtcagtctcaatacgttgaggacagaaacacgggagactcttcaagcatcgagagtgacggaaaatagtccaccactgggtgtaaactatcctgagcttgggcgtccagcagagcccctcttcccggaagaatacactgttgagacacaaacaggcttggttccggtcagaactcttgagagcatccggtctactgccatcggcgcgccacggccttcaactcccaatgttgaaaaagcaagtaagccgtacgaatttgtgacttttcagattaatgacccggccaacccatttaattggtctcgtttgtatcgttggtatatcacgatggttgtgtcggcactggttgtctgcattgcctatggctcttctattgtcactgggggcctgggcttgatcgaagaaaaatatcacgtctctctggaagtggctaccctgacatgttccatcatggtttgcgggtttgctgtgggcccactactgtggtctcctttatcggagataataggtcgacaaccggtatacattatctcgctggcgctatataccatattccagatcccatgcgccctgtcgccaaatatcggtggcctccttgcctgcaggtttctgtgcggcgtcttctccagttctggtctttccctggctggtggtaccatcgcagatatctggaacattgaagagcgcggtatggccattgcctactttgctgccgcaccgtattgtggccccgttattggccccatagtctgcggttggatcaatgtcggctcacatcggctcgatctcttcttctggaccaacatggcttttgcaggagcaatgacgattatcgtcgggctcattccagagacatatacgccggtaatcctcaagcgccgtgcaaagaaccttcgccaggaaaccggcaacttgaatatcatcacagagcaggagcaagccaagccgagtttccgcgacatcgtccggatcagtctcatccgacccattacgatgattttaactgaacctgtgctagatttgatgtgcatgtacatcgtcctcatctacgcctatctttatgcttactttttcgcctaccccgtcgtttttggcaaactgtacgggtacaatgatggccagattggcctcatgttcattcctatattaattggcgcgggcttctcgctgctcattacgcccatgatcgagaagcgtttcaagcaagtgtgtcggacgcgggcgcccacacccgaagatcgtcttgttggtgccctactcggtgcaccattcatccccattgcgatgtttattctcggcgcgacgtcgttcaagcatatcatctgggttggtccagcgtcatctggcatcgcttttggattcggaatggtgctgtgttactactcagtgaataattatatcatcgactcgtatcagaagtacgcggcgtcggcgctggccgcgaaggtgtttttgcggtcaggtggcggagctgcgtttccgctgttcacaacccagatgtatgaccggctggggttgcaatgggcgtcatggctattggcctttattggagtagcgatggtgcttgttccatatgggttttattggtttggggaaagaattagagccaagctgtctcacacatga

SEQ ID NO: 152051 - protein, 552 aa, Aspergillus oryzae
MPQESSDETQRVSLNTLRTETRETLQASRVTENSPPLGVNYPELGRPAEPLFPEEYTVETQTGLVPVRTLESIRSTAIGAPRPSTPNVEKASKPYEFVTFQINDPANPFNWSRLYRWYITMVVSALVVCIAYGSSIVTGGLGLIEEKYHVSLEVATLTCSIMVCGFAVGPLLWSPLSEIIGRQPVYIISLALYTIFQIPCALSPNIGGLLACRFLCGVFSSSGLSLAGGTIADIWNIEERGMAIAYFAAAPYCGPVIGPIVCGWINVGSHRLDLFFWTNMAFAGAMTIIVGLIPETYTPVILKRRAKNLRQETGNLNIITEQEQAKPSFRDIVRISLIRPITMILTEPVLDLMCMYIVLIYAYLYAYFFAYPVVFGKLYGYNDGQIGLMFIPILIGAGFSLLITPMIEKRFKQVCRTRAPTPEDRLVGALLGAPFIPIAMFILGATSFKHIIWVGPASSGIAFGFGMVLCYYSVNNYIIDSYQKYAASALAAKVFLRSGGGAAFPLFTTQMYDRLGLQWASWLLAFIGVAMVLVPYGFYWFGERIRAKLSHT

SEQ ID NO: 152052 - DNA, 1872 bp, Neurospora crassa
  CDS (1)..(1872)
atgaacgaactggagaaggtggaaaactacgacgccactcacctcaactcaaatgcaactcagatcaactcaccgacacatgacgtagatatcgaaaagggtcagtttagcggtagccatggagccagcggttcaaccacgcctcaggttgcccactcggcgaccggacagaacgagaaggagaatgatttcgactcggcatcatcatcatcccagacagaagacgacattggtttcgcgcccatctcaacccaccaaacgcagccccctcaccaaccccgacccatgagccgacaaagtcataacaccaccttcagccacatttctcgctcgcgctccaacaacggctttggcgtagacgacttagaagacgaagctgaaaaagaggaggaaggagccgacgcggaagcagcagcagcccgctcaggggccggcgagaccatcaaggacgaagaagagaagcgcttcgaggtcggctgggaaggaggcgacgcggaccctctgaacccgcgaagcatgccgacctggcggaagtggatcatcatcgcggtgctgagcatcggctccttcgccgtgacgcacgcctcggccatctacacggctacgtacacgcagatgaacgccgagttccactgctctcgcatagtagcgacactgggcctctcgttcttcgtgctggggattgcgatgggaccgttctggtcgccgttggctgagttctacggacggagacccatctacatttgctcgtttgccgggtttctgatctggctgatccctagtgcggtggccaagaatatccagactatgatcattgcgaggttctttcagggtctggcgggcagtgcgtttctcagcgtgtccggtggcaccgtgggcgacctgttcagtagggagaagttccagttgcccatggccatctttgcgttgtcgccgtttattggaccggcgacggggccgttggtgggaggattgattaacaccttcacgacctggaggtggacgtattatttcttgatcatttgggccggggttttgctggtgtgtgtgatggtgctagtgccggaaacatatcaccccgtcctcctaaagcgcaaggccgtcaacctccggaaaaccaccggcgacaaccgctaccacgcccccatcgagcgcaccaccaagtccgtcgcctccacccttggcaactccctcatgcgaccgtttcagctgctcctgcttgagcccatgtgtctcatcctggatgtctactccgcggttctcctgggcgttttgtatctcttcttcggtgccttccccctcgtcttccgcaccaaccacggcttcaatctctggcaggtcggacttaccttcatgggcctcggcgtgtccatggtcctggccggctgcatcactcccgtctggacgcgcgtgagaaatggcctggccgagaagcgattcaagaagacgggaatcatgaagggcgagcctgaggaccagctgccgcccgtgattgtgggtgccccgctcatcacgggcggtctgttcatgttcgggtttagtacgtatccgtgggtgcattggatcgtgccaatcattgggtcgtcgatctttggtctgggcatgtccttcgccttcaccggtatcttcacgttcttggttgacgcatacccgcgatacgcagcgagtgccttagccacgaatgctcttgtgcgatgttcgtttgcagctgccttcccattgtttggaatacaaatgtacgagaagctgggcttccagtgggccacggccctcctcgccttccttaccctggcgatgctgcctttcccgtacctcttcttcgtgtttggcaagagaatacgggccagaagcaaatttgcgacccgctcgtaa

SEQ ID NO: 152053 - protein, 623 aa, Neurospora crassa
MNELEKVENYDATHLNSNATQINSPTHDVDIEKGQFSGSHGASGSTTPQVAHSATGQNEKENDFDSASSSSQTEDDIGFAPISTHQTQPPHQPRPMSRQSHNTTFSHISRSRSNNGFGVDDLEDEAEKEEEGADAEAAAARSGAGETIKDEEEKRFEVGWEGGDADPLNPRSMPTWRKWIIIAVLSIGSFAVTHASAIYTATYTQMNAEFHCSRIVATLGLSFFVLGIAMGPFWSPLAEFYGRRPIYICSFAGFLIWLIPSAVAKNIQTMIIARFFQGLAGSAFLSVSGGTVGDLFSREKFQLPMAIFALSPFIGPATGPLVGGLINTFTTWRWTYYFLIIWAGVLLVCVMVLVPETYHPVLLKRKAVNLRKTTGDNRYHAPIERTTKSVASTLGNSLMRPFQLLLLEPMCLILDVYSAVLLGVLYLFFGAFPLVFRTNHGFNLWQVGLTFMGLGVSMVLAGCITPVWTRVRNGLAEKRFKKTGIMKGEPEDQLPPVIVGAPLITGGLFMFGFSTYPWVHWIVPIIGSSIFGLGMSFAFTGIFTFLVDAYPRYAASALATNALVRCSFAAAFPLFGIQMYEKLGFQWATALLAFLTLAMLPFPYLFFVFGKRIRARSKFATRS

SEQ ID NO: 152054 - DNA, 1815 bp, Leptosphaeria maculans
  CDS (1)..(1815)
atggacgcatccgatcgctacatcgagagagctgagcgcgatgccagccctgaacgcttccccactgctccaggacacacggacacgggcgagaaaatagagcaacacgaggagattgagcgcacacatacggcctctagtgcagcgtcgtcactgtcttcatcatccgacgcatctgctgcagagcgcgatggtggcatgtctagaatggccacacagcgcgacgatgtcttggacctcgaacgtcatgctacagctctgagccgaatccagacgcagcggtcacaacacagtcagacggttggagccagtctcaagagcagaacgtccaagaagccattgcctgccttcggagcagggaagccatatccaccaccactaccagaccgagaggagtatgtggtcgaattcaatggacacgatgaccctcttcatgcgcagaattggcccatgaagaagaagcttgccacagctactatgctggggttcactaccctcacagctgcgtttggcagttccatcttcagcgctgcgactggtgccattatgcagaaattcaatgttggctcggttgtggcgacgctgggtacatcgttgtacgttctgggtttcgcaactgggcctatcctatgggcacctttctccgaactcaaaggccgacgcctgcctcttgtcatcgcctctttcggtttcgcagtcttcaatcttgcagtcgctacgggcaaggacgttcagactgtgttgatttgtagatttttctctggtttctttggcgcttgtccactgacctgtgtcgccgcagtattcagtgacatgtttgacaatcgcacgcgcggaatggccatcaccgtcttctccatgaccgtctttaccggtcccatattcgcaccctttgttggaggcttcatcgtcatgtcagacctcggatggcgctggatcgaatacctcgtctgcatcatgggattcgccgcctttataatcaacattattttcctctctgagtcctacccaccagagatccttgtcttgaaggcagccgagctccgccgccgcactaaaaactggggtatccacgccaaacaagacgagatcgaaatcgacttcaaagagctggtgcagaagaatttctcgcggccgctgagaatgctgttcactgagcgcatcgtattgctgcttagtgtgtacatggctttcatctacggcctcttgtacctcttcctaactgcgtacccgctcgtctttcagggcgtacatggcatgaatcttggtgttggtagtctaccatttttcggaatgatcaccggacaactcctagccggtacactgatcttcatccgtcaaccgggctaccagaagaaacttgccgccaacaaaaatgtccccattcccgaatggagattgccagaggtcattctgggaggcatatgcttctccgtcggcatcttttggttcggatggacaggctatcgccaagatattcactggattgtgcctacactctctggaatcttaatcggcttcggtctgctcagtatcttccttcaggccctaaactacctcgtcgatgcctatctcatgttcgccgcctcagctatcgcagcaaacacattcctccgcagtctctgcggcgccgctttccccttgttcgcaaggcaaatgttcgagggcatgggcatacagtgggccgccacgctgctcggttgcgttgctgcgctcctcgtccccgttcccgtgtggttttatctcaggggtgcgaagatcagggagaagagtgcttatgcgcctactaccaagccagcttctgcagacgagtag

SEQ ID NO: 152055 - protein, 604 aa, Leptosphaeria maculans
MDASDRYIERAERDASPERFPTAPGHTDTGEKIEQHEEIERTHTASSAASSLSSSSDASAAERDGGMSRMATQRDDVLDLERHATALSRIQTQRSQHSQTVGASLKSRTSKKPLPAFGAGKPYPPPLPDREEYVVEFNGHDDPLHAQNWPMKKKLATATMLGFTTLTAAFGSSIFSAATGAIMQKFNVGSVVATLGTSLYVLGFATGPILWAPFSELKGRRLPLVIASFGFAVFNLAVATGKDVQTVLICRFFSGFFGACPLTCVAAVFSDMFDNRTRGMAITVFSMTVFTGPIFAPFVGGFIVMSDLGWRWIEYLVCIMGFAAFIINIIFLSESYPPEILVLKAAELRRRTKNWGIHAKQDEIEIDFKELVQKNFSRPLRMLFTERIVLLLSVYMAFIYGLLYLFLTAYPLVFQGVHGMNLGVGSLPFFGMITGQLLAGTLIFIRQPGYQKKLAANKNVPIPEWRLPEVILGGICFSVGIFWFGWTGYRQDIHWIVPTLSGILIGFGLLSIFLQALNYLVDAYLMFAASAIAANTFLRSLCGAAFPLFARQMFEGMGIQWAATLLGCVAALLVPVPVWFYLRGAKIREKSAYAPTTKPASADE

SEQ ID NO: 152056 - DNA, 1686 bp, Cephalosporium acremonium
  CDS (1)..(1686)
atggcgaacaattctggaacaacaacagtgcaactggacgatgtgctcgagagatcgtccacattgaacaccctcaacaacatcgacaccgtccaacatcatgaaccccgtacctccttcgccaacaaccggcaacaagccccagcggggggctcctcacagtccgacgcgaccgtgggcccccggcacaagctcgtcaccttcgctcccgatgacccggagaaccccaagaattggtccaaagcatacaagtggtactgcaccctagttgtttcgttgacgtgcttcgtcgtggcgttcgcctcgtccgtcatcagcgcggatatagatggcgtgatggaagagttcaacgtgagcgagacggcggccctcgtgagcatctcggtgtttgttgtcggattcggtgtcggacccatggtttttgcgcccttgtccgaggtgtatgggcgcaggatcatctatggatctaagctgctttttgccgtcatcttcgtcatcccctgcgccgtgtccaagaatctcggaacgctactcgcttgccgcgccattgacggtatcgccttctccgcgccgatgactctggtcggcggcacccttgccgatatgtggaagaatgaagagcgtggcgtcccaatggcggcgttttccgcggcaccatttgccgggccagccatcggtcccctcgtgggcggctacctctccgacgcggccggctggcgctggctctactggatccagctcatcctttcgggtatcatctggatcctcatcaccttcaccgtccccgagacatacgcacccacaatcctcgccaagcgcgcccgcaagctccgcaagtccaccggcgacccgaaccacgtcaccgagcaggagctagaccctcgacccatcagtgagcagctgcgcgtctttctcacgcggcccttccagctgctcttcggcgagctcatcgtcttacttatatcgctgtacatgagtgtcctgtacggcctgttgtacatgttcttcatcgcctaccccatcgtctacaagggaggcaaaggctactcgtccggcaagacgggactcatgttcatccccgtggccgtgggtgtcgtgctctcggcgtgctgctcgccttttgtcaacacccactacatctcattggcacacttccacggcggcaagccgccggccgaggtgcgcctcatccccatgatgttgtcgtgctggctcatccccatcggactcttcatcttcgcgtggacgtcatacccgtggctgtcgtgggctggtcccgccatgggtggcttccccgtcggcttcggcttcatcttcctctacaattcggccaacaactacctcgtcgattcgtaccagcaccaggcggcctcggccctcgcggccaagaccttcatccgaagcttctggggtgcaggtgtggtgctctttactaaacagatgtactcccgcctgggcgaccagtgggcctcgtcgcttattgccttcctcgctctcgcgtgttgcgccatccctttccttttctggaagtacggtgcccgcatccgtgctcggagcaagtacgcctacgctggcgacgagacgccagcggatgtcgagaaggccaagcagaggccggcggaggcgggcgtcctcgccgacgccgacgacctcaggagggctatcagctacgtgagcaacccttaa

SEQ ID NO: 152057 - protein, 561 aa, Cephalosporium acremonium
MANNSGTTTVQLDDVLERSSTLNTLNNIDTVQHHEPRTSFANNRQQAPAGGSSQSDATVGPRHKLVTFAPDDPENPKNWSKAYKWYCTLVVSLTCFVVAFASSVISADIDGVMEEFNVSETAALVSISVFVVGFGVGPMVFAPLSEVYGRRIIYGSKLLFAVIFVIPCAVSKNLGTLLACRAIDGIAFSAPMTLVGGTLADMWKNEERGVPMAAFSAAPFAGPAIGPLVGGYLSDAAGWRWLYWIQLILSGIIWILITFTVPETYAPTILAKRARKLRKSTGDPNHVTEQELDPRPISEQLRVFLTRPFQLLFGELIVLLISLYMSVLYGLLYMFFIAYPIVYKGGKGYSSGKTGLMFIPVAVGVVLSACCSPFVNTHYISLAHFHGGKPPAEVRLIPMMLSCWLIPIGLFIFAWTSYPWLSWAGPAMGGFPVGFGFIFLYNSANNYLVDSYQHQAASALAAKTFIRSFWGAGVVLFTKQMYSRLGDQWASSLIAFLALACCAIPFLFWKYGARIRARSKYAYAGDETPADVEKAKQRPAEAGVLADADDLRRAISYVSNP

SEQ ID NO: 152058 - DNA, 1686 bp, Candida albicans
  CDS (1)..(1686): transl_table=12
atgtcagataacactactttagacaatatcagtgtcaactccgaaaaagtcgtcgactacaccattcaccatgacgaccgcaaagaactagaaagattagtctcccacaacaagggggtggaaaagatcgtctccgagttagctgaaggtgctggtcagttaggaccattggaacagccatacgatattcacaaagttgagactcacccagatccacacaccgactacaacgacgccgacccttggaagtaccccattgacaaagaaacaaaattgcgtttagtggactggaccgaaggagacaaacacaacccgaaaaactttggcaagggattcaaatggttgtgcacggtcttgttagggatgatttgttttgttgtggctttaggttcagctatcgttactggggatttagaaagaccagctgcagatttcggcgtatcagaggaagttatcattttggcttcagttactatgtttgttattggttttggtgtagggccattggtgtttgccccaatgtctgaagaggtgggcagaaaacctatttatgtggtcaccttatttgttgcggtggtgttcattgtcccttgtggtgccgcccaaaacattgctaccttgcttatatgtcgtttgattgacggtacagcctttagtgcaccaatgacattgattggtgggtcgttggcagatatctgggaagggccagaaagaggtacagctatggcagtgttctccgctgctccattcttgggacctgtgtgcggtccaattttcggtgggttgttgtgtgactatgccccaacatggagatgggtatactggacgtttttgattgttgcagggtttttctatgttgtgtttattgttgtggtccccgaaacccaccacggaatattgttgaaaaagagggccaaaaagttgagaaaggatactggcgactctcgctacagatcgttcaatgaattgcaaatcagaacttttgcccaagtcgccaaaacctccctcttgcgtccatttgttttgctcagcgagcttattgtctttttggtcaccatgtacatgtcagtgttgtacggtttgctttacatgttctttttcgcttatcctatcgtctaccaagaaggcaaagggtggtcagcctcaaaaactggtgtcatgtttatccctattggtgtgggtgtcattgcttcgtcgttggcagcaccttttttcaacaaggactacaatagacgtgcccaggaatacagagacagaggagagttgcctccagctgaattgcgtttaattccgatgatgattgggtgttggtttgtccctgctggtcttttcgcctttgcctggtcttcataccaaagactttcgtgggccggtccgtgtttctcgggtttcgccgttgggttcgggttccttttgttatacaacccagcaaacaactatatcgtcgactcctaccaacactatgctgcatctgcattggctgctaaaacgtttgtcagatccatctggggtgcgtgtgtgcccctcttcactatccagatgtaccacagattaggcgacgaatgggcaacctcccttatggcattcatctccttagcatgctgtgccatcccatatttgttctacattttcggtgcaagaattagaaccttttccaaatacgcatacactccaaacatggattaa

SEQ ID NO: 152059 - protein, 561 aa, Candida albicans
MSDNTTLDNISVNSEKVVDYTIHHDDRKELERLVSHNKGVEKIVSELAEGAGQLGPLEQPYDIHKVETHPDPHTDYNDADPWKYPIDKETKLRLVDWTEGDKHNPKNFGKGFKWLCTVLLGMICFVVALGSAIVTGDLERPAADFGVSEEVIILASVTMFVIGFGVGPLVFAPMSEEVGRKPIYVVTLFVAVVFIVPCGAAQNIATLLICRLIDGTAFSAPMTLIGGSLADIWEGPERGTAMAVFSAAPFLGPVCGPIFGGLLCDYAPTWRWVYWTFLIVAGFFYVVFIVVVPETHHGILLKKRAKKLRKDTGDSRYRSFNELQIRTFAQVAKTSLLRPFVLLSELIVFLVTMYMSVLYGLLYMFFFAYPIVYQEGKGWSASKTGVMFIPIGVGVIASSLAAPFFNKDYNRRAQEYRDRGELPPAELRLIPMMIGCWFVPAGLFAFAWSSYQRLSWAGPCFSGFAVGFGFLLLYNPANNYIVDSYQHYAASALAAKTFVRSIWGACVPLFTIQMYHRLGDEWATSLMAFISLACCAIPYLFYIFGARIRTFSKYAYTPNMD

SEQ ID NO: 152060 - DNA, 1746 bp, Candida albicans
  CDS (1)..(1746): transl_table=12
atgtcacacgctacagactccacattagataacgcaagtgttgattcagaaaaagttagagatttcggtgacgacttacaaaaccacccagtccaaccaacaagaagcatcctcagcaagatccgctcaagagatgacgacgctagaagcttggtgtccaacaacaaaggggtagagagaatcatctcagacttacaagaaggcgcaggtcaattaggaccattagaacagccatacgatataaaaaagatcgaaacccatccagacccccacaccgactacaatgaagccgacccttggaagtacccaatcgacctggaatctggtttacgtttggttgaatgggtcgatggcgacaaacacaacccaaaaaacatctccaaagctaaaaaatggttatacaccttggtcttgggtgcaatttgttttgttgtggccttggggtcagctatcgttaccggggatatggaacgtccagcagagtactttggtgtatcggaagaagtgataatcttggcttcagtaacagtatttgtcattggttttggtgttgggccgttggtgtttgcccccatgtcagaagaagttggtagaaagcctatttatgtggtcaccttatttattgcagtggtatttatcgttccttgtggtgccgctaaaaacatcgccacattaattgtttgtcgtttgatcgatggtattgcattcagtgcaccaatgacattgattggtgggtcgttagccgatatctgggaaggtcctgaaagaggtacggccatggccattttttctgctgctccgtttttagggccagtatgtggaccaatttttggtggtttgttatgtgaccacgctccaacttggagatggatatactggacattcttaattgttgctggtgtattttatgcgatattcattgccatagtcccagaaacccaccacggaatattgttgaagaaacgtgccaaaaagttgagaaaagagacaggagactcccgctacagatcattcaacgaattgcagatcagatcatttggagaagtcgccaaaacctcccttttacgtcccttcgtcttgctcagcgagctcatcgtcttcctcatgaccatctacatggccatctgctacggtttgctttacatgttcttctttgcctacccagtggtctaccaacaaggtaaaggatggtcagcctccttgactggtgtcatgtttattcccattggtgttggtgtgatcatcgctactattgccgctccattctttaacaaagactacaacagacgtgcccaggtctacagagatagaggcgagttgccaccaccagagctcagattaatccccatgatgattgcatgctggtttgttcctgttggtctttttgcatttgcctggtcttcatacacttgggtatcctgggccggtccatgcttttcaggattggctgcaggttttggcttctgctgtttgtacaacccggccaacaactatatcgtcgactcctaccaacactacgctgcttctgcattagctgccaaaacatttgtcagatccatctggggtgcgtgtgtgcccctcttcactatccaaatgtaccacagattaggcgaccagtgggccacctccctcatggccttcatctccttagcatgctgtgccatcccatatttattcttctttttcggggcaagagtcagaacattctctagatacgcctataccccggaaactaataccaaatag

SEQ ID NO: 152061 - protein, 581 aa, Candida albicans
MSHATDSTLDNASVDSEKVRDFGDDLQNHPVQPTRSILSKIRSRDDDARSLVSNNKGVERIISDLQEGAGQLGPLEQPYDIKKIETHPDPHTDYNEADPWKYPIDSESGLRLVEWVDGDKHNPKNISKAKKWLYTLVLGAICFVVALGSAIVTGDMERPAEYFGVSEEVIILASVTVFVIGFGVGPLVFAPMSEEVGRKPIYVVTLFIAVVFIVPCGAAKNIATLIVCRLIDGIAFSAPMTLIGGSLADIWEGPERGTAMAIFSAAPFLGPVCGPIFGGLLCDHAPTWRWIYWTFLIVAGVFYAIFIAIVPETHHGILLKKRAKKLRKETGDSRYRSFNELQIRSFGEVAKTSLLRPFVLLSELIVFLMTIYMAICYGLLYMFFFAYPVVYQQGKGWSASLTGVMFIPIGVGVIIATIAAPFFNKDYNRRAQVYRDRGELPPPELRLIPMMIACWFVPVGLFAFAWSSYTWVSWAGPCFSGLAAGFGFCCLYNPANNYIVDSYQHYAASALAAKTFVRSIWGACVPLFTIQMYHRLGDQWATSLMAFISLACCAIPYLFFFFGARVRTFSRYAYTPETNTK

SEQ ID NO: 152062 - DNA, 1695 bp, Candida albicans
  CDS (1)..(1695): transl_table=12
atgcaggacagatttttgagagatagttttgttggtagagtgacttatcatttatcgaaacataaatactttgcccatccagaagaagctaaaaattatattatccccgagaaatatttagccgattacaaaccaactcttgctgatgatacaagtataaattttgaaaaagaagaaatagataatcaaggtgaacccaattcaagtcaatcatcatcttccaataacacaatagtcggaaacaacaacaataatgataatgatgttgatggagataaaatagttgtcacttgggatggtgatgatgatcccgaaaaccctcaaaattggccaactttacaaaaagcatttttcattttccaaatttcatttttgacaacttcagtttatatgggatcagcagtttatacccctggtattgaagaattaatgcatgattttggtattggaagagtcgtagctacattacctttaacattatttgttattggttatggtgttggcccattggttttcagtccgatgtcagaaaatgctatatttggtcgtacatccatatatatcataacattatttttatttgtcatactacaaatccccactgctttggtaaataatattgccggtttatgtatattgagattcttgggtggattctttgctagtccttgtttggccactggtggtgctagtgttgctgatgtggttaaattttggaatttaccagttgggttagccgcttggagtttgggtgctgtttgtggtcctagttttggtccattctttggttcaattttaactgtcaaagccagttggagatggactttttggttcatgtgtattatttctgggttttcatttgttatgttgtgtttcactttacctgaaacttttggcaaaacattattgtatcgcaaggctaaaagattgagagccatcaccggtaacgacagaatcacaagtgaaggagaaattgaaaatagcaaaatgacaagtcatgaattgatcattgatacattatggagaccattagaaatcaccgttatggaaccagttgttcttttgattaacatttacattgccatggtgtacagtattctttacttgtttttcgaagttttcccaatttatttcgttggagttaaacatttcaccctcgttgaattgggtaccacatatatgtcgattgttattggtattgtcattgctgcctttatttatattccagttattagacaaaaattcaccaaaccaattttgcgtcaagaacaggttttccccgaagtgtttattccaattgccattgttggtggtatcttgttaacttcaggtcttttcatttttggttgggcagcaaatagaaccactcattgggtgggtccattgtttggtgctgctactactgcttctggtgcatttttgattttccaaacattattcaatttcatgggtgcttcatttaagcctcattatattgcttctgtttttgcatcaaatgatttgttcagatcagtcattgcttcagtgttcccattatttggtgctcctttgtttgacaatttggctacccctgaatatccagttgcttggggtagttccgtgttgggtttcatcacccttgttatgattgctattccagttttgttttacttgaacggaccaaaattgagagcaagatctaagtatgctaattag

SEQ ID NO: 152063 - protein, 564 aa, Candida albicans
MQDRFLRDSFVGRVTYHLSKHKYFAHPEEAKNYIIPEKYLADYKPTLADDTSINFEKEEIDNQGEPNSSQSSSSNNTIVGNNNNNDNDVDGDKIVVTWDGDDDPENPQNWPTLQKAFFIFQISFLTTSVYMGSAVYTPGIEELMHDFGIGRVVATLPLTLFVIGYGVGPLVFSPMSENAIFGRTSIYIITLFLFVILQIPTALVNNIAGLCILRFLGGFFASPCLATGGASVADVVKFWNLPVGLAAWSLGAVCGPSFGPFFGSILTVKASWRWTFWFMCIISGFSFVMLCFTLPETFGKTLLYRKAKRLRAITGNDRITSEGEIENSKMTSHELIIDTLWRPLEITVMEPVVLLINIYIAMVYSILYLFFEVFPIYFVGVKHFTLVELGTTYMSIVIGIVIAAFIYIPVIRQKFTKPILRQEQVFPEVFIPIAIVGGILLTSGLFIFGWAANRTTHWVGPLFGAATTASGAFLIFQTLFNFMGASFKPHYIASVFASNDLFRSVIASVFPLFGAPLFDNLATPEYPVAWGSSVLGFITLVMIAIPVLFYLNGPKLRARSKYAN

SEQ ID NO: 152064 - DNA, 1695 bp, Candida albicans
  CDS (1)..(1695): transl_table=12
atgcattacagatttttgagagatagttttgttggtagagtgacttatcatttatcgaaacataaatactttgcccatccagaagaagctaaaaattatattatccccgagaaatatttagccgattacaaaccaactcttgctgatgatacaagtataaattttgaaaaagaagaaatagataatcaaggtgaacccaattcaagtcaatcatcatcttctaataacacaatagtcggaaacaacaacaataatgataatgatgttgatggaaataaaatagttgtcacttgggatggtgatgatgatcccgaaaaccctcaaaattggccaactttacaaaaagcatttttcattttccaaatttcatttttgacaacttcagtttatatgggatcagcagtttatacccctggtattgaagaattaatgcatgattttggtattggaagagtcgtagctacattacctttaacattatttgttattggttatggtgttggcccattggttttcagtccgatatcagaaaatgctatatttggtcgtacatccatatatatcataacattatttttatttgtcatactacaaatccccactgctttggtaaataatattgccggtttatgtatattgagattcttgggtggattctttgctagtccttgtttggccactggtggtgctagtgttgctgatatggttaaattttggaatttaccagttgggttagccgcttggagtttgggtgctgtttgtggtcctagttttggtccattctttggttcaattttaactgtcaaagccagttggagatggactttttggttcatgtgtattatttctgggttttcatttgttatgttgtgtttcactttacctgaaacttttggcaaaacattattgtatcgcaaggctaaaagattgagagccatcaccggtaacgacagaatcacaagtgaaggagaaattgaaaatagcaaaatgacaagtcatgaattgatcattgatacattatggagaccattagaaatcaccgttatggaaccagttgttcttttgattaacatttacattgccatggtgtacagtattctttacttgtttttcgaagttttcccaatttatttcgttggagttaaacatttcaccctcgttgaattgggtaccacatatatgtcgattgttattggtattgtcattgctgcctttatttatattccagttattagacaaaaattcaccaaaccaattttgcgtcaagaacaggttttccccgaagtgtttattccaattgccattgttggtggtatcttgttaacttcaggtcttttcatttttggttggtcagcaaatagaaccactcattgggttggtccattgtttggtgctgccactactgcttctggtgcatttttgattttccaaacattattcaatttcatgggtgcttcatttaagcctcactatattgcttcagtttttgcatcaaatgatttgttcagatcagtcattgcatcagtgttcccattatttggtgctcctttgtttgacaatttggccacccctgaatatccagttgcttggggtagttccgtgttgggtttcatcacccttgttatgattgctattccagttttgttttacttgaacggaccaaagttgagagcaagatctaagtatgctaattag

SEQ ID NO: 152065 - protein, 564 aa, Candida albicans
MHYRFLRDSFVGRVTYHLSKHKYFAHPEEAKNYIIPEKYLADYKPTLADDTSINFEKEEIDNQGEPNSSQSSSSNNTIVGNNNNNDNDVDGNKIVVTWDGDDDPENPQNWPTLQKAFFIFQISFLTTSVYMGSAVYTPGIEELMHDFGIGRVVATLPLTLFVIGYGVGPLVFSPISENAIFGRTSIYIITLFLFVILQIPTALVNNIAGLCILRFLGGFFASPCLATGGASVADMVKFWNLPVGLAAWSLGAVCGPSFGPFFGSILTVKASWRWTFWFMCIISGFSFVMLCFTLPETFGKTLLYRKAKRLRAITGNDRITSEGEIENSKMTSHELIIDTLWRPLEITVMEPVVLLINIYIAMVYSILYLFFEVFPIYFVGVKHFTLVELGTTYMSIVIGIVIAAFIYIPVIRQKFTKPILRQEQVFPEVFIPIAIVGGILLTSGLFIFGWSANRTTHWVGPLFGAATTASGAFLIFQTLFNFMGASFKPHYIASVFASNDLFRSVIASVFPLFGAPLFDNLATPEYPVAWGSSVLGFITLVMIAIPVLFYLNGPKLRARSKYAN

SEQ ID NO: 152066 - DNA, 1695 bp, Candida albicans
  CDS (1)..(1695): transl_table=12
  misc_feature (1287)..(1287): n is a, g, c or t
  misc_feature (1299)..(1299): n is a, g, c or t
atgcattacagatttttgagagatagttttgttggtagagtgacttatcatttatcgaaacataaatactttgcccatccagaagaagctaaaaattatattatccccgagaaatatttagccgattacaaaccaactcttgctgatgatacaagtataaattttgaaaaagaagaaatagataatcaaggtgaacccaattcaagtcaatcatcatcttccaataacacaatagtcggaaacaacaacaataatgataatgatgttgatggagataaaatagttgtcacttgggatggtgatgatgatcccgaaaaccctcaaaattggccaactttacaaaaagcatttttcattttccaaatttcatttttgacaacttcagtttatatgggatcagcagtttatacccctggtattgaagaattaatgcatgattttggtattggaagagtcgtagctacattacctttaacattatttgttattggttatggtgttggcccattggttttcagtccgatgtcagaaaatgctatatttggtcgtacatccatatatatcataacattatttttatttgtcatactacaaatccccactgctttggtaaataatattgccggtttatgtatattgagattcttgggtggattctttgctagtccttgtttggccactggtggtgctagtgttgctgatgtggttaaattttggaatttaccagttgggttagccgcttggagtttgggtgctgtttgtggtcctagttttggtccattctttggttcaattttaactgtcaaagccagttggagatggactttttggttcatgtgtattatttctgggttttcatttgttatgttgtgtttcactttacctgaaacttttggcaaaacattattgtatcgcaaggctaaaagattgagagccatcaccggtaacgacagaatcacaagtgaaggagaaattgaaaatagcaaaatgacaagtcatgaattgatcattgatacattatggagaccattagaaatcaccgttatggaaccagttgttcttttgattaacatttacattgccatggtgtacagtattctttacttgtttttcgaagttttcccaatttatttcgttggagttaaacatttcaccctcgttgaattgggtaccacatatatgtcgattgttattggtattgtcattgctgcctttatttatattccagttattagacaaaaattcaccaaaccaattttgcgtcaagaacaggttttccccgaagtntttattccaatngccattgttggtggtatcttgttaacttcaggtcttttcatttttggttgggcagcaaatagaaccactcattgggtgggtccattgtttggtgctgctactactgcttctggtgcatttttgattttccaaacattattcaatttcatgggtgcttcatttaagcctcattatattgcttctgtttttgcatcaaatgatttgttcagatcagtcattgcttcagtgttcccattatttggtgctcctttgtttgacaatttggctacccctgaatatccagttgcttggggtagttccgtgttgggtttcatcacccttgttatgattgctattccagttttgttttacttgaacggaccaaaattgagagcaagatctaagtatgctaattag

SEQ ID NO: 152067 - protein, 564 aa, Candida albicans
  misc_feature (433)..(433): The Xaa at location 433 stands for Ile, or Met.
MHYRFLRDSFVGRVTYHLSKHKYFAHPEEAKNYIIPEKYLADYKPTLADDTSINFEKEEIDNQGEPNSSQSSSSNNTIVGNNNNNDNDVDGDKIVVTWDGDDDPENPQNWPTLQKAFFIFQISFLTTSVYMGSAVYTPGIEELMHDFGIGRVVATLPLTLFVIGYGVGPLVFSPMSENAIFGRTSIYIITLFLFVILQIPTALVNNIAGLCILRFLGGFFASPCLATGGASVADVVKFWNLPVGLAAWSLGAVCGPSFGPFFGSILTVKASWRWTFWFMCIISGFSFVMLCFTLPETFGKTLLYRKAKRLRAITGNDRITSEGEIENSKMTSHELIIDTLWRPLEITVMEPVVLLINIYIAMVYSILYLFFEVFPIYFVGVKHFTLVELGTTYMSIVIGIVIAAFIYIPVIRQKFTKPILRQEQVFPEVFIPXAIVGGILLTSGLFIFGWAANRTTHWVGPLFGAATTASGAFLIFQTLFNFMGASFKPHYIASVFASNDLFRSVIASVFPLFGAPLFDNLATPEYPVAWGSSVLGFITLVMIAIPVLFYLNGPKLRARSKYAN

SEQ ID NO: 152068 - DNA, 1698 bp, Candida albicans
  CDS (1)..(1698): transl_table=12
atgcattacagatttttgagagatagttttgttggtagagtgacttatcatttatcgaaacataaatactttgcccatccagaagaagctaaaaattatattatccccgagaaatatttagccgattacaaaccaactcttgctgatgatacaagtataaattttgaaaaagaagaaatagataatcaaggtgaacccaattcaagtcaatcatcatcttctgataacacaatagtcgacaacaacaacaataataatgataatgatgttgatggagataaaatagttgtcacttgggatggtgatgatgatcccgaaaaccctcaaaattggccaactttacaaaaagcatttttcattttccaaatttcatttttgacaacttcagtttatatgggatcagcagtttatacccctggtattgaagaattaatgcatgattttggtattggaagagtcgtagctacattacctttaacattatttgttattggttatggtgttggcccattggttttcagtccgatgtcagaaaatgctatatttggtcgtacatccatatatatcataacattatttttatttgtcatactacaaattcccactgctttggttaataatattgctggtttatgtatattgagattcttgggtggattctttgctagtccttgtttggctactggtggtgcaagtgttgctgatgtggttaaattttggaatttaccagttgggttagccgcttggagtttgggtgccgtttgtggtcctagttttggtccattctttggttcaattttaactgtcaaagccagttggagatggactttttggttcatgtgtatcatttctgggttttcatttgttatgttgtgtttcactttacctgaaacttttggcaaaacattattatatcgcaaggctaaaagattgagagccatcaccggtaacgacagaatcacaagtgaaggagaaattgaaaatagcaaaatgacaagtcatgaattgatcattgatacattatggaggccattagaaatcaccgttatggaaccagttgttcttttgattaacatttacattgccatggtgtacagtattctttacttgtttttcgaagttttcccaatttatttcgttggagttaaacatttcaccctcgttgaattgggtaccacatatatgtcgattgttattggtattgtcattgctgcctttatttatattccagttattagacaaaaattcaccaaaccaattttgcgtcaagaacaggttttccccgaagtgtttattccaattgccattgttggtggtatcttgttaacttcaggtcttttcatttttggttggtcagcaaatagaaccactcattgggtgggtccattgtttggtgctgctactactgcttctggtgcatttttgattttccaaacattattcaatttcatgggtgcttcatttaagcctcattatattgcttcagtttttgcatcaaatgatttgttcagatcagtcattgcatcagtgttcccattatttggtgctcctttgtttgacaatttggctacccctgaatatccagttgcttggggtagttccgtgttgggtttcatcacccttgttatgattgctattccagttttgttttacttgaacggaccaaaattgagagcaagatctaagtatgctaattag

SEQ ID NO: 152069 - protein, 565 aa, Candida albicans
MHYRFLRDSFVGRVTYHLSKHKYFAHPEEAKNYIIPEKYLADYKPTLADDTSINFEKEEIDNQGEPNSSQSSSSDNTIVDNNNNNNDNDVDGDKIVVTWDGDDDPENPQNWPTLQKAFFIFQISFLTTSVYMGSAVYTPGIEELMHDFGIGRVVATLPLTLFVIGYGVGPLVFSPMSENAIFGRTSIYIITLFLFVILQIPTALVNNIAGLCILRFLGGFFASPCLATGGASVADVVKFWNLPVGLAAWSLGAVCGPSFGPFFGSILTVKASWRWTFWFMCIISGFSFVMLCFTLPETFGKTLLYRKAKRLRAITGNDRITSEGEIENSKMTSHELIIDTLWRPLEITVMEPVVLLINIYIAMVYSILYLFFEVFPIYFVGVKHFTLVELGTTYMSIVIGIVIAAFIYIPVIRQKFTKPILRQEQVFPEVFIPIAIVGGILLTSGLFIFGWSANRTTHWVGPLFGAATTASGAFLIFQTLFNFMGASFKPHYIASVFASNDLFRSVIASVFPLFGAPLFDNLATPEYPVAWGSSVLGFITLVMIAIPVLFYLNGPKLRARSKYAN

SEQ ID NO: 152070 - DNA, 1695 bp, Candida albicans
  CDS (1)..(1695): transl_table=12
atgcattacagatttttaagagatagttttgttggtagagtgacttatcatttatcgaaacataaatactttgcccatccagaagaagctaaaaattatattatccccgagaaatatttagccgattacaaaccaactcttgctgatgatacaagtataaattttgaaaaagaagaaatagataatcaaggtgaacccaattcaagtcaatcatcatcttccaataacacaatagtcgacaacaacaacaataataataatgatgttgatggagataaaatagttgtcacttgggatggtgatgatgatcccgaaaaccctcaaaattggccaactttacaaaaagcatttttcattttccaaatttcatttttgacaacttcagtttatatgggatcagcagtatatacccctggtattgaagaattaatgcatgattttggtattggaagagtcgtagctacattgccattaacattatttgttattggttatggtgttggcccattggttttcagtcccatgtcagaaaatgctatatttggtcgtacatccatatatatcataacattatttttatttgtcatactacaaatccccactgctttggtaaataatattgccggtttatgtatattgagattcttgggtggattcttcgccagtccttgtttggccactggtggcgcaagtgttgctgatgtggttaaattttggaatttaccagttgggttagccgcttggagtttaggtgctgtttgtggtcctagttttggtccattctttggttcaattttaactgtcaaagccagttggagatggactttttggttcatgtgtatcatttctgggttttcatttgttatgttgtgtttcactttacctgaaacttttggcaaaacattattgtatcgcaaggctaaaagattgagagccatcaccggtaacgacagaatcacaagtgaaggagaaattgaaaatagcaaaatgacaagtcatgaattgatcattgatacattatggagaccattagaaatcaccgttatggaaccagttgttcttttgattaacatttacattgccatggtgtacagtattctttacttgtttttcgaagttttcccaatttatttcgttggagttaaacatttcaccctcgttgaattgggtaccacatatatgtcgattgttattggtattgtcattgctgcctttatttatattccagttattagacaaaaattcaccaaaccaatattacgtcaagaacaagttttccccgaagtatttattccaattgccattgttggtggtatcttgttaacttcaggtcttttcatttttggttggtcagcaaatagaaccactcattgggttggtccattgtttggtgctgccactactgcttctggtgcatttttgattttccaaacattattcaatttcatgggtgcttcatttaagcctcactatattgcttcagtttttgcatcaaatgatttgttcagatcagtcattgcatcagtgttcccattatttggtgctcctttgtttgacaatttggccacccctgaatatccagttgcttggggtagttccgtgttgggtttcatcacccttgttatgattgctattccagttttgttttacttgaacggaccaaagttgagagcaagatctaagtatgctaattag

SEQ ID NO: 152071 - protein, 564 aa, Candida albicans
MHYRFLRDSFVGRVTYHLSKHKYFAHPEEAKNYIIPEKYLADYKPTLADDTSINFEKEEIDNQGEPNSSQSSSSNNTIVDNNNNNNNDVDGDKIVVTWDGDDDPENPQNWPTLQKAFFIFQISFLTTSVYMGSAVYTPGIEELMHDFGIGRVVATLPLTLFVIGYGVGPLVFSPMSENAIFGRTSIYIITLFLFVILQIPTALVNNIAGLCILRFLGGFFASPCLATGGASVADVVKFWNLPVGLAAWSLGAVCGPSFGPFFGSILTVKASWRWTFWFMCIISGFSFVMLCFTLPETFGKTLLYRKAKRLRAITGNDRITSEGEIENSKMTSHELIIDTLWRPLEITVMEPVVLLINIYIAMVYSILYLFFEVFPIYFVGVKHFTLVELGTTYMSIVIGIVIAAFIYIPVIRQKFTKPILRQEQVFPEVFIPIAIVGGILLTSGLFIFGWSANRTTHWVGPLFGAATTASGAFLIFQTLFNFMGASFKPHYIASVFASNDLFRSVIASVFPLFGAPLFDNLATPEYPVAWGSSVLGFITLVMIAIPVLFYLNGPKLRARSKYAN

SEQ ID NO: 152072 - DNA, 1761 bp, Saccharomyces cerevisiae
  CDS (1)..(1761)
atgtcggatcattctcccatttctaataaggaaaatcatctgctgccatcagactcgtcaagaagctcatccagcgatatgcattcgacgggcaccacgggaaccacaggcgtcgaacctgtagatttcaccggtgaaggtgccaaatacacaactgctacggagggcaatggtggtgcagatttagcgattcaaagaacgacgactatgaattctgctgcagaatcagaggttaatatcacgagaagattaactaaaatccttactgggtctgttaacgagcctgaccgtgtagaggttgattataccaattgtgcgcccatgggtggtgacagaccttaccctccatcgttgccgagcagagacctgtacgaggttacttttgatggtcctaacgacccactacatccatttaactggcccatgaagaagaaagtgctgctatgtctggtcttatgtctggattctattgccattgctatgtgttcttccatttttgcctctgcagtgccgcaaatctgcgagatataccacgtcatcgaagttgtcgccattttgggtatcacgctttttgttcttgggtttgcggcctcaccggttatctatgctcctctttctgaattgtacggtagaaagggtgttctggttttatctgcgtttggatttgcccttttccaatttgctgtcgctactgctgagaacctgcaaactattttcatatgtagattctttggtggttttatcggggcagcacccatggccgtcgtccccgccgcgtttgccgacatgtttgatactaatgttagaggtaaagccattgcgctattttctctaggtgtttttgtaggccccattttatcgcctgtcatgggttcttatatcgcacaaagaactacctggagatggttagaatatgttgtcggttgtttcgcttccgcagttttcgttgccatcgtattgttctttgaagaaacacatcaccctaccattttggttaacaaggccaaacagatgagaaagcaaagtaataactggggtattcatgctgctcatgaagacgtggagctatccatcaaagacattgtccaaaaaactgtgacgaggcctatcattatgcttttcgtggaaccattgctactattcgtgactatttacaactcttttgtctacggtatcttgtatttgttactggaagcctacccacttgtctttgtggagggttatgggtttactgaaaacggtgagttgccatacatcgccttgattatcggtatgatggtgtgtgctgctttcatttggtatatggacaacgattatttgaaaagatgtagagccaaggggaaattagtgcccgaggccagattgtacgcaatggtcattgcaggtaccgttttccctattggtatcttatggttctgttggacgggctactatcctcacaagattcattggatggtccccacagtaggaggggccttcatcgggttcggtttaatgggtattttcttgccatgtttaaactatatcattgaatcgtatctattgttggcagcttctgccgtcgcagcaaacactttcatgaggtctgcatttggtgcatgcttcccattgtttgcaggatatatgttccgtggcatgggtatcggttgggctggtttgttattaggtctatttgccgctgcgatgattcccgtgcctttactattcttaaaatatggtgaatctatcagaaagaaatccaagtatgcttacgccgcttaa

SEQ ID NO: 152073 - protein, 586 aa, Saccharomyces cerevisiae
MSDHSPISNKENHLLPSDSSRSSSSDMHSTGTTGTTGVEPVDFTGEGAKYTTATEGNGGADLAIQRTTTMNSAAESEVNITRRLTKILTGSVNEPDRVEVDYTNCAPMGGDRPYPPSLPSRDLYEVTFDGPNDPLHPFNWPMKKKVLLCLVLCLDSIAIAMCSSIFASAVPQICEIYHVIEVVAILGITLFVLGFAASPVIYAPLSELYGRKGVLVLSAFGFALFQFAVATAENLQTIFICRFFGGFIGAAPMAVVPAAFADMFDTNVRGKAIALFSLGVFVGPILSPVMGSYIAQRTTWRWLEYVVGCFASAVFVAIVLFFEETHHPTILVNKAKQMRKQSNNWGIHAAHEDVELSIKDIVQKTVTRPIIMLFVEPLLLFVTIYNSFVYGILYLLLEAYPLVFVEGYGFTENGELPYIALIIGMMVCAAFIWYMDNDYLKRCRAKGKLVPEARLYAMVIAGTVFPIGILWFCWTGYYPHKIHWMVPTVGGAFIGFGLMGIFLPCLNYIIESYLLLAASAVAANTFMRSAFGACFPLFAGYMFRGMGIGWAGLLLGLFAAAMIPVPLLFLKYGESIRKKSKYAYAA

SEQ ID NO: 152074 - DNA, 1845 bp, Saccharomyces cerevisiae
  CDS (1)..(1845)
atgagtgatcaagaatctgttgtttcattcaactcacaaaacacttccatggtggacgttgagggccaacaacctcaacagtatgtcccctcaaaaaccaactctcgtgcaaatcaacttaagttaactaagactgagaccgtcaagtctttacaagatttaggtgtcacttcagccgccccagtgcctgatatcaatgcgccacaaactgctaagaataacattttccctgaagaatataccatggaaacaccatctgggctggttccagtggctaccttacaatctatgggtagaaccgcctctgccttatctcgtactagaacaaagcaattgaaccgtaccgctaccaattcctcatccacaggtaaagaagaaatggaagaggaagaaactgaagaacgtgaagaccagagcggtgaaaacgagctagatccagagatcgaattcgttacttttgttactggtgatccagaaaaccctcacaattggccctcatgggttcgttggagttacactgtcctgttgtccatcttagttatttgcgttgcctacggttctgcttgtatcagtggtgggttgggaaccgttgaaaagaaataccatgtaggtatggaagccgctattttatcatgttctttaatggttattgggttctcgctgggtcctttgatttggtctcctgttagtgatctttacggtagaagagttgcttactttgtttctatgggtctttatgtcatcttcaatatcccttgcgccttagctccaaatctaggttgtcttttagcttgtagatttttatgtggtgtttggtcatcatctggtttgtgtttagttggtgggtctattgccgatatgttcccaagtgaaacaagaggtaaggctattgctttcttcgcttttgctccttacgttggtcccgttgttggtccactagttaacggttttatttccgtttctaccggacgtatggacctgattttctgggtcaatatggcctttgcaggtgttatgtggatcatatcttctgccatcccagaaacgtacgctccagttatcttgaagagaaaggctgctagattaagaaaggaaactggtaatcccaagattatgactgagcaggaagcgcaaggtgtcagtatgagtgaaatgatgagggcttgtctgttgagacctttgtacttcgctgtcactgaacctgttctagttgccacttgtttctacgtgtgtttgatttactctctactatatgcgttcttctttgccttccctgtcattttcggtgaactatatggctacaaagataaccttgtgggtttaatgtttattcctattgttatcggtgctctttgggcgttagccacaactttctactgtgaaaacaaatatttacaaattgtcaaacagcgtaaacctactcctgaagatcgtttgctaggtgctaagatcggtgctccatttgctgcaattgctctatggatcctgggtgctaccgcttataaacatattatttgggttggtccagcttcagctggtttagcttttggtttcggtatggtgttgatttattattcattgaataattacattattgattgctacgtccaatacgcatccagtgctctggctacaaaggttttcttaagatccgccggtggtgctgccttccccttgtttaccattcaaatgtaccacaaattgaatttgcactggggttcttggttgttggctttcatctccactgctatgattgctttaccttttgcattttcttactggggtaagggcttgagacataagttgtccaagaaggactattccatcgacagtgttgagatgtaa

SEQ ID NO: 152075 - protein, 614 aa, Saccharomyces cerevisiae
MSDQESVVSFNSQNTSMVDVEGQQPQQYVPSKTNSRANQLKLTKTETVKSLQDLGVTSAAPVPDINAPQTAKNNIFPEEYTMETPSGLVPVATLQSMGRTASALSRTRTKQLNRTATNSSSTGKEEMEEEETEEREDQSGENELDPEIEFVTFVTGDPENPHNWPSWVRWSYTVLLSILVICVAYGSACISGGLGTVEKKYHVGMEAAILSCSLMVIGFSLGPLIWSPVSDLYGRRVAYFVSMGLYVIFNIPCALAPNLGCLLACRFLCGVWSSSGLCLVGGSIADMFPSETRGKAIAFFAFAPYVGPVVGPLVNGFISVSTGRMDLIFWVNMAFAGVMWIISSAIPETYAPVILKRKAARLRKETGNPKIMTEQEAQGVSMSEMMRACLLRPLYFAVTEPVLVATCFYVCLIYSLLYAFFFAFPVIFGELYGYKDNLVGLMFIPIVIGALWALATTFYCENKYLQIVKQRKPTPEDRLLGAKIGAPFAAIALWILGATAYKHIIWVGPASAGLAFGFGMVLIYYSLNNYIIDCYVQYASSALATKVFLRSAGGAAFPLFTIQMYHKLNLHWGSWLLAFISTAMIALPFAFSYWGKGLRHKLSKKDYSIDSVEM

SEQ ID NO: 152076 - DNA, 26 bp, Artificial sequence
  primer
atgaacagacaggaatccataaattc

SEQ ID NO: 152077 - DNA, 28 bp, Artificial sequence
  primer
ttattcaatactatctatggaataatcc

SEQ ID NO: 152078 - protein, 486 aa, Artificial sequence
  consensus sequence
  Variant (3)..(4): Xaa in position 3 to 4 is any amino acid
  Variant (6)..(6): Xaa in position 6 is any amino acid
  Variant (8)..(10): Xaa in position 8 to 10 is any amino acid
  Variant (11)..(12): Xaa in position 11 to 12 is any or no amino acid
  Variant (14)..(30): Xaa in position 14 to 30 is any amino acid
  Variant (32)..(52): Xaa in position 32 to 52 is any amino acid
  Variant (53)..(53): Xaa in position 53 is any or no amino acid
  Variant (55)..(59): Xaa in position 55 to 59 is any amino acid
  Variant (60)..(60): Xaa in position 60 is any or no amino acid
  Variant (62)..(62): Xaa in position 62 is any amino acid
  Variant (64)..(66): Xaa in position 64 to 66 is any amino acid
  Variant (69)..(71): Xaa in position 69 to 71 is any amino acid
  Variant (72)..(72): Xaa in position 72 is any or no amino acid
  Variant (74)..(74): Xaa in position 74 is any amino acid
  Variant (76)..(78): Xaa in position 76 to 78 is any amino acid
  Variant (79)..(81): Xaa in position 79 to 81 is any or no amino acid
  Variant (84)..(101): Xaa in position 84 to 101 is any amino acid
  Variant (103)..(105): Xaa in position 103 to 105 is any amino acid
  Variant (107)..(113): Xaa in position 107 to 113 is any amino acid
  Variant (115)..(117): Xaa in position 115 to 117 is any amino acid
  Variant (119)..(128): Xaa in position 119 to 128 is any amino acid
  Variant (130)..(133): Xaa in position 130 to 133 is any amino acid
  Variant (135)..(153): Xaa in position 135 to 153 is any amino acid
  Variant (154)..(155): Xaa in position 154 to 155 is any or no amino acid
  Variant (158)..(160): Xaa in position 158 to 160 is any amino acid
  Variant (162)..(194): Xaa in position 162 to 194 is any amino acid
  Variant (195)..(199): Xaa in position 195 to 199 is any or no amino acid
  Variant (202)..(206): Xaa in position 202 to 206 is any amino acid
  Variant (208)..(210): Xaa in position 208 to 210 is any amino acid
  Variant (212)..(213): Xaa in position 212 to 213 is any amino acid
  Variant (216)..(217): Xaa in position 216 to 217 is any amino acid
  Variant (219)..(242): Xaa in position 219 to 242 is any amino acid
  Variant (243)..(249): Xaa in position 243 to 249 is any or no amino acid
  Variant (252)..(256): Xaa in position 252 to 256 is any amino acid
  Variant (257)..(257): Xaa in position 257 is any or no amino acid
  Variant (259)..(266): Xaa in position 259 to 266 is any amino acid
  Variant (268)..(271): Xaa in position 268 to 271 is any amino acid
  Variant (273)..(274): Xaa in position 273 to 274 is any amino acid
  Variant (277)..(282): Xaa in position 277 to 282 is any amino acid
  Variant (284)..(296): Xaa in position 284 to 296 is any amino acid
  Variant (297)..(299): Xaa in position 297 to 299 is any or no amino acid
  Variant (301)..(308): Xaa in position 301 to 308 is any amino acid
  Variant (309)..(313): Xaa in position 309 to 313 is any or no amino acid
  Variant (315)..(337): Xaa in position 315 to 337 is any amino acid
  Variant (338)..(346): Xaa in position 338 to 346 is any or no amino acid
  Variant (349)..(349): Xaa in position 349 is any amino acid
  Variant (352)..(365): Xaa in position 352 to 365 is any amino acid
  Variant (367)..(377): Xaa in position 367 to 377 is any amino acid
  Variant (378)..(382): Xaa in position 378 to 382 is any or no amino acid
  Variant (384)..(385): Xaa in position 384 to 385 is any amino acid
  Variant (387)..(393): Xaa in position 387 to 393 is any amino acid
  Variant (395)..(395): Xaa in position 395 is any amino acid
  Variant (397)..(406): Xaa in position 397 to 406 is any amino acid
  Variant (408)..(411): Xaa in position 408 to 411 is any amino acid
  Variant (413)..(416): Xaa in position 413 to 416 is any amino acid
  Variant (417)..(417): Xaa in position 417 is any or no amino acid
  Variant (420)..(421): Xaa in position 420 to 421 is any amino acid
  Variant (423)..(427): Xaa in position 423 to 427 is any amino acid
  Variant (430)..(435): Xaa in position 430 to 435 is any amino acid
  Variant (439)..(441): Xaa in position 439 to 441 is any amino acid
  Variant (443)..(445): Xaa in position 443 to 445 is any amino acid
  Variant (447)..(449): Xaa in position 447 to 449 is any amino acid
  Variant (450)..(457): Xaa in position 450 to 457 is any or no amino acid
  Variant (459)..(473): Xaa in position 459 to 473 is any amino acid
  Variant (474)..(474): Xaa in position 474 is any or no amino acid
  Variant (476)..(477): Xaa in position 476 to 477 is any amino acid
  Variant (479)..(481): Xaa in position 479 to 481 is any amino acid
  Variant (483)..(485): Xaa in position 483 to 485 is any amino acid
DPXXPXNXXXXXKXXXXXXXXXXXXXXXXXSXXXXXXXXXXXXXXXXXXXXXXLXXXXXXVXGXXXGPXXXXPXSXXXXXXGRXXXXXXXXXXXXXXXXXXAXXXNXXXXXXXRXXXGXXXXXXXXXXGXXXXDXXXXXXXXXXXXXXXXXXXXXGPXXXPXXXXXXXXXXXXXXXXXXXXXXXXXXXXXXXXXXXXXXETXXXXXLXXXAXXLRXXTXXXXXXXXXXXXXXXXXXXXXXXXXXXXXXXRPXXXXXXEXXXXXXXXYXXXXYXXLYXXXXXXPXXXXXXXXXXXXXXXXGXXXXXXXXXXXXXGXXXXXXXXXXXXXXXXXXXXXXXXXXXXXXXXPEXRLXXXXXXXXXXXXXXFXXXXXXXXXXXXXXXXWXXPXXXXXXXGXGXXXXXXXXXXYXXXXYXXXXXASXXAXXXXXRSXXXXXXPLFXXXMXXXLXXXXXXXXXXXWXXXXXXXXXXXXXXXXPXXFXXXGXXXR

SEQ ID NO: 152079 - protein, 31 aa, Artificial sequence
  protein pattern
  Variant (3)..(4): Xaa in position 3 to 4 is any or no amino acid
  Variant (6)..(10): Xaa in position 6 to 10 is any amino acid
  Variant (11)..(12): Xaa in position 11 to 12 is any or no amino acid
  Variant (15)..(16): Xaa in position 15 to 16 is any amino acid
  Variant (17)..(17): Xaa in position 17 is Ala or Gly
  Variant (18)..(19): Xaa in position 18 to 19 is any amino acid
  Variant (20)..(20): Xaa in position 20 is Phe, Leu, Met or Val
  Variant (23)..(26): Xaa in position 23 to 26 is any amino acid
  Variant (27)..(27): Xaa in position 27 is Leu or Met
  Variant (28)..(30): Xaa in position 28 to 30 is any amino acid
  Variant (31)..(31): Xaa in position 31 is Leu or Met
ASXXAXXXXXXXRSXXXXXXPLXXXXXXXXX

SEQ ID NO: 152080 - protein, 15 aa, Artificial sequence
  protein pattern
  Variant (3)..(3): Xaa in position 3 is Phe, His or Tyr
  Variant (4)..(6): Xaa in position 4 to 6 is any amino acid
  Variant (7)..(7): Xaa in position 7 is Ile or Leu
  Variant (9)..(10): Xaa in position 9 to 10 is any amino acid
  Variant (11)..(11): Xaa in position 11 is Lys or Arg
  Variant (13)..(14): Xaa in position 13 to 14 is any amino acid
  Variant (15)..(15): Xaa in position 15 is Ile, Leu or Met
ETXXXXXLXXXAXXX

SEQ ID NO: 152081 - DNA, 1326 bp, Arabidopsis thaliana
  CDS (1)..(1326)
atggcggaagagaaaagctacaagtacgtgatcattggaggtggtgtagccggcggttacgcggcgagagagtttagtaatcagggcctgaagcctggtgaactcgcaatcatttccaaggaaccagtgcctccttttgagcgtcctgaactaaccaaggtatatattgacctcgaagtcaatccgacccttgcaaatatctatgtttgtgctggaactggagaagcgaagcagtaccctaactggtacaaagagaaagggattgatctaattgtgggcacagagatagtcaaagcagatcttgcttcaaagacacttgttagtgatgatggcaaaatttacaagtaccaaactttgctaattgcaaccggttctactaacataagattgtcagaaattggcgtccaagaagcagatgttaagaatatattctacctaagagaaatcgaggatagtgatgagcttgccttggctatggaactatatgtgcaaaggggaaaggccgtcatcattggcggcggtttcttagggcttgagataagttctgctctaagggctaataatcatgaagtgaccatggtttttccagaaccttggcttgtacaccggtttttcaccgctgagatagcttcattctatgagagttactatgccaacaagggaatcaaaatcatcaagggaactgtagcaactggatttagcaccaactcagatggagaggtcactgaggtgaaactagaggatggaagaaccctagaagctaacatagttgtcgctggtgtcggtgctagaccggccacctcactcttcaaaggccaacttgaagaggagaagggtggaataaagactgatgggttcttcaaaacaagtgtgcctgatgtatacgcacttggagatgtagccacattcccaatgaaaatgtatggcgggacgaggcgtgttgaacacgccgacaatgctcgcaaatctgctgcacaagcagtcaaagcaatcaaagcgggtgaagaagggaaaacgatcccagattacgattatcttccctatttctactctcgatttttcaaactatcgtgggaattctatggggaaaacgttggagaatctgtactgtttggagataatgacccgaaatctccaaagccaaagtttgggacgtattgggttaaagatgggaaagtagtaggagtgttcctagaaggaggtactcaagaggaacacaaggctattgctaaagtggcacgagcacaaccttccgttgagagtcttgacgtgttatccgaggaaggcctttctttcgccaccaagttctatagcacctctctttga

SEQ ID NO: 152082 - protein, 441 aa, Arabidopsis thaliana
MAEEKSYKYVIIGGGVAGGYAAREFSNQGLKPGELAIISKEPVPPFERPELTKVYIDLEVNPTLANIYVCAGTGEAKQYPNWYKEKGIDLIVGTEIVKADLASKTLVSDDGKIYKYQTLLIATGSTNIRLSEIGVQEADVKNIFYLREIEDSDELALAMELYVQRGKAVIIGGGFLGLEISSALRANNHEVTMVFPEPWLVHRFFTAEIASFYESYYANKGIKIIKGTVATGFSTNSDGEVTEVKLEDGRTLEANIVVAGVGARPATSLFKGQLEEEKGGIKTDGFFKTSVPDVYALGDVATFPMKMYGGTRRVEHADNARKSAAQAVKAIKAGEEGKTIPDYDYLPYFYSRFFKLSWEFYGENVGESVLFGDNDPKSPKPKFGTYWVKDGKVVGVFLEGGTQEEHKAIAKVARAQPSVESLDVLSEEGLSFATKFYSTSL

SEQ ID NO: 152083 - DNA, 1778 bp, Glycine max
  CDS (300)..(1601)
gaatgcatgggcgatggaggcggagatgaggccggcaggggtggcagcgccgttgtcggtgagcttgttgtaggcgatgccggagcctgagccggcgaacacgaagatgaaggttgagatgaactcagccaaagccgccttcaacgtgtcggggtgagtcgcctcttcaggccttccgacggcgatgtttctgatcggcatcttcttcaattgacgctgacgattatgatgagatcaagtgaacaccgatcactcactgaaatcacgcgatttctcatttcatttttcacacttcaacaatggcgaaaaccttcaaatacatcatcctcggtggaggagtttccgctggttatgcggcgagggagtttgccaaacagggcgttaagccaggggagttggctatcatttcgaaagaagcggtagcaccttatgaacgtcctgctctgagcaaggcttacctttttccagagtcccctgctagacttcctgggttccatgtctgtgttggaagtggaggagaaaggttgcttcctgagtggtacacagagaaagggatagagttaattcttagcacagaaatagtaaaggtagaccttgctgcaaaatctctgatcagtgctggaggagaaacattcagttatcagattttgattgttgcaactggctcaacagttataaggctgacagatttcggtgtagaaggagctgatgcgaaaaacatcttttatttgagggaggttgacgatgctgacaaattgtacgcagcaatcaaggcaaagaagaatgggaaagctgtggttgttgggggaggatacattggtctggagcttagtgcagtgttgaaactcaacaatattgatgttaccatggtctacccggagccttggtgtatgccacgactttttacggctggtatagctgaattctatgagggatattacgcaaataagggtgtaaatatcattaaaggaactgttgctgttggattcacttctaattctgatggagaggtaaaagaagtcaaactaaaggatggcagggtcctggaagctgatattgttgttgttggtgttggaggaaggcctcaaacagtcttagtcaaagggcaggttgaagaggagaagggtggaatcaagaccgatgctttcttcaaaactaatctctccgatgtatatgctgttggtgatgttgctactttccctttgaaattatacggtgaattgagaagagttgaacatgttgatcattctcgcaaatcggctgaacaggctgtgaaggccatcaaggcagctgaggaaggaaaaacagttgaggagtatgattaccttccatacttctattcccgttcattcgatctgtcttggcaattctatggcgacaatgtcggcgacacagtgctattcggagacaacaatcctgcgtcttcaaagccaaagtttgggacatactggattaaagacgggaaagttgtcggggtctttctggaaggtggaactcctgaagaaaaccaggctattgctaaagttgctaaggtccagcctccggttgcggatgtaaatcaacttgctaaggaaggcctttcctttgctagtaaaatataatggttttatttgggaaggataaaaatgcttggtggtttgcatagattgtatctgacaggctttattttactctggtttatgcattactgtgttttttcgtttgatgtggttgcaagggatattatataatatatatatatgttttgccgtatctattcaaaaaaaaaaaaaaaaaag

SEQ ID NO: 152084 - protein, 433 aa, Glycine max
MAKTFKYIILGGGVSAGYAAREFAKQGVKPGELAIISKEAVAPYERPALSKAYLFPESPARLPGFHVCVGSGGERLLPEWYTEKGIELILSTEIVKVDLAAKSLISAGGETFSYQILIVATGSTVIRLTDFGVEGADAKNIFYLREVDDADKLYAAIKAKKNGKAVVVGGGYIGLELSAVLKLNNIDVTMVYPEPWCMPRLFTAGIAEFYEGYYANKGVNIIKGTVAVGFTSNSDGEVKEVKLKDGRVLEADIVVVGVGGRPQTVLVKGQVEEEKGGIKTDAFFKTNLSDVYAVGDVATFPLKLYGELRRVEHVDHSRKSAEQAVKAIKAAEEGKTVEEYDYLPYFYSRSFDLSWQFYGDNVGDTVLFGDNNPASSKPKFGTYWIKDGKVVGVFLEGGTPEENQAIAKVAKVQPPVADVNQLAKEGLSFASKI

SEQ ID NO: 152085 - DNA, 1939 bp, Glycine max
  CDS (100)..(1401)
cctcgaccgattcggctcagagtgcctggcgtcgcggacacagaccagagcttgcagaagcgatttctcatttctcattcttaacaacacacttcaacaatggccaaaaccttcaaatacatcatcctcggaggaggagtttccgctggttatgcggcgagggagtttgccaaacagggcgttaagccaggggagttggctatcatttccaaagaagcggtagcaccttatgaacgtcctgctctgagcaaggcttacctttttccagagtcccctgctagacttcctgggttccatgtctgtgttggaagtggaggggaaaggttgcttcctgagtggtacacagagaaagggatagagttaatacttagcacagaaatagtaaaggtggaccttgcggcaaaatctctgatcagtgcgggaggagaaacattcagttatcagattttgattgttgcaactggctcaacagttataaggctgacagattttggtgtagaaggagctgatgcgaaaaacatcttttatttgagggaggttgatgatgctgacaaattgtatgaggcaatcaaggcaaagaagaatgggaaagctgtggttgttgggggaggatacattggtctggagcttagtgcagtgttgaaactcaacaatattgatgttaccatggtctacccggagccttggtgtatgccacgactttttacggctggtatagctgaattctatgaggagtattacaaaaataagggtgtcaatatcattaaaggaactgttgctgttggattcacttctaattctgatggagaggtaaaagaagtcaaactaaaggatggcagggtcctggaagctgatattgttgtcgttggtgttggaggaaggcctcaaacagccttagtcaaagggcaggttgaagaggagaagggtggaatcaagaccgatgctttcttcaaaactaatctttccgatgtatatgctgttggtgatgttgctactttccctttgaaattatacggtgaattgagaagagttgaacatgttgatcattctcgcaaatcagctgaacaggctgtgaaggccatcaaggcagctgaggaaggaagaacagttgaggagtatgattaccttccatacttctattcccgttcatttgatctgtcttggcaattctatggcgacaatgtcggcgacacagtactattcggagacaacaatcctgcgtcgtcaaagcctaagtttgggacatactggattaaagatgggaaagttgttggggtctttctggaaggtggaactcctgaagagaaccaggctattgctaaagttgctaaggtccagcctccggttgcagatgtagatcaacttgctaaggaaggcctttcctttgctagtaaaatataatggttttaatagggaaggataaaaatgcttggtggtttgcatagaagattgtatctgatctggctttattttactctgaattatgctttgacgacgcaggattgttgtctccgaatagtactgtgtcgccgacattgtactattcggagacaacaatcctgtcgtcgtcaaagcctaagtttgggacatactggattaaagatgggaaagttgttggggtctttctggaaggtggaactcctgaagagaaccaggctattgctaaagttgctaaggtccagcctccggttgcagatgtagatcaacttgctaaggaaggcctttcctttgctagtaaaatataatggttttaatagggaaggataaaaatgcttggtggtttgcatagaagattgtatctgatctggctatattttactctgaattatgcattacagaagctttattttgtgttattcgtttgatgtggttgcacgggatatatatatatatatatattgccgtatctatttcaaaaaaaaaaaaaaaaagggcgggc

SEQ ID NO: 152086 - protein, 433 aa, Glycine max
MAKTFKYIILGGGVSAGYAAREFAKQGVKPGELAIISKEAVAPYERPALSKAYLFPESPARLPGFHVCVGSGGERLLPEWYTEKGIELILSTEIVKVDLAAKSLISAGGETFSYQILIVATGSTVIRLTDFGVEGADAKNIFYLREVDDADKLYEAIKAKKNGKAVVVGGGYIGLELSAVLKLNNIDVTMVYPEPWCMPRLFTAGIAEFYEEYYKNKGVNIIKGTVAVGFTSNSDGEVKEVKLKDGRVLEADIVVVGVGGRPQTALVKGQVEEEKGGIKTDAFFKTNLSDVYAVGDVATFPLKLYGELRRVEHVDHSRKSAEQAVKAIKAAEEGRTVEEYDYLPYFYSRSFDLSWQFYGDNVGDTVLFGDNNPASSKPKFGTYWIKDGKVVGVFLEGGTPEENQAIAKVAKVQPPVADVDQLAKEGLSFASKI

SEQ ID NO: 152087 - DNA, 1711 bp, Sorghum bicolor
  CDS (179)..(1486)
ccagggacccgcctccattccatttccgcttccccacccgtcgaggatcgtctcccgtcggtcggcgtccttcgcgatcgtctcgtctcgtttctcctcgccttcgatctccaggaccaggccggcagaagctgatcgaatccgagtagggttgatacagtttgattcggtgggaggcatggcgtcggagaagcacttcaagtacgtcatccttggcggcggcgtcgcggcggggtacgcggcgcgggagttcgccaagcagggagttaagcctggggagcttgccatcatctccaaggaggctgtggctccttacgagcgtcctgccctcagcaaaggttacctctttcctcagaatgctgcaagactcccaggattttatgtatgtgtgggaagtggtggagagaggctattgccagagtggtactcagagaaaggtattgagctgatccttagtacagaaattgtcaaagctgatctttccaccaagaccctgactagtgcagctggagcaaactttacatatgagatcttgctcattgctactggctcctcggtcataaagctcactgattttggcacaccaggagctgattcaaacaacattctatatctaagggaaattgatgatgctgacaagctggttgcagctatccaggcaaagaagggtggcaaggcagtggttgttggaggaggttatattggccttgaacttagtgcagccctgaagatcaatgactttgatgtcactatggtgttccctgaaccttggtgcatgcctcggctcttcactgccgacattgctgctttctacgaggcttactatactaacaaaggtgtaaaggtcttgaagggcacactagctgttggttttgatgctgatgccaatggtgatgtcactgcagttaaactaaaggatggcacagtacttgaagctgatattgttgttgtcggtgttggaggcagaccattgactactctcttcaaaggtcaagttgctgaggagaagggtggaatcaagactgatgccttctttgaaacaagtgttcctggagtatatgccattggtgatgtggctaccttccctttgaagatgtacaatgagttgaggagagtggaacatgttgaccattctaggaagtctgcagagcaggctgtaaaggcaatcaagggcaaagagtccggtgaaccagttccggagtatgactacctgccatacttctactcccgatcattcgacctggggtggcaattctacggcgacaacgtgggtgaaaccatcctatttggcgacagtgaccccacctccagcaagcccaagttcggctcgtactggatcaaggacggcaaggtcttgggcgccttcctggaaggcgggtcaccggatgagaacaaggccattgccaaggtggcgaaaacccagccgccggtcgctaacctcgaggagctcaagaaggagggcctccagttcgccagcaagatctgagacgctccacgttccatgtacatttccgtgtcatcatttaggttgttcttctggagttctggtcatggttgcaatgttctgctacagatgttgccgtgcatacgtgactacatgatatatcggtttttctgattgtcgtgtctgtacgtgactacactcacacgtgagaaatttgaataaagtctgcagactcagggttcaaatagcacaaatttttttccgaaa

SEQ ID NO: 152088 - protein, 435 aa, Sorghum bicolor
MASEKHFKYVILGGGVAAGYAAREFAKQGVKPGELAIISKEAVAPYERPALSKGYLFPQNAARLPGFYVCVGSGGERLLPEWYSEKGIELILSTEIVKADLSTKTLTSAAGANFTYEILLIATGSSVIKLTDFGTPGADSNNILYLREIDDADKLVAAIQAKKGGKAVVVGGGYIGLELSAALKINDFDVTMVFPEPWCMPRLFTADIAAFYEAYYTNKGVKVLKGTLAVGFDADANGDVTAVKLKDGTVLEADIVVVGVGGRPLTTLFKGQVAEEKGGIKTDAFFETSVPGVYAIGDVATFPLKMYNELRRVEHVDHSRKSAEQAVKAIKGKESGEPVPEYDYLPYFYSRSFDLGWQFYGDNVGETILFGDSDPTSSKPKFGSYWIKDGKVLGAFLEGGSPDENKAIAKVAKTQPPVANLEELKKEGLQFASKI

SEQ ID NO: 152089 - DNA, 1308 bp, Oryza sativa (japonica cultivar-group)
  CDS (1)..(1308)
atggcgtcggagaagcacttcaagtacgtcatcctcggcggcggcgtcgcagcgggatatgcggcacgggagttcgccaagcagggtgttaagccaggggagctcgccatcatctccaaggaggccgtggctccttatgagcgccctgctctcagcaagggatacctctttcctcagaatgctgcaagactcccaggatttcatgtgtgtgtcggcagtggaggagagaggcttttgcccgaatggtactcagagaaaggcattgagttgatcctgagcactgaaattgtcaaagctgatcttgcctccaagactttgactagtgcagttggagcaacctttacatatgagattttgatcattgcaactggctcctcagtcatcaagctatcagattttggtactcaaggagctgattccaacaacattttatatctaagggaagtagatgatgctgacaagctggttgcagctatccaagcaaagaagggtggaaaggcagttattgtaggaggaggttacattggtctagaacttagtgctgcattgaagatcaatgattttgatgtcacgatggtgtttcctgaaccttggtgcatgcctcgtctcttcactgctgatatcgcggctttctatgagagttactacactaacaaaggagttaagatcgtgaagggtacagtagctgttggttttgatgctgatgctaatggtgatgtcacagcagttaacctgaagaatggcagtgtgcttgaagctgatattgttgttgttggtgttgggggcagaccgctgactactctctttaaaggtcaagttgctgaggagaaaggtggaattaagaccgatgctttctttgaaacaagtgttcctggagtctatgctgtcggtgatgtggccaccttccccatgaagatgtacaatgagttgaggagagtggaacatgttgaccatgctaggaagtctgcagagcaggctgtaaaggcaatcaagggaaaagagtccggcgagtccgttgtggagtatgactatctgccatacttctactcccggtcattcgacctgggatggcaattctacggcgacaacgttggcgacaccatcctgttcggagacagtgacccgacctctgccaagcccaagttcgggtcctactggatcaaggacggcaaggtgttgggtgccttcctggagggtgggtcacctgatgagaacaaggccattgccaaggtcgcgaaaactcagccgcccgttgccaacatagaggagctcaagaaggaaggcctccagttcgccagcaaaatatga

SEQ ID NO: 152090 - protein, 435 aa, Oryza sativa (japonica cultivar-group)
MASEKHFKYVILGGGVAAGYAAREFAKQGVKPGELAIISKEAVAPYERPALSKGYLFPQNAARLPGFHVCVGSGGERLLPEWYSEKGIELILSTEIVKADLASKTLTSAVGATFTYEILIIATGSSVIKLSDFGTQGADSNNILYLREVDDADKLVAAIQAKKGGKAVIVGGGYIGLELSAALKINDFDVTMVFPEPWCMPRLFTADIAAFYESYYTNKGVKIVKGTVAVGFDADANGDVTAVNLKNGSVLEADIVVVGVGGRPLTTLFKGQVAEEKGGIKTDAFFETSVPGVYAVGDVATFPMKMYNELRRVEHVDHARKSAEQAVKAIKGKESGESVVEYDYLPYFYSRSFDLGWQFYGDNVGDTILFGDSDPTSAKPKFGSYWIKDGKVLGAFLEGGSPDENKAIAKVAKTQPPVANIEELKKEGLQFASKI

SEQ ID NO: 152091 - DNA, 1221 bp, Mycobacterium tuberculosis H37Rv
  CDS (1)..(1221): transl_table=11
atgaacgcacacgtgaccagtcgtgaaggcgtcaatgagtttgacgatggaattgtgatcgtcggcggcggattggcagctgcgcgcaccgccgagcagttgcgtcgtgcgggctattcgggtcgcctcacgatcgtcagcgacgaggtgcatctgccgtacgaccgtccgccgctatccaaggaggtgctgcgcagcgaggtcgacgatgtggccctcaaaccccgcgagttctacgacgaaaaggacatcgcacttcggctggggtcggctgccgtcagcttggacacgggagaacagacggtaacgctggccgacggtacggtgctcggctacgacgagctcgtcatcgcgactggtttggtgccccggcgtattccatcgcttcccgaccttgatggcattcgggtgctccggtcgttcgacgagagcatggcactgcgcaagcatgcatccgccgcacggcacgccgtggtggtgggggccggtttcatcggctgcgaggtggctgccagtctgcgcggtctcggtgtggatgtggtgctggttgagccgcagccggcgccgttggcctcggtgctgggcgagcagatcggccagttggtgacgcggctccatcgcgatgagggcgttgatgttcgcacgggtgtgacagtggccgaggtacgtggcaaggggcatgtcgacgcggtggtcctgaccgacggtaccgaactgccggctgatctggtggttgtgggcattgggtcgaccccggcgaccgaatggctagagggtagcggcgtcgaggtcgacaacggcgtgatctgtgacaaagccgggcggactagcgcgccgaatgtgtgggcgctcggtgacgtcgcctcctggcgagatccgatgggacaccaagcacgcgtggaacattggagcaacgtcgccgaccaggcccgagtcgtggtgcccgcgatgctcgggaccgatgtgcccacgggcgtggtcgtcccgtatttctggagtgaccagtatgacgtcaaaatccagtgcctgggggagccgcacgccaccgacgttgtgcatctggtcgaggacgacgggcgcaagttccttgcctattacgagcgcgatggcgtgctggttggcgtggtcggtggcgggatggccggcaaggtcatgaaggtgcgcggcaagatcgccgcgggcgcgcccatcgccgaagtgttagaccaaactcaggcctag

SEQ ID NO: 152092 - protein, 406 aa, Mycobacterium tuberculosis H37Rv
MNAHVTSREGVNEFDDGIVIVGGGLAAARTAEQLRRAGYSGRLTIVSDEVHLPYDRPPLSKEVLRSEVDDVALKPREFYDEKDIALRLGSAAVSLDTGEQTVTLADGTVLGYDELVIATGLVPRRIPSLPDLDGIRVLRSFDESMALRKHASAARHAVVVGAGFIGCEVAASLRGLGVDVVLVEPQPAPLASVLGEQIGQLVTRLHRDEGVDVRTGVTVAEVRGKGHVDAVVLTDGTELPADLVVVGIGSTPATEWLEGSGVEVDNGVICDKAGRTSAPNVWALGDVASWRDPMGHQARVEHWSNVADQARVVVPAMLGTDVPTGVVVPYFWSDQYDVKIQCLGEPHATDVVHLVEDDGRKFLAYYERDGVLVGVVGGGMAGKVMKVRGKIAAGAPIAEVLDQTQA

SEQ ID NO: 152093 - DNA, 1221 bp, Mycobacterium tuberculosis CDC1551
  CDS (1)..(1221): transl_table=11
atgaacgcacacgtgaccagtcgtgaaggcgtcaatgagtttgacgatggaattgtgatcgtcggcggcggattggcagctgcgcgcaccgccgagcagttgcgtcgtgcgggctattcgggtcgcctcacgatcgtcagcgacgaggtgcatctgccgtacgaccgtccgccgctatccaaggaggtgctgcgcagcgaggtcgacgatgtggccctcaaaccccgcgagttctacgacgaaaaggacatcgcacttcggctggggtcggctgccgtcagcttggacacgggagaacagacggtaacgctggccgacgttacggtgctcggctacgacgagctcgtcatcgcgactggtttggtgccccggcgtattccatcgcttcccgaccttgatggcattcgggtgctccggtcgttcgacgagagcatggcactgcgcaagcatgcatccgccgcacggcacgccgtggtggtgggggccggtttcatcggctgcgaggtggctgccagtctgcgcggtctcggtgtggatgtggtgctggttgagccgcagccggcgccgttggcctcggtgctgggcgagcagatcggccagttggtgacgcggctccatcgcgatgagggcgttgatgttcgcacgggtgtgacagtggccgaggtacgtggcaaggggcatgtcgacgcggtggtcctgaccgacggtaccgaactgccggctgatctggtggttgtgggcattgggtcgaccccggcgaccgaatggctagagggtagcggcgtcgaggtcgacaacggcgtgatctgtgacaaagccgggcggactagcgcgccgaatgtgtgggcgctcggtgacgtcgcctcctggcgagatccgatgggacaccaagcacgcgtggaacattggagcaacgtcgccgaccaggcccgagtcgtggtgcccgcgatgctcgggaccgatgtgcccacgggcgtggtcgtcccgtatttctggagtgaccagtatgacgtcaaaatccagtgcctgggggagccgcacgccaccgacgttgtgcatctggtcgaggacgacgggcgcaagttccttgcctattacgagcgcgatggcgtgctggttggcgtggtcggtggcgggatggccggcaaggtcatgaaggtgcgcggcaagatcgccgcgggcgcgcccatcgccgaagtgttagaccaaactcaggcctag

SEQ ID NO: 152094 - protein, 406 aa, Mycobacterium tuberculosis CDC1551
MNAHVTSREGVNEFDDGIVIVGGGLAAARTAEQLRRAGYSGRLTIVSDEVHLPYDRPPLSKEVLRSEVDDVALKPREFYDEKDIALRLGSAAVSLDTGEQTVTLADVTVLGYDELVIATGLVPRRIPSLPDLDGIRVLRSFDESMALRKHASAARHAVVVGAGFIGCEVAASLRGLGVDVVLVEPQPAPLASVLGEQIGQLVTRLHRDEGVDVRTGVTVAEVRGKGHVDAVVLTDGTELPADLVVVGIGSTPATEWLEGSGVEVDNGVICDKAGRTSAPNVWALGDVASWRDPMGHQARVEHWSNVADQARVVVPAMLGTDVPTGVVVPYFWSDQYDVKIQCLGEPHATDVVHLVEDDGRKFLAYYERDGVLVGVVGGGMAGKVMKVRGKIAAGAPIAEVLDQTQA

SEQ ID NO: 152095 - DNA, 1215 bp, Sulfolobus solfataricus P2
  CDS (1)..(1215): transl_table=11
atgaaatgtgaatacttaattattggaagtggcattgcgggatataacgcactaaaggaattactccaaataaaaccaaactcgagaataattatgataacctcagacaaatattatccatatgatagaccaccactatcaaaggattatcttaaaggaaaattggaaaaagatatgttattcttcgagtctgatgatttttacaagagggataatttagaggtaatgttaaacaagagtgtcgaaaggattgatgctaatttaaaggaggcaatactaaatgatggtagtgtaatatcctttgataaggcattaataagtactggtggtaggcctaggagattaaacattccggggagtgaaaacgcgttatacttaagaagtttggatgacgcagataggataagggaagctgcgagtaaaggcaaaaacgcgttaataattggtgctggatttataggtgttgaagtggcctctagcttgataacacttggtgtaaagactacagtagtggaagtaatgccatacatatggaatacattcgtagacgaaaaagtatcaagagtcatacaacaatacttggaaagtaagggaataaacttcattctaaacgagtcagtgaaggagattcaagggaaaatcgcaacaacctcaagcggtagaaaaattgaggcagacatgttcctaatcgcagtgggaatctcgccaaatgtcgaactagcgcagagaagtggaatgcaagtggataatggcatagttgttaacgagtacctagagacgagtgccagggatatttatgcagctggggacatcgctaacatattcgatccaagggagggtaagaggaagagaatagagcattggaacaacgcggaatacactggaaaattggcagctaggaatatggctggaagcagagaggcttacaatttcatatcatccatatggtcagacatattcgacttacacatagagtcagccggtgaaacaaggaattatgacgaatatataataaggggaaagtttgaattggaaagaccaaggtttagtgtaatatacttaaaaggaggtattataaagggttacttagcgataaatagaaacgttaaagaaataatagccctcaataaattaatacaaaagcaagcagacgtttcaagtaaaagagataagttggcagatgaaagttttgatcttcagaaacttttaatataa

SEQ ID NO: 152096 - protein, 404 aa, Sulfolobus solfataricus P2
MKCEYLIIGSGIAGYNALKELLQIKPNSRIIMITSDKYYPYDRPPLSKDYLKGKLEKDMLFFESDDFYKRDNLEVMLNKSVERIDANLKEAILNDGSVISFDKALISTGGRPRRLNIPGSENALYLRSLDDADRIREAASKGKNALIIGAGFIGVEVASSLITLGVKTTVVEVMPYIWNTFVDEKVSRVIQQYLESKGINFILNESVKEIQGKIATTSSGRKIEADMFLIAVGISPNVELAQRSGMQVDNGIVVNEYLETSARDIYAAGDIANIFDPREGKRKRIEHWNNAEYTGKLAARNMAGSREAYNFISSIWSDIFDLHIESAGETRNYDEYIIRGKFELERPRFSVIYLKGGIIKGYLAINRNVKEIIALNKLIQKQADVSSKRDKLADESFDLQKLLI

SEQ ID NO: 152097 - DNA, 1461 bp, Arabidopsis thaliana
  CDS (1)..(1461)
atggcgttagcatcaaccacgttgccgacgaagtccggattatctctttggtgtccgtcttctccgtctctcgctcgccgatttcccgctcgtttttctccgatcggttctagaatcgcttccagaagcctcgtcactgcttcgttcgctaacgagaatcgcgagtttgtgattgttggtggaggaaatgctgctggttatgctgctagaacttttgtggaaaatggaatggctgatggtcggctatgcattgtgaccaaagaggcttacgcaccttatgagagaccggctttgacaaaagcttacttgttcccaccagagaagaagccagctcgtttaccaggatttcatacttgcgttggaggtggtggagaaaggcaaacaccagattggtataaggagaaaggaattgaggtaatatatgaagatccagtggctggagctgattttgaaaagcaaacactcaccacagacgcagggaagcagttaaaatatggatctctaattatcgctacagggtgtacagcctcaaggttcccagataaaatcggtgggcacttgccaggggttcactatattcgggaggttgcagatgctgattcactgatagcatctctgggaaaggcaaagaaaattgtcattgttggtggtggctacatcggcatggaggttgctgctgcagctgttgcgtggaatctagatacaacgattgtattccctgaagatcagcttttgcaaagattgttcactccatcgcttgctcagaaatatgaagaactgtaccgtcaaaatggtgttaagtttgtcaagggcgcttccataaataacttggaagcaggttcggatgggcgtgtatcagctgttaagcttgctgatgggtctacaattgaggcagacacggttgtaattggaattggagctaagcctgctattggcccctttgaaactttggccatgaacaaatcaattggaggaattcaggtcgatggcttgttcaggacaagtacccctggaatttttgctattggagatgtcgcagccttccctttgaagatatatgataggatgactcgagttgaacatgttgatcacgcccgccgctctgcacaacactgtgtgaaatcactactcacggcacacactgacacgtacgattatcttccatatttctactcaagagtattcgagtatgaaggaagcccaagaaaagtgtggtggcagtttttcggagataatgtgggagaaacagtggaggttgggaactttgacccgaaaatcgctaccttctggattgaatctggcaggttgaaaggtgttctagtagaaagcggatcgcctgaggagttccagcttctaccaaagctagcaagaagccaaccacttgtcgataaggctaaactcgcaagcgcatcttcagtcgaagaagctctcgagattgctcaagccgctctacagagttag

SEQ ID NO: 152098 - protein, 486 aa, Arabidopsis thaliana
MALASTTLPTKSGLSLWCPSSPSLARRFPARFSPIGSRIASRSLVTASFANENREFVIVGGGNAAGYAARTFVENGMADGRLCIVTKEAYAPYERPALTKAYLFPPEKKPARLPGFHTCVGGGGERQTPDWYKEKGIEVIYEDPVAGADFEKQTLTTDAGKQLKYGSLIIATGCTASRFPDKIGGHLPGVHYIREVADADSLIASLGKAKKIVIVGGGYIGMEVAAAAVAWNLDTTIVFPEDQLLQRLFTPSLAQKYEELYRQNGVKFVKGASINNLEAGSDGRVSAVKLADGSTIEADTVVIGIGAKPAIGPFETLAMNKSIGGIQVDGLFRTSTPGIFAIGDVAAFPLKIYDRMTRVEHVDHARRSAQHCVKSLLTAHTDTYDYLPYFYSRVFEYEGSPRKVWWQFFGDNVGETVEVGNFDPKIATFWIESGRLKGVLVESGSPEEFQLLPKLARSQPLVDKAKLASASSVEEALEIAQAALQS

SEQ ID NO: 152099 - DNA, 1236 bp, Corynebacterium glutamicum ATCC 13032
  CDS (1)..(1236): transl_table=11
atgagcacaccacaaagcatcgtcattatcggcggcggtttagccggagcgaaaaccgcagaggcactacgtgtaaacgggtatgaaggctccatcacgctcatcgcagcagaggattatctgccatatgagcgcccaccgctgtcaaaggagtacatggctggaaaagtgggctttgacaaggcgattgttcacccggcggagtggtacaaagaaaacaatgtcacgctgcgtcaaggtgtgcgtgcaacggcaattgatgcgggttcacgccaagtcaccgttgatgatggcggaaacactgagaccattaactacgacaaactagttcttgctactggatcagcagtgcgcaaacttccaattccgggagccgacgcctctaatgtgcactacctgcgcaccgtggaagactctgacgcgatcaaggcaaccttcggtgaaggtaaaaagctggtcctcatcggtggtggctggatcggactcgaagtcgcatcagcggcacgaggagctggcactgacgtcactgttttggaaggtggaaagctcccacttttgaaagtccttggtgaaacggtcgcgcaagtctttgccgatctgcatgtggcaaacggcgttgacctgcgcaccgaagtgaaaattacggacatcgtcaccgaagatggacgtgcagttggcgtgcgacttgatgacggcgaagtggttcccgcagacgcagtagtcattggcatcggtgtcaccccagtgattgacctagcggaaactgctggactggaaatcgacaatggtgttttggtggacgcagcactgcgtaccagcgacccggatatctacgcagttggagacattgcgaaccacgatcacccagttctaggacaccgcatccgcgtggagcactgggccaccgcgttgaatcaacctgcggctgcggtgaaatccctacttggcaaagacgccgagtttaccaaccttccgtacttctttacagatcaattcgatctgggttgtgaatacgtcggccacgccaccggttcgcaggagaaggtattcatccgtggaaaccttgaaacacgagaatttgtcgccttctgggttgatactgaaaaccgaattctcgccgcaatgaacgtgaatgtgtgggatgttcctgatcaaatcaagcctctcatcgcatcaggaaagagcgttgacaccgagaagctagtggatccagaagttccgtattcagagctctaa

SEQ ID NO: 152100 - protein, 411 aa, Corynebacterium glutamicum ATCC 13032
MSTPQSIVIIGGGLAGAKTAEALRVNGYEGSITLIAAEDYLPYERPPLSKEYMAGKVGFDKAIVHPAEWYKENNVTLRQGVRATAIDAGSRQVTVDDGGNTETINYDKLVLATGSAVRKLPIPGADASNVHYLRTVEDSDAIKATFGEGKKLVLIGGGWIGLEVASAARGAGTDVTVLEGGKLPLLKVLGETVAQVFADLHVANGVDLRTEVKITDIVTEDGRAVGVRLDDGEVVPADAVVIGIGVTPVIDLAETAGLEIDNGVLVDAALRTSDPDIYAVGDIANHDHPVLGHRIRVEHWATALNQPAAAVKSLLGKDAEFTNLPYFFTDQFDLGCEYVGHATGSQEKVFIRGNLETREFVAFWVDTENRILAAMNVNVWDVPDQIKPLIASGKSVDTEKLVDPEVPYSEL

SEQ ID NO: 152101 - DNA, 1224 bp, Streptomyces coelicolor A3(2)
  CDS (1)..(1224): transl_table=11
gtggtcgtggtgggcgccgggatggcgggcgtgcagaccgcggtcgccctgcgggaacagggcttcaccggcccggtgaccctgatcggtgcggagccgcaccagccgtacgaccgccccccgctgtccaaggccgtcctgctcggcaccgccgagggctccgccttcgacgtcgacttcgaggccctcggcatcaccctgcggctgggctgcgaggccctgggcgtccgccccgcggagcacgtcctggacacctccgaggggcccgtgccctacgacgtcctcgtcctggcgaccggcgccgaaccggtgcggctccccggcgcggagggcgtgcccggcgtgcacctgctgcgcaccctggacgacgcggaacggttgcggccggtactcgcccggcagcacgacgtcgtggtcgtcggcgcgggctggatcggcgccgagttcgccaccgccgcgcgcgaggcgggctgcgcggtgaccgtggtggaggccgccgaccggccgctggccgacgcgctgcccgccgaggtcgccgcgccgatgaccgcctggtacgccgacgccggcgccgaactgcgcacccgcgcgcgcgtggagcgcgtcgagtccggcggccccggtgagtccggccgggtcgtcctcgacgacggcacccggctggccgcgggcgcggtcgtcgtcggcatcggcgcccgcccggccaccggctggctggccgggtccggcatcgccctcggcgcgcacggcgaggtgctggccgacgacctcctgcgcacctccgcgccggacgtccacgcggtcggcgactgcgcctccttcccctccgcccgctacggcgagcggctgctggtgcaccactgggacaacgccctccagggcccgcgcacggtcgccgccgacatcgtcggcaccccgggcggcgagaccccggcggcctacgacccggtgccctacttctggtccgagcagttcggccgcttcgtccagtacgccggtcaccacaccgccgccgacaccaccctgtggcgcggcgaccccgcgagcccggcgtggacggtctgctggctgcgcgagggccgcctggtcgccctgctcgcggtgggccgcccccgcgacctggcgcagggcaggcgcctgatccaggcgggcacgccgatggacccggacctgctggccgacccggcgaagccgttgaaggcggcgacggcggccacggcgtag

SEQ ID NO: 152102 - protein, 407 aa, Streptomyces coelicolor A3(2)
MVVVGAGMAGVQTAVALREQGFTGPVTLIGAEPHQPYDRPPLSKAVLLGTAEGSAFDVDFEALGITLRLGCEALGVRPAEHVLDTSEGPVPYDVLVLATGAEPVRLPGAEGVPGVHLLRTLDDAERLRPVLARQHDVVVVGAGWIGAEFATAAREAGCAVTVVEAADRPLADALPAEVAAPMTAWYADAGAELRTRARVERVESGGPGESGRVVLDDGTRLAAGAVVVGIGARPATGWLAGSGIALGAHGEVLADDLLRTSAPDVHAVGDCASFPSARYGERLLVHHWDNALQGPRTVAADIVGTPGGETPAAYDPVPYFWSEQFGRFVQYAGHHTAADTTLWRGDPASPAWTVCWLREGRLVALLAVGRPRDLAQGRRLIQAGTPMDPDLLADPAKPLKAATAATA

SEQ ID NO: 152103 - DNA, 1266 bp, Streptomyces coelicolor A3(2)
  CDS (1)..(1266): transl_table=11
gtggtcgacgcggatcagacattcgtcatcgtcggaggcggcctggcgggcgcgaaagcggccgagacgctccgcacggagggcttcaccggccgggtgatcctcgtctgcgacgaacgcgaccacccctacgagcgcccgccgctgtccaagggctacctcctgggcaaggaggagcgcgacagcgtcttcgtgcacgagcccgcctggtacgcccggcacgacatcgagctgcacctcggccagaccgtcgtcgcgatcgaccgcgccgccaagaccgtccactacggcgacgacggcacccacgtcagctacgacaagctgctcatcgcgaccggcgccgagccccgccgcctggacgtccccggcaccggcctcgcgggcgtccaccacctgcgccgcctggcgcacgccgagcgcctcaagggcgtcctcgccaccctcggccgggacaacggacacctggtgatcgccggcgcgggctggatcggcctggaggtcgcggccgcggcccgcgagtacggtgcggaggtcaccgtcatcgagcccgccccgaccccgctgcacggcgtcctcggtcccgagctgggcgccgtcttcgccgagctgcacgagtcgcgcggcgtccgcttccgcttcggcgtgaagctgaccgagatcgtcggccaggacggtgtggtgctggccgcccgcaccgacgacggcgaggagcaccccgcgcacgacgtgctcgccgcgatcggcgccgccccgcgcaccgcgctcgcccaggcggccgggttggagatcgccgaccgcgcgcacggcggcggcatcgtcgtcgacgaccacctgcgcacctccgaccccgacatcttcgcggccggcgacgtggcctccttccaccacgccctcttcgacaccagcctgcgcgtggagcactgggccaacgccctgaacggcggtccggccgccgcccgcgcgatgctcggcaggggcctcgcccacgaccgcgtgccctacttcttcaccgaccagtacgacctgggcatggagtactccggctgggcgccggccggctcgtacgaccaggtggtgatccgcggggacgcggcgaagcgcgagttcatcgccttctgggtgaaggagggccgggtgctggccgggatgaacgtcaacgtgtgggacgtcacggagccgatccagcagctgatccgctcgaagacccgggtggacacggaggacctggcgaacccgcacgtatccctcgaaagcctcgtcgcatag

SEQ ID NO: 152104 - protein, 421 aa, Streptomyces coelicolor A3(2)
MVDADQTFVIVGGGLAGAKAAETLRTEGFTGRVILVCDERDHPYERPPLSKGYLLGKEERDSVFVHEPAWYARHDIELHLGQTVVAIDRAAKTVHYGDDGTHVSYDKLLIATGAEPRRLDVPGTGLAGVHHLRRLAHAERLKGVLATLGRDNGHLVIAGAGWIGLEVAAAAREYGAEVTVIEPAPTPLHGVLGPELGAVFAELHESRGVRFRFGVKLTEIVGQDGVVLAARTDDGEEHPAHDVLAAIGAAPRTALAQAAGLEIADRAHGGGIVVDDHLRTSDPDIFAAGDVASFHHALFDTSLRVEHWANALNGGPAAARAMLGRGLAHDRVPYFFTDQYDLGMEYSGWAPAGSYDQVVIRGDAAKREFIAFWVKEGRVLAGMNVNVWDVTEPIQQLIRSKTRVDTEDLANPHVSLESLVA

SEQ ID NO: 152105 - DNA, 1263 bp, Streptomyces coelicolor A3(2)
  CDS (1)..(1263): transl_table=11
atgccgcgtgcgaagacgttcgtgatcgtcgggggcggcctggccgccggcaaggccgcggaggaactgcgcgagcacggccacgacgggccgcttctcgtgatcggggacgagcgggaacgaccgtacatccggccgccgctgtccaaggggtacctgctgggcaaggaggaccgcgagtccatccacgtgcaccccgagagctggtaccgggagcacgacgtcgatctgctcctcggcacgagcgtgacgtccgtcgacgcgcgtggccgggcggtgacgctggacgacggccgtcgcgtgccctacgccggtctgctgctggccaccggttcctcgccgcgccgcctgtcggtgccgggcgcggacctggagggcgtgctgtacctgcggcgcgtgggcgacagcgagcgcctcaaggaggcgttcaccgaaggagcccggatcgtggtggtcggcggcggctggatcgggctggagacggcggcggcggcccgggcggccggcgcggaggtgaccgtgctggagcgcggtgagctgcccctgctgaaggtcctgggccgcgaggcggccgaggtcttcgccggtctgcaccgggaccacggtgtggacctgcgtccccatgcccggatcgaggccgtcaccggcaccgggggccgcgtcgacggggtccggctcgccgacggcacccacctgcccgcggacgccgtggtcgtgggggtgggcatcacgcccaacgtccgcctggccgaggaggcgggcctcgacgtgcgcaacggcatcgtgacggacgcccgtctgcggacctccgccgccggggtccacgccgccggtgacgtcgccaacgcctaccacccccggctcggccggcacctgcgcgtggagcactgggccaacgcgctgcaccagccccgtaccgccgcgctgagcatgctcggccaggacgcggtgtacgaccggctgccgtacttctacaccgaccagtacgacctcggcatggagtacaccgggtacgccgaaccgggcggctacgaccgcgtcgtcttccgcgggtcgcgcgaggagcggcggttcctggcgttctggatgtccggcgaccgggtgctggcggggatgagcgtcaacctgtgggacgtgatcgggacgatccgcgccctgatcgagtcgggcgcggagacggacgacgccgccctggccgacccctcggtcccgctggagagcctgcttcccccgcacgcgcggccgacgggagaccaggcgtga

SEQ ID NO: 152106 - protein, 420 aa, Streptomyces coelicolor A3(2)
MPRAKTFVIVGGGLAAGKAAEELREHGHDGPLLVIGDERERPYIRPPLSKGYLLGKEDRESIHVHPESWYREHDVDLLLGTSVTSVDARGRAVTLDDGRRVPYAGLLLATGSSPRRLSVPGADLEGVLYLRRVGDSERLKEAFTEGARIVVVGGGWIGLETAAAARAAGAEVTVLERGELPLLKVLGREAAEVFAGLHRDHGVDLRPHARIEAVTGTGGRVDGVRLADGTHLPADAVVVGVGITPNVRLAEEAGLDVRNGIVTDARLRTSAAGVHAAGDVANAYHPRLGRHLRVEHWANALHQPRTAALSMLGQDAVYDRLPYFYTDQYDLGMEYTGYAEPGGYDRVVFRGSREERRFLAFWMSGDRVLAGMSVNLWDVIGTIRALIESGAETDDAALADPSVPLESLLPPHARPTGDQA

SEQ ID NO: 152107 - DNA, 1266 bp, Streptomyces avermitilis MA-4680
  CDS (1)..(1266): transl_table=11
gtggtcgacgcggatcagacattcgtcatcgtcggaggaggtctggccggcgcgaaggcggccgagacgctccgcgcggaggggttcaccgggcgggtgatactgatctgtgacgagcgtgaccacccgtacgagcgcccaccgctgtccaaggggtatctgctcggcaaggaggagcgcgacagcgtcttcgtccacgaacccgcctggtacgcgcggaacgacatcgagctgcacctcggccagaccgtcgacgcggtcgaccgcgccgcgaagacggtccgcttcggcgacgacggcaccctggtgcactacgacaagctgctcctcgccaccggcgccgagccccgccgcctcgacatcccgggcacggacctcgccggggtccaccatctgcgacgcctcgcccacgccgagcggctcaagggcgtcctcgccgccctcggccgggacaacgggcacctcgtcatcgcgggcgccggctggatcggcctggaggtcgcggcggcggcccgcgagtacggcgcggaggtcaccgtcgtcgagcacgggccgaccccgctgcacggcgttctcggccccgagctgggccaggtcttcgccgagctgcaccgtgaacacggcgtccgcttccacttcggcgtccggctgaccgagatcgtcgggcaggacggcatggtgctggccgcgcgtacggacgacggcgaggagcacccggcgcacgacgtgctcgccgcgatcggcgccgccccgcgcaccggtctcgccgaggccgcgggcctgacgctcgccgaccgcgcccacggcggcggtatcgcggtcgacgggcggctgcgcacctccgaccccgacatctacgccgccggcgacgtcgccgccttccaccaccccctcttcgacacccggctgcgcgtcgaacactgggccaacgcgctcaacggcgggccggcggcggcgcgcgcgatgctcggccgcgacctcacgtacgaccggatgccgtacttcttctccgaccagtacgacctggggatggagtactcgggctgggcacccccggggacgtacgaccaggtggtgatccgcggggacgcgggcaagcggcagttcatcgcgttctgggtgaaggaggggcgggtgctggccgggatgaacgtgaatgtgtgggacgtcacggagccgatccaggccctgatccgctccggaaccccggtggacacggaggccctggcaaacccgcacgtcccactggagaccctgaccccctga

SEQ ID NO: 152108 - protein, 421 aa, Streptomyces avermitilis MA-4680
MVDADQTFVIVGGGLAGAKAAETLRAEGFTGRVILICDERDHPYERPPLSKGYLLGKEERDSVFVHEPAWYARNDIELHLGQTVDAVDRAAKTVRFGDDGTLVHYDKLLLATGAEPRRLDIPGTDLAGVHHLRRLAHAERLKGVLAALGRDNGHLVIAGAGWIGLEVAAAAREYGAEVTVVEHGPTPLHGVLGPELGQVFAELHREHGVRFHFGVRLTEIVGQDGMVLAARTDDGEEHPAHDVLAAIGAAPRTGLAEAAGLTLADRAHGGGIAVDGRLRTSDPDIYAAGDVAAFHHPLFDTRLRVEHWANALNGGPAAARAMLGRDLTYDRMPYFFSDQYDLGMEYSGWAPPGTYDQVVIRGDAGKRQFIAFWVKEGRVLAGMNVNVWDVTEPIQALIRSGTPVDTEALANPHVPLETLTP

SEQ ID NO: 152109 - DNA, 1449 bp, Arabidopsis thaliana
  CDS (1)..(1449)
atggcgttagcatcaaccacgttgccgacgaagtccggattatctctttggtgtccgtcttctccgtctctcgctcgccgatttcccgctcgtttttctccgatcggttctagaatcgcttccagaagcctcgtcactgcttcgttcgctaacgagaatcgcgagtttgtgattgttggtggaggaaatgctgctggttatgctgctagaacttttgtggaaaatggaatggctgatggtcggctatgcattgtgaccaaagaggcttacgcaccttatgagagaccggctttgacaaaagcttacttgttcccaccagagaagaagccagctcgtttaccaggatttcatacttgcgttggaggtggtggagaaaggcaaacaccagattggtataaggagaaaggaattgaggtaatatatgaagatccagtggctggagctgattttgaaaagcaaacactcaccacagacgcagggaagcagttaaaatatggatctctaattatcgctacagggtgtacagcctcaaggttcccagataaaatcggtgggcacttgccaggggttcactatattcgggaggttgcagatgctgattcactgatagcatctctgggaaaggcaaagaaaattgtcattgttggtggtggctacatcggcatggaggttgctgctgcagctgttgcgtggaatctagatacaacgattgtattccctgaagatcagcttttgcaaagattgttcactccatcgcttgctcagaaatatgaagaactgtaccgtcaaaatggtgttaagtttgtcaagggcgcttccataaataacttggaagcaggttcggatgggcgtgtatcagctgttaagcttgctgatgggtctacaattgaggcagacacggttgtaattggaattggagctaagcctgctattggcccctttgaaactttggccatgaacaaatcaattggaggaattcaggtcgatggcttgttcaggacaagtacccctggaatttttgctattggagatgtcgcagccttccctttgaagatatatgataggatgactcgagttgaacatgttgatcacgcccgccgctctgcacaacactgtgtgaaatcactactcacggcacacactgacacgtacgattatcttccatatttctactcaagagtattcgagtatgaaggaagcccaagaaaagtgtggtggcagtttttcggagataatgtggaggttgggaactttgacccgaaaatcgctaccttctggattgaatctggcaggttgaaaggtgttctagtagaaagcggatcgcctgaggagttccagcttctaccaaagctagcaagaagccaaccacttgtcgataaggctaaactcgcaagcgcatcttcagtcgaagaagctctcgagattgctcaagccgctctacagagttag

SEQ ID NO: 152110 - protein, 482 aa, Arabidopsis thaliana
MALASTTLPTKSGLSLWCPSSPSLARRFPARFSPIGSRIASRSLVTASFANENREFVIVGGGNAAGYAARTFVENGMADGRLCIVTKEAYAPYERPALTKAYLFPPEKKPARLPGFHTCVGGGGERQTPDWYKEKGIEVIYEDPVAGADFEKQTLTTDAGKQLKYGSLIIATGCTASRFPDKIGGHLPGVHYIREVADADSLIASLGKAKKIVIVGGGYIGMEVAAAAVAWNLDTTIVFPEDQLLQRLFTPSLAQKYEELYRQNGVKFVKGASINNLEAGSDGRVSAVKLADGSTIEADTVVIGIGAKPAIGPFETLAMNKSIGGIQVDGLFRTSTPGIFAIGDVAAFPLKIYDRMTRVEHVDHARRSAQHCVKSLLTAHTDTYDYLPYFYSRVFEYEGSPRKVWWQFFGDNVEVGNFDPKIATFWIESGRLKGVLVESGSPEEFQLLPKLARSQPLVDKAKLASASSVEEALEIAQAALQS

SEQ ID NO: 152111 - DNA, 1197 bp, Mycobacterium avium subsp. paratuberculosis K-10
  CDS (1)..(1197): transl_table=11
gtgagtagtgacgcaagcgccagcaacggaatcgtgatcgtcggcggcggcctggccgccgcccgcaccgccgagcagctgcggcgctcggagtattccgggcccatcaccatcgtcagcgacgaggtgcacctgccctacgaccgcccgccgctgtccaaagaggtgctgcgcaaagaggtggacgacaccgcgctcaaaccccgccagtggtacgacgacaacgacatcacgctgcggctggggtcggccgcgcgcagcctggacaccgcggcgcagacgctgacgctcgaggacggcaccacgctcggctacgacgaactcgtcatcgccaccggcctggtgccgcggcgcatcccgaccatcccggacctggacggcatccgggtgctgcggaccttcgacgagagcctggcgctgcgcgagcacgcgtccgcggcgcagcgcgcggtgatcatcggcgccggcttcatcggctgcgaggtggccgccagcctgcgcagcctgggcgtggacgtggtgctggtcgagccgcaaccgaccccgctggccgcggtgctcggcgagcagatcggcgagctggtggcccggctgcaccgcgccgagggcgtcgacgtgcgcctcggtgtcggggtggcacaggtgcgcggcgacacgcacgtcgaggcggtggtgctgaccgacggcaccgagctggcggccgacgtggtggtgatcggcatcgggtcgcgtccggccaccgattggctcgagggcagcggcgtggcgatcgacagcgtcgaccggggcgtcctgtgcgacgaggccggacgcaccagcgcccccaacgtgtgggcgctcggcgacgtcgcgtcgtggcgcgacgcgacgggacaccaagggcgggtggaacattggagcaacgtcgcggaccaggcccgggtggtggtgccggcgatgctgggcaaggaggtgccgccggtggtggtggtgccctacttctggagcgaccaatacgacgtcaagatccagtgcctgggcgaaccggaggccgacgacatcgtccacatcgtggaggacgacggccgcaagttcctggcctactacgaacgcgacggggccctggtcggggtggtcggtggcggcatgccgggcaaggtcatgaagacccgcgccaagatcgccgcggccgtgcccatcgccgagatgctcggctga

SEQ ID NO: 152112 - protein, 398 aa, Mycobacterium avium subsp. paratuberculosis K-10
MSSDASASNGIVIVGGGLAAARTAEQLRRSEYSGPITIVSDEVHLPYDRPPLSKEVLRKEVDDTALKPRQWYDDNDITLRLGSAARSLDTAAQTLTLEDGTTLGYDELVIATGLVPRRIPTIPDLDGIRVLRTFDESLALREHASAAQRAVIIGAGFIGCEVAASLRSLGVDVVLVEPQPTPLAAVLGEQIGELVARLHRAEGVDVRLGVGVAQVRGDTHVEAVVLTDGTELAADVVVIGIGSRPATDWLEGSGVAIDSVDRGVLCDEAGRTSAPNVWALGDVASWRDATGHQGRVEHWSNVADQARVVVPAMLGKEVPPVVVVPYFWSDQYDVKIQCLGEPEADDIVHIVEDDGRKFLAYYERDGALVGVVGGGMPGKVMKTRAKIAAAVPIAEMLG

SEQ ID NO: 152113 - DNA, 1686 bp, Aspergillus nidulans FGSC A4
  CDS (1)..(1686)
atggcacagaagtataagctcaaggatatctcctccttgacgggcatcaataactttgataaggttgaggctgaggtggagggcgtgcaggatggaaaggtgctgctcgtgaaatacgaagacaaagtgcacgccatcagtcctaaatgcacccattacggtgctcccttgaagaatggagtcgtttctccagaggggcggattacctgcccgtggcatggagcttgcttcaatgtcaagagtggagatattgaagatgcccctgctcccgctgctctcaatacatttgaattgtttgaggagaacggctctgtctacatccgcggtgaagaatccgctatcaagtctggtcagcgaatctcggagcataagtgcagctcctctggccccggcggcttggttattataggaggaggctctggtaccctcggcgtgatccttgctattcgagaactcggttacaatggcgctattaccatcattactcgcgagcctagtctcataatcgaccgcacgaagctctccaaggctctcatcccagaccctgagaagatccagtggcgctctccccagtggtacaaggacgttggcatcgagacagtctcagacgaagttagtgcagtcgacttcagccaaaagattgtcgttacgcgctctggcaagacattcccttacaccaaactcgtcctagccactggaggcgtccctcgcacgctccccctggaaggcttccagctcctcgagaacgtcttcaaactccgcacagtaacagacgtccagcgaattctcaatgccattggcgacggaaagaacaagaaggttgtcattatcggaagctccttcatcggcatggaggttggcaacgctctgtccaaggacaatgaggtcaccatcgttggtcaagaatccgcacccatggagcgcgtaatgggcaccgaagtcggccacatcttccaacgcaacctcgaaaaggccggcgtgaagttcaagctctccgccggcgtcgcgaaggccaccccctccaatgaagaagcccgcaaggttggcgccgtgcatctgcaggacggcaccgttttacccgccgacgtcgtcatcctgggtgtcggcgtccgtcctgcaaccgatttcctccaaggcaacccagccatcacccttgagaaggacggctccatcaaggttgacgagcacttctccgtccctggtctgaacaatgacgtcttcgccattggcgatatcgccacgttcccgtaccacgggcccggcacagatcccaaaaagggcacatacacacgcatcgaacactggaatgtcgctcaaaatgccggccgtagcgtcgcatcctcaatcttgcacatgctccacaacaccacctcctccctgcaaaaggtcaaaccaaaggtctttatcccaatcttctggtccgcgctcggctcacagctgcgttattgcggaaacacgataatgggatgggacgacctggtgctcaagggcgagcccgagaatgccaagtttgcagcttactactgtaagggagagacagttgttgctgttgccacgatgggtatggatcctattatggttaagtgtgcagaattaatgaggaggaacaacatgccaagtaagaaggagatccaggacggggtggatgtactgtcgattgatgtgccgaagggtgtgaggatctaa

SEQ ID NO: 152114 - protein, 561 aa, Aspergillus nidulans FGSC A4
MAQKYKLKDISSLTGINNFDKVEAEVEGVQDGKVLLVKYEDKVHAISPKCTHYGAPLKNGVVSPEGRITCPWHGACFNVKSGDIEDAPAPAALNTFELFEENGSVYIRGEESAIKSGQRISEHKCSSSGPGGLVIIGGGSGTLGVILAIRELGYNGAITIITREPSLIIDRTKLSKALIPDPEKIQWRSPQWYKDVGIETVSDEVSAVDFSQKIVVTRSGKTFPYTKLVLATGGVPRTLPLEGFQLLENVFKLRTVTDVQRILNAIGDGKNKKVVIIGSSFIGMEVGNALSKDNEVTIVGQESAPMERVMGTEVGHIFQRNLEKAGVKFKLSAGVAKATPSNEEARKVGAVHLQDGTVLPADVVILGVGVRPATDFLQGNPAITLEKDGSIKVDEHFSVPGLNNDVFAIGDIATFPYHGPGTDPKKGTYTRIEHWNVAQNAGRSVASSILHMLHNTTSSLQKVKPKVFIPIFWSALGSQLRYCGNTIMGWDDLVLKGEPENAKFAAYYCKGETVVAVATMGMDPIMVKCAELMRRNNMPSKKEIQDGVDVLSIDVPKGVRI

SEQ ID NO: 152115 - DNA, 1665 bp, Ustilago maydis 521
  CDS (1)..(1665)
atgtccgaacaacgcatccgtgtcgggtccgccaacgatgtggctcagggcaaaatgaaagagtttacgttttccggtgaaggagacgatgcggtcaaggttctcgtctctaacgtcaagggccagcttcacgccacctcttccaagtgtacccactacggtgcccccctcgtcaacggtgtactgaccggggatggtcgcatcatttgcccctggcatggcgcctgttttcacgccaaggacggcgagatcgaggatgcacctgctctcgacagcctgctcagcctcaagctggaagtcgaagacggcgaccttttcgtgactgccgacccggaaaaactcaagggcaagcctggtattgctcccagctgcaagggcggtgctcagagtgtcgctaagggcaagggcgtcgtgattgtcggtggtggtgccggtgccatcaactgcgtcgaagagctgcgaaagagcggctaccagggaagcatcaccattgtctcgaacgagcaagccattatcgaccgcaccaagctcagcaaggcgctgatcgccgatgccgacaaggttacctggcggagcaagtcgcacctcaacaacgttctcggtgtcgagctgcataacaccagtgtaaccaaggtgaatgcgaacgccaagtcggtgacgctggagaacggatcgacgatcgagtacgagaagctggttcttgctaccggcggtacacccaagcgcatccccatccccggctctgacttcaagaatgtgcttgttctgcgacagatcagcgacaccaaggcgatcaaccaagccgtcggcaatgagaagggagacgagagcaaaaagaacaagaacgtcgttgtcatcggatcaagcttcatcggcatggaggctgccattgccctcatcaagcgcgccaacgtgtcggtggtaggcatggaaaaggtgcccttcgagcgagtgctcggtcaggaggtgggccagggtctgatgcaggcgcaggtcaagaacggactcaagttctacatggaggctggcgtcgagaagatcgagggtgacaagtcgaccggacccactgctgtggtcatcaagaacaaccaaggcaaacaagaatcgatcgcggctgacgttgtcatccttggagttggtgtttctcccgctaccaacttcctcaaggcatctggattcaagctggaaaaggacggaggcattgcggtggactcgaagctgcgcgttcagggctaccaggacattttcgcgatcggcgacattgccgctgcacctacgcgtgcttcggagcacgccagaatcgagcactggaacgttgcctcgaaccacggtcgcgctgtcgccaagacgcttgccggtaccgagacagagtacgacaaggtggcgattttctggtctgcgctcggctcgcagctgcgatactgcggtagtggtggacctcaattcgacaacgtctacgttgacggcaagccggaggagctcaagtttgctgcttactatgcaaagggagacgaggtggtagcggtagcaacaatgggggtcgatccgctgatggtgcagtgcagcgagctgattcgcattcgtgccatgcccaagctgtctgagatcaagaatggcaagaaccctcttgatgtggagctttcgacgccttcagccaagatctaa

SEQ ID NO: 152116 - protein, 554 aa, Ustilago maydis 521
MSEQRIRVGSANDVAQGKMKEFTFSGEGDDAVKVLVSNVKGQLHATSSKCTHYGAPLVNGVLTGDGRIICPWHGACFHAKDGEIEDAPALDSLLSLKLEVEDGDLFVTADPEKLKGKPGIAPSCKGGAQSVAKGKGVVIVGGGAGAINCVEELRKSGYQGSITIVSNEQAIIDRTKLSKALIADADKVTWRSKSHLNNVLGVELHNTSVTKVNANAKSVTLENGSTIEYEKLVLATGGTPKRIPIPGSDFKNVLVLRQISDTKAINQAVGNEKGDESKKNKNVVVIGSSFIGMEAAIALIKRANVSVVGMEKVPFERVLGQEVGQGLMQAQVKNGLKFYMEAGVEKIEGDKSTGPTAVVIKNNQGKQESIAADVVILGVGVSPATNFLKASGFKLEKDGGIAVDSKLRVQGYQDIFAIGDIAAAPTRASEHARIEHWNVASNHGRAVAKTLAGTETEYDKVAIFWSALGSQLRYCGSGGPQFDNVYVDGKPEELKFAAYYAKGDEVVAVATMGVDPLMVQCSELIRIRAMPKLSEIKNGKNPLDVELSTPSAKI

SEQ ID NO: 152117 - DNA, 1236 bp, Bradyrhizobium sp. ORS278
  CDS (1)..(1236): transl_table=11
atggggcagggtgctgtgactaagagaccggtggtgatcgtgggtgcggggcatgcgggctttcagctcgcgacctcgttgcgtcaggcaggctttgtcgatcccattcatctgatcaacgacgagccgcatctgccgtatcagcgcccgcctttgtcgaaggcctatctcaagggtaccggcggccccgagacgctgatgtttcggccgcagaagttttacgccgaccaggccgtcgatctggtctatgaccgcgccgtggcggtgcagcgtgagccgcgcaaggtgctgctggcctccggcaagaccctggactatggccacctcgtgttcgcgaccggcgcgcgcaaccgactgctcgatattcccaacgccaatcttccggcggttcgttacctccgcatcctcgatgacagcgaagcgttgcgcagcctgcttggcgacgccaagcgcgtcgtcgtgatcggcgccggcttcatcggtcttgaattcgctgccaccgcgcgcatcaagggactcgaggtcgacgtgctcgaactcggcgcgcgggtgatggcgcgggcggtgacggcggaaatctccgagtacttccagaagcagcatgccgatgccggcgtacgcatccatctcggcgtgcagtccaccagcatcgaggccgacggcaacaaggtcatcggcgtcagcctcagcgacggtcggcatattcccgccgatctcgtcgtggtcggcgtcggcgtgctgccgaatgtcgagctcgcggcggaggccggattgcaggtcgcctccggcatcgtcgtcgacgaatatctcctgaccagcgatccgcacatctcggcgatcggcgactgcgcgctgttcgccagcccgcgcttcggcgggaccctgcggctggagtcggtacagaacgcgaccgaccatgcccgctgcgtcgccgcgcggctcacgggagacgtcaagccgtacgatggccagccctggttctggagcgaccaggccaatgacaagctccagatcgccgggctcaccacgggctatgaccaggtcgtgctgcgcggggatccggcgcaaaaggcattctccgcattctgctacaaagagggccggctggtcggcatcgaatccgtcaaccgcgccggtgatcacatgttcggccgcaagctgctcgccgcgggcggcacgatcgatccggccgaggccgccgatccgagcttcgacctgaagagcgcgctcggctag

SEQ ID NO: 152118 - protein, 411 aa, Bradyrhizobium sp. ORS278
MGQGAVTKRPVVIVGAGHAGFQLATSLRQAGFVDPIHLINDEPHLPYQRPPLSKAYLKGTGGPETLMFRPQKFYADQAVDLVYDRAVAVQREPRKVLLASGKTLDYGHLVFATGARNRLLDIPNANLPAVRYLRILDDSEALRSLLGDAKRVVVIGAGFIGLEFAATARIKGLEVDVLELGARVMARAVTAEISEYFQKQHADAGVRIHLGVQSTSIEADGNKVIGVSLSDGRHIPADLVVVGVGVLPNVELAAEAGLQVASGIVVDEYLLTSDPHISAIGDCALFASPRFGGTLRLESVQNATDHARCVAARLTGDVKPYDGQPWFWSDQANDKLQIAGLTTGYDQVVLRGDPAQKAFSAFCYKEGRLVGIESVNRAGDHMFGRKLLAAGGTIDPAEAADPSFDLKSALG

SEQ ID NO: 152119 - DNA, 1242 bp, Acinetobacter sp. ADP1
  CDS (1)..(1242): transl_table=11
atgtcaaattacgatgtgattatcgtgggcacagggcatgcgggcggacaggcggctgtcgcactcagacaacaaggatttactggatcaattttgatgatcggtgaagaattacatttgccttatgagcgaccaccattatcaaaagagtatttctctggtgaaaaaacgtttgagcgaattttgttgcgtccagaacagttttggaaggataaaaatattgacctaaagcttggacaacgcgtgattcagattgatgcccagtcacatcgtattttgacccagcaaaaccacgaatatcactatggaaaattgatttgggcgactggtggaaaaccacgtcggctaagttgtgaaggtgcagatttagacgggattcattatattcgtaatcgcgaagatgtagatcgcattaatcaggagcttgatcgtgttcaaaaatgtgtggtcattggtggtggatatattggtttagaggctgccagtgcattacgcaaaattaatcgagatgtgactttggttgaagcacagtcaagagtgctggcgcgtgttgcagggcccataatttctgatttttatcagcaatatcatcagcaaaaaggcattgaattttatttagggcaaggagtggatcatcttgaaggtgatcaggggcgtgtgcatacggtgatactcgccaatggaacacgaattgcgacggatatggtaattgttgggatagggttaaaccctgaaattaatgctttgattgaggcaggtgcgatatcgagtaatggcattgaaacggatcgccgttgccgaacttctctgcctgatatttttgcaattggcgattgtgctaatcatgaaaatatttttgccgatggacagcgtatcagactcgaatctgtacaaaatgccaatgatcaagccatgattgtcgccaaagaaatcttagataaaggtgaagactacgcggccataccgtggttttggtcaaatcagtatgatctgaaattacaaacgattgggctttcaattggctatgatcaggaggttctacgcagtgaacccgactcaggctcatttaccgtgatttatttacgtcaaggcacaatcatagcactggattgtgtcaatcggcctgctgattttatacaaggcaaagccattattcagcaatcaatcagtattccaacagaacaattaagtgatcatacactgccatttaaagagctgatacaacgctataaaaacagttaa

SEQ ID NO: 152120 - protein, 413 aa, Acinetobacter sp. ADP1
MSNYDVIIVGTGHAGGQAAVALRQQGFTGSILMIGEELHLPYERPPLSKEYFSGEKTFERILLRPEQFWKDKNIDLKLGQRVIQIDAQSHRILTQQNHEYHYGKLIWATGGKPRRLSCEGADLDGIHYIRNREDVDRINQELDRVQKCVVIGGGYIGLEAASALRKINRDVTLVEAQSRVLARVAGPIISDFYQQYHQQKGIEFYLGQGVDHLEGDQGRVHTVILANGTRIATDMVIVGIGLNPEINALIEAGAISSNGIETDRRCRTSLPDIFAIGDCANHENIFADGQRIRLESVQNANDQAMIVAKEILDKGEDYAAIPWFWSNQYDLKLQTIGLSIGYDQEVLRSEPDSGSFTVIYLRQGTIIALDCVNRPADFIQGKAIIQQSISIPTEQLSDHTLPFKELIQRYKNS

SEQ ID NO: 152121 - DNA, 1380 bp, Propionibacterium acnes KPA171202
  CDS (1)..(1380): transl_table=11
gtgccttgtcagggggtttacgcgtggtgtggtaatccggtttctggtggcgacggctgccacccctcgtggcaagacatgccgttgcgtgccgatatgccatacgaagcttggcctagtgcgaaaagctcgctggaaccctcgaagaggcagggtcggcaggttaccctggttggtgtatgcatcgtttcgacgatgaaccccattctgggagcagatatgacgacctaccagtacctcatcgtcggtggcgggatggccgctgattctgccgcccgcggtatccgcgacatcgacaagaaagggtcgatcgccatcctcagcgctgacgtcgacgccccgtatcctcggccagcgctgagcaagaagctgtggactgaccctgagttcacctgggaccaggccgacctcgctaccgtcgcagacaccggcgcggaattgcggctcggcactgaggtgctcagcattgaccgtgacggcaagaccgtcctgaccgcttccggccaggtattcggctaccagaagttgctgctcgttaccggccttaccccgtcgcgcattgacgacgacggcgatgccgtcctctactttcggtctgctcgggactaccagcagctgcgtgcgctggcccagcccggtcaccagttcgtggtcgtcggcggcggatatatcggtgccgagcttgctgcgggcctcgtccagcagggctgcgaggtcgccctcgtcacccccgatccgacgctgggtggttcgcaattcccggcccagattgcgtctgagtaccagaagcttttcgccgatgctggggtgcacctcgtcactgggaagcgcgtctgttcggtgcgcaaacatgaagcggccgaggtcaccctcgatgacggcactattctccaggctgacgatgttattgcgggtttgggggcatccccggtcaccaaactggccgaggaagcgggtcttaccgttaatgatggggtcatcgttgatgagcagttgcgcaccaacgatccggccatctgggccgccggagacatcgccaattacccggacccggtgttgggccgcacccgcgtcgagcatgtggacaatgccatcgcgatgggcaaggcggccggccgcatcatggcgggatcaaaagactcctacacccataccccgatgatgtactcacaaatctttggggtccgctgggaggcagtcggcaccctcgactccagcctcgcgaccacatcagtggaagctggggatgggcaggtcgtctactacctgtccgacggcaagcctgtcggtgtgctgctgtggaaccttcccggacgcaccgacaaggccgtcacagtgcttgccgatccgcctgaggacctctcgaccgctatcagctaa

SEQ ID NO: 152122 - protein, 459 aa, Propionibacterium acnes KPA171202
MPCQGVYAWCGNPVSGGDGCHPSWQDMPLRADMPYEAWPSAKSSLEPSKRQGRQVTLVGVCIVSTMNPILGADMTTYQYLIVGGGMAADSAARGIRDIDKKGSIAILSADVDAPYPRPALSKKLWTDPEFTWDQADLATVADTGAELRLGTEVLSIDRDGKTVLTASGQVFGYQKLLLVTGLTPSRIDDDGDAVLYFRSARDYQQLRALAQPGHQFVVVGGGYIGAELAAGLVQQGCEVALVTPDPTLGGSQFPAQIASEYQKLFADAGVHLVTGKRVCSVRKHEAAEVTLDDGTILQADDVIAGLGASPVTKLAEEAGLTVNDGVIVDEQLRTNDPAIWAAGDIANYPDPVLGRTRVEHVDNAIAMGKAAGRIMAGSKDSYTHTPMMYSQIFGVRWEAVGTLDSSLATTSVEAGDGQVVYYLSDGKPVGVLLWNLPGRTDKAVTVLADPPEDLSTAIS

SEQ ID NO: 152123 - DNA, 1248 bp, Novosphingobium aromaticivorans DSM 12444
  CDS (1)..(1248): transl_table=11
atggccagcgaagttcaggcagagcgtgcagacgtcgtcatcgtcggagcaggtcacggcggagcccaggcggccatcgcgctgcgccagaacggcttcgagggtcgcgtgctggtcattggtcgcgagcccgagatcccttatgaacgtccgccgctgtccaaggagtacctcgcgcgcgaaaagacgttcgagcgcatctgcatccgcccggcgcagttctgggaggacaaggcggtcgagatgaagctcggcgcagaggtcgtctcgctcgacccggccgcgcacacggtcaagctgggcgacggctcggccatcgaatatggcaaactgatctgggcgaccggtggcgatccgcggcggctgtcctgcgtgggtgccgaccttgcaggcgtccatgcggtgcgcaccaaggaagacgccgaccgcctgatggccgagcttgatgccggcgcgaagaatgcggtggtgatcggcggcggctacatcgggctggaagcggcggcggtcctgaccaagttcggcgtcaacgtcaccctgctggaagcccttccgcgcgtgctggcgcgcgtcgcgggcgaggcgctgtccgaattctaccaggcagagcaccgcgcgcacggcgtcgacctgcgcaccggcgcggcgatggactgcatcgagggcgacggcaccaaggtgaccggcgtccggatgcaggacggctcggtcattccggcagatatcgtcatcgtcggcatcggcatcgtgccctgcgtcggggcgctgatctcggcgggagcatcgggcggcaacggcgtcgacgtggacgagttctgccgtacctcgctgaccgacgtctatgccatcggcgattgcgctgcccatgccaacgactttgccgacggcgccgtgatccgcctcgaatcggtacagaacgccaacgacatggcgacggctgccgcaaaggacatctgtggcgccccggtgccctacaaggcgacgccgtggttctggtcgaaccagtacgatctcaagctgcagacggtcggcctttccaccgggcacgacaacgcggttctgcgcggagaccccgcgacgcggtcgttctcggtggtgtacctcaagggcggcaaggtcgtcgcgctcgactgcgtgaacatggtcaaggactatgttcagggcaagaagctggtcgaagcccgcgcgcagatcgcaccggagcagctcgccgatgccggcgtgccgctcaaggagatgctggcctag

SEQ ID NO: 152124 - protein, 415 aa, Novosphingobium aromaticivorans DSM 12444
MASEVQAERADVVIVGAGHGGAQAAIALRQNGFEGRVLVIGREPEIPYERPPLSKEYLAREKTFERICIRPAQFWEDKAVEMKLGAEVVSLDPAAHTVKLGDGSAIEYGKLIWATGGDPRRLSCVGADLAGVHAVRTKEDADRLMAELDAGAKNAVVIGGGYIGLEAAAVLTKFGVNVTLLEALPRVLARVAGEALSEFYQAEHRAHGVDLRTGAAMDCIEGDGTKVTGVRMQDGSVIPADIVIVGIGIVPCVGALISAGASGGNGVDVDEFCRTSLTDVYAIGDCAAHANDFADGAVIRLESVQNANDMATAAAKDICGAPVPYKATPWFWSNQYDLKLQTVGLSTGHDNAVLRGDPATRSFSVVYLKGGKVVALDCVNMVKDYVQGKKLVEARAQIAPEQLADAGVPLKEMLA

SEQ ID NO: 152125 - DNA, 1239 bp, Rubrobacter xylanophilus DSM 9941
  CDS (1)..(1239): transl_table=11
atgccccaaacgctggcgatcgtcggagccggaccggcgggggggagcgcggctgccgccctccgccgggagggcttcgagggacgggtgatcctgatcggcgccgagccgcaccctccttacgaacggcccccgctatccaaggagtacctccggggcgagacctccttcgagcaggctctgctccagccgtccggcttttaccgcgagaacggcatcgaggcgtggttcggggttcgggccaccagagtagacgccgcccgaagagaggtcgaactcgagaacggggagcgcttggcttatgacgggctcctgatcgcaactggggcgaggaaccgacgccccgcaattccgggcctgggtctgggaggagtacaccagctgcgcacggtcgccgactgcgaccgcatccggcaggagatcgcgccgggccgcagggcggtggtggtgggcatgggcttcatcggttcggaggtggcggcctccctccggcaatccggtgttgaggttaccgtcgtggaccgcaacgaggtgccgctgcgccgggcgttgggcagggaagtcgggcgggtgatcgaggaactccaccgcgaccacggcgcagagctgatcctcgaggacgcggtggccgccttcgaggggagggagcgcgtcgaaagggtaacgacccgcggcggccgccgcatcgggtgcgacttcgtcgtggtgggtctcggagccgagccggtcaccgacctcctcgccgagaccggcgcaaagatccagaacggcatcgtggtggacgaacattgccggaccagcgttgaaggagtctacgccgcgggcgacgtggccaaccactaccacccgaccttcggacggcacatccgcacagagcactggcagaacgcgctgagacagggttccgtcgcggccaggagcatgttgggcaagaagagcgctccctacgaggagatcccctggttctggtccgatcaatacggacacaacctccagtacgccgggctccacaccgaatgggacgagctcgtcgtgcgcggcagcatgcgggagcgagacttcctggcgttctaccggaaggacgggcgggtcctggcggctgtggccatcggccggggaagagagctgcgccgctcgatcccgctgatcaaagcccgagagagggtcgaggccgcaaagctccgcgaccccgacgttgacctgagagcgctcgcaggcgcagcgggctcgcgcagatag

SEQ ID NO: 152126 - protein, 412 aa, Rubrobacter xylanophilus DSM 9941
MPQTLAIVGAGPAGGSAAAALRREGFEGRVILIGAEPHPPYERPPLSKEYLRGETSFEQALLQPSGFYRENGIEAWFGVRATRVDAARREVELENGERLAYDGLLIATGARNRRPAIPGLGLGGVHQLRTVADCDRIRQEIAPGRRAVVVGMGFIGSEVAASLRQSGVEVTVVDRNEVPLRRALGREVGRVIEELHRDHGAELILEDAVAAFEGRERVERVTTRGGRRIGCDFVVVGLGAEPVTDLLAETGAKIQNGIVVDEHCRTSVEGVYAAGDVANHYHPTFGRHIRTEHWQNALRQGSVAARSMLGKKSAPYEEIPWFWSDQYGHNLQYAGLHTEWDELVVRGSMRERDFLAFYRKDGRVLAAVAIGRGRELRRSIPLIKARERVEAAKLRDPDVDLRALAGAAGSRR

SEQ ID NO: 152127 - DNA, 1275 bp, Rhodococcus sp. RHA1
  CDS (1)..(1275): transl_table=11
gtgagcgcactgtcgaacctttccacggaactgtcgacggtggtcatcgtcgggtccggtatcgcaggagcgagcgccgcacagacgctccggtcggaaggcttcagcgggcgcgtcgtcctgatcggagacgaacccgcaccgccgtatcggcggccgacggtgtcgaaggacttcctgtcgggtgccacggccgcggagaagaccgcgctgaaaccggactctttctggaaggaaagagatatcgaattgatcaccggtgcaacggcagtcgaactcgacacccggcggaagttgctgacgctctcgtccggagtaacactgtcgtacagtgccctgctgctcgcgaccggcggccgggcccggaaactcgagggtgtctccggtgcgcacgtgttcactctgcggtcgatggccgatgccgattcccttcgcgagtcgattcggcgcaccggttccctgctcgtgatcggcggaggtctcatcggatgtgaggtcgcggccacggcgcggtcgctcggcgcggaggtcaccgtcctcgaacgagacccgtcgctcctcagtcgaattgtgcccccggaaatctcgacgatgatcgcgtcgctgcactccgagaacggcgtcgacgtccgcacggatgtcgccctgtcctcgctcgacgtgagcgacgacggctccgcccgcgccaccgcggacgacggtcgaagttggagtgccggcaccgtcctcgtgtcggtcggaacggtccccgaggtcacgctcgcggtcgcggcgggactgcgcgtgcacaacggcatcaccgtcgacgggcagtttcgcacctcggccgacggcgtctacgcggccggagacgcggccaacatccccggtgcgcgtgactccgagcgataccgttccgaacattggaacggcgctcaggcgcaggggattgccgccgcgcactccatcctcggagagcccatgccgttcaccgacgttccgtgggggtggtccacgcagtacggccacaacgtgcagttcgccggcgcgacccgtttcgacgacgactacgtgatccgcggttcgatcgacgatcgcgatttcacagcggtcgcggtccgtgggagcacgccggtcggggtcatcgccgtgggccgcccgaaagacctccgaaccgcgcgcacgatgatcgcccggggcggcacagtcgaccgcgccgcgctggcggacgagtcggttgctctgaccgacgtgctcgccggcgagcgggaaggtcgggtcgcggccgcccgctag

SEQ ID NO: 152128 - protein, 424 aa, Rhodococcus sp. RHA1
MSALSNLSTELSTVVIVGSGIAGASAAQTLRSEGFSGRVVLIGDEPAPPYRRPTVSKDFLSGATAAEKTALKPDSFWKERDIELITGATAVELDTRRKLLTLSSGVTLSYSALLLATGGRARKLEGVSGAHVFTLRSMADADSLRESIRRTGSLLVIGGGLIGCEVAATARSLGAEVTVLERDPSLLSRIVPPEISTMIASLHSENGVDVRTDVALSSLDVSDDGSARATADDGRSWSAGTVLVSVGTVPEVTLAVAAGLRVHNGITVDGQFRTSADGVYAAGDAANIPGARDSERYRSEHWNGAQAQGIAAAHSILGEPMPFTDVPWGWSTQYGHNVQFAGATRFDDDYVIRGSIDDRDFTAVAVRGSTPVGVIAVGRPKDLRTARTMIARGGTVDRAALADESVALTDVLAGEREGRVAAAR

SEQ ID NO: 152129 - DNA, 1182 bp, Rhodococcus sp. RHA1
  CDS (1)..(1182): transl_table=11
gtgcagagaattgtgatcgtcggagcgggcctggcaggtctgcgcaccgccgaggagctccggcgggccggatacgagggtgacctggtgcttctcggcggtgaaccgcaccttccgtacgaccgtccgccgctgtcgaaggaagtgatgcgcggggagaagagcgacaccacgctcaagccgcgtgagttcttcgacgagaagaacatccagttgcgtctgggcgtcgaggcggtcgcggtgggcagcggatcccgcatcctgagactcgccgacggtaccgaactcggctacgacgaactggtgatcgccaccggcctcgtgccgcggcggatacccggtctcccggacctcgcgggcgtccacgttctccgttccatcgacgagagtctggcgttgcgcgcggacctcgcggagggcaagcgcgcactgatcgtcggggcggggttcatcggctgcgagctggcggcgagcatgcgggcgggtggtctcgacgtggtgctggtggagccgcagccgacgccgctcgcgtccgtgctcggcgagaagatcggcggactcgtcgcccggctgcacaccggcgagggggtcgatctgcgggccggtgtcgggctcacgtcgctggtgggcaccgaccgggtcaccggagccgtcctcggcgacggaaccgaggtggacgtcgacgtcgtggcgatcggagtcggctcggtgccggtcaccgcgtggctcgacggctccggcgtcgaactggacaacggtgtggtgtgcgacggcgtcggacgcacggcggtcccgcacgtgtgggcggtcggcgacgtggccgcgtggcagctgcgggtgggcggtcgaaaacgcgtcgaacactggagcaatgccggtgagcaggccaagatcctcgccggggcgttgaccggggccggcgacgagaacgccgccgctcaggtcccgtacttctggagcgaccagtacgacatcaagatccaggccctgggcacggtggcggccaccgacgaggtgcacgtgatcaaggacgacggccgcaagttcctcgcctactacgagcgggacggcatcctggccggtgtcgtcggcggtggaatggcgggcggcgtcatgaagatgcggggcaagatcgcggcgggaacgccgatcggcgaggtcctcgaggccgcgtcggcgtag

SEQ ID NO: 152130 - protein, 393 aa, Rhodococcus sp. RHA1
MQRIVIVGAGLAGLRTAEELRRAGYEGDLVLLGGEPHLPYDRPPLSKEVMRGEKSDTTLKPREFFDEKNIQLRLGVEAVAVGSGSRILRLADGTELGYDELVIATGLVPRRIPGLPDLAGVHVLRSIDESLALRADLAEGKRALIVGAGFIGCELAASMRAGGLDVVLVEPQPTPLASVLGEKIGGLVARLHTGEGVDLRAGVGLTSLVGTDRVTGAVLGDGTEVDVDVVAIGVGSVPVTAWLDGSGVELDNGVVCDGVGRTAVPHVWAVGDVAAWQLRVGGRKRVEHWSNAGEQAKILAGALTGAGDENAAAQVPYFWSDQYDIKIQALGTVAATDEVHVIKDDGRKFLAYYERDGILAGVVGGGMAGGVMKMRGKIAAGTPIGEVLEAASA

SEQ ID NO: 152131 - DNA, 1263 bp, Sphingomonas sp. KA1
  CDS (1)..(1263): transl_table=11
gtggctgatatcgttattgtcggagccgggcatggtggggcgcagtgcgccatcgcgctgcggcaggccgggttcgaaggcactgtgacgattgtcggtcgcgagtgcgaaccgccctacgaacgcccaccgctctccaaggaatacttcgcccgcgagaagaccttcgaccggctctacatccgcccgccgcagttctgggaggagaaaggcgttcgcctgatgctcggcatcgaagtgacggcgatcgatccggcgtcgaagcagcttaccctctcggacggctccagcttcggctatggcaagctcgtctgggcgaccggcggcgatccgcgcaagctgcccgttcccggcgggagcctttccggtgtccacggcgtgcgcacccgcgaagactgcgacacgctgatgggcgagatcgacggaggagtgaaaaacatctgcgtgatcggcggcggctacatcgggcttgaggcagcagccgtgctcaccaaaatggggtgcaaggtcactttgctcgaggctctcccccgtgtgcttgcgcgcgttgccgggccggagctgtcggccttctacgaaaaagaacaccgcgaccacggtgttgacctgcggaccggcgcaaccgttgaagcgcttgagggtgaagggcgcgttaccggagtcaggctgggtgacggctcggtgcttcccgccgatgcagtaatcgtcggcatcggcatcgtgcctgccgtcgcaccgctgatcgcagccggagcagcaggcggcaatggcgtggacgtcgacgagtactgccgtacctcgctccccgatatctatgccatcggtgattgtgccgccttcgcctgtgattttgccgacggaaaagtgatgcgcatcgaatcggtgcagaatgccaacgatcaggcaacctgcgttgccaaggccatctgcggcgacgagaagccctatcatgccttcccgtggttctggtccaaccagtacgatctgcgcctgcaaaccgccggactctcggtcggctatgaccagaccgtggtgcggggatcccccgacgcgcgggcgttttcggtagtttatcttaagggcgggaaagtgatcgcgctcgactgcgtcaatatggtcaaggactatgttcagggcaggaagctggtggaagcaggtgtttcgccaaaccagcaacgcctgggcgacgtgagcgtagcgctcaaggagcttttacccatccaaggcgacacacacttgcggaacggcggagccgctgtttga

SEQ ID NO: 152132 - protein, 420 aa, Sphingomonas sp. KA1
MADIVIVGAGHGGAQCAIALRQAGFEGTVTIVGRECEPPYERPPLSKEYFAREKTFDRLYIRPPQFWEEKGVRLMLGIEVTAIDPASKQLTLSDGSSFGYGKLVWATGGDPRKLPVPGGSLSGVHGVRTREDCDTLMGEIDGGVKNICVIGGGYIGLEAAAVLTKMGCKVTLLEALPRVLARVAGPELSAFYEKEHRDHGVDLRTGATVEALEGEGRVTGVRLGDGSVLPADAVIVGIGIVPAVAPLIAAGAAGGNGVDVDEYCRTSLPDIYAIGDCAAFACDFADGKVMRIESVQNANDQATCVAKAICGDEKPYHAFPWFWSNQYDLRLQTAGLSVGYDQTVVRGSPDARAFSVVYLKGGKVIALDCVNMVKDYVQGRKLVEAGVSPNQQRLGDVSVALKELLPIQGDTHLRNGGAAV

SEQ ID NO: 152133 - DNA, 1245 bp, Hyphomonas neptunium ATCC 15444
  CDS (1)..(1245): transl_table=11
gtggacctttcgggcgcaaaacggattgtaattgtcggcgctggccaggcggctgcgcaggctgttcaatccttgcgcctgggtggttatgctggcgagctcacaatcgtcggtgaagagacggcgcttccctatcagcgtcccccactctcgaaggcttacatgaagggcgagatggcggaggagcgcctctatttccgccccgcggcctggtacgaagacaacaagatcgaagtgatgctgggctcccgcgtcacctccattgatcgcgccgcgcgcgtcgcccatctcgaacatggcgccgaactgccttacgacgcgctggtcatcgccacaggttcccgcccccgcacgcttccctgccagggcgctgatttgaccggcgttcacgatctgcgcagcctgtcggatgtcgaacgcatccgcccgcaaatggtcgaaggccgccgcatggtcataatcggcgccggctatatcggccttgaagcggcagctgtcgcacgcaccatgggtctggatgtcactgttctggaaatggcaccgcgcgttctggcgcgcgttacaagccctgtaatgagcgaattctacgccgccgagcacatcgccaaaggcgtcaagatcctcaccagcacggccctgtcgcatctcgaaggcaaggacggccatatcaacgccgccgcgctggccgatggcacgaagctcccggccgacatcgtcctcgtcggcatcggcatcctgcccaatgaagagcttgcaaaagacgccggcatcgcctgttccaacggcatcctgaccgaccgggacggccgcacatccgacccgcacgtgtttgcggccggtgactgcgccagccgtccgctggttcactatggccgtacagggcgcctcgaaagcgtccacaacgccatcgagcagggcaagctcgtcgccgctgccattcttggacaaaatcggccggcagaggactgcccctggttctggtcggaccaatatgacctcaaactccagatcgccggactcagtacggactatgacacgatcgtcctgcgcggcgatcctgaggaccgcaagtttgccgctttctatctgcgcaatggcaccctgatcgccgttgacgccgtcaacagcccgccagagttcctggcatccaagaaactcatcatgacaggcgcaaaaattgcccctgaagtgctcagcgacacctcaatcccaatgaaagacatcgccgcaaaagctgcggcctga

SEQ ID NO: 152134 - protein, 414 aa, Hyphomonas neptunium ATCC 15444
MDLSGAKRIVIVGAGQAAAQAVQSLRLGGYAGELTIVGEETALPYQRPPLSKAYMKGEMAEERLYFRPAAWYEDNKIEVMLGSRVTSIDRAARVAHLEHGAELPYDALVIATGSRPRTLPCQGADLTGVHDLRSLSDVERIRPQMVEGRRMVIIGAGYIGLEAAAVARTMGLDVTVLEMAPRVLARVTSPVMSEFYAAEHIAKGVKILTSTALSHLEGKDGHINAAALADGTKLPADIVLVGIGILPNEELAKDAGIACSNGILTDRDGRTSDPHVFAAGDCASRPLVHYGRTGRLESVHNAIEQGKLVAAAILGQNRPAEDCPWFWSDQYDLKLQIAGLSTDYDTIVLRGDPEDRKFAAFYLRNGTLIAVDAVNSPPEFLASKKLIMTGAKIAPEVLSDTSIPMKDIAAKAAA

SEQ ID NO: 152135 - DNA, 1218 bp, Solibacter usitatus Ellin6076
  CDS (1)..(1218): transl_table=11
atggccagctttaagcaccttattttaggtggaggaatggtcgcgggccactgcgccaagcagtacgtggagaacggcggcaaagccggagaactcgcgattgtgtccggcgacgatgcgctgccctacgagcgcccgccgctctccaaaggctttctcgccggcaaagacagcgaggagtccgttcggatcaacgccgcggaattctacgccgagcatggaatcgacgtgaggttgaatacccgcgtcaattcgatcgatgcgcgcggcggacgtctgtccacaagctcgggcgaagaattcggttttgagaaactgatcctcgccaccggagcggaagtgcggcggctcgacgtgcccggcgccgcttccagcaatgtcctgtacctgcgctctttgaacgattcgaaacggctacgcgacgcctcgataaaggccaaacatgccgtggttgcgggcggcggatttatcgcgatggaagttgcttccgtgctggcgagccgtggaatcgagaccaccatactggcgcgccaaaaccgtttcggcgccgcgtttttcacgcccgagatgtccgcattcttcgaaaagtattacgtcgatcgaggtgtgcgaatcctcaaacagaccgaagtaatgggcatcgagaagggatcgagagcactgctgaaagacgggcgggcagtcgatttcgatctcttccttgcgggtatcggagtgcagccggtgacagtactggccgagaaagccggcttgccggtggacaacggcattctggtcaacgagtatctcgaaacccgtgatgcgaacctgtacgccgcgggcgacgtagccaactatccggattcactgttcggcatgaaacggcggcgggtagaacactgggacaacgccgtctcgcaaggccagtacctggccggcgccctgcttggcaaacgcgaaccgttcgttcacgtgccgtatttcttctcggatgtcttcgacctttcgtacgaattctggggcgatccctcgccgtccgaccgcgttgtgcaccgtggcgatctacaaaccagcagcttcagcatctggtggctgtcacaaaaccggctggtggccgccttcgcgatgaaccgtcccgatgaggaacgtgaactggctccggagctgattcgctctaggaagcttctctcggccgagcgattacgtgaggcagggtccgtgcgtgacgcggccgcatga

SEQ ID NO: 152136 - protein, 405 aa, Solibacter usitatus Ellin6076
MASFKHLILGGGMVAGHCAKQYVENGGKAGELAIVSGDDALPYERPPLSKGFLAGKDSEESVRINAAEFYAEHGIDVRLNTRVNSIDARGGRLSTSSGEEFGFEKLILATGAEVRRLDVPGAASSNVLYLRSLNDSKRLRDASIKAKHAVVAGGGFIAMEVASVLASRGIETTILARQNRFGAAFFTPEMSAFFEKYYVDRGVRILKQTEVMGIEKGSRALLKDGRAVDFDLFLAGIGVQPVTVLAEKAGLPVDNGILVNEYLETRDANLYAAGDVANYPDSLFGMKRRRVEHWDNAVSQGQYLAGALLGKREPFVHVPYFFSDVFDLSYEFWGDPSPSDRVVHRGDLQTSSFSIWWLSQNRLVAAFAMNRPDEERELAPELIRSRKLLSAERLREAGSVRDAAA

SEQ ID NO: 152137 - DNA, 1197 bp, Mycobacterium avium 104
  CDS (1)..(1197): transl_table=11
gtgagtagtgacgcaagcgccagcaacggaatcgtgatcgtcggcggcggcctggccgccgcccgcaccgccgagcagctgcggcgctcggagtattccgggcccatcaccatcgtcagcgacgaggtgcacctgccctacgaccgcccgccgctgtccaaagaggtgctgcgcaaagaggtggacgacaccgcgctcaaaccccgccagtggtacgacgacaacgacatcacgctgcggctggggtcggccgcgcgcagcctggacaccgcggcgcagacgctgacgctcgaggacggcaccacgctcggctacgacgaactcgtcatcgccaccggcctggtgccgcggcgcataccgaccatcccggacctggacggcatccgggtgctgcggaccttcgacgagagcctggcgttgcgcgagcacgcgtccgcggcgcagcgcgcggtgatcatcggcgccggcttcatcggctgcgaggtggccgccagcctgcgcagcctgggcgtggacgtggtgctggtcgagccgcaaccgaccccgctggccgcggtgctcggccagcagatcggcgagctggtggcccggctgcatcgcgccgagggcgtcgacgtgcgcctcggtgtcggggtgtcagaggtgcgcggtgacaggcacgtcgaggcggtggtgctgaccgacggcaccgagctggcggccgacgtggtggtgatcggcatcgggtcgcgtccggccaccgactggctcgagggcagcggcgtggcgatcgacagcgtcgaccggggcgtcctgtgcgacgaggccggacgcaccagtgcccccaacgtgtgggcgctcggcgacgtcgcgtcgtggcgcgacgcgacgggacaccaagggcgggtggaacattggagcaacgtcgcggaccaggcccgggtggtggtgccggcgatgctgggtaaggaggtgccgccggtggtggtggtgccctacttctggagcgaccagtacgacgtcaagatccagtgcctgggtgaaccggaggccgacgacatcgtccacatcgtggaggacgacggccgcaagttcctggcctactacgaacgcgacggggccctggtcggggtggtcggcggcggcatgccgggcaaggtcatgaagacccgcgccaagatcgccgcggccgtgccgatcgccgagatgctcggctga

SEQ ID NO: 152138 - protein, 398 aa, Mycobacterium avium 104
MSSDASASNGIVIVGGGLAAARTAEQLRRSEYSGPITIVSDEVHLPYDRPPLSKEVLRKEVDDTALKPRQWYDDNDITLRLGSAARSLDTAAQTLTLEDGTTLGYDELVIATGLVPRRIPTIPDLDGIRVLRTFDESLALREHASAAQRAVIIGAGFIGCEVAASLRSLGVDVVLVEPQPTPLAAVLGQQIGELVARLHRAEGVDVRLGVGVSEVRGDRHVEAVVLTDGTELAADVVVIGIGSRPATDWLEGSGVAIDSVDRGVLCDEAGRTSAPNVWALGDVASWRDATGHQGRVEHWSNVADQARVVVPAMLGKEVPPVVVVPYFWSDQYDVKIQCLGEPEADDIVHIVEDDGRKFLAYYERDGALVGVVGGGMPGKVMKTRAKIAAAVPIAEMLG

SEQ ID NO: 152139 - DNA, 1188 bp, Mycobacterium smegmatis str. MC2 155
  CDS (1)..(1188): transl_table=11
gtgaccacttcagcgcattctgcgggcatcgtgatcgtcggtggtggcctggccgccacccggactgccgaacagctgcgccgttcggagtacgccgggccgatcaccatcgtcagcgacgaggaccatctgccgtacgaccgtccgccgctgtcgaaggaagtcctgcgcgcggagaacgacgacgtcacgctcaagccggccgagttctacgaagagaacaacatcaccctgcggctcgggtcgggtgcgcagtcggtggacacggccgcccagaccgtccggcttgccgacggcagcgaacttccttacgacgaactcgtgatcgccaccgggctggtgcccaagcggatcggttcgttccccgatctgcaggggatccgtgtgctgcgcacctacgacgagagcatggcgctgcgtgaggacgccaggaaggcctcgcgtgccgtggtgatcggtgccggcttcatcggctgtgaggtcgcggcgagcctgcgcaagctcggtgtcgacgtggtgctggtcgaaccgcagccgaccccgctggcgtcggtgctgggcgagaagatcggtgcgctggtgacccgcctgcaccgggccgagggcgtcgacgtccgctgcggcgtcggcgtgaccgaggtgcgcggcacccagaacgtcgagaccgtggtgctcgccgacggcacggaactggaggccgacctggtgatcgtgggcatcggctcacgcccgtcggtggactggctaaaaggcagcggcatcgaggtggacaacggtgtcgtgtgcgacgaggtgggacgcacgagtgcgccgcacgtgtgggcgatcggtgacgtcgcgtcatggcgcgatcacgtgggtggtcaagtgcgcgttgagcattggagcaatgtcgccgaccaggcgcgtgccatggtgcccgcgctgctggggcaggaggcctcggccgtcgtgtcggtgccgtacttctggagcgaccagtacgacgtcaagatccagtgcctcggcgagccggaatccgacgacaccgtccacatcgtcgaggacgacggtcgcaagttcctggcctactacgagcgtgacggcgtgctcgtcggcgtggtcggcggcggcatgcccggcaaggtcatgaagacccgcggcaagatcgccgccggtgcgccaattgccgaggtcctcggcggctga

SEQ ID NO: 152140 - protein, 395 aa, Mycobacterium smegmatis str. MC2 155
MTTSAHSAGIVIVGGGLAATRTAEQLRRSEYAGPITIVSDEDHLPYDRPPLSKEVLRAENDDVTLKPAEFYEENNITLRLGSGAQSVDTAAQTVRLADGSELPYDELVIATGLVPKRIGSFPDLQGIRVLRTYDESMALREDARKASRAVVIGAGFIGCEVAASLRKLGVDVVLVEPQPTPLASVLGEKIGALVTRLHRAEGVDVRCGVGVTEVRGTQNVETVVLADGTELEADLVIVGIGSRPSVDWLKGSGIEVDNGVVCDEVGRTSAPHVWAIGDVASWRDHVGGQVRVEHWSNVADQARAMVPALLGQEASAVVSVPYFWSDQYDVKIQCLGEPESDDTVHIVEDDGRKFLAYYERDGVLVGVVGGGMPGKVMKTRGKIAAGAPIAEVLGG

SEQ ID NO: 152141 - DNA, 1230 bp, Mycobacterium smegmatis str. MC2 155
  CDS (1)..(1230): transl_table=11
atgactgcggcgtcgacattcgtgatcatcggcggcggcctggccggcgccaaagctgctgaagcgttgcgcgacaacgacttcgacggccaggtactgttgttcgcggccgaggagaagctgccctacgagcggcctccgctgtccaaggactacctggcaggcaagaagaccctcgacgagttcaccgtcgccgctccggcgtggtaccgcgaccacgacgtgacgctgcgactcgggaccgaggtggccgcgatcaacccggccgaccacaccgtgacgttgcccgacgggtcggcagtgggttacgacaagctgctgctggccaccggttcggcatcgcggcggctgccgattcccggtgcggacgcatccggcgtgcactatctgcgcacggtcgacgacgccgccgcactcgatgcggttctcaccgagggcgcctcgctcgcggtggtcggcgcaggatggatcgggctcgaggtcgccgcgagcgcacgtacccgcggcgtcaacgtcaccgtggtggaggccgcgcgcctgccgctgctcggcgcgctcggcgccgaggtcgcagaggtgttcgcgcagttgcaccgcgagcacggcgtggacctgcggctcgaacagaccgtcgaggagatcaccaccgccgacggccgggccaccggcctgcgtctcggggacggttcgaccatcgcggccgacgccgtgctggtcgcggtcggcgcggcgccgaacatcggactggccgaacgggccggcctcgcgaccgccgacggaggtgttctggtcgacgcgtcgctgcgcaccagcgatccggacatctacgccgtcggcgacatcgccgcggcacaacacccgctgttcggtgtccgcatccgcaccgaacactgggcgaacgcgctgaaacaacccgcggtggccgtcgcgggcatgctgggccggcccgcggaatacgccgaactaccctatttcttcaccgaccagtacgacctcggcatggagtatgccgggcacgcccccagctacgagcgcgtggtgttccgcggtgatgtgcccgggcgcgagttcgtgtccttctggctcgacggcgacaaccgggtgctggccgggatgaacgtcaacatctgggatgtgctcgacgacgtcaaggccctgatccggtcgcgggaaccggtcgaccccgacctgctggccgatccgggccggccgctcaacgcgcccggctga

SEQ ID NO: 152142 - protein, 409 aa, Mycobacterium smegmatis str. MC2 155
MTAASTFVIIGGGLAGAKAAEALRDNDFDGQVLLFAAEEKLPYERPPLSKDYLAGKKTLDEFTVAAPAWYRDHDVTLRLGTEVAAINPADHTVTLPDGSAVGYDKLLLATGSASRRLPIPGADASGVHYLRTVDDAAALDAVLTEGASLAVVGAGWIGLEVAASARTRGVNVTVVEAARLPLLGALGAEVAEVFAQLHREHGVDLRLEQTVEEITTADGRATGLRLGDGSTIAADAVLVAVGAAPNIGLAERAGLATADGGVLVDASLRTSDPDIYAVGDIAAAQHPLFGVRIRTEHWANALKQPAVAVAGMLGRPAEYAELPYFFTDQYDLGMEYAGHAPSYERVVFRGDVPGREFVSFWLDGDNRVLAGMNVNIWDVLDDVKALIRSREPVDPDLLADPGRPLNAPG

SEQ ID NO: 152143 - DNA, 1179 bp, Nocardioides sp. JS614
  CDS (1)..(1179): transl_table=11
gtgagtggacgaatcgtcatcgtcggcggcggtcttgccgctgggaccgccgccgcggctcttcgcgacgcggggtacgacggcgacgtcgtgctccacgccgcggagccgcacctgccctacgagcgtccgccgctgtccaagggttacctcgccggggacgccgaggccgacagcatgctcgtccacccggcgtcctggtatgccgagaacgacgtcgaggtgcgcaccggctcccgggtcgagcggatcgacgccgacggccacacggtcaccgccggtggggcgaccgagtccttcgaccgactgctgatcgccaccggcgcctccccgcgccacctggccgtcgcggacgagagcggcgcgccggtcgcctacctgcgcacccgcgaggacagcgaccggctccgctcggtgctgtcccccggccaccggatcgcgatcctcggtggcggcttcctcggtctcgaggtcgccgcggcggcccgcaccgccggggcggacgtcaccgtgctcgaggcgctcgaccagccgctgctgcgggtgctcggccccgagatgggcgcgatgttcgccgacctgcaccgcgagcacggcgtggacctgcgcctgggcgccaaggtcaccggcttcgacggcgacgggcgcacggcgcggctcaccgtggagggctcccccgacgtcgatgccgacctgctcgtcatcggcatcggcgccagccccgacgtcgccctcgcggaggcggccggtctggcggtcgacaacggcatcctggtcgacgagcggatgcgcgcctcacgcccggacatctacgccgcgggcgacgcggcccgggcccaccaccccgtgctgggacggtcgatccgggtcgagcactgggacaacgccatccgccaggggcgggtcgccgggcgcgccatggccggcgacgaggatgcggtggcgaccgacctgccgtacttcttcaccgaccagtacgacctcggcatggagtacgtcggcgacgtcggcccggagggctacgacgaggtggtgatccagggcgacctcgcgaagcgggtcttcaaggccttctgggtcgcgggcggcaaggtcgtcgcggcgatgcaggccaacgactgggacgccagcgactcgctgcgcccggccatcgggaagagcctggccgagatctcgtag

SEQ ID NO: 152144 - protein, 392 aa, Nocardioides sp. JS614
MSGRIVIVGGGLAAGTAAAALRDAGYDGDVVLHAAEPHLPYERPPLSKGYLAGDAEADSMLVHPASWYAENDVEVRTGSRVERIDADGHTVTAGGATESFDRLLIATGASPRHLAVADESGAPVAYLRTREDSDRLRSVLSPGHRIAILGGGFLGLEVAAAARTAGADVTVLEALDQPLLRVLGPEMGAMFADLHREHGVDLRLGAKVTGFDGDGRTARLTVEGSPDVDADLLVIGIGASPDVALAEAAGLAVDNGILVDERMRASRPDIYAAGDAARAHHPVLGRSIRVEHWDNAIRQGRVAGRAMAGDEDAVATDLPYFFTDQYDLGMEYVGDVGPEGYDEVVIQGDLAKRVFKAFWVAGGKVVAAMQANDWDASDSLRPAIGKSLAEIS

SEQ ID NO: 152145 - DNA, 1227 bp, Erythrobacter sp. SD-21
  CDS (1)..(1227): transl_table=11
atggagcattacgacgtcgtcatcgtggggtccgggcacggcggcgcacaggctgcgatagccctgcgccaggctggccacgaggattcgatcctcatggtcagccgcgatcgcaacccgccctacgaacgcccgccgctgtcgaaggaatacttcgcgggcgacaagcccttcgagaagatcctcatccgtcccgaagcgttttgggcggagcgcaaggtgaccctgcggctcggcgcgaatgtcaatgaggtcgactggatgcgccgcgtcctgtcgctctcggatgaaagcttggtcagctatcgcaagctcatctgggcgggcggcggcgatccgcgccgtcttggctgcccgggcgcggaactggccggcatccacaccatccgcagccgccgcgacaccgacagtttgaaggacgaactcgccgccggtgcacgccgtgcggtcgtggtcggcggcggctatatcgggcttgaggcagcggcggtgctgcgcaagctcgatctggaagttaccgtggtcgaaatgcaggaccgcgtgctggcccgcgtggccggccccgagatctccgatttctacgccgccgaacatcgcaagcagggcgtggacattcgcctcgaagcggacatcgaccggatcgaaggcgacggcgagaaagtcactggcgtcaccctgtcgagcggccagacgctggcctgcgaagtggtgatcgtcggcatcggcatcgtgccctcggtcggaccgctgatcgccgccggggccgcgggcaccaatggcgtcgacgtggacagcttctgccgcacgtcgctcgacgatatctacgccatcggcgactgcgccgcccatgccaatccctatgcggacaacgcggtgatccggctggaatcggtccagaacgcgaacgacatggcaagcgtcgcggccaagtcgatcatgggcgacaagcaggactacgacgcggtgccgtggttctggtcgaaccagtacgatttgcggcttcagaccgtcggcatttcgaacgactacgaccagtcggtgctgcgcggcgatcccgaagcgcgcaagttcagcttgatctatctcaaggaaggccgcgtaattgcgctcgattgcgtcaacaacacgcgcgactatgcgcaggggcgcaagctcgtgatgaaccgcgccgagatcgattccgagctgctggcggacaccgaagtcccgctcaaggagatgggctga

SEQ ID NO: 152146 - protein, 408 aa, Erythrobacter sp. SD-21
MEHYDVVIVGSGHGGAQAAIALRQAGHEDSILMVSRDRNPPYERPPLSKEYFAGDKPFEKILIRPEAFWAERKVTLRLGANVNEVDWMRRVLSLSDESLVSYRKLIWAGGGDPRRLGCPGAELAGIHTIRSRRDTDSLKDELAAGARRAVVVGGGYIGLEAAAVLRKLDLEVTVVEMQDRVLARVAGPEISDFYAAEHRKQGVDIRLEADIDRIEGDGEKVTGVTLSSGQTLACEVVIVGIGIVPSVGPLIAAGAAGTNGVDVDSFCRTSLDDIYAIGDCAAHANPYADNAVIRLESVQNANDMASVAAKSIMGDKQDYDAVPWFWSNQYDLRLQTVGISNDYDQSVLRGDPEARKFSLIYLKEGRVIALDCVNNTRDYAQGRKLVMNRAEIDSELLADTEVPLKEMG

SEQ ID NO: 152147 - DNA, 1305 bp, Acanthus ebracteatus
  CDS (1)..(1305)
atggcggagaagtcgttcaagtatgtgatccttggtggcggcgttgctgcgggatacgctgctagggagtttgccaagcagggggttcaacctggtgaactggctatcatctccaaagaggctgtggccccttatgaacgcccagcacttagcaaggcatacttgtttcctgaaggaactgcaaggctcccaggtttccatgtgtgcgttggaagtggtggagagagactccttcctgagtggtactctgagaaagggatatctttgatccttagcacggaaattgcccaggcagatcttgcttcaaagacactcaccagtgcaaagggtgaagccttcaaatatgaaacgttaattatagctactggttctactgttattaaactgtcagactttggcgtacaaggtgctgatgccaaaaacatcttttatttgagggaaattgacgatgctgatcaacttgtagaagcaatcaaatctaagccaaatggaaaggctgtgattgttggcggtggatacataggcttggagcttagtgctgctttgagaatcaataatatcgatgtcagcatggtttacccagaaccttggtgcatgcccagactcttcactgctggcatagctgctttctatgaaggatactatgcaaacaagggaatcaacatcattaaaggaactgttgctgttggatttggtgcaaatgaaaaaggagaggttactgatgttaaacttaaggacggtagagtactagaagcagatattgttgttgttggtgtgggtggaagacccctcaccactttgtttaagggtcaggttgcagaggaaaagggtggaatcaagactgatgctttcttcaaaacaagcgtatccagtgtatatgctgtgggtgatgtcgcgacattccccatgaaattgtacaatgacattagaagagttgagcatgtcgatcatgcccgcaaatctgctgaacaggctgttaaggcaatttttgcaagtgaacaaggaaaatcagttgatgaatacgactacctcccatacttctattcgcgtgcctttgacctttcatggcagttctacggtgataacgtgggtgacacagtcatattcggtgacagcaacccaacatctgccactcacaagtttgggacatactggatcaaggatggccaggttgttggtgcatttttggagagcggcagtccagaagagaacaaggcgattgccaatgttgccagggcccagcctccagccggcagcttggatgagctggcctcggagggtcttgcatttgctactaaactgtaa

SEQ ID NO: 152148 - protein, 434 aa, Acanthus ebracteatus
MAEKSFKYVILGGGVAAGYAAREFAKQGVQPGELAIISKEAVAPYERPALSKAYLFPEGTARLPGFHVCVGSGGERLLPEWYSEKGISLILSTEIAQADLASKTLTSAKGEAFKYETLIIATGSTVIKLSDFGVQGADAKNIFYLREIDDADQLVEAIKSKPNGKAVIVGGGYIGLELSAALRINNIDVSMVYPEPWCMPRLFTAGIAAFYEGYYANKGINIIKGTVAVGFGANEKGEVTDVKLKDGRVLEADIVVVGVGGRPLTTLFKGQVAEEKGGIKTDAFFKTSVSSVYAVGDVATFPMKLYNDIRRVEHVDHARKSAEQAVKAIFASEQGKSVDEYDYLPYFYSRAFDLSWQFYGDNVGDTVIFGDSNPTSATHKFGTYWIKDGQVVGAFLESGSPEENKAIANVARAQPPAGSLDELASEGLAFATKL

SEQ ID NO: 152149 - DNA, 1440 bp, Oryza sativa subsp
  CDS (1)..(1440)
atgggccgcgcgttcgagtacgtgatcctgggcggcggcgtggccgccggctacgcggcgctcgagttcgtccgccgcaacggcggcgcatccagccaggagctctgcatcatctccgacgagcactttgctccttatgagcgtcctgcattaagcaaaggctatttgctcccacaagacgcgccgcgtctaccggcatttcatacttgcgttggttctaaggatgagttacttaccgaagaatggtacaacgaacacggcattgtacttgttcttggaacgagggtgatttctgctgatgtgcggcagaagacattgcttacatccagtggggaaaccatcagctataaaactcttatcgttgccacgggtgctcgggccgtgaagctggaagaatttggagtgagcggttcagatgcgaggaacgtctgctatctgcgcaatgtggaggatgcagacaaattagtcggtgtaatgagatcatgtcccggtggaaatgccgttgtcgtcggtggtggatacataggaatggaatgtgcagcggcattggtcacaaacaacataaaagttaccatggtcttccctgaaaaacactgcatgggtcgtctttttacaccgaaaattgctgagttttatgagagctattacgcttcaagaggagttactttcgtcaaagaagctgcggttacttccatgcagatatcagctggaaaggtgactgcagtgaacttgggaaacggtaggcggcttcctgccgacatggtcgtcgtcggcgtcggcgcccgcgcgaacaccgggctgttcgacggccagctggtcatggagaatggcgggatcaaggtgaacggacggatgcaggcgagcgacgcctcggtgtacgccgtgggcgacgtggccgcgttccccgtcaagctgttcggcggcgacgtccgccggctggagcacgtcgactgcgcgcgccggaccgcgcggcacgccgtcgcggcgatgctggagggcaccggatcggtggggcacatcgactacctgccattcttctactccagggtcttctcgctgtcgtggcagttctacggcgacaacgccggggaagccgtgcacttcggggacctcgcgccgcccggcgacggcgacggcgccgcccccaagttcggcgcgtactgggtccgcgacggccgcgtcgccggcgcgttcctcgagggcgggagccggcaggagtacgaggccgtggcggccgccgtccgccgcggggccgcggtggccgacgtcgcggagctcgagaggcgaggcctcgcgttcgccacccaggccaccggcggcggcggcaagcccacctgcgcatggcacgccacggtgggcgtcgccgcggccgtgtccatcgccgccttcgcctgctggtacggctggcaggcgccgtacgtgctcaagcgagacttctga

SEQ ID NO: 152150 - protein, 479 aa, Oryza sativa subsp
MGRAFEYVILGGGVAAGYAALEFVRRNGGASSQELCIISDEHFAPYERPALSKGYLLPQDAPRLPAFHTCVGSKDELLTEEWYNEHGIVLVLGTRVISADVRQKTLLTSSGETISYKTLIVATGARAVKLEEFGVSGSDARNVCYLRNVEDADKLVGVMRSCPGGNAVVVGGGYIGMECAAALVTNNIKVTMVFPEKHCMGRLFTPKIAEFYESYYASRGVTFVKEAAVTSMQISAGKVTAVNLGNGRRLPADMVVVGVGARANTGLFDGQLVMENGGIKVNGRMQASDASVYAVGDVAAFPVKLFGGDVRRLEHVDCARRTARHAVAAMLEGTGSVGHIDYLPFFYSRVFSLSWQFYGDNAGEAVHFGDLAPPGDGDGAAPKFGAYWVRDGRVAGAFLEGGSRQEYEAVAAAVRRGAAVADVAELERRGLAFATQATGGGGKPTCAWHATVGVAAAVSIAAFACWYGWQAPYVLKRDF

SEQ ID NO: 152151 - DNA, 1308 bp, Oryza sativa subsp
  CDS (1)..(1308)
atggcggccgcgaagcacttcacctacgtcatcctcggcggcggcgtcgccgcgggatacgctgcgcgggagttcgccaagcagggcgtcaagcccggggaactcgccatcatctccaaggaatcggtggctccctacgagcgtcctgctctcagcaagggatacctctttcctcagaatgcagccaggcttccgggattccacacctgcgtcgggagcggcggagagaggctcttgcctgaatggtattccgagaaaggtatcgagctgatcctgagcaccgaaattgtcaaggctgatcttgcctccaagacattgaccagttcagctgatgcaacctttacctatgacactttgctcattgccactggctcctcggtcataaagctcactgactttggtgttcaaggagcagaggccaacgacatattgtacctgagggatattgaggacgctgacaagttggtcgcggctatgcaagccaagaaggatggaaaggctgtgattgtcggaggtggctacataggacttgagcttagcgcagccttgaagaccaacaattttgatgtcactatggtgtaccctgaaccttggtgcatgccccgtctcttcacttctggccttgctgctttctacgagggatactacgctaacaaaggaatccatatcataaagggaaccgtggctgttggttttgatgctgatgccaatggagatgttactgcggtgaagctaaagaatggaaacgtgctggaagctgacattgttattgtcggtgtcggtggcaggccactgactcatctcttcaagggtcaagttgcagaggagaagggtggaataaagactgatgcattcttcgaaacgagcgttcctggtgtatacgccattgccgacgtggccgccttcccgatgaagatatacaatgagattaggagagtagagcatgttgaccatgctcgcaaatcagccgagcaggccgtgaaggcgatcaaggcgaaggaggccggcgagtcggtgccggagtacgactacctgccctacttctactcccggtcgttcgacctctcgtggcagttctacggcgacaacgtcggcgaggatgtgctgttcggcgacaacgaccccacggcggccaagcccaagttcggctcgtactggatcaaggacggcaaggtcgtcggcgtcttcctcgaaggcggctcggcggaggagaatcaggtcattgccaaggtcgccagagctcagccgccggtggccgacgtcgaggctctcaagaaggaaggactcgacttcgctgccaaagtctga

SEQ ID NO: 152152 - protein, 435 aa, Oryza sativa subsp
MAAAKHFTYVILGGGVAAGYAAREFAKQGVKPGELAIISKESVAPYERPALSKGYLFPQNAARLPGFHTCVGSGGERLLPEWYSEKGIELILSTEIVKADLASKTLTSSADATFTYDTLLIATGSSVIKLTDFGVQGAEANDILYLRDIEDADKLVAAMQAKKDGKAVIVGGGYIGLELSAALKTNNFDVTMVYPEPWCMPRLFTSGLAAFYEGYYANKGIHIIKGTVAVGFDADANGDVTAVKLKNGNVLEADIVIVGVGGRPLTHLFKGQVAEEKGGIKTDAFFETSVPGVYAIADVAAFPMKIYNEIRRVEHVDHARKSAEQAVKAIKAKEAGESVPEYDYLPYFYSRSFDLSWQFYGDNVGEDVLFGDNDPTAAKPKFGSYWIKDGKVVGVFLEGGSAEENQVIAKVARAQPPVADVEALKKEGLDFAAKV

SEQ ID NO: 152153 - DNA, 1437 bp, Vitis vinifera
  CDS (1)..(1437)
  misc_feature (603)..(603): r is g or a
atgggaagagcaattacgtatgtgattcttggtggaggcgtagcagctgggtatgcagctcttgaattcacgaagagaggcatttctcatggtgaactctgcataatctctgaagaaccagttgtgccatatgagagacctgcattaagcaaaggttttttgcttccagaagctccttcacgcctaccatcatttcacacttgtgttggtgctaatgaggagagattaactccaaaatggtataaggaacatggaattgaactggtccttggtactcgagtcaaatctgctgatgtgaggcggaagacgctactaacagcaactggagaaacaataagttacaagattctcatcattgcaacaggtgctcgggcattgcagcttgaagaatttggagtggctggatcagatgctgaaaatgtgtgttatttacgtgacttggctgatgccaccaggcttgttgatgtcatgaaatcttgtactggtgggaatgctgttgtgattggcggtgggtacataggcatggagtgtgctgcatctttggtgataaataaaataaatgttacaatggtcttcccagaagcacattgcatggcccgtttrttcacaccaaagattgcgagttattatgaagattattacaagtctaaaggagtaaagttcattaaaggaacggccttgtcatcatttgatatcgacgactctggaaaggtcacagcagttactctcagggatgggaatcggctccctgcagacatggttgtggtgggaatcggaatccgcccaaatacaggcctgtttgagggccaactaactttggaaaagggtgggatcaaagtgaatggatggatgcagtcaagtaatagctcagtctatgctgttggagatgttgcagcatttcctgtcaaactctttggagaaacccgcagacttgagcatgttgactcagcccgaaagtcagcaagacatgctgttactgcaataatggaaccagccaagacaagtgaattcgactacctaccattcttctactccagggtcttcacgctgtcttggcagttctatggggactctgtaggggaagtggttcattatggggatttctctggaagcacttttggtgcttactgggtgagtaaaggccaacttgttgggtctttccttgaaggtggaacgaaagaggagtatgaggccatagccaaggctaccaagctgaagccagatgttgaagacttagctgagctggaaagacaaggtctgggttttgcattggcagtcagtcggaaaccaccaccatcacagcctcctgaggtgagcagctctggcctcaatcttcaaaaaccaatgtatgcttggcatgcaacagcaggggtgattgtggctgcctccgtagctgtatttgcatattggtacggaaggaaacgccgaagatggtaa

SEQ ID NO: 152154 - protein, 478 aa, Vitis vinifera
MGRAITYVILGGGVAAGYAALEFTKRGISHGELCIISEEPVVPYERPALSKGFLLPEAPSRLPSFHTCVGANEERLTPKWYKEHGIELVLGTRVKSADVRRKTLLTATGETISYKILIIATGARALQLEEFGVAGSDAENVCYLRDLADATRLVDVMKSCTGGNAVVIGGGYIGMECAASLVINKINVTMVFPEAHCMARLFTPKIASYYEDYYKSKGVKFIKGTALSSFDIDDSGKVTAVTLRDGNRLPADMVVVGIGIRPNTGLFEGQLTLEKGGIKVNGWMQSSNSSVYAVGDVAAFPVKLFGETRRLEHVDSARKSARHAVTAIMEPAKTSEFDYLPFFYSRVFTLSWQFYGDSVGEVVHYGDFSGSTFGAYWVSKGQLVGSFLEGGTKEEYEAIAKATKLKPDVEDLAELERQGLGFALAVSRKPPPSQPPEVSSSGLNLQKPMYAWHATAGVIVAASVAVFAYWYGRKRRRW

SEQ ID NO: 152155 - DNA, 1305 bp, Vitis vinifera
  CDS (1)..(1305)
atggcggagaagcattttaaatacgtgatcctcggcggtggcgtttctgctggatatgcagctagggagtttgccaagcaaggggttaagccaggggagctggcaattatttccaaagaggcggttgctccttatgaacgtcctgcgcttagcaaagcctacctatttcctgagggagctgcaagacttcctggatttcatgtttgtgttggaagcggaggagagagacttcttcctgagtggtataaagagaaaggtatagaattgatccttggtacagaaatagtgaaagcagatcttgcatccaaaactctgataagtgcagctggagaaacctttaagtatcacatcttgattattgcaactggttcaacggtcataaggttaactgactttcgtgtagaaggagctgatgcaaaaaatatcttatacttgagagaaatcgatgatgctgacaagcttatagatgtaataaaggccaaaaagaatggaaaggctgtgattgttggaggggggtacattggtctcgagcttagtgcagtgatgaaaatcaacaacttagatgtttgcatggtttatccagaaccatggtgcatgcctcggcttttcactgctggtatagctgctttttatgagggttattatgctaataaaggaatcaaaatcatcaagggaacagtagcagttgggtttacctctgatgcaaatggagaggtaaaggaagtgaaacttaaggatggtagggtgctggaagctgacattgttgttgttggtgttggtggaagaccccttacaacattattcaaaggacaggtggaagaggagaaaggtggaattaagactgatgaattcttcaaaacaagtgttcctgatgtatatgctgtgggagatgttgctactttcccactgaaattgtacaacgaaattagaagagttgaacatgtcgaccatgcccggaaatcagctgagcaagctgtcaaggcaatcaaggcaagtgaggaagggaaatcagttgaggagtatgactaccttccatacttctactctcgtgcctttgatctgtcctggcagttctatggtgacaatgtgggtgaaacagtgctatttggagacaataatccagcatcaccaaaggccaagtttggaacctattggatcaaagatgggaaagtggtgggagcatttctggagggtgggactcctgaagagaacacggccattgccaaagttgcaaggctccaacctgcagttgagaatctggatcaactgactaatgaaggtctcacctttgcctgtaagatttga

SEQ ID NO: 152156 - protein, 434 aa, Vitis vinifera
MAEKHFKYVILGGGVSAGYAAREFAKQGVKPGELAIISKEAVAPYERPALSKAYLFPEGAARLPGFHVCVGSGGERLLPEWYKEKGIELILGTEIVKADLASKTLISAAGETFKYHILIIATGSTVIRLTDFRVEGADAKNILYLREIDDADKLIDVIKAKKNGKAVIVGGGYIGLELSAVMKINNLDVCMVYPEPWCMPRLFTAGIAAFYEGYYANKGIKIIKGTVAVGFTSDANGEVKEVKLKDGRVLEADIVVVGVGGRPLTTLFKGQVEEEKGGIKTDEFFKTSVPDVYAVGDVATFPLKLYNEIRRVEHVDHARKSAEQAVKAIKASEEGKSVEEYDYLPYFYSRAFDLSWQFYGDNVGETVLFGDNNPASPKAKFGTYWIKDGKVVGAFLEGGTPEENTAIAKVARLQPAVENLDQLTNEGLTFACKI

SEQ ID NO: 152157 - DNA, 1239 bp, Rhodococcus erythropolis
  CDS (1)..(1239): transl_table=11
atggcgaacgcgaagcgccaccatgtaatagtcggtggcagtgcggccggggtctcagcggctctgtcgatgcggagggcggggttcgaaggtcagatcaccctggtcgaagcggacacggcggtgccctatcaacgaccaccgctatccaaatcgttcgaggacctcgacagcccaaaggtcatcgttccagaggtgacgtacgacgaccacgacgtacagctactgtcgggcgaaagggttgcgtcactagatgaagatcgacgccgcgtcgtgttggagagtggtaccgatctgcaggctgattccgtactcgtggcgaccggggtgctgccgcgtcgactcggtgtaccgggtgacgacctcaacaacgtccttacactgcgcgacatcaacgacgcccgagcgttggcgagccgtctagacgcaggcccattagttgtcgtcggtggtggcttcatcggactcgaagttgcggcagccgcccgactacgcggccagcatgtcaccgtaatcgaggccctaagagtgccgctgacaggcgctctcggcgatgaggtcggatcgctcgtgacgaatatgcatttggcgcgtggggttcacgtcgtgacggaacgtaccgtggtcgagctgcgtggtgacggcgacgtggagtcagtaatcctcaatgacggcagtcaactgaacgcagccacggtggtcgtgggttgcggcgtctcgcccaacgacgaacttgctcggagggcgggtgtcttcaccgataacggcatcgtcatcgacgagtacgggcagacgagtcgtggctggatctgggcagctggagatgttgctactttcgagagccccttcactgaccggcgccagcggatcgaacactggaatgtcgctcaaggccagggcgccgtggtgggcgccaacatggcgggtacggcaacggcctaccgcgacgtgccctacttctggtccgatcagtacgactcgcacttgcagatgtacggccgggcggtggccagcgatcgattgacaattcgcccttcgtccgaacatgagggattcctagcgctctggatccgggacgacgtcctggtcgcagccgcctccataggtgagtccaaacaactacgtctcgccaagaacctaatcgagcaccacgtcccagtgcgggaaacagagctcgctaacccgcaccagtctctgcgggaactggtcaaacagcacaagccacaagcctttcgatga

SEQ ID NO: 152158 - protein, 412 aa, Rhodococcus erythropolis
MANAKRHHVIVGGSAAGVSAALSMRRAGFEGQITLVEADTAVPYQRPPLSKSFEDLDSPKVIVPEVTYDDHDVQLLSGERVASLDEDRRRVVLESGTDLQADSVLVATGVLPRRLGVPGDDLNNVLTLRDINDARALASRLDAGPLVVVGGGFIGLEVAAAARLRGQHVTVIEALRVPLTGALGDEVGSLVTNMHLARGVHVVTERTVVELRGDGDVESVILNDGSQLNAATVVVGCGVSPNDELARRAGVFTDNGIVIDEYGQTSRGWIWAAGDVATFESPFTDRRQRIEHWNVAQGQGAVVGANMAGTATAYRDVPYFWSDQYDSHLQMYGRAVASDRLTIRPSSEHEGFLALWIRDDVLVAAASIGESKQLRLAKNLIEHHVPVRETELANPHQSLRELVKQHKPQAFR

SEQ ID NO: 152159 - DNA, 1308 bp, Ostreococcus tauri
  CDS (1)..(1308)
atgtctcgaccgatcgtcgttgtcggcgccggtaacgccgccggttacctcgtgcgcgctctcgtcgccgctgatcccgcgctcggtgccaaaactctcgttctcggcgccgaggacgtcgctccttacgagcgtccggcgctcacgaaagcgtttttacacgaacaaacgccaccgcgattacccggattccacacgtgcgtgggcggtggcttcgatcgacaaacgcccgagtggtacgccgagagcggggtggaattgaagctgaactcgacggtgacgagcgcggatttcaaggcgaaaacggtgaccacggcgggcggtgagtcttttgcgtacgagaccttggtggttgccacgggatgcggcgtgatcagacttccagagtccatcgggggtggactccgaggggtgcactacgtgcggaacaactcggatgcgttggcgctcacagaggcgatgtcaaaagctaagaagtgcgtcgtcatcggcggtggttacatcggtttagaggtcgccgcgtcgtgtgcgacgcgcggattgaaccctgagattatcatgatggagccgcactgcatggcgaggctttggaacggagatattgcaaagtactacgaggctttgtacgaagccaagggcgcaaggtttcatcgtgagagcaaggtgaaacggattctggcggacgacgcaacgggcgcggcgagaggtgttgagctcgagagcggcgtagtgatcgattgcgatttggttgttgtcggcatcggcgctactgcgccgttgccgttcgcaggattggatgctcccgagggacgtctcggcggcgtcaaggttgactctcgattccgagcgtccggagccgacatcgctccgggtagtgtctacgccgtcggcgacatcgcggctttcccgctcaagatgacgaatgagatcgtgagaatggagcacgtcaagcacgcgcgggacagcgcgacgctcgtcggtaacctgatcgctggcaagacggacgccgaatacgattacacccccttcttttacagccgtgtgttcgagcaccccggcaccgaacgcgccgtgagctgggtcttccatggcttgcaacgcggcgagatcatcaccgtcggtgatttcaaccctaagctcgccgcattttgggtcgaaaactcaaagtgcgtcggcgtcatgctcgaatccggcgccccggagcaaaactccgccctcgccgccgcgacgcgttcgggtaaatccatcgacgtcgacgccctccgcgccgccgcatccgccgacgacgccatcgcgctcatcctttaa

SEQ ID NO: 152160 - protein, 435 aa, Ostreococcus tauri
MSRPIVVVGAGNAAGYLVRALVAADPALGAKTLVLGAEDVAPYERPALTKAFLHEQTPPRLPGFHTCVGGGFDRQTPEWYAESGVELKLNSTVTSADFKAKTVTTAGGESFAYETLVVATGCGVIRLPESIGGGLRGVHYVRNNSDALALTEAMSKAKKCVVIGGGYIGLEVAASCATRGLNPEIIMMEPHCMARLWNGDIAKYYEALYEAKGARFHRESKVKRILADDATGAARGVELESGVVIDCDLVVVGIGATAPLPFAGLDAPEGRLGGVKVDSRFRASGADIAPGSVYAVGDIAAFPLKMTNEIVRMEHVKHARDSATLVGNLIAGKTDAEYDYTPFFYSRVFEHPGTERAVSWVFHGLQRGEIITVGDFNPKLAAFWVENSKCVGVMLESGAPEQNSALAAATRSGKSIDVDALRAAASADDAIALIL

SEQ ID NO: 152161 - DNA, 1305 bp, Rheum australe
  CDS (1)..(1305)
atggcggagaagcacttcaaatacgtcatccttggtggtggcgttgcggctggttatgctgcccgtgagtttgccaaacagggtgtccaaccaggagagcttgctattatttctaaagaggctgtggctccatatgaacgaccagcactcagcaaggcatacctctttcctgaaggtgctgccagacttccaggatttcacacgtgtgttggaagtggaggagagagacttcttcctgaatggtacaaggagaaaggtatagaacttattctcagtacagaaatagtcacagctgatcttgcttccaagactctcacaagtgcagctggagaagttttcaagtatcacatcttgattattgctaccggttcttctgtcataaagttgactgacttcaaggtacaaggagctgatgctaagaacattctctacttgagagagatagacgatgctgataaacttgtggaagctattaaagagaagaagggcgggaaagttgttattgttgggggaggctatataggtcttgaacttagtgcagtaatgctactcaacaagttggatgttactatggtgtatcctgagccctggtgcatgcctcgtctcttcactgctgatatagctgctttctatgagggttattatgctaataagggtgtcaaaatcataaagggaactttggctgttggctttgagtcccatgctaatggagaggtgaaggtagttaaactgaaggatggacgagagcttgaagctgacatagttgttgttggtgttggtgcaaggccactcaagaatctgttcaaagggcaacttgaagaggacaagggtggaattaagactgatgcattcttcagaacaagtgttccagatgtttatactgttggtgacgttgctaccttccccatgaaaatgtatggtgatatcagaagagtagaacatgtcgaccactcccgtaaatctgctgagcaggctgttaaggccatcaaggcaagtgaagtgggcgaagcaattgaggaatatgactaccttccctacttctactcccgttccttcgatctgtcatggcagttctacggcgacaatgtaggagatgccgtgatatttggagacagcagtcctgagtccgagaaaccgaagtttggcttctactggattaaagacgggaaagtggtgggagttttcctggagagtggaaccccagaagagaacaaagccatagctaaggttgctaagctccaaccaccagctgagagcttggaacagcttgcaaatgaaggcttaggctttgcctccaaaatctaa

SEQ ID NO: 152162 - protein, 434 aa, Rheum australe
MAEKHFKYVILGGGVAAGYAAREFAKQGVQPGELAIISKEAVAPYERPALSKAYLFPEGAARLPGFHTCVGSGGERLLPEWYKEKGIELILSTEIVTADLASKTLTSAAGEVFKYHILIIATGSSVIKLTDFKVQGADAKNILYLREIDDADKLVEAIKEKKGGKVVIVGGGYIGLELSAVMLLNKLDVTMVYPEPWCMPRLFTADIAAFYEGYYANKGVKIIKGTLAVGFESHANGEVKVVKLKDGRELEADIVVVGVGARPLKNLFKGQLEEDKGGIKTDAFFRTSVPDVYTVGDVATFPMKMYGDIRRVEHVDHSRKSAEQAVKAIKASEVGEAIEEYDYLPYFYSRSFDLSWQFYGDNVGDAVIFGDSSPESEKPKFGFYWIKDGKVVGVFLESGTPEENKAIAKVAKLQPPAESLEQLANEGLGFASKI

SEQ ID NO: 152163 - DNA, 1173 bp, Nocardioides aromaticivorans
  CDS (1)..(1173): transl_table=11
atgcgccgccattacgagtacctggtcgtcggtggtggcgtcgccggcggtcgcgcggtcgaagcgctgtcaaagcgcgccgactcggtcgccctcgtcagcgcggaacactggcgaccctatgcgcgaccgccactgtcgaaggaggcactcgtcgagggccggtccatcgaggacctgtgccttcgagacagcgcctggtacgacgacaacggcgccgaactgtggttgggagagcgcgtggtcgggctcgacccgacagactcggtcgtgaggctggcgtccggttccgaaatcgggtttgaccgtctcctcctcgcgccgggcgtcgaaccgattcggcttcccgtaccgggcagtgagcttgccggcgtgcactacctgcgcacctacgacgacgcggtccagctccggcacgccgtggaggtccgaggccgtccgtgccgtgtggtcgtcgtgggcggcggcttcatcggatcggagctggccgcgtcgctcggcgcgatgggtgcgcttgtgacggtcgtggaggcaacctcccagttgatggtgcaggcgctcggggaggaagtgggtgccctcctcaccaggcgtcaccgccaggccgggatcgatgtgcggttggacgcgagggtcgagcgactcagcggggaaaccacagtgcagggagtccagctcgctgacggctccgaactgccctgcgacctggtggtggtcggcatcggcgccaagccccgtttggagtggctggagggctccggtgtggagctcgctgacgggatcgtcgtcgacgagcactgccgcacctcgcgggaaaacgtcttcggcgccggggatgcgacagtgatgtactccccgcgactgggccgccaccgccgggtcgagcacgaggccaacgcccaagcccaaggcgtcgtagcagcccgcaacatgctgggcggcaacgccgtccacgacccagtcgactactgctggtccatccagcacgacctcgacatctggacgctcggcgaaacgggccgcggtggggaggtgtcggtcgagatcggagacgggggcaagcacgcgctcgcgacgtatcgcctggccgggaatgtggtgggcgtcgtgggtatcaaccgtccagacgacctcgcgcccgccagggagctgctgacgtcgctgatcgcatag

SEQ ID NO: 152164 - protein, 390 aa, Nocardioides aromaticivorans
MRRHYEYLVVGGGVAGGRAVEALSKRADSVALVSAEHWRPYARPPLSKEALVEGRSIEDLCLRDSAWYDDNGAELWLGERVVGLDPTDSVVRLASGSEIGFDRLLLAPGVEPIRLPVPGSELAGVHYLRTYDDAVQLRHAVEVRGRPCRVVVVGGGFIGSELAASLGAMGALVTVVEATSQLMVQALGEEVGALLTRRHRQAGIDVRLDARVERLSGETTVQGVQLADGSELPCDLVVVGIGAKPRLEWLEGSGVELADGIVVDEHCRTSRENVFGAGDATVMYSPRLGRHRRVEHEANAQAQGVVAARNMLGGNAVHDPVDYCWSIQHDLDIWTLGETGRGGEVSVEIGDGGKHALATYRLAGNVVGVVGINRPDDLAPARELLTSLIA

SEQ ID NO: 152165 - DNA, 1305 bp, Physcomitrella patens
  CDS (1)..(1305)
atggacgcagctatgctgaagtacgtgctagtaggcggaggtgttgcagggggatacgcagcgcgggaatttgtaaagttgggtgtgaatcctggagagcttgcaattttctccaaagaaccggttgcgccctatgaacggcccgccttgagcaaggcatacttgtttcctgaatcgcctgcaaggctccctggtttccacacatgtgttggcagtggtggagagaggcaagcaccggagtggtatgctgataatggcattgatcttcacttgagctccgagattgctaaggcagacacaaagagcaagaccattacaactgcgcaagggaaaacttttgaatatggttcacttttgattgcaactggctctacatttattaacctggccgacttcaagactcctggagctgatgctggaggtattcactatctgagagaaaaagatgatgccgataagctggtggaagagattggagccaacaaaggaggcgaagctgtggttgtcggaggaggctacatcggtgtggaattggctgcgtgtcttgccctcaactcaatcagggtgactatggtgttccctgacccacatttcatgcctcgcttgtttacaccggaaatagcttcgttctacgaaagctattacaaggcaaagggtatcaacatcatcaaaggaacatccgtgactgcgtttgagaaagatgatcagggcaatgtggtgaaggtaatcctgggagatggccggtcgttgtcaaccaaccttgtagtagtgggtattggtgccagacctaacctaggaccattcaaaggcttgctggaggaagaaaaaggtggcttcaaggtggattcttctttcagatcaagcgcggaagacgtgtatgcagtcggtgatattgcaacattcccattaaagatgtatggtgacaggcgacgtgtcgagcacgtggaccatgcccggaaatcagctatccaagctgttcaggccatcaaagccgctgagaaaggcgaaactgtggacgactacgactacctgcccttcttttactcacgatctttcgacctctcatggcaattctatggagacaatactggtgattctgtcgtctggggtctagatggagcaagcgcttcaggctccaaattcggcgcctactggataaacgatggcaaagtagtgggtgcatttttggagggtgggtctcctgatgaaaacaagcttcttgccagagttgcacgacagaggccctcagtgagcagcaagaaggatctgatctctggcggcttggattttgccgcgaagatttag

SEQ ID NO: 152166 - protein, 434 aa, Physcomitrella patens
MDAAMLKYVLVGGGVAGGYAAREFVKLGVNPGELAIFSKEPVAPYERPALSKAYLFPESPARLPGFHTCVGSGGERQAPEWYADNGIDLHLSSEIAKADTKSKTITTAQGKTFEYGSLLIATGSTFINLADFKTPGADAGGIHYLREKDDADKLVEEIGANKGGEAVVVGGGYIGVELAACLALNSIRVTMVFPDPHFMPRLFTPEIASFYESYYKAKGINIIKGTSVTAFEKDDQGNVVKVILGDGRSLSTNLVVVGIGARPNLGPFKGLLEEEKGGFKVDSSFRSSAEDVYAVGDIATFPLKMYGDRRRVEHVDHARKSAIQAVQAIKAAEKGETVDDYDYLPFFYSRSFDLSWQFYGDNTGDSVVWGLDGASASGSKFGAYWINDGKVVGAFLEGGSPDENKLLARVARQRPSVSSKKDLISGGLDFAAKI

SEQ ID NO: 152167 - DNA, 1302 bp, Physcomitrella patens
  CDS (1)..(1302)
atggctacaattgatcgcaaatacattgtggtgggaggaggtgtagccgggggctacgctgcacgagagtttgtcaaattgggcttgcaacctggagaattgaccattttctccaaagaagcggcggcaccttatgagcgacccgccttgagcaaagcttacatgttccctgaggctgctgctaggcttccaggcttccatgtctgtgtaggaagcggtggagagagacagttaccggactggtatgccgaaaaaggtattgaactgaaactggagtctgagattgtgaaggccgacctagagaacaagactctgacgacagataagggagatgtctacagttatggaactctggttattgccacaggctctacgttccttaaccttgctgacttcaaaactgctggagccgacgctaaaggtatttactacctgagagaggtgcatgaagctgataagcttgttgacgccattaaagccaacaagggaggtgaagcagtggttgtcggtggaggttacattgggctggaattagctgcatgcctgacaatcaataagattaaagtcacaatggtgttcccagacccatgcttcatgcctcgtttgtttacacccgagcttgcctccttctatgagggttattacgagaataagggtgtgaacatcatcaagggaacgtctgtgactgcttttgagaaagatgataatggccatgtatcgaaagtaattctgaaagatggaagaacgttggacagcactctcgtggttgtgggagttggtgcaaaaccacttttgggtccttttaagggtttgttggaggaggagaagggtggtattaaggttgatgcctcattcaagacaagtgaccccaacgtgtacgctgtaggtgatattgcgacgttcccaatgaagatgtacggcgacactcggcgagtggagcatgtggatcatgcaaggaagtcggccatgcaggctgtgcaggctatcaaagctgcagagaagggcgaagtcgtggacgagtacgattacctgcctttcttctactctcgctccttcgatctgtcgtggcagttttatggcgacaatgtgggtgaaactgtgcattggggccgagaggctggaacacctgactcaaagtttggtgcttactgggttaaggacaacagggtaatgggcgcctttttggagggtggttcacctgatgaaaacaagttaattgccaaagttgcccgagaacaaccgtctgtgaattctacacaggatttagtatctgctggattaggcttcgcatccaaggtataa

SEQ ID NO: 152168 - protein, 433 aa, Physcomitrella patens
MATIDRKYIVVGGGVAGGYAAREFVKLGLQPGELTIFSKEAAAPYERPALSKAYMFPEAAARLPGFHVCVGSGGERQLPDWYAEKGIELKLESEIVKADLENKTLTTDKGDVYSYGTLVIATGSTFLNLADFKTAGADAKGIYYLREVHEADKLVDAIKANKGGEAVVVGGGYIGLELAACLTINKIKVTMVFPDPCFMPRLFTPELASFYEGYYENKGVNIIKGTSVTAFEKDDNGHVSKVILKDGRTLDSTLVVVGVGAKPLLGPFKGLLEEEKGGIKVDASFKTSDPNVYAVGDIATFPMKMYGDTRRVEHVDHARKSAMQAVQAIKAAEKGEVVDEYDYLPFFYSRSFDLSWQFYGDNVGETVHWGREAGTPDSKFGAYWVKDNRVMGAFLEGGSPDENKLIAKVAREQPSVNSTQDLVSAGLGFASKV

SEQ ID NO: 152169 - DNA, 1305 bp, Physcomitrella patens
  CDS (1)..(1305)
atggctgctatattgcgcaagtacattgtggtgggaggaggtgtagctggaggctacgctgcacgagagtttgtaaaactgggattacaacctggggaactgaccattttctccaaagaagcggcggcaccttatgagcggcctgctctgagcaaagcttacttgttccctgatgctcctgctaggcttccaggctttcatgtgtgcgtggggagtggaggagagaagcaattaccggattggtatgctgaaaaaggtattgaacttaaattggagactgagatcgtgaaagcggacgtggagaataagaccttgacaactaataagggcgatatttacgagtatgggactctgattcttgcaacaggctccacgttccttaaccttgccgacttcaaaactcctggagctgacgccaaaggtatttattacctaagagatattggtgatgctgataaaattgttgaagccatcaaagctagcaagggagatgaagcagtggttgtaggtggaggttacattgggctggaattagctgcatgtctgacgatgaacaagattaaagtcaacatggtgttcccagaaccatgcttgatgcctcgtttgtttacacccgaacttgcctcattttacgagagatactatgagggtaaaggcgtaaacatcatcaagggaacaactgtaactgcatttgagaaagatgacaatggccacgtatctaaagtcttattgaaaaacggaagctctgtgaacagcacttttgtggtggtgggagttggcgcaaggccacttctggctcctctgaagggtttgatagaagaagagaagggtggtttcaaggttgatgcttcattcaaaacaagcaaccccaatgtgtacgccgtaggtgacattgcaacattcccaatgaagatgtatggtgatagccggcgagtggagcatgtggaccatgcaaggaaatctgccatgcaggctgttcaggcgatcaaagccgctgagaagggcgaagtcgtggacgagtacgattacctcccattcttctactcccgctccttcaatctgtcgtggcagttctacggcgacaatgtgggcgagactgtgctttggggccgtaacggggctgcagcctctgagtccaagtttggtgcttactgggtcaaggacaacaaggtgatgggggcatttttggagggcggatcacctgatgagaacaagttgattgccaaagttgcacgagagcagcctactgtgaattcaactgatgagttagtgtctggtggcctaggctttgcatccaagatataa

SEQ ID NO: 152170 - protein, 434 aa, Physcomitrella patens
MAAILRKYIVVGGGVAGGYAAREFVKLGLQPGELTIFSKEAAAPYERPALSKAYLFPDAPARLPGFHVCVGSGGEKQLPDWYAEKGIELKLETEIVKADVENKTLTTNKGDIYEYGTLILATGSTFLNLADFKTPGADAKGIYYLRDIGDADKIVEAIKASKGDEAVVVGGGYIGLELAACLTMNKIKVNMVFPEPCLMPRLFTPELASFYERYYEGKGVNIIKGTTVTAFEKDDNGHVSKVLLKNGSSVNSTFVVVGVGARPLLAPLKGLIEEEKGGFKVDASFKTSNPNVYAVGDIATFPMKMYGDSRRVEHVDHARKSAMQAVQAIKAAEKGEVVDEYDYLPFFYSRSFNLSWQFYGDNVGETVLWGRNGAAASESKFGAYWVKDNKVMGAFLEGGSPDENKLIAKVAREQPTVNSTDELVSGGLGFASKI

SEQ ID NO: 152171 - DNA, 1680 bp, Aspergillus oryzae
  CDS (1)..(1680)
atggcacaagaatataaactcaaggatatctcgtccctagcggacatcaaagaaatggacaaggtggagtccgaggtggagggcatagaggatggtaaggtcctggtggtgaactacgaaggtcaatttcatgccatgagtcctaaatgtacccattacggagctccgttgaaacttggtgttgttgctccggagggacggattacttgcccgtggcatggagcatgctttaatatcagtaccggtgatgttgaagatgcacccgctcccaaagctttgcataagtttgaagtctttgagaaggatggtgcggtctatatcaagggagaggagtcgaccattaagtccggccaaagagatccggttgcccggtgcagtgcttccgctccggagaagttggtcattgtgggaggtggaagcggtacttttggtgttgtcgaggccattcgcgagttgaaatacaagggtgacataaccatcatttctcgagagcccaatctgcctattgatagaaccaagttatccaaggctctgatctcagatccttcgaagatcgagtggcgccctcgtgaatggtacgagagcgtctccgtagagaccgtcactgatgaagtgacgtcggtggactttaacaagagaactgtggccactaagtcgggcaagacatacccatacactaagctggtacttgctactggaggtgtgccacgcactctccctgtggaaggcttcaatgacctaggcaacatcttcctcctgcgctttgtcaccgatgtacagtccatcctcaaggcagtaggcgagaagaacaaaaagatcgttgtcgtcggtagctcattcattggtatggaggtgggtaacgcactcgccaaagataacgatgtcaccattgtcggtcaagaaaaggcccctatggaacgcgtcttgggtgaggaggtcggccgaatcattcaaggaaatctggagaaggcgggtgtcaaattcaagctgcaggccggcgttgcgaaagctacaccttctagttcggactccagcaaggtcggcgcagtccatctcaacgacggcaccgtcctcggagccgacctagtcattctgggcgtcggtgtacgtccagctaccgacttccttaagaacaaccaggccattactctagagaatgacggttcaatcagaactgatgaacatttcgccgtccctggtctagacaaccatgtctttgccatcggtgacattgccacatacccttatcatgggccgggtacggatccaaagggcactctcactcgtatcgaacactggaacgttgcgcaaaacgccggccgcggcgtcgcccgcgccattgttcatagcctcgcaaactcagcctcatcgctacaatccctgaaaccgaaggccttcatcccaattttctggtctgccgtgggggctcaattgcggtactgcggtaacacccccaacggctgggatagcctcgttttgaagggcgagcccgagaacgccaagtttgctgcgtactactgtaagggcgatacagtggtcgccgttgcgacgatgggcatggatcccattatggtgaagtgtgcggagttgatgcgccggaagaatatgccgtctaagtcgcagattgagagtggtgttgatgtcttgaaagtaggattgccggaaggtgtaaagatttaa

SEQ ID NO: 152172 - protein, 559 aa, Aspergillus oryzae
MAQEYKLKDISSLADIKEMDKVESEVEGIEDGKVLVVNYEGQFHAMSPKCTHYGAPLKLGVVAPEGRITCPWHGACFNISTGDVEDAPAPKALHKFEVFEKDGAVYIKGEESTIKSGQRDPVARCSASAPEKLVIVGGGSGTFGVVEAIRELKYKGDITIISREPNLPIDRTKLSKALISDPSKIEWRPREWYESVSVETVTDEVTSVDFNKRTVATKSGKTYPYTKLVLATGGVPRTLPVEGFNDLGNIFLLRFVTDVQSILKAVGEKNKKIVVVGSSFIGMEVGNALAKDNDVTIVGQEKAPMERVLGEEVGRIIQGNLEKAGVKFKLQAGVAKATPSSSDSSKVGAVHLNDGTVLGADLVILGVGVRPATDFLKNNQAITLENDGSIRTDEHFAVPGLDNHVFAIGDIATYPYHGPGTDPKGTLTRIEHWNVAQNAGRGVARAIVHSLANSASSLQSLKPKAFIPIFWSAVGAQLRYCGNTPNGWDSLVLKGEPENAKFAAYYCKGDTVVAVATMGMDPIMVKCAELMRRKNMPSKSQIESGVDVLKVGLPEGVKI

SEQ ID NO: 152173 - DNA, 1296 bp, Burkholderia cepacia
  CDS (1)..(1296): transl_table=11
atgcggccgggcaatttgctgctgaattgggccgcccctttttccaatgatttatcgagccactgcacgatgccccaagaagcaatgaaagcccctgtcgtcgtcctcggtgccggtttggccgccgtctcttttgctagtgaactgcgccaggccggctaccaggggccgctcaccgtggtcggcgacgaggccgagccgccctacgatcgtccgcccttgtctaaagacttcatgggccatggcgacgccgagaaaatccgcctcgactgcaagcgcgcgcccgaggtcgaatggctgttgggcgtggcggcgcagtcgttcgacccgcaggcacacacggtgacgctgtcggacgggcgcacgctgccctacggcacgctggtgctcgccacgggcgcaaccccgcgcacgctgccggccttgcagagcgcgcccatgcccgtgcacacgctgcgcacactcgaagacgcgcggcgcatccaggtcggcttgcgcccgcaggctcggctcttgatcgttggcggcggcgtgatcgggctcgaacttgcggccacggcgcgcgcagcgggtgttcacgtgacgctggtcgaaacccagccgcgcctcatgggccgcgcggcctcttccacgctctcggacttcgtggcgcgctaccacgcagcgcagggggtggacttgcgcttcggccgcagcgtcactggctttaccgagggcaccgtgctactcgacgacggcgcgcgcatcgcggccgacatggtggtcgtgggtataggcgtggtgaccaacgacgcgctcgcgcgcgcggcccgtctggcctgcgacgacggcatcttcgtcgatgccttcgggcgcaccacctgccccgatgtctacgcgattggcgacgtgacgcgccagcgcaaccctttgagtgggcgcttcgagcgcatcgaaacctggtcgaacgcgcagaatcaggggatcgcggtcgcgcgccacttggttgatccagccgcgcctggatatgcagagttgccatggtattggtccgaccagggtgcactgcgcatccaggtggcggggcttgcaagtggcgacgaggaaatcgtgcgcggcgagttctccatcgagtcgcccaagttcacgctgatcgagctgcaaaagggctgcatcgtgggcgccacctgcgtgaacaacgcgcgcgacttcgcgccgcttcggcggctgcttgcggccggtgcgcagcccgaccgcgccgcactcgccaaccctgccaccgacttgcgcaagctcgctgccgccgtcggcacgtga

SEQ ID NO: 152174 - protein, 431 aa, Burkholderia cepacia
MRPGNLLLNWAAPFSNDLSSHCTMPQEAMKAPVVVLGAGLAAVSFASELRQAGYQGPLTVVGDEAEPPYDRPPLSKDFMGHGDAEKIRLDCKRAPEVEWLLGVAAQSFDPQAHTVTLSDGRTLPYGTLVLATGATPRTLPALQSAPMPVHTLRTLEDARRIQVGLRPQARLLIVGGGVIGLELAATARAAGVHVTLVETQPRLMGRAASSTLSDFVARYHAAQGVDLRFGRSVTGFTEGTVLLDDGARIAADMVVVGIGVVTNDALARAARLACDDGIFVDAFGRTTCPDVYAIGDVTRQRNPLSGRFERIETWSNAQNQGIAVARHLVDPAAPGYAELPWYWSDQGALRIQVAGLASGDEEIVRGEFSIESPKFTLIELQKGCIVGATCVNNARDFAPLRRLLAAGAQPDRAALANPATDLRKLAAAVGT

SEQ ID NO: 152175 - DNA, 1296 bp, Burkholderia cepacia
  CDS (1)..(1296): transl_table=11
atggcgtaccactcaaccaatccgttactttcacgcgtggtgatcgtcggagcggggcaggccgccgcggcagtggcgaagaccttgcgtgcggagggacatcgcggcgagattatgatgctcggcgctgaacgcgtgggtccgtatgagcggccgcccttgtcgaaagcgtggctgagcgcggaaaacgtgcccgaaatagccgctctgctcgaaaagtctgaagcggggcagtccgatgtcgacttgcggaccggggtgaacgttacgcggatcgaccgcccctcatgcaccgtgcacgtcgacgatggatcggagatttgcttcgatcgtctcgtgatcgcaacgggcggacgcgcccggcggctggcggtgcctggcgacgcgagcgaccagatcgcctatctgcgtacgatcgacgacgctctgcatatccgccgcggattgaaagcaggcaagcggctgctgctcatcgggggcggatggatcggattggaaaccgcgtgcagcgcccggaagctaggcgtcgacgtggtgctggtcgaagcggcgcagcggttatgcgaacggaccgtcccggcgatcgtgggtgagcgtctgctcgggattcagcgttcgcttggcgtcgacgtgcgccttggcgccggcatcgagcaactgtcgaagctgcccggcggacgttatgccgcttcgctatcgggcgttcgcgaagaattcgacctggtggttgcgggggtgggcatggtggcgaacgacgaactcgcggctgaagcaggtctcccttgtgcgggcggcgtgttatgcgacgttgaaggccgcacggtcgatccccacgtgttcgcgtgcggcgatgtggcgtcgttcgagcatccttccggacccatcgggatgcggcggctggagtcgtgggacaacgcgcagcagcagggtgcggcgtgtgcccgcgccatcctcggcaagcgggcggcggcgcatccgttgccttggttctggtccgatcagggcgacgtgaatatccagatcctcggcttcccgaatgcgacggccacaccggtcgtgcgggaaggcgacggcaaggcgacgttggtctggctggaggagcacgcagcggacgagcccgcgcaaatcgtcgcggcggtatgcatcaacgcgcccgccgacatgccgatactgcgccgcatgtggcagaagggcgtgcgcgtcgaccgaaagacgctcgccgtgcaggaggtcagtctcaagagccttctgcagcgttccgcgggcgccgcgaggaatggaggtgcgaacacttag

SEQ ID NO: 152176 - protein, 431 aa, Burkholderia cepacia
MAYHSTNPLLSRVVIVGAGQAAAAVAKTLRAEGHRGEIMMLGAERVGPYERPPLSKAWLSAENVPEIAALLEKSEAGQSDVDLRTGVNVTRIDRPSCTVHVDDGSEICFDRLVIATGGRARRLAVPGDASDQIAYLRTIDDALHIRRGLKAGKRLLLIGGGWIGLETACSARKLGVDVVLVEAAQRLCERTVPAIVGERLLGIQRSLGVDVRLGAGIEQLSKLPGGRYAASLSGVREEFDLVVAGVGMVANDELAAEAGLPCAGGVLCDVEGRTVDPHVFACGDVASFEHPSGPIGMRRLESWDNAQQQGAACARAILGKRAAAHPLPWFWSDQGDVNIQILGFPNATATPVVREGDGKATLVWLEEHAADEPAQIVAAVCINAPADMPILRRMWQKGVRVDRKTLAVQEVSLKSLLQRSAGAARNGGANT

SEQ ID NO: 152177 - DNA, 1266 bp, Streptomyces tubercidicus
  CDS (1)..(1266): transl_table=11
gtggtcgacgcacaccagacgttcgtcatcgtcgggggtggcctggccggcgcaaaggccgcggagactctccgcgcggaagggttcaccggccgggtgatcctcatctgtgacgagcgcgaccacccgtacgagcgccccccgctctccaaggggttcctgctcggcaaggaagagcgcgacagcgttttcgtccacgaacccgcctggtacgcccaggcacagatcgaactgcacctgggccagcccgccgtccgcctcgaccccgaggcgaagaccgtccgcctcggcgacggcaccctgatcgcctacgacaagctgctgctggccaccggcgccgagccgcgccgcctggacatccccggcaccggcctggccggcgtgcaccacctgcgccgcctcgcccacgccgaacggctgcgcggcgtcctggcctccctcgggcgggacaacgggcatctggtgatcgccggcgccggctggatcggcctggaggtcgccgccgcggcccgctcctacggcgccgaggtcaccgtcgtcgaggccgccccgacaccgctgcacggcatcctggggcccgaactcggcggcctgttcaccgaactgcaccgcgcacacggcgtgcgcttccacttcggcgcccgtttcaccgagatcgtcggacaggacggcatggtgctcgccgtgcgcaccgacgacggcgaggagcaccccgcccacgacgtgctcgccgcgatcggcgccgccccgcgcaccgcactcgccgaacaggccggactcgacctcgccgacccggaggccggcggcggcgtggccgtcgacgcgacgctgcgcacctccgacccgtacatctacgccgccggcgacgtggccgccgccgaccaccccctcctggacacccggctgcgcgtcgaacactgggccaacgccctcaacggcggcccggccgccgcgcgcgccatgctcggccaggacatcagctacgaccgcgtcccgtacttcttctccgaccagtacgacgtcggcatggagtactccggctacgccccgcccggctcctacgcacaggtcgtctgccgcggcgacgtcgccaaacgggagttcatcgcgttctggctcggcgaggacggacggctgctcgcggggatgaacgtcaacgtctgggacgtcgccgaaaccatccagcaactcatccgcggcggggtgcggttggagcccggcgagctggctgatccggaggttccgctgacctcactgctcccgtag

SEQ ID NO: 152178 - protein, 421 aa, Streptomyces tubercidicus
MVDAHQTFVIVGGGLAGAKAAETLRAEGFTGRVILICDERDHPYERPPLSKGFLLGKEERDSVFVHEPAWYAQAQIELHLGQPAVRLDPEAKTVRLGDGTLIAYDKLLLATGAEPRRLDIPGTGLAGVHHLRRLAHAERLRGVLASLGRDNGHLVIAGAGWIGLEVAAAARSYGAEVTVVEAAPTPLHGILGPELGGLFTELHRAHGVRFHFGARFTEIVGQDGMVLAVRTDDGEEHPAHDVLAAIGAAPRTALAEQAGLDLADPEAGGGVAVDATLRTSDPYIYAAGDVAAADHPLLDTRLRVEHWANALNGGPAAARAMLGQDISYDRVPYFFSDQYDVGMEYSGYAPPGSYAQVVCRGDVAKREFIAFWLGEDGRLLAGMNVNVWDVAETIQQLIRGGVRLEPGELADPEVPLTSLLP

SEQ ID NO: 152179 - DNA, 1233 bp, Streptomyces tubercidicus
  CDS (1)..(1233): transl_table=11
atggcccagaacacggcattcatcatcgcgggagcggggctggccggggcgaaggccgcggagacactgcgcgcggagggcttcggcggccccgtcctgctgctgggcgacgagcgcgagcgtccctacgagcggccgccgctgtccaagggctacctcttgggcacctccgagcgggagaaggcgtacgtccatccgccccagtggtacgccgagcacgacgtcgatctgcggctgggcaacgccgtcaccgccctcgacccggccggccacgaggtgaccctcgccgacggcagccggctgggctacgccaagctgctgctggccaccggctccactccgcgccggctgccggtgcccggcgccgacctcgacggggtccacacgctgcggtacctggcggacagcgaccgcctcaaggacctcttccggtccgcgtcccggatcgtggtgatcggcggcggctggatcggcctggagaccacggccgccgcgcgtgcggcgggggtcgaggtgaccgtgctggagtcggcgccgctgcccctgctgggggtgctgggccgcgaggtcgcccaggtcttcgccgatctgcacaccgagcacggtgtcgcgctgcgctgcgacacccaggtcacggagatcaccggcacgaacggcgcggtcgacggggtacggctggccgacggcacccggatcgcggccgacgcggtgatcgtcggcgtcgggatcacccccaactccgagacggccgccgcggccgggctcaaggtcgacaacggcgtcgtcgtggacgagcggctgtgctcctcccacccggacatctacgccgccggcgacgtcgccaacgcctaccaccccctcctgggcaagcacctccgcgtcgagcactgggccaacgccctccaccagccgaagaccgcggcccgggccatgctgggcggggaggccggctacgaccggctgccgtacttcttcaccgaccagtacgacctgggcatggagtacacggggcatgtggagccgggcgggtacgaccgcgtggtgttccgcggcgacaccggtgcccgcgagttcatcgccttctggctctccggcggccgggtgctggccgggatgaatgtgaacgtatgggacgtcaccgacccgatccgggccctggtggcgagcgggcgggccgtggaccccgagcggctcgccgacgcggacgtaccgctggcggatctggtcccctga

SEQ ID NO: 152180 - protein, 410 aa, Streptomyces tubercidicus
MAQNTAFIIAGAGLAGAKAAETLRAEGFGGPVLLLGDERERPYERPPLSKGYLLGTSEREKAYVHPPQWYAEHDVDLRLGNAVTALDPAGHEVTLADGSRLGYAKLLLATGSTPRRLPVPGADLDGVHTLRYLADSDRLKDLFRSASRIVVIGGGWIGLETTAAARAAGVEVTVLESAPLPLLGVLGREVAQVFADLHTEHGVALRCDTQVTEITGTNGAVDGVRLADGTRIAADAVIVGVGITPNSETAAAAGLKVDNGVVVDERLCSSHPDIYAAGDVANAYHPLLGKHLRVEHWANALHQPKTAARAMLGGEAGYDRLPYFFTDQYDLGMEYTGHVEPGGYDRVVFRGDTGAREFIAFWLSGGRVLAGMNVNVWDVTDPIRALVASGRAVDPERLADADVPLADLVP

SEQ ID NO: 152181 - DNA, 1314 bp, Streptomyces tubercidicus
  CDS (1)..(1314): transl_table=11
atgcccgctgcacgccgccgccttcgacctccgcaccggagcggcgacctgcctgcccgcccgccgggccgtgcgcacccaccccgtgaccgtccaggacggcatgatctacgtccatcacgccgcggaggagggcaccgccgcatgaagtcggtcgctgtcatcggggcctcgctggcgggcctgtacgccgcgcggtccctgcgttcccaggggttcgacggccgcctggtgatcgtcggggacgagtgccacggcccctacgaccggcccccgctgtccaaggacttcctcaccggcgccaccgacccgggccgactcgccctggccgacgccgaggagatcgccgaactcgacgccgaatggctgctgggcacccgggccaccgggctcgacaccggcggacgcacggtgctgctcgatggcggccggtccctgaccaccgacggcgtggtcctcgccaccggcgccgccccgcgcctgctccccggaccggtgcccgccggggtccacaccctgcgcaccctcgacgacgcccaggcgctccgtgcggatctggcgccggcgccggtccgggtcgtggtgatcggcggcggcttcatcggcgccgaggtcgcctcgtcctgcgccgccctaggccatgacgtcaccgtggtcgaggccgcgccgctccccctcgtcccccaactcggccacgccatggccgagatctgcgccgccctgcatgcggaccacggcgtcacgctgctcaccggaaccggtgtcgcccggctgcgcagcgagggcgacggccggcgcgtcaccggcgtcgagctgaccgacggccgcctgctccccgccgacgtggtcgtcgtcggcatcggggtacgcccccgcaccgcctggctcacggactccggactgccgctcgacgacggtgtgctctgcgacgcgggctgtgtcaccccgctgcccgccgtcgtggccgtcggcgacgtcgccagggtggacggcgcccgtgccgagcactggaccagcgccaccgaacaggccgccgtggcggcgcggaacctgctggccggcagcaccgtcgcgacccaccggagcctgccgtacttctggtccgaccagtacggcgtccgcatccagttcgcgggccaccggctgcccaccgacacaccgcgcgtcctcgaaggctcccccgacgaccgcagcttcctcgcctgttacgaacgggacggacgcaccaccgcggtgctcgccctcaaccggccccgccccttcatgcggctccgccgcgaactcgcccgcaccgccctgtcggccaccacctga

SEQ ID NO: 152182 - protein, 437 aa, Streptomyces tubercidicus
MPAARRRLRPPHRSGDLPARPPGRAHPPRDRPGRHDLRPSRRGGGHRRMKSVAVIGASLAGLYAARSLRSQGFDGRLVIVGDECHGPYDRPPLSKDFLTGATDPGRLALADAEEIAELDAEWLLGTRATGLDTGGRTVLLDGGRSLTTDGVVLATGAAPRLLPGPVPAGVHTLRTLDDAQALRADLAPAPVRVVVIGGGFIGAEVASSCAALGHDVTVVEAAPLPLVPQLGHAMAEICAALHADHGVTLLTGTGVARLRSEGDGRRVTGVELTDGRLLPADVVVVGIGVRPRTAWLTDSGLPLDDGVLCDAGCVTPLPAVVAVGDVARVDGARAEHWTSATEQAAVAARNLLAGSTVATHRSLPYFWSDQYGVRIQFAGHRLPTDTPRVLEGSPDDRSFLACYERDGRTTAVLALNRPRPFMRLRRELARTALSATT

SEQ ID NO: 152183 - DNA, 1266 bp, Streptomyces tubercidicus
  CDS (1)..(1266): transl_table=11
gtggtcgacgcacaccagacgttcgtcatcgtcgggggtggcctggccggcgcaaaggccgcggagactctccgcgcggaggggttcaccggccgggtgatcctcatctgtgacgagcgcgaccacccgtacgagcgccccccgctctccaaggggttcctgctcggcaaggaagagcgcgacagcgtgttcgtccatgagcccgcctggtacgcccaggcacagatcgaactgcacctgggccagcccgccgtccgcctcgaccccgagggcaggaccgtccgcctcggcgacggcaccctgatcgcctacgacaagctgctgctggccaccggcgccgaaccgcggcgcctggacatccccggcaccggcctggccggcgtgcaccacctgcgccgcctcgcccacgccgaacggctgcgcggcgtcctggcctccctcggccgcgacaacggccatctggtgatcgccggagccggctggatcggcctggaggtcgccgccgcggcccgctcctacggcgccgaggtgaccgtcgtcgaggccgccccgacgccgctgcacggcatcctggggcccgaactcggcggtctgttcaccgatctgcaccgcgagcacggcgtccgcttccacttcggcgcccgcttcaccgagatcgtcggagagggcggcatggtgctcgccgtgcgcaccgacgacggcgaggaacaccccgcccacgatgtgctcgccgcgatcggcgccgccccgcgcaccgcgctcgccgaacaggccgggctggatctcgccgacccggagaccggcggcggggtggccgtcgacgcggcgctgcgcacctccgacccgtacatctacgccgccggtgacgtcgccgccgccgaccacccgctgctggacacccggctgcgggtcgaacactgggccaacgccctcaacggcggcccggccgccgcccgcgccatgctcggccaggacatcagctacgaccgcatcccgtacttcttctccgaccagtacgacgtcggcatggagtactccggctacgccccgcccggctcgtacgcccaggtcgtctgccgcggcgacgtcgccaagcgggagttcatcgccttctggctggcggcggacggccggctgctcgcgggcatgaacgtcaacgtctgggacgtcgccgagtccatccagcaactcatccgctccggggcgccgttggagcccggcgcactggccgatccgcaggttccgctggcggcactgctcccgtag

SEQ ID NO: 152184 - protein, 421 aa, Streptomyces tubercidicus
MVDAHQTFVIVGGGLAGAKAAETLRAEGFTGRVILICDERDHPYERPPLSKGFLLGKEERDSVFVHEPAWYAQAQIELHLGQPAVRLDPEGRTVRLGDGTLIAYDKLLLATGAEPRRLDIPGTGLAGVHHLRRLAHAERLRGVLASLGRDNGHLVIAGAGWIGLEVAAAARSYGAEVTVVEAAPTPLHGILGPELGGLFTDLHREHGVRFHFGARFTEIVGEGGMVLAVRTDDGEEHPAHDVLAAIGAAPRTALAEQAGLDLADPETGGGVAVDAALRTSDPYIYAAGDVAAADHPLLDTRLRVEHWANALNGGPAAARAMLGQDISYDRIPYFFSDQYDVGMEYSGYAPPGSYAQVVCRGDVAKREFIAFWLAADGRLLAGMNVNVWDVAESIQQLIRSGAPLEPGALADPQVPLAALLP

SEQ ID NO: 152185 - DNA, 1230 bp, Xanthomonas maltophilia
  CDS (1)..(1230): transl_table=11
atgcagagggcagacgtcgtaatcgtgggagccgggcatggcggtgcacagtgcgcgatcgcccttcgccagaacggcttcgaaggcaccatcaccgtcatcggtcgtgagccggaatatccctatgagcgtccgccgctctcgaaggaatatttcgcgcgcgagaagaccttcgaccgcctctacatccgtccgccgacgttctgggccgagaagaacatcgagttcaagcttggcaccgaagtcaccaaggtcgatcccaaggcgcacgaactgacgctctccaacggcgagagctacggttatggcaagctcgtctgggccaccggcggcgatccgcgtcgcctttcttgccagggggccgacctcaccggcatccacgccgtgcgcacccgcgaggactgcgacacgctgatggccgaagtcgatgcgggcacgaagaacatcgtcgtcatcggcggcggctacatcggtctggaagccgctgcggtgctgtccaagatgggcctcaaggtcaccctgctcgaagcgcttccgcgcgtgctggcgcgcgttgcgggtgaagacctctcgaccttctaccagaaggaacatgtcgatcacggcgtcgacctgcgcaccgaagtcatggtcgacagcctcgtcggcgaaaacggcaaggtcaccggcgtgcagcttgccggcggcgaagtgatcccggccgaaggcgtcatcgtcggcatcggcatcgtgcctgccatcggtccgctgatcgcggccggcgcggccggcgccaacggcgtcgacgtggacgagtactgccgcacctcgctgcccgacatctatgcgatcggcgactgtgcggctttcgcctgcgactacgccggcggcaacgtgatgcgcgtggaatcggtccagaacgccaacgacatgggcacctgcgtggccaaggcgatctgcggcgacgagaagccctacaaggcgttcccgtggttctggtccaaccagtacgacctcaagctgcagaccgccggcatcaacctgggcttcgacaagaccgtgatccgcggcaatccggaggagcgcagcttctcggtcgtctatctcaaggacggccgcgtggtcgcgctggactgcgtgaacatggtcaaggattacgtgcagggccgcaagctggtcgaagccggggccacccccgacctcgaagcgctggccgatgccggcaagccgctcaaggaactgcaatactag

SEQ ID NO: 152186 - protein, 409 aa, Xanthomonas maltophilia
MQRADVVIVGAGHGGAQCAIALRQNGFEGTITVIGREPEYPYERPPLSKEYFAREKTFDRLYIRPPTFWAEKNIEFKLGTEVTKVDPKAHELTLSNGESYGYGKLVWATGGDPRRLSCQGADLTGIHAVRTREDCDTLMAEVDAGTKNIVVIGGGYIGLEAAAVLSKMGLKVTLLEALPRVLARVAGEDLSTFYQKEHVDHGVDLRTEVMVDSLVGENGKVTGVQLAGGEVIPAEGVIVGIGIVPAIGPLIAAGAAGANGVDVDEYCRTSLPDIYAIGDCAAFACDYAGGNVMRVESVQNANDMGTCVAKAICGDEKPYKAFPWFWSNQYDLKLQTAGINLGFDKTVIRGNPEERSFSVVYLKDGRVVALDCVNMVKDYVQGRKLVEAGATPDLEALADAGKPLKELQY

SEQ ID NO: 152187 - DNA, 1227 bp, Xanthomonas maltophilia
  CDS (1)..(1227): transl_table=11
atgagcaaggcagacgtcgtaatcgtgggagccgggcatggcggcgcacagtgcgcgatcgcccttcgccagaacggcttcgaaggaaccatcaccgtcatcggtcgtgagccggaatatccctatgagcgtccgccgctctcgaaggaatatttcgcgcgcgagaagaccttcgaccgcctctacatccgtccgccgacgttctgggccgagaagaacatcgagttcaagcttggcaccgaagtcaccaaggtcgatcccaaggcgcacgaactgacgctctccaacggcgagagctacggttatggcaagctcgtctgggccaccggcggcgatccgcgtcgcctttcttgccagggggccgacctcaccggcatccacgccgtgcgcacccgcgaggactgcgacacgctgatggccgaagtcgatgcgggcacgaagaacatcgtcgtcatcggcggcggctacatcggtctggaagccgctgcggtgctgtccaagatgggcctcaaggtcaccctgctcgaagcgcttccgcgcgtgctggcgcgcgttgcgggtgaagacctctcgaccttctaccagaaggaacatgtcgatcacggcgtcgacctgcgcaccgaagtcatggtcgacagcctcgtcggcgaaaacggcaaggtcaccggcgtgcagcttgccggcggcgaagtgatcccggccgaaggcgtcatcgtcggcatcggcatcgtgcctgccgtcggtccgctgatcgcggccggcgcggccggtgccaacggcgtcgacgtggacgagtactgccgcacctcgctgcccgacatctatgcgatcggcgactgtgcggctttcgcctgcgactacgccggcggcaacgtgatgcgcgtggaatcggtccagaacgccaacgacatgggcacctgcgtggccaaggcgatctgcggcgacgagaagccctacaaggcgttcccgtggttctggtccaaccagtacgacctcaagctgcagaccgccggcatcaacctgggcttcgacaagaccgtgatccgcggcaatccggaggagcgcagcttctcggtcgtctatctcaaggacggccgcgtggtcgcgctggactgcgtgaacatggtcaaggattacgtgcagggccgcaagctggtcgaagccggggccacccccgacctcgaagcgctggccgatgccggcaagccgctcaaggaactgctctag

SEQ ID NO: 152188 - protein, 408 aa, Xanthomonas maltophilia
MSKADVVIVGAGHGGAQCAIALRQNGFEGTITVIGREPEYPYERPPLSKEYFAREKTFDRLYIRPPTFWAEKNIEFKLGTEVTKVDPKAHELTLSNGESYGYGKLVWATGGDPRRLSCQGADLTGIHAVRTREDCDTLMAEVDAGTKNIVVIGGGYIGLEAAAVLSKMGLKVTLLEALPRVLARVAGEDLSTFYQKEHVDHGVDLRTEVMVDSLVGENGKVTGVQLAGGEVIPAEGVIVGIGIVPAVGPLIAAGAAGANGVDVDEYCRTSLPDIYAIGDCAAFACDYAGGNVMRVESVQNANDMGTCVAKAICGDEKPYKAFPWFWSNQYDLKLQTAGINLGFDKTVIRGNPEERSFSVVYLKDGRVVALDCVNMVKDYVQGRKLVEAGATPDLEALADAGKPLKELL

SEQ ID NO: 152189 - DNA, 1302 bp, Pisum sativum
  CDS (1)..(1302)
atggtgcattcgttcaagtatatcctcattggaggaggagtttcagctgggtatgcagcaagggagtttgtgaaacaaggagttcatcctggggagcttgcaattatatctaaagaagcggtagcaccttatgaacgtcctgctctgagcaaggcttacctttttccagagtctcctgctaggcttcctgggttccatacctgtgttggaagtgggggagaaagattgcttccagagtggtacagtgagaaagggatacagctgtatctcagtacagaaattgtaagtgcagatcttgctgcaaaatttctgaaaagtgcaaacggagaacacttcgattaccagactttggttatcgcaacaggctcagctgttataaggttgacagatttcggtgtaataggagctaatgccaaaaacatattttaccttagggaggttgatgatgctgacaaattgtacgaggcaatcaaaagaaagaagaatgcgaaagctgtggttgttggaggaggatacattggtctggagttgagtgcagttttgaaactcaatgatcttgatgttaccatggtctacccagaaccttggtgtatgccacgactttttacttctgaaattgctgctttctatgagggatattatgccaataaagggatcaatatcattaaagggacagttgctgttggattcactgccaactccgatggagaggtaaaagaagtcaaactaaaggatggtagggtcctggaagcagatattgtcattgttggtgttggaggaaggcctcaaatatccttattcaaagggcaggttgaagagcagcatggtggaatcaagactgattccttcttcaaaacaagtgttcctgatgtatatgccgttggtgatgttgctacgttccctttgaaattgtacaatgacgtgagaagagttgaacacgttgatcatgctcgcaaatcagctgagcaggctgcaaaggtaatctttgcagcagatgtacgaaaatcagttgaagagtatgattaccttccatacttctattcccgttcgtttgatctgtcctggcaattctatggcgacaatgttggtgagacagtgctatttggagacaacgatcctgcatcatcaaagcctaaatttgggacatactggattaaagaagggaaagttgttggggcctttttggagggtggaactcctgatgagaataaagctattgccaaagttgcaagagccaagcctgcagtggaggatgtgaatcaacttgcagaggaaggcctttcttttgcaagtaaaatttaa

SEQ ID NO: 152190 - protein, 433 aa, Pisum sativum
MVHSFKYILIGGGVSAGYAAREFVKQGVHPGELAIISKEAVAPYERPALSKAYLFPESPARLPGFHTCVGSGGERLLPEWYSEKGIQLYLSTEIVSADLAAKFLKSANGEHFDYQTLVIATGSAVIRLTDFGVIGANAKNIFYLREVDDADKLYEAIKRKKNAKAVVVGGGYIGLELSAVLKLNDLDVTMVYPEPWCMPRLFTSEIAAFYEGYYANKGINIIKGTVAVGFTANSDGEVKEVKLKDGRVLEADIVIVGVGGRPQISLFKGQVEEQHGGIKTDSFFKTSVPDVYAVGDVATFPLKLYNDVRRVEHVDHARKSAEQAAKVIFAADVRKSVEEYDYLPYFYSRSFDLSWQFYGDNVGETVLFGDNDPASSKPKFGTYWIKEGKVVGAFLEGGTPDENKAIAKVARAKPAVEDVNQLAEEGLSFASKI

SEQ ID NO: 152191 - DNA, 1245 bp, Rhizobium sp
  CDS (1)..(1245): transl_table=11
gtgcaattcacgctgccggaggagggcgcgatgcattacgattgcctcatcgtcggaagcgggcacgggggcgcccaggcagcgacgtcgcttcgtcagaacggcttccaaggatcgatcggaatcctcagcgaagaccgggatccgccttatgaacgtccgcccctctccaaggattatctccttggtggcaagaccttcgaccgcattctgatccggccggctgagttctggacgtcgcgcagcatcgacctgctgctcgggcacgaagtcgtcaaggtccacgcgaaggagaagcaggtcctttgcgcggacggtgccacctacagttacggctacctcatctggtccgctggcgggcgcccgcgccggatgtcctgccccggtcatgatcttcaaggcatccacgcggtccggacacgctcggatgtggaccggctcgtgaaggatcttgccagcgcggaaggagtggtggtcgtcggcggcggttacatcgggctcgaggccgcggccgcgctaaccaagctcggaaagacggtgaccgtcgtcgaagcgatgaacagggtgcttgcccgtgtcgcggcggaaccgctgtctcgtttctatgagagggagcaccgtgaccacggcgtcgaaatcaggctcgagaccggtgtcgacaagttcgtcggtagcgagggacgcctcactggcgttctcttgaaggatggtgtgacgcttcctgcggatatcgcgatcgtcggcatcggtatcgtgccttgtgtcgaaccgctgatcgaggccggagcgtcgggagagaacggcctcgacgtcgacgagcattgccggacaagtctgccggacgtgttcgcggtcggcgactgcgcccgggtcaagagcgcccacggcctgcggatcgagtccgtgcagaatgcccatgatcaggccactgccgtggcaaagacgctttgcggggaattgacgccttacagcgcaacgccctggttctggtcgaaccagtacgacctccggcttcagaccgtgggtctttccgccggcttcgacaggacggtggtgcgcggcgatcccaacacccgcagcttcagtatcgtctatctccgcgagggtgcggtgatcgccctggactgcatcaatagcgtcagggactacgtcgaaggccgaatgctggtcgaaaggcgcgcgcgcgtcagtccggacgtcctggcaaacaacagcatcagactgaaatcgctggcccttgcgtga

SEQ ID NO: 152192 - protein, 414 aa, Rhizobium sp
MQFTLPEEGAMHYDCLIVGSGHGGAQAATSLRQNGFQGSIGILSEDRDPPYERPPLSKDYLLGGKTFDRILIRPAEFWTSRSIDLLLGHEVVKVHAKEKQVLCADGATYSYGYLIWSAGGRPRRMSCPGHDLQGIHAVRTRSDVDRLVKDLASAEGVVVVGGGYIGLEAAAALTKLGKTVTVVEAMNRVLARVAAEPLSRFYEREHRDHGVEIRLETGVDKFVGSEGRLTGVLLKDGVTLPADIAIVGIGIVPCVEPLIEAGASGENGLDVDEHCRTSLPDVFAVGDCARVKSAHGLRIESVQNAHDQATAVAKTLCGELTPYSATPWFWSNQYDLRLQTVGLSAGFDRTVVRGDPNTRSFSIVYLREGAVIALDCINSVRDYVEGRMLVERRARVSPDVLANNSIRLKSLALA

SEQ ID NO: 152193 - DNA, 1350 bp, Streptomyces peucetius
  CDS (1)..(1350): transl_table=11
atgaaggacgatagtccggccccgtgcgtcgccgacagggaccggatcgccaggcggaccgcctcaacctgcgggccgcccgggcaaaggagagagagcatggccacgaacgcggcattcgtgatcgtaggagcgagcctggccggcgcgaaggcagcacagaccctccgggaggagaacttcgacggccccgtagtgctgctcggagaggaaagcgagcacccctacgaacgcccgccactgtcgaaggggtatctgctcggcaaggacgaacgtgacaccgtctatgtccatcctgcccagtggtaccccgagcacgacgtcgacctgcgcctgggagccacggtcaccgcgatcgaccccgccggacacgaggtgacactcgcagacggcagccgcatcggctacgagaagctgctcctgaccaccggctcctcgccgcgccgcctgaccgtgcccggagccgatctcgaggcagtccattacctgcgccggctcgccgacagcgaccgcatcaaagaatccttcgcgtccgcaacccgcatcgtcgtgatcggcgccggctggatcggactggagaccgcggccgccgcccgcgcggccggcgtagaggtcaccgtgctggagatggcggagctgccgctgctgcgcgtgctgggccgtgaggtctcccagatcttcgccgacctgcacaccgaacacggggtcgacctgcgcttcggcgtacaggtcgccgagatcaccggcgcggacggccgggcgaatggtgtgatgctggccgacggcagccgcatcgatgccgacgcggtcatcgtcggagtcggcatcacccccaacacccagctcgccgacgccgctggcctggaagtcgacaacggcatccgcgtcgacgcccacctgaggacctcgcacccggacatctacgccgccggcgacgtcgccaacgcctttcatccgttgctcgggaaacacatccgtgtcgagcactgggccaacgccgtcaatcagccgcacgtcgcagccaaggcgatgctcggccaggacgtggcctacgaccgcgttccgtacttcttcaccgaccagtacgacctgggcatggagtacaccggctacgtcgaacccggaggctacgaccaggtcgtcttccgcggccgaacggacacccgcgagttcatcgccttctggctcgccgaggggcgggtgctggccgggatgaacgtcaacgtatgggacgtcaccgacccgatccgcgacctcgtgacctcccggcgcccggtcgacgcgaagaggctcgccgactccgacgttcccctggcacaccttctcggacgcccagacacgaccgcatga

SEQ ID NO: 152194 - protein, 449 aa, Streptomyces peucetius
MKDDSPAPCVADRDRIARRTASTCGPPGQRRESMATNAAFVIVGASLAGAKAAQTLREENFDGPVVLLGEESEHPYERPPLSKGYLLGKDERDTVYVHPAQWYPEHDVDLRLGATVTAIDPAGHEVTLADGSRIGYEKLLLTTGSSPRRLTVPGADLEAVHYLRRLADSDRIKESFASATRIVVIGAGWIGLETAAAARAAGVEVTVLEMAELPLLRVLGREVSQIFADLHTEHGVDLRFGVQVAEITGADGRANGVMLADGSRIDADAVIVGVGITPNTQLADAAGLEVDNGIRVDAHLRTSHPDIYAAGDVANAFHPLLGKHIRVEHWANAVNQPHVAAKAMLGQDVAYDRVPYFFTDQYDLGMEYTGYVEPGGYDQVVFRGRTDTREFIAFWLAEGRVLAGMNVNVWDVTDPIRDLVTSRRPVDAKRLADSDVPLAHLLGRPDTTA

SEQ ID NO: 152195 - DNA, 1305 bp, Brassica oleracea
  CDS (1)..(1305)
atggcggagaagagcttcaaatacatcatcctcggcggcggagtctcggccggatacgcagctaaggagtttgctaatcaaggggttaagccaggagaattggctgttatctccaaagaggccgtggctccatatgaacgccctgcacttagcaaggggtatctgtttcctgaaggggctgctagacttccaggtttccattgctgtgttggcagcggtggagaaaaactgcttcctgaatcctacaaacagaaagggattgagttgatactgagcacagaaatagtgaaagcagatctcgctgccaagactcttgtcagtgcagctggggatgtcttcaaatacgagactctcataattgcaactggctctactgttctcagattgactgattttggagtaaaaggtgcagactctacgaacatcctctatctgagagagattgatgatgccgacaaagtggttgaagcaattaaagcaaagaaaggcgggaaggctgtagttgttggtggaggttacattggtcttgagcttagttcagctttgaggatcaacgattttgatgtcactatggttttccctgaaccttggtgcatgcccaggcttttcaccgctgatattgctgctttctatgagacatactacacaaacaagggagtgaagatcattaagggaacggtggcatctggtttcaccgctcatccaaatggagaggtgaatgaagtacaactcaaggatgggaggtcactggaagccgacattgtgatagtcggagttggtgcgaaaccattgacatccttattcaagggacaggtggaggaagacaaaggtggaattaagaccgatgccttcttcaaaacaagtgtccctgatgtttacgctgttggtgacgttgctactttccccttgaaaatgtatggagacatgagaagggtcgagcatgttgaccattctcgcaaatccgcagagcaagctgttaaggcgatcaaagcggctgagggaggcggaacggtggaggaatacgactatctcccattcttctactcgcgctcctttgatctctcatggcagttctatggagacaacgtaggagactctgtcttatttggagacagcaatccatcaaacccaaaaccaagatttggagcgtactggatccaagatggtaaagtggttggagcattcatggaaggaggttgtggtgacgagaacaaagccttggctaaagtcgccaaagctcgacctgttgcagagagccttgacgagctggccaaacaaggcatctccttcgctgctaagatttga

SEQ ID NO: 152196 - protein, 434 aa, Brassica oleracea
MAEKSFKYIILGGGVSAGYAAKEFANQGVKPGELAVISKEAVAPYERPALSKGYLFPEGAARLPGFHCCVGSGGEKLLPESYKQKGIELILSTEIVKADLAAKTLVSAAGDVFKYETLIIATGSTVLRLTDFGVKGADSTNILYLREIDDADKVVEAIKAKKGGKAVVVGGGYIGLELSSALRINDFDVTMVFPEPWCMPRLFTADIAAFYETYYTNKGVKIIKGTVASGFTAHPNGEVNEVQLKDGRSLEADIVIVGVGAKPLTSLFKGQVEEDKGGIKTDAFFKTSVPDVYAVGDVATFPLKMYGDMRRVEHVDHSRKSAEQAVKAIKAAEGGGTVEEYDYLPFFYSRSFDLSWQFYGDNVGDSVLFGDSNPSNPKPRFGAYWIQDGKVVGAFMEGGCGDENKALAKVAKARPVAESLDELAKQGISFAAKI

SEQ ID NO: 152197 - DNA, 1461 bp, Brassica oleracea
  CDS (1)..(1461)
atggcgttagcatccaccacgttgccagcgaagaccggattgtctctttggtgtcccacttctccctccctcgctcgccgtcttcccgctcggttttctccgattggttccagaatcgcctccagaggcgtcgtcactgcttccttcgccaacgagaatcgcgagtttgtgataattgggggaggaaatgcggcggggtatgcagctaggacctttgtagaaaacggaatggccgatggtcgcctttgtattgtcaccaaagaggcttacgcgccttatgagagacctgccttgacaaaagcttacttgttccctccagagaagaagcctgctcgtcttccagggtttcatacttgtgttggaggtggtggagagaggcaaacaccagattggtacaaggagaaagggattgagatgatatatgaagatccagtgactggagctgattttgaaaagcaaaccctcacgacaaacacagggaagcagttaaaatatggatccctgattatcgctacagggtgtacagcctctaggttcccagataaaattggtggaaacttgcctggggttcactatattcgggaggttgcagatgctgattcacttatttcatctctgggaaagtcaaagaaagttgtcattgttggtggtggctacatcggcatggaggttgctgctgcagctgttgcgtggaacctagatacaacgattgtattccccgaagatcagcttttgcaaagattgttcactccatcacttgctcagagatacgaagagctataccgtcaaaatggtgttaagtttgtcaagggcgcttcgataaataacttagaagctggttcggatgggcgtgtaacagctgttaagcttgctgatggatctacaattgaggcagacacggttgtgatcggaattggagctaagcctgctattggcccctttgaaactttgtccatgaacaaatctattggaggcattcaggttgatggcttgttcagaacaagtacccctggaattttcgctattggagatgtggcagccttccctttaaagatatatgatcggatgacccgagttgaacatgttgatcacgcccgccgttctgcacaacactgcgtgaaatctctgctcactgcacacactgacacttatgattatctcccgtacttctactcaagagtattcgagtatgaaggcagctcaagaaaagtctggtggcagttttatggggataatgtgggagaaacagttgaagttggcaacttcgatcccaagatcgctaccttctggattgattctggcaggttgaaaggtgttcttgtagaaagtggttctccagaggagtttcagcttctcccaaagctagcaagaagtcaaccaattgtcgataaggctaaactcgccagcgcatcttcagtggaagaagccatcgagattgctcaagccgctctacagagttaa

SEQ ID NO: 152198 - protein, 486 aa, Brassica oleracea
MALASTTLPAKTGLSLWCPTSPSLARRLPARFSPIGSRIASRGVVTASFANENREFVIIGGGNAAGYAARTFVENGMADGRLCIVTKEAYAPYERPALTKAYLFPPEKKPARLPGFHTCVGGGGERQTPDWYKEKGIEMIYEDPVTGADFEKQTLTTNTGKQLKYGSLIIATGCTASRFPDKIGGNLPGVHYIREVADADSLISSLGKSKKVVIVGGGYIGMEVAAAAVAWNLDTTIVFPEDQLLQRLFTPSLAQRYEELYRQNGVKFVKGASINNLEAGSDGRVTAVKLADGSTIEADTVVIGIGAKPAIGPFETLSMNKSIGGIQVDGLFRTSTPGIFAIGDVAAFPLKIYDRMTRVEHVDHARRSAQHCVKSLLTAHTDTYDYLPYFYSRVFEYEGSSRKVWWQFYGDNVGETVEVGNFDPKIATFWIDSGRLKGVLVESGSPEEFQLLPKLARSQPIVDKAKLASASSVEEAIEIAQAALQS

SEQ ID NO: 152199 - DNA, 1305 bp, Brassica rapa subsp
  CDS (1)..(1305)
atggcggagaagagcttcaagtacatcatcctcggcggcggcgtctcagccggatacgcagctaaggagtttgctagtcaaggagttaaaccaggggaattggcagttatctccaaagaggcggtggctccttatgaacgtcctgctcttagcaagggctatttgtttcctgaaggggcggctagactcccaggtttccattgctgtgttggtagtggtggagaaaaactgcttcctgaatcatacaaacagaaagggattgagttgatactaagcacggagatagtgaaagcagatctcgctgccaagagtcttgtcagtgcagctggggatgtcttcaaatatgagactctcataattgcaactggctctactgttctgagattgactgattttggtgtgaaaggtgctgactctaagaatatcctctatctgagggagattgatgatgcagacaaagtggttgaagctattcaagcaaagaaaggtggaaaggctgtggttgttggtggaggctacattggtcttgagcttagtgcagctttaaggatcaacaattttgatgtcactatggttttccctgaaccctggtgcatgcctaggcttttcaccgccgacattgctgcgttctatgagacttactatacaaacaagggagtgaagatcattaaaggaactgtggcatctgggttcacagcacatccaaatggagaggtgaatgaagtacaactcaaggatggaaggtcgctagaagccgacattgtgatagttggagttggtgcaagaccattaacagccttattcaagggacaggtcgaagaagacaaaggtggaatcaagaccgatgcattcttcaaaacaagtgttcctgatgtttacgctgttggtgacgttgccactttccccttgaaaatgtatggagacatgagaagggtcgagcatgttgaccattctcgcaaatccgcagagcaagctgttaaggcgatcaaagcggctgagggaggcggagcggtggaggaatacgactacctcccattcttctactcccgctcgtttgatctctcatggcagttctatggagacaacgtaggagactctgtcttgtttggagacagcaatccatcaaacccgaaaccaagatttggagcgtattgggttcaagatggtaaagtggttggagcattcatggaaggaggtagtggtgacgagaacaaagccttggcgaaagtggccaaagctagacctgctgcagagagcctcgaggatcttaccaaacaaggcatctcatttgctgctaagatctga

SEQ ID NO: 152200 - protein, 434 aa, Brassica rapa subsp
MAEKSFKYIILGGGVSAGYAAKEFASQGVKPGELAVISKEAVAPYERPALSKGYLFPEGAARLPGFHCCVGSGGEKLLPESYKQKGIELILSTEIVKADLAAKSLVSAAGDVFKYETLIIATGSTVLRLTDFGVKGADSKNILYLREIDDADKVVEAIQAKKGGKAVVVGGGYIGLELSAALRINNFDVTMVFPEPWCMPRLFTADIAAFYETYYTNKGVKIIKGTVASGFTAHPNGEVNEVQLKDGRSLEADIVIVGVGARPLTALFKGQVEEDKGGIKTDAFFKTSVPDVYAVGDVATFPLKMYGDMRRVEHVDHSRKSAEQAVKAIKAAEGGGAVEEYDYLPFFYSRSFDLSWQFYGDNVGDSVLFGDSNPSNPKPRFGAYWVQDGKVVGAFMEGGSGDENKALAKVAKARPAAESLEDLTKQGISFAAKI

SEQ ID NO: 152201 - DNA, 1434 bp, Mesembryanthemum crystallinum
  CDS (1)..(1434)
atgcgcccaacaaccaatcccaatatcgcagctcctccgattttctctctcttctctctctgtctcgctctcagctgctcattctttgcgcttcgcttcatcgatcgaaggtccactaactccatttcaatggcggaaaagcactttaagtacatcgctcttggtggtggcgtttccggtggatatgccgcaagagagtttgctaagcagggtgtccaaccaggcgagttagcaatcatttctaaagaagcggtggccccttatgaacgtccggcacttagcaaggcatacctctttccagagggtactgctagacttcctggattccatgtttgtgtaggaagcggaggggagagacttgttcctgactggtataaggagaaaggtatagagttgattctgagcacagaaatagtcaaagctgatctttcttcaaagtctctcacaagtgctagtggagaaatatttaaatatgacaacttggtcatagcaactggttctacagtcataaaattgtcagattttggtgtccaaggggctgatgctaaaaacatcttctatcttagagaaattgatgatgctgataagcttgtggaagcaatcaaaactaagaagaatggaaaagttgtgttggttggtggaggttacattgggcttgagcttagtgcagcaatgagagtcaatgatttggatgtcactatggtttacccagagccctggtgcatgccacgactcttcactgctgatatagcaaagttctatgagggttactacactaacaagggagtcaaaattataaaaggaacagtagcggctggattcagctcccatgataatggagaggtgaaagaagtgcagctaaaggatggtagggttctggcagctgatattgtggtggttggcgttggtggaaggcctcttacagctctgttcaagggtcaggttgcagaggaaaaaggaggaattaagactgatggattctttaaaacaagcgtcccagatgtatatgctgttggtgatgtagccacctttccactgaaattgtatggtgaactgagaagagttgaacatgtcgaccatgcccgtaaatctgcagaacaggctgtgaaggctatcaaagctagtgaggagggaaaagcagttgaggaatatgactacctaccatacttctattctcgtgctttcgatctatcttggcagttttatggggataatgttggagatgccgttctatttggtgataatgaccctgcatcatcaccacacaagtttggttcgtactggatcaaagatgggaaggttgtaggagcattcctagagagcggaaccccagaagagaacaaggccatagcaaaggttgctcgagtccagcccccggctgacagcttggagcagctgtcgaaagaaggactcacctttgcctccaagatctga

SEQ ID NO: 152202 - protein, 477 aa, Mesembryanthemum crystallinum
MRPTTNPNIAAPPIFSLFSLCLALSCSFFALRFIDRRSTNSISMAEKHFKYIALGGGVSGGYAAREFAKQGVQPGELAIISKEAVAPYERPALSKAYLFPEGTARLPGFHVCVGSGGERLVPDWYKEKGIELILSTEIVKADLSSKSLTSASGEIFKYDNLVIATGSTVIKLSDFGVQGADAKNIFYLREIDDADKLVEAIKTKKNGKVVLVGGGYIGLELSAAMRVNDLDVTMVYPEPWCMPRLFTADIAKFYEGYYTNKGVKIIKGTVAAGFSSHDNGEVKEVQLKDGRVLAADIVVVGVGGRPLTALFKGQVAEEKGGIKTDGFFKTSVPDVYAVGDVATFPLKLYGELRRVEHVDHARKSAEQAVKAIKASEEGKAVEEYDYLPYFYSRAFDLSWQFYGDNVGDAVLFGDNDPASSPHKFGSYWIKDGKVVGAFLESGTPEENKAIAKVARVQPPADSLEQLSKEGLTFASKI

SEQ ID NO: 152203 - DNA, 1494 bp, Spinacia oleracea
  CDS (1)..(1494)
atgtcaacagttggaagattcatggcgaccatgtcaaattcactctcactcaaacatggcgtctcactttactcttctacttcttcctcattttctctttccaaactccactgtaaaccttcacttgtcgcttctagacccttctacaatcgtcgatgtttctcaatctctgcttcttccagtttcgccaacgacaatcgagagtatgtgatcgttggaggtgggaatgcggcggggtacgcagctcggacatttgttgaacatggattggctgatggcaagctctgcattgttactaaagaggcatacgcaccatatgagcgtccagctttgacgaagggctacttgtttccattggataagaagcctgcacgactaccaggttttcatacttgtgttggaggtggtggtgaaaggcagactccggaatggtaccaggagaaaggaattgagatgatttacgaggacgcagtgacaggtgttgatatagagaagcatactctacaaactcagtcaggcaaatcgcttaagtatggttcacttatagtggcaacaggctgcacagctacaaggtttccggagaagattggcggtaacttacccggtgtgcactatgttcgagatgtggcagatgctgactcccttatagagtcattgaagaaagcaaagaaggtggtgattgtgggcggtggctatattggcatggaagttgctgctgcagctgtgggttggaaccttgataccacggtcatatttcctgaagaccatcttttgcaaagactatttactccctcactggccaggaagtatgaagagctgtatgagcaaaatggggtcaaatttgtgaagggtgctatgattaaaaacctagaagccggttctgatggaagtgtggctgctgtcaatctcgaaaatggttctaccatagaagctgacactataattattggtatcggagctaaacctgctgtcggtccttttgaaaacgttggcttagatacaactgttggtggtatagaggttgatggtctgttccgctccaaagttcctggaatttttgccattggagatgtcgcagcatttccattgaaaatgtatgaccgtgttgctcgagttgaacatgtggatcatgcccgtaaatcagctcagcattgtgtcagtgcgcttttgagtgctcgaactcacacatacgattatctcccttatttctactcaagggtatttgaatatgaagggagccaaagaaaagtatggtggcaatttttcggggacaatgttggagaggcagttgaggttggaaactttgaccccaagattgctacattctggatagattctgggagactgaaaggagttcttgttgaaagcgggagtcctgaggaattccaacttcttcccaaaattgccaaggctcaacctttggttgacaaagccaagctgcaaagtgcatcttcagtagaggaggccttggaaatcattcatcagtcaatgtag

SEQ ID NO: 152204 - protein, 497 aa, Spinacia oleracea
MSTVGRFMATMSNSLSLKHGVSLYSSTSSSFSLSKLHCKPSLVASRPFYNRRCFSISASSSFANDNREYVIVGGGNAAGYAARTFVEHGLADGKLCIVTKEAYAPYERPALTKGYLFPLDKKPARLPGFHTCVGGGGERQTPEWYQEKGIEMIYEDAVTGVDIEKHTLQTQSGKSLKYGSLIVATGCTATRFPEKIGGNLPGVHYVRDVADADSLIESLKKAKKVVIVGGGYIGMEVAAAAVGWNLDTTVIFPEDHLLQRLFTPSLARKYEELYEQNGVKFVKGAMIKNLEAGSDGSVAAVNLENGSTIEADTIIIGIGAKPAVGPFENVGLDTTVGGIEVDGLFRSKVPGIFAIGDVAAFPLKMYDRVARVEHVDHARKSAQHCVSALLSARTHTYDYLPYFYSRVFEYEGSQRKVWWQFFGDNVGEAVEVGNFDPKIATFWIDSGRLKGVLVESGSPEEFQLLPKIAKAQPLVDKAKLQSASSVEEALEIIHQSM

SEQ ID NO: 152205 - DNA, 1257 bp, Rhodococcus erythropolis
  CDS (1)..(1257): transl_table=11
atgacagcggtcagcgagcccgacacacgcaccgtcgtgatcgtgggcacgggcatcgccggttccggtgccgcgcaggccctgcgcaaggaagggttcggcggcagcatcatcctgatcggcagcgaaacggaggagccgtaccgacgtccggcgctgtcgaaggaactactgtccgggaaagcgtcgatcgatcgggttcggttgcgaccgccgactttctggaccgagcagggtatcgaccttcggatcggcgtgactgtcacgagtatcgacacagattcccgcacagtatgtttagtcgacggggacagcatcgactacgacgttctgattcttgccgcgggtggacggtcccgacggttgaccgcggaagattctgagcgcgttcactatcttcgggatatcgcagacatgcgacgcttgcaatcccagctgatcgaaggatcctcgctactggtggtcggcggtggcttgatcggatcggaggtggcatcaacggcacgtgacttgggttgcagtgtgcaggttctcgaagcgcaaccggtgcccctgtccaggctgcttccaccgtcgatagcggagaagatcgccgcgctgcacgcctcggcgggcgtcgccttgcagacgggggtcgacctcgagacgctgacgacaggtgtcgacggtgtcaccgcacgtgcgcgtgacgggcgtgagtggactgcggacttggccgtcgtcgcaatcggatccttgcccgataccgatgtggctgctgctgcgggtattgcggtggacaacgggatttcggtcgaccgatacctccggacctccgtcattgatgtgtacgcgatcggcgatgtggccaacgtgcccaacggttttctcggcggcatgcaccgtggtgagcactggaacactgcgcaggaccacgcagtcgcagttgccaagaccatcgtcgggaaggaagaacccttcgaatccgtcccatggagttggtcgaaccaattcggccgcaacattcaagtagctggttggccaggcgcggacgacaccgtgattgttcgaggagacttggactcctatgacttcactgcgatctgcatgcgcgatggaaatatcgtcggtgctgtgagcgtgggccggccgaaggacattcgcgccgtccgaacccttatcgaacgctccccggacatcagcgtcgacgtactcgccgattcgaacagggatctgaccgaacttgcggcgggtcttgtcgcctcaccggtgctctga

SEQ ID NO: 152206 - protein, 418 aa, Rhodococcus erythropolis
MTAVSEPDTRTVVIVGTGIAGSGAAQALRKEGFGGSIILIGSETEEPYRRPALSKELLSGKASIDRVRLRPPTFWTEQGIDLRIGVTVTSIDTDSRTVCLVDGDSIDYDVLILAAGGRSRRLTAEDSERVHYLRDIADMRRLQSQLIEGSSLLVVGGGLIGSEVASTARDLGCSVQVLEAQPVPLSRLLPPSIAEKIAALHASAGVALQTGVDLETLTTGVDGVTARARDGREWTADLAVVAIGSLPDTDVAAAAGIAVDNGISVDRYLRTSVIDVYAIGDVANVPNGFLGGMHRGEHWNTAQDHAVAVAKTIVGKEEPFESVPWSWSNQFGRNIQVAGWPGADDTVIVRGDLDSYDFTAICMRDGNIVGAVSVGRPKDIRAVRTLIERSPDISVDVLADSNRDLTELAAGLVASPVL

SEQ ID NO: 152207 - DNA, 1452 bp, Brassica juncea
  CDS (1)..(1452)
atggcgttagcatccaccacgctgccagcgaagaccggattgtctctttggtgtcccacttctccctccctcgctcgccgtcttcccgttcgtttttcttccagaatcgcttcgagaggtctcgtcactgcttcgttcgccaacgagaatcgcgagtttgtgataattgggggaggaaatgcggcggggtatgcagctaggacctttgttgaaaacggaatggccgatggtcgcctttgtattgtcaccaaagaggcttatgcgccttatgagagacctgccttgacaaaagcttacttgttccctccagagaagaagcctgctcgtcttccaggctttcatacttgtgttggaggtggtggagagaggcaaacaccagattggtacaaggagaaagggattgagatgatatatgaagatcctgtgactggagctgattttgaaaagcaaaccctcacgacaaacacagggaagcagttgaaatatggatcccttattatcgctacagggtgtactgcctctaggttcccagataaaattggtggaaacttgcctggggttcactatattcgggaggttgcagatgctgattcacttatttcatctctgggaaagtcaaagaaagttgtcattgttggtggtggctacatcggcatggaggctgctgctgcagctgttgcgtggaacctagatacaacgattgtattccccgaagatcagcttttgcaaagattgttcactccctcacttgctcagagatacgaagagctataccgtcaaaatggtgttaagtttgtcaagggcgcttcgataaataacttagaagctggttcggatgggcgtgtaacagctgttaagcttgctgatggatctacaattgaggcagacacggttgtgatcggaattggagctaagcctgctattggcccctttgaaactttggctatgaacaaatcaattggaggcattcaggttgatggcttgttcaggacaagtacccctggaattttcgctattggagatgtcgcagccttcccattgaagatatatgatcggatgacccgagttgaacatgttgatcacgcccgccgttctgcacaacactgcgtgaaatctctgctcactgcacacactgacacgtatgattatctcccgtatttctactcaagagtattcgagtatgaaggcagctcaagaaaagtttggtggcagttttatggggataatgtgggagaaacagttgaagttggcaacttcgatcccaagatcgctaccttctggattgattctggcaggttgaaaggtgtttttgtagaaagtggttctccagaggagtttcagcttctcccaaagctagcaagaagtcaaccaattgtggacaaggctaaactcgccagcgcatcttcagtggaagaagccctcgagattgctcaagccgctctacagagttaa

SEQ ID NO: 152208 - protein, 483 aa, Brassica juncea
MALASTTLPAKTGLSLWCPTSPSLARRLPVRFSSRIASRGLVTASFANENREFVIIGGGNAAGYAARTFVENGMADGRLCIVTKEAYAPYERPALTKAYLFPPEKKPARLPGFHTCVGGGGERQTPDWYKEKGIEMIYEDPVTGADFEKQTLTTNTGKQLKYGSLIIATGCTASRFPDKIGGNLPGVHYIREVADADSLISSLGKSKKVVIVGGGYIGMEAAAAAVAWNLDTTIVFPEDQLLQRLFTPSLAQRYEELYRQNGVKFVKGASINNLEAGSDGRVTAVKLADGSTIEADTVVIGIGAKPAIGPFETLAMNKSIGGIQVDGLFRTSTPGIFAIGDVAAFPLKIYDRMTRVEHVDHARRSAQHCVKSLLTAHTDTYDYLPYFYSRVFEYEGSSRKVWWQFYGDNVGETVEVGNFDPKIATFWIDSGRLKGVFVESGSPEEFQLLPKLARSQPIVDKAKLASASSVEEALEIAQAALQS

SEQ ID NO: 152209 - DNA, 1308 bp, Oryza sativa subsp
  CDS (1)..(1308)
atggcgtcggagaagcacttcaagtacgtcatcctcggcggcggcgtcgcagcgggatatgcggcacgggagttcgccaagcagggtgttaagccaggggagctcgccatcatctccaaggaggccgtggctccttatgagcgccctgctctcagcaagggatacctctttcctcagaatgctgcaagactcccaggatttcatgtgtgtgtcggcagtggaggagagaggcttttgcccgaatggtactcagagaaaggcattgagttgatcctgagcactgaaattgtcaaagctgatcttgcctccaagactttgactagtgcagttggagcaacctttacatatgagattttgatcattgcaactggctcctcagtcatcaagctatcagattttggtactcaaggagctgattccaacaacattttatatctaagggaagtagatgatgctgacaagctggttgcagctatccaagcaaagaagggtggaaaggcagttattgtaggaggaggttacattggtctagaacttagtgctgcattgaagatcaatgattttgatgtcacgatggtgtttcctgaaccttggtgcatgcctcgtctcttcactgctgatatcgcggctttctatgagagttactacactaacaaaggagttaagatcgtgaagggtacagtagctgttggttttgatgctgatgctaatggtgatgtcacagcagttaacctgaagaatggcagtgtgcttgaagctgatattgttggtgttggtgttgggggcagaccgctgactactctctttaaaggtcaagttgctgaggagaaaggtggaattaagaccgatgctttctttgaaacaagtgttcctggagtctatgctgtcggtgatgtggccaccttccccatgaagatgtacaatgagttgaggagagtggaacatgttgaccatgctaggaagtctgcagagcaggctgtaaaggcaatcaagggaaaagagtccggcgagtccgttgtggagtatgactatctgccatacttctactcccggtcattcgacctgggatggcaattctacggcgacaacgttggcgacaccatcctgttcggagacagtgacccgacctctgccaagcccaagttcgggtcctactggatcaaggacggcaaggtgttgggtgccttcctggagggtgggtcacctgatgagaacaaggccattgccaaggtcgcgaaaactcagccgcccgttgccaacatagaggagctcaagaaggaaggcctccagttcgccagcaaaatatga

SEQ ID NO: 152210 - protein, 435 aa, Oryza sativa subsp
MASEKHFKYVILGGGVAAGYAAREFAKQGVKPGELAIISKEAVAPYERPALSKGYLFPQNAARLPGFHVCVGSGGERLLPEWYSEKGIELILSTEIVKADLASKTLTSAVGATFTYEILIIATGSSVIKLSDFGTQGADSNNILYLREVDDADKLVAAIQAKKGGKAVIVGGGYIGLELSAALKINDFDVTMVFPEPWCMPRLFTADIAAFYESYYTNKGVKIVKGTVAVGFDADANGDVTAVNLKNGSVLEADIVGVGVGGRPLTTLFKGQVAEEKGGIKTDAFFETSVPGVYAVGDVATFPMKMYNELRRVEHVDHARKSAEQAVKAIKGKESGESVVEYDYLPYFYSRSFDLGWQFYGDNVGDTILFGDSDPTSAKPKFGSYWIKDGKVLGAFLEGGSPDENKAIAKVAKTQPPVANIEELKKEGLQFASKI

SEQ ID NO: 152211 - DNA, 1467 bp, Arabidopsis thaliana
  CDS (1)..(1467)
atgggaagagctttcgtgtatgtaattctcggaggaggtgttgctgctggttacgcagctctcgaattcacccgtcgaggtgtctccgatggcgaactctgtatcatttccgaagaacccgttgcaccgtatgagaggcctgccttaagcaaaggttttctgctgccagaagctcctgcacggcttccttctttccacacttgtgttggagctaatgatgagaagcttacaccgaaatggtacaaggatcatggaattgaattggtacttggaactcgtgttaagtccgttgatgtgaggaggaagactcttttatcgagcacaggggagactataagttacaaattcttgatcattgcaacaggtgcccgggcgttgaagcttgaagaatttggggtggaaggctcagatgctgaaaatgtttgttacttacgagatctagctgatgcaaataggcttgccactgtgattcaatcaagctccaacgggaatgcggttgttatcggcggtggctatatcggtatggagtgtgctgcatctttagtgatcaacaaaatcaatgtgacgatggttttcccagaggctcactgcatggcacgtctctttacgcccaagattgcaagtttgtatgaagactactacagggctaaaggcgtaaaatttataaaaggaacggttttgacatcatttgagtttgactcgaacaaaaaggttactgcagttaatctcaaagacgggagccacttaccagccgacttggttgtggttggtatcgggatacgaccaaacacaagcttgtttgaaggacagttaacaatagagaaaggagggataaaagtgaacagcagaatgcagtcaagtgacagctcagtgtatgcaataggcgatgtagctacatttccagtgaaactatttggcgaaatgaggaggcttgagcacgtggactcagctaggaaatctgcgcgacacgcagtttcagccatcatggatccaataaagaccggagactttgattacttaccatttttctactcaagggtcttcgcattctcatggcaattctatggagaccctacaggtgatgttgtgcactttggagagtatgaagacgggaaatcatttggagcgtattgggttaaaaagggtcaccttgttggatcttttcttgaaggaggcactaaagaagaatatgaaactatctcaaaggcgacacaattgaaaccagctgtgactattgatttggaagaattggaaagagaaggactcgggtttgctcacacggttgtgagtcagcagaaagttcctgaagttaaggatattccgagcgctgagatggtgaagcaatctgcaagtgtggtcatgataaagaagcctttgtatgtatggcacgcagctactggagtcgttgtggctgcatctgtggctgcgttcgcgttttggtatgggaggagacgccgtagatggtga

SEQ ID NO: 152212 - protein, 488 aa, Arabidopsis thaliana
MGRAFVYVILGGGVAAGYAALEFTRRGVSDGELCIISEEPVAPYERPALSKGFLLPEAPARLPSFHTCVGANDEKLTPKWYKDHGIELVLGTRVKSVDVRRKTLLSSTGETISYKFLIIATGARALKLEEFGVEGSDAENVCYLRDLADANRLATVIQSSSNGNAVVIGGGYIGMECAASLVINKINVTMVFPEAHCMARLFTPKIASLYEDYYRAKGVKFIKGTVLTSFEFDSNKKVTAVNLKDGSHLPADLVVVGIGIRPNTSLFEGQLTIEKGGIKVNSRMQSSDSSVYAIGDVATFPVKLFGEMRRLEHVDSARKSARHAVSAIMDPIKTGDFDYLPFFYSRVFAFSWQFYGDPTGDVVHFGEYEDGKSFGAYWVKKGHLVGSFLEGGTKEEYETISKATQLKPAVTIDLEELEREGLGFAHTVVSQQKVPEVKDIPSAEMVKQSASVVMIKKPLYVWHAATGVVVAASVAAFAFWYGRRRRRW

SEQ ID NO: 152213 - DNA, 1305 bp, Arabidopsis thaliana
  CDS (1)..(1305)
atggcggagaagagctttaagtacatcatcctcggcggcggcgtctctgccggatacgcagctaaggagtttgccaatcaaggggttcaaccaggagaattggctgttatctcgaaagaggcggtggctccatatgaacgccctgcacttagcaaggggtatttgtttcctgaaggggctgctagacttccaggtttccattgctgtgttggtagtggtggagaaaaactgcttcctgaatcctacaagcagaaaggaattgagttgatactaagcacagaaatagtgaaagctgatctctctgccaagagtcttgtcagtgcaactggggatgtcttcaagtatcagacgctcataattgcaactggttctactgttctcagattgactgattttggagtaaaaggtgcagactctaagaatatcctctatctgagagagattgatgatgccgacaaattggttgaagcaattaaagctaagaaaggtggaaaggctgtagttgttggcggaggttacattggtcttgagcttagtgcagttttaaggatcaacaatttagatgtcactatggttttccctgaaccttggtgcatgcctaggcttttcaccgccgatattgctgctttctatgagacttactatacaaacaagggagtgaagatcattaaaggaacagtggcatctgggttcacagctcagccaaatggagaggtgaaggaagtacaactcaaggatgggaggacattggaagccgacattgtgatagttggggttggtgcaaaaccattgacatccttattcaagggacaggtcgaggaagataaaggtggaattaagaccgatgcattcttcaaaacaagtgttccagatgtttacgctgttggtgacgttgctactttccctttgaaaatgtacggagacgtgagaagggtcgagcatgttgaccattcccgcaaatcagcagagcaagctgttaaggcgatcaaagcggctgagggaggcgcagcggtggaggaatacgactatcttccattcttctactctcgctcctttgatctctcatggcagttctacggagacaacgtaggagactctgtgttatttggagacagcaatccatcaaacccaaaaccaagatttggagcatattgggttcaaggtggtaaagtggttggagcattcatggagggaggtagtggtgatgagaacaaagccttggctaaagtcgccaaagctcgaccttctgcagagagtctcgacgagctcgtgaaacaaggaatttccttcgcagctaagatctga

SEQ ID NO: 152214 - protein, 434 aa, Arabidopsis thaliana
MAEKSFKYIILGGGVSAGYAAKEFANQGVQPGELAVISKEAVAPYERPALSKGYLFPEGAARLPGFHCCVGSGGEKLLPESYKQKGIELILSTEIVKADLSAKSLVSATGDVFKYQTLIIATGSTVLRLTDFGVKGADSKNILYLREIDDADKLVEAIKAKKGGKAVVVGGGYIGLELSAVLRINNLDVTMVFPEPWCMPRLFTADIAAFYETYYTNKGVKIIKGTVASGFTAQPNGEVKEVQLKDGRTLEADIVIVGVGAKPLTSLFKGQVEEDKGGIKTDAFFKTSVPDVYAVGDVATFPLKMYGDVRRVEHVDHSRKSAEQAVKAIKAAEGGAAVEEYDYLPFFYSRSFDLSWQFYGDNVGDSVLFGDSNPSNPKPRFGAYWVQGGKVVGAFMEGGSGDENKALAKVAKARPSAESLDELVKQGISFAAKI

SEQ ID NO: 152215 - DNA, 1308 bp, Arabidopsis thaliana
  CDS (1)..(1308)
atggcagaagaaaagagcttcaagtatgtgatcgtcggaggtggtgtcgccgccggatacgcggcgagagagttcttcaaccaaggtgtcaagcctggtgaacttgctatcatttccagggaacaagttcctccatatgagcgtcctgcacttagcaagggatatatccacctcgaaaataaagctacacttccgaatttctatgttgctgctggaattgggggagagagacagttccctcaatggtacaaagagaaaggtattgagctgattttgggcacagagattgtcaaagcagatcttgctgcgaagacacttgtcagtgggactggacaagtcttcaagtaccaaactttgctagctgcaactggttcttctgtcataaggttgtcagattttggcgtcccaggtgcagatgctaagaatatattctacctgagagaactcgaagatgctgattaccttgcttatgcaatggaaacaaaggaaaaaggaaaggctgtggttgttggtggcggttacatcggtcttgaactcggtgctgctctgaaggctaacaacctcgacgttaccatggtttatccagaaccttggtgcatgcctcggcttttcaccgctggcattgcttccttctacgagggttactatgccaacaaaggaattaacattgtcaaaggcactgttgcatctggtttcactaccaactcaaatggagaggtcactgaggtgaaattgaaagacggaagaacgttagaagctgatattgtgatagtgggtgtcggtggtagaccaattatatcactcttcaaagatcaagttgaagaagagaagggtggtttgaagactgatgggttcttcaaaacaagccttccagatgtatacgccattggtgatgtagccaccttcccaatgaaactctacaatgaaatgagacgcgttgaacacgttgaccatgctcgcaaatccgctgaacaagccgtaaaggcaatcaaggcggctgaggaagggaactcaattccggaatatgactatcttccatacttttactctcgagcctttgatctctcatggcaattctacggtgacaacgttggagaaagcgtattgtttggggacaatgacccggaatcgccaaagccgaaattcgggagctactggattaaagaacggaaagtggttggagcatttttagaaggtggaagtcctgaagagaacaatgcaattgctaaacttgcacgagcacaaccttctgttgagagccttgaagtgctatctaaggaaggcctttccttcgccacaaatatataa

SEQ ID NO: 152216 - protein, 435 aa, Arabidopsis thaliana
MAEEKSFKYVIVGGGVAAGYAAREFFNQGVKPGELAIISREQVPPYERPALSKGYIHLENKATLPNFYVAAGIGGERQFPQWYKEKGIELILGTEIVKADLAAKTLVSGTGQVFKYQTLLAATGSSVIRLSDFGVPGADAKNIFYLRELEDADYLAYAMETKEKGKAVVVGGGYIGLELGAALKANNLDVTMVYPEPWCMPRLFTAGIASFYEGYYANKGINIVKGTVASGFTTNSNGEVTEVKLKDGRTLEADIVIVGVGGRPIISLFKDQVEEEKGGLKTDGFFKTSLPDVYAIGDVATFPMKLYNEMRRVEHVDHARKSAEQAVKAIKAAEEGNSIPEYDYLPYFYSRAFDLSWQFYGDNVGESVLFGDNDPESPKPKFGSYWIKERKVVGAFLEGGSPEENNAIAKLARAQPSVESLEVLSKEGLSFATNI

SEQ ID NO: 152217 - DNA, 1482 bp, Arabidopsis thaliana
  CDS (1)..(1482)
atgtctgcagttcgtagagtcatggcgttagcatcaaccacgttgccgacgaagtccggattatctctttggtgtccgtcttctccgtctctcgctcgccgatttcccgctcgtttttctccgatcggttctagaatcgcttccagaagcctcgtcactgcttcgttcgctaacgagaatcgcgagtttgtgattgttggtggaggaaatgctgctggttatgctgctagaacttttgtggaaaatggaatggctgatggtcggctatgcattgtgaccaaagaggcttacgcaccttatgagagaccggctttgacaaaagcttacttgttcccaccagagaagaagccagctcgtttaccaggatttcatacttgcgttggaggtggtggagaaaggcaaacaccagattggtataaggagaaaggaattgaggtaatatatgaagatccagtggctggagctgattttgaaaagcaaacactcaccacagacgcagggaagcagttaaaatatggatctctaattatcgctacagggtgtacagcctcaaggttcccagataaaatcggtgggcacttgccaggggttcactatattcgggaggttgcagatgctgattcactgatagcatctctgggaaaggcaaagaaaattgtcattgttggtggtggctacatcggcatggaggttgctgctgcagctgttgcgtggaatctagatacaacgattgtattccctgaagatcagcttttgcaaagattgttcactccatcgcttgctcagaaatatgaagaactgtaccgtcaaaatggtgttaagtttgtcaagggcgcttccataaataacttggaagcaggttcggatgggcgtgtatcagctgttaagcttgctgatgggtctacaattgaggcagacacggttgtaattggaattggagctaagcctgctattggcccctttgaaactttggccatgaacaaatcaattggaggaattcaggtcgatggcttgttcaggacaagtacccctggaatttttgctattggagatgtcgcagccttccctttgaagatatatgataggatgactcgagttgaacatgttgatcacgcccgccgctctgcacaacactgtgtgaaatcactactcacggcacacactgacacgtacgattatcttccatatttctactcaagagtattcgagtatgaaggaagcccaagaaaagtgtggtggcagtttttcggagataatgtgggagaaacagtggaggttgggaactttgacccgaaaatcgctaccttctggattgaatctggcaggttgaaaggtgttctagtagaaagcggatcgcctgaggagttccagcttctaccaaagctagcaagaagccaaccacttgtcgataaggctaaactcgcaagcgcatcttcagtcgaagaagctctcgagattgctcaagccgctctacagagttag

SEQ ID NO: 152218 - protein, 493 aa, Arabidopsis thaliana
MSAVRRVMALASTTLPTKSGLSLWCPSSPSLARRFPARFSPIGSRIASRSLVTASFANENREFVIVGGGNAAGYAARTFVENGMADGRLCIVTKEAYAPYERPALTKAYLFPPEKKPARLPGFHTCVGGGGERQTPDWYKEKGIEVIYEDPVAGADFEKQTLTTDAGKQLKYGSLIIATGCTASRFPDKIGGHLPGVHYIREVADADSLIASLGKAKKIVIVGGGYIGMEVAAAAVAWNLDTTIVFPEDQLLQRLFTPSLAQKYEELYRQNGVKFVKGASINNLEAGSDGRVSAVKLADGSTIEADTVVIGIGAKPAIGPFETLAMNKSIGGIQVDGLFRTSTPGIFAIGDVAAFPLKIYDRMTRVEHVDHARRSAQHCVKSLLTAHTDTYDYLPYFYSRVFEYEGSPRKVWWQFFGDNVGETVEVGNFDPKIATFWIESGRLKGVLVESGSPEEFQLLPKLARSQPLVDKAKLASASSVEEALEIAQAALQS

SEQ ID NO: 152219 - DNA, 1305 bp, Cucumis sativus
  CDS (1)..(1305)
atggcagatgagaccttcaaatacgtgattcttggtggtggcgttgccgctggatatgcagctagggaattcgttaaacagggacttaatccaggagaattggcgattatatccaaggaggcggttgctccttatgagcgtccagctcttagcaaagcctatctctttcccgagtcccctgctagattaccagggttccatgtatgtgtaggaagtggaggggagaggttgcttcctgattggtacaaggaaaaagggatcgagttgattctcagtacagaaattgttgaagcagatcttcctgccaagagactcagaagtgctcatgggaaaatttacaattaccaaactttgattattgctactggttctactgttattaaattgtctgactttggagttcaaggagcggatgccaaaaacattttctatttgagagaaattgatgatgctgatcagctagttgaagcaatcaaagcaaaggaaaatggaaaagtggttgttgttggaggaggatacataggccttgagcttggtgcagcgttgagaataaacaactttgatgtcagcatggtttatcctgaaccatggtgcatgcctaggctattcactccagaaatagctgctttctatgaaggttattatgcacaaaaaggaatcacaatcattaaaggaacagtcgctgtaggcttcacagttgatactaatggagaggttaaggaagtgaaacttaaagatggcagggtcttagaagctgacattgttgttgttggtgttggtgcacggccactgacaagcttattcaagggtcaaatcgtagaagaaaaaggaggcattaagactgatgaattcttcaagacgagtgttcctgatgtatacgcggtgggcgatgtggctacttttcctttgaagctttacaatgaactgagaagagttgagcatgttgaccattctcgcaaatcagcagagcaagctgtgaaggccatcaaggcgagtgaagagggcaaagccattgaggagtatgactatcttccatacttctactctcgatcctttgatttatcatggcagttttacggggataatgttggcgacgcagtcttatttggagacaacagtcctgattcagctactcacaaatttgggtcatattggatcaaagatgggaaggttgtgggagctttcctagagagtgggagtcctgaagaaaacaaggccattgccaaagttgctaggattcaaccatcagttgagagctcagatttgctccttaaagaaggcatctcctttgcatccaaggtttaa

SEQ ID NO: 152220 - protein, 434 aa, Cucumis sativus
MADETFKYVILGGGVAAGYAAREFVKQGLNPGELAIISKEAVAPYERPALSKAYLFPESPARLPGFHVCVGSGGERLLPDWYKEKGIELILSTEIVEADLPAKRLRSAHGKIYNYQTLIIATGSTVIKLSDFGVQGADAKNIFYLREIDDADQLVEAIKAKENGKVVVVGGGYIGLELGAALRINNFDVSMVYPEPWCMPRLFTPEIAAFYEGYYAQKGITIIKGTVAVGFTVDTNGEVKEVKLKDGRVLEADIVVVGVGARPLTSLFKGQIVEEKGGIKTDEFFKTSVPDVYAVGDVATFPLKLYNELRRVEHVDHSRKSAEQAVKAIKASEEGKAIEEYDYLPYFYSRSFDLSWQFYGDNVGDAVLFGDNSPDSATHKFGSYWIKDGKVVGAFLESGSPEENKAIAKVARIQPSVESSDLLLKEGISFASKV

SEQ ID NO: 152221 - DNA, 1302 bp, Pisum sativum
  CDS (1)..(1302)
atggtgcattcgttcaagtatatcatcattggaggaggagtttcagctggttatgcagcaagggagtttgtgaaacaaggagttcatcctggggagcttgcaattatatctaaagaagcggtagcaccttatgaacgtcctgctctgagcaaggcttacctttttccagagtctcctgctaggcttcctgggttccatacctgtgttggaagtgggggagaaagattgcttccagagtggtacagtgagaaagggatacagctgtatctcagtacagaaattgtaagtgcagatcttgctgcaaaatttctgaaaagtgcaaacggagaacacttcgattaccagactttggttatcgcaacaggctcagctgttataaggttgacagatttcggtgtaataggagctaatgccaaaaacatattttaccttagggaggttgatgatgctgacaaattgtacgaggcaatcaaaagaaagaagaatgcgaaacgtgtggttgttggaggaggatacattggtctggagttgagtgcagttttgaaactcaatgatcttgatgttaccatggtctacccagaaccttggtgtatgccacgactttttacttctgaaattgctgctttctatgagggatattatgccaataaagggatcaatatcattaaagggacagttgctgttggattcactgccaactccgatggagaggtaaaagaagtcaaactaaaggatggtagggtcctggaagcagatattgtcattgttggtgttggaggaaggcctcaaatatccttattcaaagggcaggttgaagagcagcatggtggaatcaagactgattccttcttcaaaacaagtgttcctgatgtatatgccgttggtgatgttgctacgttccctttgaaattgtacaatgacgtgagaagagttgaacacgttgatcatgctcgcaaatcagctgagcaggctgcaaaggccatctttgcagcagatgtaggaaaatcagttgaagagtatgattaccttccatacttctattcccgttcgtttgatctgtcctggcaattctatggcgacaatgttggtgagacagtgctatttggagacaacgatcctgcatcatcaaagcctaaatttgggacatactggattaaagaagggaaagttgttggggcctttttggagggtggaactcctgatgagaataaagctattgccaaagttgcaagagccaagcctgcagtggaggatgtgaatcaacttgcagaggaaggcctttcttttgcaagtaaaatttaa

SEQ ID NO: 152222 - protein, 433 aa, Pisum sativum
MVHSFKYIIIGGGVSAGYAAREFVKQGVHPGELAIISKEAVAPYERPALSKAYLFPESPARLPGFHTCVGSGGERLLPEWYSEKGIQLYLSTEIVSADLAAKFLKSANGEHFDYQTLVIATGSAVIRLTDFGVIGANAKNIFYLREVDDADKLYEAIKRKKNAKRVVVGGGYIGLELSAVLKLNDLDVTMVYPEPWCMPRLFTSEIAAFYEGYYANKGINIIKGTVAVGFTANSDGEVKEVKLKDGRVLEADIVIVGVGGRPQISLFKGQVEEQHGGIKTDSFFKTSVPDVYAVGDVATFPLKLYNDVRRVEHVDHARKSAEQAAKAIFAADVGKSVEEYDYLPYFYSRSFDLSWQFYGDNVGETVLFGDNDPASSKPKFGTYWIKEGKVVGAFLEGGTPDENKAIAKVARAKPAVEDVNQLAEEGLSFASKI

SEQ ID NO: 152223 - DNA, 1302 bp, Solanum lycopersicum
  CDS (1)..(1302)
atggcggagaaatcattcaagtatgtgatcgtcggtggcggtgtttctgctgggtatgctgctagagaatttgccaaacagggagttaagcctggggaactggctattatttccaaagaggcagtggctccttatgaacgtcctgcacttagcaaggcatacctttttcctgaaggagctgctagactcccaggatttcatgtgtgtgttggaagtggaggagagagacagcttcctgagtggtatgcagagaaaggcatttcgttgatcctgagtactgaaatagtgaaagcagatcttgcttcaaagactcttgttagtgcagctggggaatcttttaaatatcaaacacttgttattgcaacaggtaccaccgttttgaagttgtcagattttggtgtacaaggtgctgattccaagaatatcttttacttgagagaaatcgatgatgctgatcaacttgtggaagcattaaaagctaagaaaaatggtaaagctgttgttgttgggggagggtacatcggtctcgagcttagtgctgtactgagactgaacaacattgaagtcaatatggtttacccagaaccatggtgcatgcctcggcttttcacagagggcatagctgcgttctatgaaggttattataaaaacaagggagtcaatattatcaagggtacagtggctgttgggtttgatacccatccaaatggagaggtgaaggaagtcaaactcaaagatggcagagttttggaagctgacatagtagtcgtaggagtcggagcaagaccactcacaactctattcaaagggcaagttgaagaggagaagggtggaattaagacagatgcgttcttcaaaacaagtgtacctgatgtatatgctgtgggtgatgttgccacttttcctttgaaaatgtacaatgagattagaagagttgaacatgttgatcattctcgcaaatctgctgagcaggctgtcaaggcaatatttgccagtgagcaagggaagtctgtcgatgaatatgactaccttccatacttctattcccgcgccttcgatttgtcttggcaattctacggtgataatgtgggtgaaacagtgctctttggggacgctgatcccaactctgcaactcacaagtttggacaatactggatcaaagatggaaagatcgttggtgcattcctcgagagtgggtcacctgaagagaacaaggcaattgctaaggttgcaaaggttcaaccccctgctaccttggatcaattggcacaggagggcatcagttttgcctcaaagatctaa

SEQ ID NO: 152224 - protein, 433 aa, Solanum lycopersicum
MAEKSFKYVIVGGGVSAGYAAREFAKQGVKPGELAIISKEAVAPYERPALSKAYLFPEGAARLPGFHVCVGSGGERQLPEWYAEKGISLILSTEIVKADLASKTLVSAAGESFKYQTLVIATGTTVLKLSDFGVQGADSKNIFYLREIDDADQLVEALKAKKNGKAVVVGGGYIGLELSAVLRLNNIEVNMVYPEPWCMPRLFTEGIAAFYEGYYKNKGVNIIKGTVAVGFDTHPNGEVKEVKLKDGRVLEADIVVVGVGARPLTTLFKGQVEEEKGGIKTDAFFKTSVPDVYAVGDVATFPLKMYNEIRRVEHVDHSRKSAEQAVKAIFASEQGKSVDEYDYLPYFYSRAFDLSWQFYGDNVGETVLFGDADPNSATHKFGQYWIKDGKIVGAFLESGSPEENKAIAKVAKVQPPATLDQLAQEGISFASKI

SEQ ID NO: 152225 - DNA, 1728 bp, Schizosaccharomyces pombe
  CDS (1)..(1728)
atgagtagtagttcaggcttaaagcagcaagggcttgcacaaaagaagaaatttcagctggagtttgacccttcgtctgtttcgaaaaatggaacgaaaacagaagccaaggtggttggtacggaatttggcgtattactagttcgtgctcgaaacacctactttgcgacggctggaaagtgcagccattatggtgctcccttagccaaaggtgtggttacgtcggacggccatattgtgtgtccttggcacggtgcctgtttcaatgcagcaactggagacgtggaagacacgcctgccattgctgcgttacgtacctttcctgttactgaggagggcgatggtagcctctggattgaagtggaggacaagaacgacaatggtgcctctgttttgcaacctgaaggctgctggagaaataaggccaccgaagtgtacaacaagggtagcgttgagactgaagtgacggcgcctcacgtctgtattatcggcggtggaaagggtgcctcagttgcagcagaataccttcgcgagaagaacttcaaaggaaagattaccatctttacccgggaagacgaagtcccctacgatcgtcctaaactatctaaatccttacttcatgacatttccaaacttgctttacgttctaaagaatactatgatgatcttgatatatctttccatttcaacactgacgttaccaagattgatttggccgagaaaaaaatttactgtggttcagatgaaaagcccacagagtcatatacgaagttgattttggctactggaggcgagccgaacaaactccctattcctggcttggattcgaagaatgtatacctgttgcgctctatcgccgatgcatccaaactcgctgccgtcactaccgaagctggtgacaaaaagaacattgtcattattggaagtagcttcattggtttggagctcgcagtcgtgctgaaagaccataatgtctcggtgattggaatggagtcgattccctttgaaaaggttatgggtaaagaagttggtactgcacttaaagctttgcacgagcaaaatggtatcgccttttacttggagaacagcattaaagaggtgaagacttcttccaatgactcatctaaagccgaacacattgtgttgaaagacggacaaagtatacccgccgacgtagttatcttggctgctggtgtaaaacccaatcttcgctatttgggtaatgccgtttctctcgaaaaagatggtggtgtcaaggtcgatgagcattgtcgtgttctaggtgccgaagacgtgtacgcagtaggagacattgcacatgctccatttgccggtttaccttcatcaggagaaaagtcgcacacacgaattgagcattgggatgtcgccggtaatttgggaagagtcgcggctgaccatattttgtttggtaacaaagctggctatacgacgaaatcattcaccccatacttttggtctgcccaaggaaagcaactacgctattgcggaaacaatgctgctgaaggttttgatgatgtggtcattcagggctccctctccgactataagtttgcttgcttttttaccaagggtgaaaaagtcgttggagtttgtagcattatgaaggatcctgtcgtctctcaatgcgcaagacttttcatcaaagatgcaatgcccagcaaatctcagctaaaggaaaactttgatgtgttgtccattcctttgtaa

SEQ ID NO: 152226 - protein, 575 aa, Schizosaccharomyces pombe
MSSSSGLKQQGLAQKKKFQLEFDPSSVSKNGTKTEAKVVGTEFGVLLVRARNTYFATAGKCSHYGAPLAKGVVTSDGHIVCPWHGACFNAATGDVEDTPAIAALRTFPVTEEGDGSLWIEVEDKNDNGASVLQPEGCWRNKATEVYNKGSVETEVTAPHVCIIGGGKGASVAAEYLREKNFKGKITIFTREDEVPYDRPKLSKSLLHDISKLALRSKEYYDDLDISFHFNTDVTKIDLAEKKIYCGSDEKPTESYTKLILATGGEPNKLPIPGLDSKNVYLLRSIADASKLAAVTTEAGDKKNIVIIGSSFIGLELAVVLKDHNVSVIGMESIPFEKVMGKEVGTALKALHEQNGIAFYLENSIKEVKTSSNDSSKAEHIVLKDGQSIPADVVILAAGVKPNLRYLGNAVSLEKDGGVKVDEHCRVLGAEDVYAVGDIAHAPFAGLPSSGEKSHTRIEHWDVAGNLGRVAADHILFGNKAGYTTKSFTPYFWSAQGKQLRYCGNNAAEGFDDVVIQGSLSDYKFACFFTKGEKVVGVCSIMKDPVVSQCARLFIKDAMPSKSQLKENFDVLSIPL

SEQ ID NO: 152227 - DNA, 1440 bp, Oryza sativa
  CDS (1)..(1440)
atgggccgcgcgttcgagtacgtgatcctgggcggcggcgtggccgccggctacgcggcgctcgagttcgtccgccgcaacggcggcgcatccagccaggagctctgcatcatctccgacgagcactttgctccttatgagcgtcctgcattaagcaaaggctatttgctcccacaagacgcgccgcgtctaccggcatttcatacttgcgttggttctaaggatgagttacttaccgaagaatggtacaacgaacacggcattgtacttgttcttggaacgagggtgatttctgctgatgtgcggcagaagacattgcttacatccagtggggaaaccatcagctataaaactcttatcgttgccacgggtgctcgggccgtgaagctggaagaatttggagtgagcggttcagatgcgaggaacgtctgctatctgcgcaatgtggaggatgcagacaaattagtcggtgtaatgagatcatgtcccggtggaaatgccgttgtcgtcggtggtggatacataggaatggaatgtgcagcggcattggtcacaaacaacataaaagttaccatggtcttccctaaaaaacactgcatgggtcgtctttttacaccgaaaattgctgagttttatgagagctattacgcttcaagaggagttactttcgtcaaagaagctgcggttacttccatgcagatatcagctggaaaggtgactgcagtgaacttgggaaacggtaggcggcttcctgccgacatggtcgtcgtcggcgtcggcgcccgcgcgaacaccgggctgttcgacggccagctggtcatggagaacggcgggatcaaggtgaacggacggatgcaggcgagcgacgcctcggtgtacgccgtgggcgacgtggccgcgttccccgtcaagctgttcggcggcgacgtccgccggctggagcacgtcgactgcgcgcgccggaccgcgcggcacgccgtcgcggcgatgctggagggcaccggatcggtggggcacatcgactacctgccattcttctactccagggtcttctcgctgtcgtggcagttctacggcgacaacgccggggaagccgtgcacttcggggacctcgcgccgcccggcgacggcgacggcgccgcccccaagttcggcgcgtactgggtccgcgacggccgcgtcgccggcgcgttcctcgagggcgggagccggcaggagtacgaggccgtggcggccgccgtccgccgcggggccgcggtggccgacgtcgcggagctcgagaggcgaggcctcgcgttcgccacccaggccaccggcggcggtggcaagcccacctgcgcatggcacgccacggtgggcgtcgccgcggccgtgtccatcgccgccttcgcctgctggtacggctggcaggcgccgtacgtgctcaagcgagacttctga

SEQ ID NO: 152228 - protein, 479 aa, Oryza sativa
MGRAFEYVILGGGVAAGYAALEFVRRNGGASSQELCIISDEHFAPYERPALSKGYLLPQDAPRLPAFHTCVGSKDELLTEEWYNEHGIVLVLGTRVISADVRQKTLLTSSGETISYKTLIVATGARAVKLEEFGVSGSDARNVCYLRNVEDADKLVGVMRSCPGGNAVVVGGGYIGMECAAALVTNNIKVTMVFPKKHCMGRLFTPKIAEFYESYYASRGVTFVKEAAVTSMQISAGKVTAVNLGNGRRLPADMVVVGVGARANTGLFDGQLVMENGGIKVNGRMQASDASVYAVGDVAAFPVKLFGGDVRRLEHVDCARRTARHAVAAMLEGTGSVGHIDYLPFFYSRVFSLSWQFYGDNAGEAVHFGDLAPPGDGDGAAPKFGAYWVRDGRVAGAFLEGGSRQEYEAVAAAVRRGAAVADVAELERRGLAFATQATGGGGKPTCAWHATVGVAAAVSIAAFACWYGWQAPYVLKRDF

SEQ ID NO: 152229 - DNA, 1431 bp, Oryza sativa
  CDS (1)..(1431)
atggggcgggcgttcgtgcacgtgatcctcggcggcggcgtggccgccggctacgcggcgctcgagttcgcccgccgcggcggctactcccgcggcgagctctgcatcatctccgaagagacggttgctccttatgaacgtccggcactaagcaaaggctatttactcccagaaggtgccgctcgtcttccaggatttcatacctgcgttggtgccaatgatgaattactgacggcaaaatggtacaaagaaaatggtattgaacttgttcttggaacaaaagtgataaccgctgatgtaaggatgaagacattgcttacagccactggagaaactatcagctataagaatcttatcattgcgaccggtgctcgggctttgaagctggaagagtttggaatcagtggatcagatgcttcgaacatatgttatttgcgcaatcttgatgatgcggataagttagtgaatgtgatgaaatcatgtcctggtggaaatgctgtcgtcattggtggtggctatataggaatggagtgcgcagcagcattggttactaataggataaaagtaaccatggtcttccctgaaagccactgcatggcccgtctatttacaccaaaaattgcagaatattatgagaactattacacttcaaaaggtgttacctttgtcaaaggaactgtgcttacatcctttgaaaaagattcgacagggaaggtgacttcagtaatcctgaaagatggtaaacaccttcctgccgatatggttgtggttggtattggcatccgtgcaagcactggtctttttgaaggtcagctgttgatggagcaaggtgggataaaggtaaacggacaaatgttaacaagcgatggttctgtatatgccgttggcgatgttgctgccttccctatcaagctctttgatggtgttatacgacggcttgagcatgttgactcagctcgcagaacagcgagacatgctgttgcagccatcctggagccttcaaaaactaaggacatcgattacctgccattcttctactccagggtcttcacattatcctggcaattctatgggaacaataccggagaagtggttcactttggagacttcacaaacagcagcccaaggtttggtgcctattgggttgataaaagccggattaggggtgcatttcttgaaggtggaagtcgagaagaatacgaggcgatatcgaatgttgttcggcgtaaagctaaggttataaacattgctgaacttgaaaagcaaggtctgatgtttgccattcaagaaagccagaaggacttgcctgatggtgggcttgctcttggtgaaaagcctacatatgtatggcatgcaacggctggtgtcattgcagctgcgtccattgctgcatttggttattggtacggcaggaaacgccgtaggtggtga

SEQ ID NO: 152230 - protein, 476 aa, Oryza sativa
MGRAFVHVILGGGVAAGYAALEFARRGGYSRGELCIISEETVAPYERPALSKGYLLPEGAARLPGFHTCVGANDELLTAKWYKENGIELVLGTKVITADVRMKTLLTATGETISYKNLIIATGARALKLEEFGISGSDASNICYLRNLDDADKLVNVMKSCPGGNAVVIGGGYIGMECAAALVTNRIKVTMVFPESHCMARLFTPKIAEYYENYYTSKGVTFVKGTVLTSFEKDSTGKVTSVILKDGKHLPADMVVVGIGIRASTGLFEGQLLMEQGGIKVNGQMLTSDGSVYAVGDVAAFPIKLFDGVIRRLEHVDSARRTARHAVAAILEPSKTKDIDYLPFFYSRVFTLSWQFYGNNTGEVVHFGDFTNSSPRFGAYWVDKSRIRGAFLEGGSREEYEAISNVVRRKAKVINIAELEKQGLMFAIQESQKDLPDGGLALGEKPTYVWHATAGVIAAASIAAFGYWYGRKRRRW

SEQ ID NO: 152231 - DNA, 1521 bp, Oryza sativa
  CDS (1)..(1521)
atgacctcagaggtggccgtagctctccggcggaaggcggcggagatggcttccacggccgcggcggcgtcgtcgcaggggtgcatctcgtgggcgctgcggcagcgtgggcttggtggtggtggtgcgcgggctgtcccggtgcttccccgccggagattctgcgtctccgcggcggcgggtgcggggttcgacaacgagaatcgcgagtatgtgatcgtgggtggaggcaacgcggccggttacgcggcgaggacgttcgtcgagcacggcatggctgatggccgcctttgcatcgtctccaaggaggcgtatccgccatatgagcgaccagcactgacaaagggctatcttttccctccagacaagaagcctgctcgtctacctggctttcatacctgtgttggatcaggtgggcagaggcagactgctgaatggtacaaggagaacggcatagaggtattgtatgaggatccagttgtagcgtttgatggcaaaacacataccttaaaaacttcatcagggaaaattctgaagtatgggtcacttattatttctactggctgtgaagcttcaaggttacctgctaagattggaggaaatttgcctggagttcactatatacgtgatgttgctgatgcggattctctagtatcttcattgggaaaagcaaagaaaattgttgttattggtgggggctatattggcatggaggtagcagcagcagcttgtggctggaatctcgacacaactattatattcccagaggaccacattatgccaagactctttacaccttcccttgctaagaagtatgaggaactgtatcagcaaaatggtgtcaaattcattaagggagctcttattgataaacttgaagctggctctgatggtagggtgtcatctgcagtacttgaagatggatctgtagttgaagctgatacagttattgttggtataggagcaagaccagttattggcccatttgaagctgttggggtcaacactaaagttggtggaatagaggttgattccttgtttagaactagtatacctggtatctttgctattggagatgtagcagcttttcccctcaagatgtatgatagaatgactcgagttgagcatgtggatcatgctcggaagtctgcacaccactgtgttgaagcactcctaacatcacacacaaagccgtatgactaccttccatatttctattcaagagtttttgagtacgaaggaagttcaaggaaaatttggtggcaattttacggtgataatgttggcgaaacaattgaagtgggaagctttgaaccaaagattgctaccttctggattgactctgatagtcgactgaagggtgttttccttgagagtggtagctcagaggaattttcgcttcttcctcaactcgctaagtctcagcccgttgtagacaaagctaagctcaaaagtgcaacctctgtcgaggatgccttagagatcgcaagaagctctctccactctggttcttctgtttag

SEQ ID NO: 152232 - protein, 506 aa, Oryza sativa
MTSEVAVALRRKAAEMASTAAAASSQGCISWALRQRGLGGGGARAVPVLPRRRFCVSAAAGAGFDNENREYVIVGGGNAAGYAARTFVEHGMADGRLCIVSKEAYPPYERPALTKGYLFPPDKKPARLPGFHTCVGSGGQRQTAEWYKENGIEVLYEDPVVAFDGKTHTLKTSSGKILKYGSLIISTGCEASRLPAKIGGNLPGVHYIRDVADADSLVSSLGKAKKIVVIGGGYIGMEVAAAACGWNLDTTIIFPEDHIMPRLFTPSLAKKYEELYQQNGVKFIKGALIDKLEAGSDGRVSSAVLEDGSVVEADTVIVGIGARPVIGPFEAVGVNTKVGGIEVDSLFRTSIPGIFAIGDVAAFPLKMYDRMTRVEHVDHARKSAHHCVEALLTSHTKPYDYLPYFYSRVFEYEGSSRKIWWQFYGDNVGETIEVGSFEPKIATFWIDSDSRLKGVFLESGSSEEFSLLPQLAKSQPVVDKAKLKSATSVEDALEIARSSLHSGSSV

SEQ ID NO: 152233 - DNA, 1509 bp, Oryza sativa
  CDS (1)..(1509)
atgacctcagctctccggcggaaggcggcggagatggcttccacggccgcggcggcgtcgtcgcaggggtgcatctcgtgggcgctgcggcagcgtgggcttggtggtggtggtgcgcgggctgtcccggtgcttccccgccggagattctgcgtctccgcggcggcgggtgcggggttcgacaacgagaatcgcgagtatgtgatcgtgggtggaggcaacgcggccggttacgcggcgaggacgttcgtcgagcacggcatggctgatggccgcctttgcatcgtctccaaggaggcgtatccgccatatgagcgaccagcactgacaaagggctatcttttccctccagacaagaagcctgctcgtctacctggctttcatacctgtgttggatcaggtgggcagaggcagactgctgaatggtacaaggagaacggcatagaggtattgtatgaggatccagttgtagcgtttgatggcaaaacacataccttaaaaacttcatcagggaaaattctgaagtatgggtcacttattatttctactggctgtgaagcttcaaggttacctgctaagattggaggaaatttgcctggagttcactatatacgtgatgttgctgatgcggattctctagtatcttcattgggaaaagcaaagaaaattgttgttattggtgggggctatattggcatggaggtagcagcagcagcttgtggctggaatctcgacacaactattatattcccagaggaccacattatgccaagactctttacaccttcccttgctaagaagtatgaggaactgtatcagcaaaatggtgtcaaattcattaagggagctcttattgataaacttgaagctggctctgatggtagggtgtcatctgcagtacttgaagatggatctgtagttgaagctgatacagttattgttggtataggagcaagaccagttattggcccatttgaagctgttggggtcaacactaaagttggtggaatagaggttgattccttgtttagaactagtatacctggtatctttgctattggagatgtagcagcttttcccctcaagatgtatgatagaatgactcgagttgagcatgtggatcatgctcggaagtctgcacaccactgtgttgaagcactcctaacatcacacacaaagccgtatgactaccttccatatttctattcaagagtttttgagtacgaaggaagttcaaggaaaatttggtggcaattttacggtgataatgttggcgaaacaattgaagtgggaagctttgaaccaaagattgctaccttctggattgactctgatagtcgactgaagggtgttttccttgagagtggtagctcagaggaattttcgcttcttcctcaactcgctaagtctcagcccgttgtagacaaagctaagctcaaaagtgcaacctctgtcgaggatgccttagagatcgcaagaagctctctccactctggttcttctgtttag

SEQ ID NO: 152234 - protein, 502 aa, Oryza sativa
MTSALRRKAAEMASTAAAASSQGCISWALRQRGLGGGGARAVPVLPRRRFCVSAAAGAGFDNENREYVIVGGGNAAGYAARTFVEHGMADGRLCIVSKEAYPPYERPALTKGYLFPPDKKPARLPGFHTCVGSGGQRQTAEWYKENGIEVLYEDPVVAFDGKTHTLKTSSGKILKYGSLIISTGCEASRLPAKIGGNLPGVHYIRDVADADSLVSSLGKAKKIVVIGGGYIGMEVAAAACGWNLDTTIIFPEDHIMPRLFTPSLAKKYEELYQQNGVKFIKGALIDKLEAGSDGRVSSAVLEDGSVVEADTVIVGIGARPVIGPFEAVGVNTKVGGIEVDSLFRTSIPGIFAIGDVAAFPLKMYDRMTRVEHVDHARKSAHHCVEALLTSHTKPYDYLPYFYSRVFEYEGSSRKIWWQFYGDNVGETIEVGSFEPKIATFWIDSDSRLKGVFLESGSSEEFSLLPQLAKSQPVVDKAKLKSATSVEDALEIARSSLHSGSSV

SEQ ID NO: 152235 - DNA, 1476 bp, Oryza sativa
  CDS (1)..(1476)
atggcttccacggccgcggcggcgtcgtcgcaggggtgcatctcgtgggcgctgcggcagcgtgggcttggtggtggtggtgcgcgggctgtcccggtgcttccccgccggagattctgcgtctccgcggcggcgggtgcggggttcgacaacgagaatcgcgagtatgtgatcgtgggtggaggcaacgcggccggttacgcggcgaggacgttcgtcgagcacggcatggctgatggccgcctttgcatcgtctccaaggaggcgtatccgccatatgagcgaccagcactgacaaagggctatcttttccctccagacaagaagcctgctcgtctacctggctttcatacctgtgttggatcaggtgggcagaggcagactgctgaatggtacaaggagaacggcatagaggtattgtatgaggatccagttgtagcgtttgatggcaaaacacataccttaaaaacttcatcagggaaaattctgaagtatgggtcacttattatttctactggctgtgaagcttcaaggttacctgctaagattggaggaaatttgcctggagttcactatatacgtgatgttgctgatgcggattctctagtatcttcattgggaaaagcaaagaaaattgttgttattggtgggggctatattggcatggaggtagcagcagcagcttgtggctggaatctcgacacaactattatattcccagaggaccacattatgccaagactctttacaccttcccttgctaagaagtatgaggaactgtatcagcaaaatggtgtcaaattcattaagggagctcttattgataaacttgaagctggctctgatggtagggtgtcatctgcagtacttgaagatggatctgtagttgaagctgatacagttattgttggtataggagcaagaccagttattggcccatttgaagctgttggggtcaacactaaagttggtggaatagaggttgattccttgtttagaactagtatacctggtatctttgctattggagatgtagcagcttttcccctcaagatgtatgatagaatgactcgagttgagcatgtggatcatgctcggaagtctgcacaccactgtgttgaagcactcctaacatcacacacaaagccgtatgactaccttccatatttctattcaagagtttttgagtacgaaggaagttcaaggaaaatttggtggcaattttacggtgataatgttggcgaaacaattgaagtgggaagctttgaaccaaagattgctaccttctggattgactctgatagtcgactgaagggtgttttccttgagagtggtagctcagaggaattttcgcttcttcctcaactcgctaagtctcagcccgttgtagacaaagctaagctcaaaagtgcaacctctgtcgaggatgccttagagatcgcaagaagctctctccactctggttcttctgtttag

SEQ ID NO: 152236 - protein, 491 aa, Oryza sativa
MASTAAAASSQGCISWALRQRGLGGGGARAVPVLPRRRFCVSAAAGAGFDNENREYVIVGGGNAAGYAARTFVEHGMADGRLCIVSKEAYPPYERPALTKGYLFPPDKKPARLPGFHTCVGSGGQRQTAEWYKENGIEVLYEDPVVAFDGKTHTLKTSSGKILKYGSLIISTGCEASRLPAKIGGNLPGVHYIRDVADADSLVSSLGKAKKIVVIGGGYIGMEVAAAACGWNLDTTIIFPEDHIMPRLFTPSLAKKYEELYQQNGVKFIKGALIDKLEAGSDGRVSSAVLEDGSVVEADTVIVGIGARPVIGPFEAVGVNTKVGGIEVDSLFRTSIPGIFAIGDVAAFPLKMYDRMTRVEHVDHARKSAHHCVEALLTSHTKPYDYLPYFYSRVFEYEGSSRKIWWQFYGDNVGETIEVGSFEPKIATFWIDSDSRLKGVFLESGSSEEFSLLPQLAKSQPVVDKAKLKSATSVEDALEIARSSLHSGSSV

SEQ ID NO: 152237 - DNA, 1308 bp, Oryza sativa
  CDS (1)..(1308)
atggcggccgcgaagcacttcacctacgtcatcctcggcggaggcgtcgccgcgggatacgctgcgcgggagttcgccaagcagggcgtcaagcccggggaactcgccatcatctccaaggaatcggtggctccctacgagcgtcctgctctcagcaagggatacctctttcctcagaatgcagccagacttccgggattccacacctgcgtcgggagcggcggagagaggctcttgcctgaatggtattccgagaaaggtatcgagctgatcctgagcaccgaaattgtcaaggctgatcttgcctccaagacattgaccagttcagctgatgcaacctttacctatgacactttgctcattgccactggctcctcggtcataaagctcactgactttggtgttcaaggagcagaggccaacgacatattgtacctgagggatattgaggacgctgacaagttggtcgcggctatgcaagccaagaaggatggaaaggctgtgattgtcggaggtggctacataggacttgagcttagcgcagccttgaagaccaacaattttgatgtcactatggtgtaccctgaaccttggtgcatgccccgtctcttcacttctggccttgctgctttctacgagggatactacgctaacaaaggaatccatatcataaagggaaccgtggctgttggttttgatgctgatgccaatggagatgttactgcggtgaagctaaagaatggaaacgtgctggaagctgacattgttattgtcggtgtcggtggcaggccactgactcatctcttcaagggtcaagttgcagaggagaagggtggaatcaagactgatgcattcttcgaaacgagcgttcctggtgtatacgccattgccgacgtggccgccttcccgatgaagctatacaatgagattaggagagtagagcatgttgaccatgctcgcaaatcagccgagcaggccgtgaaggcgatcaaggcgaaggaggccggcgagtcggtgccggagtacgactacctgccctacttctactcccggtcgttcgacctctcgtggcagttctacggcgacaacgtcggcgaggatgtgctgttcggcgacaacgaccccacggcggccaagcccaagttcggctcgtactggatcaaggacggcaaggtcgtcggcgtcttcctcgagggcggctcggcggaggagaatcaggtcattgccaaggtcgccagagctcagccgccggtggccgacgtcgaggctctcaagaaggaaggactcgacttcgctgccaaagtctga

SEQ ID NO: 152238 - protein, 435 aa, Oryza sativa
MAAAKHFTYVILGGGVAAGYAAREFAKQGVKPGELAIISKESVAPYERPALSKGYLFPQNAARLPGFHTCVGSGGERLLPEWYSEKGIELILSTEIVKADLASKTLTSSADATFTYDTLLIATGSSVIKLTDFGVQGAEANDILYLRDIEDADKLVAAMQAKKDGKAVIVGGGYIGLELSAALKTNNFDVTMVYPEPWCMPRLFTSGLAAFYEGYYANKGIHIIKGTVAVGFDADANGDVTAVKLKNGNVLEADIVIVGVGGRPLTHLFKGQVAEEKGGIKTDAFFETSVPGVYAIADVAAFPMKLYNEIRRVEHVDHARKSAEQAVKAIKAKEAGESVPEYDYLPYFYSRSFDLSWQFYGDNVGEDVLFGDNDPTAAKPKFGSYWIKDGKVVGVFLEGGSAEENQVIAKVARAQPPVADVEALKKEGLDFAAKV

SEQ ID NO: 152239 - DNA, 1437 bp, Oryza sativa
  CDS (1)..(1437)
atggggagagcctttgtgtatgtgattcttggaggaggcgtggctgctggctatgctgctcttgaattcgtcaagaaaggagtctctcatggtgaactctgtattatttccgatgaaccagttgctccttatgaaaggcctgcattgagcaaaggatttttgcttccagaagctgctgcccggcttccatcctttcatacctgtgttggtgcaaatgaggagaggctaactccaaaatggtataaagagcatgggattgaattagttcttggaaccggagttaaatccactgatgtgaaacgtaagacactattaacaacaactggagagaccataagttacaagattctgattgttgctactggtgctcgggctttgaagctggaagaatttggggtgagtggatcagatgcagaaaatgtatgttatttaagacatatagcagatgcaaataggcttgtagatgttatgcagtcttgtcctggaggtaatgctgttgtcattggtggtggatacataggcatggagtgtgcagcgtctttagtgatcaataaaataaatgtaacaatggtcttccctgaggaacattgcatggctcgtttatttacctcaaagattgcaaactactatgaagaatattataaatcaagaggagtaaacttcattaagggaactgtgctgtcatcatttgattttgactccaatgggaaggttacagctgttaatcttagagatggaaccacgctatctgtggacatggttgtggtgggaattggaatacgtccaaatacaggtttgtttgaaggccaacttactttggagaaaggtggaatcaaagtaaatgggatgttgcagtcaagcaacagctcagtctatgccattggagatgttgcagcatttccagtcaaagcatttggggaaacacgaagacttgagcatgttgattcagcacggaaatctgcaatacatgttgtttcttccataatggaaccaaacaaaacgggagaatttgattacattccttttttctactccagagtcttcacactgtcttggcaattttatggggataatgttggggaagttgtctattatggagatatgtcaggtagtgcatttggggcatactgggtaagcaagggtcaccttgttggggctttccttgaaggtggaactaaagaagaatatgaagccatagccaaggctactaggttaaggccagcaattgaagacttgactgaactggagagacagggtttgagttttgcagttacagttagccagaaaccggtggtgccacccccagtcgaggttagggcctcggacctacttttggaaaaaccactatatgcttggcatgccacagccggggttattattgctgcatcaatagctgcatttgcatatttttacggaaaaaagcgccgcagatggtga

SEQ ID NO: 152240 - protein, 478 aa, Oryza sativa
MGRAFVYVILGGGVAAGYAALEFVKKGVSHGELCIISDEPVAPYERPALSKGFLLPEAAARLPSFHTCVGANEERLTPKWYKEHGIELVLGTGVKSTDVKRKTLLTTTGETISYKILIVATGARALKLEEFGVSGSDAENVCYLRHIADANRLVDVMQSCPGGNAVVIGGGYIGMECAASLVINKINVTMVFPEEHCMARLFTSKIANYYEEYYKSRGVNFIKGTVLSSFDFDSNGKVTAVNLRDGTTLSVDMVVVGIGIRPNTGLFEGQLTLEKGGIKVNGMLQSSNSSVYAIGDVAAFPVKAFGETRRLEHVDSARKSAIHVVSSIMEPNKTGEFDYIPFFYSRVFTLSWQFYGDNVGEVVYYGDMSGSAFGAYWVSKGHLVGAFLEGGTKEEYEAIAKATRLRPAIEDLTELERQGLSFAVTVSQKPVVPPPVEVRASDLLLEKPLYAWHATAGVIIAASIAAFAYFYGKKRRRW

SEQ ID NO: 152241 - DNA, 1437 bp, Glycine max
  CDS (1)..(1437)
atggggagagcctttgtgtatgtgattcttggaggaggcgtggctgctggctatgctgctcttgaattcgtcaagaaaggagtctctcatggtgaactgtgtattatttccgatgaaccagtggctccttatgaaaggcccgcattgagcaaaggatttttgcttccagaagctgctgcccggcttccatcctttcatacctgtgttggtgcaaatgaggagaggctaactccaaaatggtataaagagcatgggattgaattagttcttggaactggagttaaatctgctgatgtaaaacgtaagacactattaacaacaaccggagagaccataagttacaagattcttattgttgctaccggtgctcgggctttgaagctggaagaatttggggtcactggatcagatgcaggaaatgtctgttatttaagagatatagcagatgcaaataggcttgttgatgttatgcaatcttgtcctggaggtaatgctgttgtcattggtggtggatacataggcatggagtgtgcagcgtctttagtgatcaataaaataaatgtaacaatggtctttcctgaggaacattgcatggctcgattatttacctcaaagatagcaaactactatgaagaatattataaatcaagaggagtaaacttcattaagggaactgtgctgtcatcatttgattttgattccaatgggaaggttacagctgttaatcttagagatggaagcacactatctgtggacatggttgtggtaggaattggaatacgtccaaatacagggctgtttgaaggccagcttactttggagaaaggtggaatcaaagtaaatgggatgttgcagtcaagcaacagctcagtctatgccattggagatgttgcagcatttccagtcaaagcagttggggaaacacgaagacttgagcatgttgattcagcacggaaatctgcgagacatgttgtttctgccataatggaaccaaacaaaacgagagaattcgattaccttccttttttcgattccagaatcttcacactgtcttggcaattttatggtgataatgttggggaagttgtctattatggagatatgtcaggtagtacatttggagcatactgggtaagcaaggatcaccttgttggggctttccttgaaggcggaactaaagaagagtatgaagccatagccaaggccactaggttaaggccggtaattgaagacttgactgaacttgagagacagggtttgaggtttgctgttacagttagcgagaaaccgatggcctcacccccaattgaggttagggcctcagacctacttttggaaaaaccattatatgcttggtatgctacagctggggttattattgctgcatcaatagctggatttgcatatttttatgggaaaaagcgccacagatggtga

SEQ ID NO: 152242 - protein, 478 aa, Glycine max
MGRAFVYVILGGGVAAGYAALEFVKKGVSHGELCIISDEPVAPYERPALSKGFLLPEAAARLPSFHTCVGANEERLTPKWYKEHGIELVLGTGVKSADVKRKTLLTTTGETISYKILIVATGARALKLEEFGVTGSDAGNVCYLRDIADANRLVDVMQSCPGGNAVVIGGGYIGMECAASLVINKINVTMVFPEEHCMARLFTSKIANYYEEYYKSRGVNFIKGTVLSSFDFDSNGKVTAVNLRDGSTLSVDMVVVGIGIRPNTGLFEGQLTLEKGGIKVNGMLQSSNSSVYAIGDVAAFPVKAVGETRRLEHVDSARKSARHVVSAIMEPNKTREFDYLPFFDSRIFTLSWQFYGDNVGEVVYYGDMSGSTFGAYWVSKDHLVGAFLEGGTKEEYEAIAKATRLRPVIEDLTELERQGLRFAVTVSEKPMASPPIEVRASDLLLEKPLYAWYATAGVIIAASIAGFAYFYGKKRHRW

SEQ ID NO: 152243 - DNA, 1308 bp, Brassica napus
  CDS (1)..(1308)
atggcggaagagaagagcttcaagtacgtgatcgtcggaggcggtgtcgccgccggatacgcggcgagagagttctctaagcaaggtctcaagcctggtgaacttgctatcatctccagggaaccggtgcctccatatgagcgtcctgcactcagcaaaggatatatcaatctcgagaataaagcttcacttccaaatttctatgtctgtgctggaagtgggggagagaaacagttccctcaatggtacaaagacaatgggattgagctgcttctggagacagagattgtcaaagcagatcttgcttcaaagactctcgtcagtggcactggacaagtcttcaagtaccaaactttgatagctgctactggctcttctgtcacaaggctgtctgattttggcgtggaaggtgcagatgctaagaatatattctacctaagagagcttctggacgctgatgagctcgtgactgcaatgaacgtaaaggcaaacggcaaagctgtggttgttggtggcggttacattggtcttgaactcagttctgctctcaaggttaacaacatggaagttaccatggtttatccagagccttggtgcatgcctcggcttttcaccgccggcattgcttccttctacgagggtttctacgccaacaaaggaataaacatcgtcaaaggcaccgtggcagctggtttcagcaccaactcagatggagaggtcactgaggtgatactaaaggacggaagaacattagaagccgatatagtgatagtaggtgttggtgctagacctattatatcactcttcaaaggtcaagttgatgaagacaagggcggactcaaaactgatgcattcttcagaacaagcgttccacatgtatacgccgttggtgacatagcaaccttcccaatgaaactctacaacgacatgagacgcgtggagcacgtcgaccatgctcgcaagtccgctgaacaagccgttaaggcaatcaaggctgcagaggaaggaaactcgattccagaatatgactatcttccgtacttctactcgcgagcctttaacctctcgtggcaattctacggtgacaacgttggagagaccgtgttgtttggggataatgacccgacatctgctaaaccgaagtttgggagcttctggattaaagatgggaagttgataggagcgtttctagaaggaggaagtcctgatgagaacaaggctattgctaaggctgcaagagaacaaccttttgttgagagcgttgaggtgttgtctaaggaaggtctttccttcgtcagcaacatataa

SEQ ID NO: 152244 - protein, 435 aa, Brassica napus
MAEEKSFKYVIVGGGVAAGYAAREFSKQGLKPGELAIISREPVPPYERPALSKGYINLENKASLPNFYVCAGSGGEKQFPQWYKDNGIELLLETEIVKADLASKTLVSGTGQVFKYQTLIAATGSSVTRLSDFGVEGADAKNIFYLRELLDADELVTAMNVKANGKAVVVGGGYIGLELSSALKVNNMEVTMVYPEPWCMPRLFTAGIASFYEGFYANKGINIVKGTVAAGFSTNSDGEVTEVILKDGRTLEADIVIVGVGARPIISLFKGQVDEDKGGLKTDAFFRTSVPHVYAVGDIATFPMKLYNDMRRVEHVDHARKSAEQAVKAIKAAEEGNSIPEYDYLPYFYSRAFNLSWQFYGDNVGETVLFGDNDPTSAKPKFGSFWIKDGKLIGAFLEGGSPDENKAIAKAAREQPFVESVEVLSKEGLSFVSNI

SEQ ID NO: 152245 - DNA, 1305 bp, Brassica napus
  CDS (1)..(1305)
atggcggagaagagcttcaagtacatcatcctcggcggcggcgtctcagccggatacgcagctaaggagtttgctagtcaaggggttaaaccaggggaattggcagttatctccaaagaggcggtggctccttatgaacgtcctgctcttagcaagggctatttgtttcctgaaggggcggctagactcccaggtttccattgctgtgttggtagtggtggagaaaaactgcttcctgaatcatacaaacagaaagggattgagttgatactaagaacagagatagtgaaagcagatctcgctgccaagagtcttgtcagtgcagctggggatgtcttcaaatatgagactctcataattgcaactggctctactgtcttgagattgactgattttggtgtaaaaggtgctgactctaagaatatcctctatcttagagagattgatgatgcagacaaagtggttgaagctattcaagcaaagaaaggtggaaaggctgtggttgttggtggaggctacattggtcttgagcttagtgcagctttgaggatcaacaattttgatgtcactatggttttccctgaaccttggtgcatgcctaggcttttcaccgccgacattgctgcgttctatgagacttactatacaaacaagggagtgaagatcattaaaggaacagtagcatctgggttcaccgctcatccaaatggagaggtgaatgaagtacaactcaaggatggaaggtcgctagaagccgacattgtgattgttggagttggtgcaaaaccattaacagccttattcaagggacaggtcgaagaagacaaaggtggaatcaagaccgatgcattcttcaaaacaagcgttcctgatgtttacgctgttggtgacgttgccactttccccttgaaaatgtatggagacatgagaagggtcgagcatgttgaccattctcgcaaatccgcagagcaagctgttaaggcgatcaaagcggctgagggaggcggagcggtggaggaatacgactacctcccattcttctactcccgctcgtttgatctctcatggcagttctatggagacaacgtaggagactctgtcttgtttggagacagcaatccatcaaacccgaaaccaagatttggagcgtattgggttcaagatggtaaagtggttggagcattcatggaaggaggtagtggtgacgagaacaaagccttggctaaagtggccaaagctagacctgctgcagagagcctcgatgatcttaccaaacaaggtatctcctttgctgctaagatctga

SEQ ID NO: 152246 - protein, 434 aa, Brassica napus
MAEKSFKYIILGGGVSAGYAAKEFASQGVKPGELAVISKEAVAPYERPALSKGYLFPEGAARLPGFHCCVGSGGEKLLPESYKQKGIELILRTEIVKADLAAKSLVSAAGDVFKYETLIIATGSTVLRLTDFGVKGADSKNILYLREIDDADKVVEAIQAKKGGKAVVVGGGYIGLELSAALRINNFDVTMVFPEPWCMPRLFTADIAAFYETYYTNKGVKIIKGTVASGFTAHPNGEVNEVQLKDGRSLEADIVIVGVGAKPLTALFKGQVEEDKGGIKTDAFFKTSVPDVYAVGDVATFPLKMYGDMRRVEHVDHSRKSAEQAVKAIKAAEGGGAVEEYDYLPFFYSRSFDLSWQFYGDNVGDSVLFGDSNPSNPKPRFGAYWVQDGKVVGAFMEGGSGDENKALAKVAKARPAAESLDDLTKQGISFAAKI

SEQ ID NO: 152247 - DNA, 1308 bp, Brassica napus
  CDS (1)..(1308)
atggcggaagagaagagcttcaagtacgtgatcgtcggaggcggtgtagccgccggatacgcggcgagagagttctctaagcaaggtctcaagcctggtgaacttgctatcatctccagggaacctgtgcctccatatgagcgtcctgcactcagcaaaggatatatcaatctcgagaataaagcttcacttccaaatttctatgtatgtgctggaagtggaggagagaaacagttccctcaatggtacaaagacaatgggattgagctgcttctggacacagagattgtcaaagcagatcttgctgcaaagactctcgtcagtggcactggacaagtcttcaagtaccaaactttgatagctgctactggctcttctgtcacaaggctgtctgattttggcgtggaaggtgcagatgctaagaatatattctacctaagagagcttctggacgctgatgagctcgtgactgcaatgaacgtaaaggcaaacggcaaagctgtggttgttggtggcggttacattggtcttgaactcagttctgctctcaaggttaacaacatggaagttaccatggtttatccagagccttggtgcatgcctcggcttttcaccgccggcattgcttccttctacgagggtttctacgccaacaaaggaatcaacattgttaagggcaccgttgcagctggtttcagcaccaactcagatggagaggtcactgaggtgatactaaaggacggaagaacattagaagctgatatagtgatagtaggtgttggtgctagacctattatatcactcttcaaaggtcaagttgatgaagacaagggtggactcaagactgatgcattcttcagaacaagcgttccagatgtatacgccgttggtgacatagccaccttcccaatgaaactctacaacgacatgagacgcgttgagcacgtggaccatgctcgcaagtccgctgaacaagccgttaaggcaatcaaggctgcagaggaaggaaactcgattccagaatatgactatcttccgtacttctactcgcgagcctttaacctctcgtggcaattctacggtgacaacgttggagagaccgtgttgtttggggataatgacccgacatctgctaaaccgaagtttgggagcttctggattaaagatgggaagttgataggagcgtttctagaaggaggaagtcctgatgagaacaaggctattgctaaggctgcaagagaacaaccttttgttgagagcgttgaggtgttgtctaaggaaggtctttccttcgtcagcaacatataa

SEQ ID NO: 152248 - protein, 435 aa, Brassica napus
MAEEKSFKYVIVGGGVAAGYAAREFSKQGLKPGELAIISREPVPPYERPALSKGYINLENKASLPNFYVCAGSGGEKQFPQWYKDNGIELLLDTEIVKADLAAKTLVSGTGQVFKYQTLIAATGSSVTRLSDFGVEGADAKNIFYLRELLDADELVTAMNVKANGKAVVVGGGYIGLELSSALKVNNMEVTMVYPEPWCMPRLFTAGIASFYEGFYANKGINIVKGTVAAGFSTNSDGEVTEVILKDGRTLEADIVIVGVGARPIISLFKGQVDEDKGGLKTDAFFRTSVPDVYAVGDIATFPMKLYNDMRRVEHVDHARKSAEQAVKAIKAAEEGNSIPEYDYLPYFYSRAFNLSWQFYGDNVGETVLFGDNDPTSAKPKFGSFWIKDGKLIGAFLEGGSPDENKAIAKAAREQPFVESVEVLSKEGLSFVSNI

SEQ ID NO: 152249 - DNA, 1500 bp, Zea mays
  CDS (1)..(1500)
atgacttcagctctccggcggaaggcggcgcagatggcttccgcggcgacacagtgcttcagctactcctcgttgccggccacgtgggctctgcggcagcggggcggcggtgccagcgtgctccggctctcttcccggcggaccttctcggtctccgcggcggccgggttcgacaaccagaaccgcgagtatgtgatcgtcgggggagggaacgctgcgggttacgccgccaggacgttcgtggagcatggcatggctgacggccgcctttgcatcgtctccaaggagccagttccaccatacgagcggccagccttgaccaaaggctatcttttccctccggacaagaaaccggctcgcctacctggtttccatacatgcgttggatctggtggacagcgacagactgctgaatggtacaaggagaatggtatagaggtgctgtatgaggatccagttgtagcatttgatggcaaaacgcaaaccttaaagacttcatcggggaaagttctgaaatacggctcacttattatttctactggatgtgaagcatcgagattacctgagaaaattggagggaaattacctggagttcactacatacgggatgttgctgatgctgatgctctagtatcctcattgggaagtgcaaagaaggtggtggttattggtgggggctatattggcatggaggtagctgcagcagcttgtggctggaatcttgacacaactattatattcccagaggaccacattatgccaagattatttacaccctcgcttgctaagaagtatgaggaactgtatcagcaaaatggtgtcaaattcataaagggagctcttatcgaaaaacttggagctggctctgatggaagggtgtcttctgcagtacttaaggatggatctgtagttgaagctgatacagtaattgttggtataggagcaaaaccagttgtcagcccgtttgaagctgttggagttaaccctaaagttggtggaatagaggttgattccttgttcagaactagtgtacctggcatctttgcaattggagatgtagcagcgttccccctgaagatgtacaatagaattgctcgagtggaacatgtggatcatgctcggaagtctgcacaccactgtgtagagacgctcctaacatcccagacaaaagcgtatgactaccttccatacttctactcgagggtttttgagtacgagggaagttcgaggaaagtctggtggcagttttatggcgacaatgtcggcgaagcagtcgaagtagggaactttgatccaaaggttgcgactttctggatcgactctgatagccggctgaagggtgttttcctcgagagtggaacctcagaggaattctcgcttcttccgcagctcgccaaatctcagcctgttgttgacaagtcaaagctccaggccgcgacttctgttgaagatgcattagagattgcaagaagctcactccggtccagtgccacggtttag

SEQ ID NO: 152250 - protein, 499 aa, Zea mays
MTSALRRKAAQMASAATQCFSYSSLPATWALRQRGGGASVLRLSSRRTFSVSAAAGFDNQNREYVIVGGGNAAGYAARTFVEHGMADGRLCIVSKEPVPPYERPALTKGYLFPPDKKPARLPGFHTCVGSGGQRQTAEWYKENGIEVLYEDPVVAFDGKTQTLKTSSGKVLKYGSLIISTGCEASRLPEKIGGKLPGVHYIRDVADADALVSSLGSAKKVVVIGGGYIGMEVAAAACGWNLDTTIIFPEDHIMPRLFTPSLAKKYEELYQQNGVKFIKGALIEKLGAGSDGRVSSAVLKDGSVVEADTVIVGIGAKPVVSPFEAVGVNPKVGGIEVDSLFRTSVPGIFAIGDVAAFPLKMYNRIARVEHVDHARKSAHHCVETLLTSQTKAYDYLPYFYSRVFEYEGSSRKVWWQFYGDNVGEAVEVGNFDPKVATFWIDSDSRLKGVFLESGTSEEFSLLPQLAKSQPVVDKSKLQAATSVEDALEIARSSLRSSATV

SEQ ID NO: 152251 - DNA, 1302 bp, Glycine max
  CDS (1)..(1302)
atggcgaaaaccttcaaatacatcatcctcggtggaggagtttccgctggttatgcggcgagggagtttgccaaacagggcgttaagccaggggagttggctatcatttcgaaagaagcggtagcaccttatgaacgtcctgctctgagcaaggcttacctttttccagagtcccctgctagacttcctgggttccatgtctgtgttggaagtggaggagaaaggttgcttcctgagtggtacacagagaaagggatagagttaattcttagcacagaaatagtaaaggtagaccttgctgcaaaatctctgatcagtgctggaggagaaacattcagttatcagattttgattgttgcaactggctcaacagttataaggctgacagatttcggtgtagaaggagctgatgcgaaaaacatcttttatttgagggaggttgacgatgctgacaaattgtacgcagcaatcaaggcaaagaagaatgggaaagctgtggttgttgggggaggatacattggtctggagcttagtgcagtgttgaaactcaacaatattgatgttaccatggtctacccggagccttggtgtatgccacgactttttacggctggtatagctgaattctatgaggaatattacaaaaataagggtgtaaatatcattaaaggaactgttgctgttggattcacttctaattctgatggagaggtaaaagaagtcaaactaaaggatggcagggtcctggaagctgatattgttgtcgttggtgttggaggaaggcctcaaacagccttagtcaaagggcaggttgaagaggagaagggtggaatcaagaccgatgctttcttcaaaactaatctttccgatgtatatgctgttggtgatgttgctactttccctttgaaattatacggtgaattgagaagagttgaacatgttgatcattctcgcaaatcagctgaacaggctgtgaaggccatcaaggcagctgaggaaggaagaacagttgaggagtatgattaccttccatacttctattcccgttcatttgatctgtcttggcaattctatggcgacaatgtcggcgacacagtactattcggagacaacaatcctgcgtcgtcaaagcctaagtttgggacatactggattaaagatgggaaagttgttggggtctttctggaaggtggaactcctgaagagaaccaggctattgctaaagttgctaaggtccagcctccggttgcagatgtagatcaacttgctaaggaaggcctttcctttgctagtaaaatataa

SEQ ID NO: 152252 - protein, 433 aa, Glycine max
MAKTFKYIILGGGVSAGYAAREFAKQGVKPGELAIISKEAVAPYERPALSKAYLFPESPARLPGFHVCVGSGGERLLPEWYTEKGIELILSTEIVKVDLAAKSLISAGGETFSYQILIVATGSTVIRLTDFGVEGADAKNIFYLREVDDADKLYAAIKAKKNGKAVVVGGGYIGLELSAVLKLNNIDVTMVYPEPWCMPRLFTAGIAEFYEEYYKNKGVNIIKGTVAVGFTSNSDGEVKEVKLKDGRVLEADIVVVGVGGRPQTALVKGQVEEEKGGIKTDAFFKTNLSDVYAVGDVATFPLKLYGELRRVEHVDHSRKSAEQAVKAIKAAEEGRTVEEYDYLPYFYSRSFDLSWQFYGDNVGDTVLFGDNNPASSKPKFGTYWIKDGKVVGVFLEGGTPEENQAIAKVAKVQPPVADVDQLAKEGLSFASKI

SEQ ID NO: 152253 - DNA, 1437 bp, Glycine max
  CDS (1)..(1437)
atggggagagcctttgtgtatgtgattcttggaggaggcgtggctgctggctatgctgctcttgaattcgtcaagaaaggagtctctcatggtgaactctgtattatttccgatgaaccagtggctccttatgaaaggcccgcattgagcaaaggatttttgcttccagaagctgctgcccggcttccatcctttcatacctgtgttggtgcaaatgaggagaggctaactccaaaatggtataaagagcatgggattgaattagttcttggaaccggagttaaatccactgatgtaaaacgtaagacactattaacaacaaccggagagaccataagttacaagattctgattgttgctactggtgctcgggctttgaagctggaagaatttggggtgagtggatcagatgcagaaaatgtctgttatttaagagatatagcagatgcaaataggcttgttgatgttatgcaatcttgtcctggaggtaatgctgttgtcattggtggtggatacataggcatggagtgtgcagcgtctttagtgatcaataaaataaatgtaacaatggtctttcctgaggaacattgcatgggtcgattatttacctcaaagatagcaaactactatgaagaatattataaatcaagaggagtaaacttcattaagggaactgtgctgtcatcatttgattttgattccaatgggaaggttacagctgttaatcttagagatggaaccacgctatctgtggacatggttgtggtgggaattggaatacgtccaaatacagggctgtttgaaggccagcttactttggagaaaggtggaatcaaagtaaatgggatgttgcagtcaagcaacagctcagtctatgccattggagatgttgcagcatttccagtcaaagcatttggggaaacacgaagacttgagcatgttgattcagcacggaaatctgcaagacatgttgtttctgccataatggaaccaaacaaaacgagagaattcgattaccttccttttttctattccagaatcttcacactgtcttggcaattttatggtgataatgttggggaagttgtctattatggagatatgtcaggtagtacatttggagcatactgggtaagcaaggatcaccttgttggggctttccttgaaggcggaactaaagaagagtatgaagccatagccaaggccactaggttaaggccggtaattgaagacttgactgaacttgagagacagggtttgaggtttgctgttacagttagcgagaaaccgatggcctcacccccaattgaggttagggcctcagacctacttttggaaaaaccattatatgcttggcatgctacagctggggttattattgctgcatcaatagctggatttgcatatttttatgggaaaaagcgccacagatggtga

SEQ ID NO: 152254 - protein, 478 aa, Glycine max
MGRAFVYVILGGGVAAGYAALEFVKKGVSHGELCIISDEPVAPYERPALSKGFLLPEAAARLPSFHTCVGANEERLTPKWYKEHGIELVLGTGVKSTDVKRKTLLTTTGETISYKILIVATGARALKLEEFGVSGSDAENVCYLRDIADANRLVDVMQSCPGGNAVVIGGGYIGMECAASLVINKINVTMVFPEEHCMGRLFTSKIANYYEEYYKSRGVNFIKGTVLSSFDFDSNGKVTAVNLRDGTTLSVDMVVVGIGIRPNTGLFEGQLTLEKGGIKVNGMLQSSNSSVYAIGDVAAFPVKAFGETRRLEHVDSARKSARHVVSAIMEPNKTREFDYLPFFYSRIFTLSWQFYGDNVGEVVYYGDMSGSTFGAYWVSKDHLVGAFLEGGTKEEYEAIAKATRLRPVIEDLTELERQGLRFAVTVSEKPMASPPIEVRASDLLLEKPLYAWHATAGVIIAASIAGFAYFYGKKRHRW

SEQ ID NO: 152255 - DNA, 1437 bp, Glycine max
  CDS (1)..(1437)
atggccgcaatatccaactccttatcactgaagcacagtttctctctgagtcgagctcctccttcttcctcttccatcaaattcaaattcagaagatgttacgccgcgttcgccaatgagaatcgcgagtacgtgatcgttggcggcggaaatgccgcgggatatgctgcgcgcactttcgttgagcatggaatggctgatggtcgtctctgtattgtaaccaaagagccgtatgcaccttacgagcgtcccgctctgacgaaagcgtatttgttcccgccggataagaaaccagcacgccttcctggttttcacacttgtgttggatccggtggagagaggcagactccggggtggtataaagagaatgggatagagatgttgtatgaagatccagtaaaagatattgatattgaaaagcatactttgacaacaagttctggaaaacttctgaagtatggttcgcttgttattgctacaggatgtacagcatcaaagtttccagagaaaattgggggaaacctacctggtgttcactatattcgggatgttggagatgccgatgcactaattttatcgttggagaaagcaaaaaaggttgtagttgttggaggtggttatataggaatggaggttgctgctgctgctgttggttggaaacttgatacaacaatcatattcccagaagatcaccttttgcaaagactgtttactccttctcttgcccggagatatgaagaactctatcaaaagaatggagtcaaaatcttgaagggtgcttccataaaaaatttggaagctggttctaatggacatgtagctgctgtgaaacttggagatggatctcttgtggaggcagatacggtaattataggcattggagcaaaacctgctgtgactccctttgagagggtgggcctgaatacagaggttggtggtatacaggttgatggtcagtttcggacaagcactcccggaatctttgctgttggtgatgtagcagctttccctttgaagatttataatcgtatctctcgagtggagcatgtggatcatgcccgtcgctctgcacagcactgtgtgaaagcattactcagtgcacaaactcacacgtatgattatcttccatacttctactcgaggatttttgaatatgaaggaagccctagaaaagtgtggtggcagttctttggagacaatgttggagaaacagttgaaattggaaattttgatcctaaaatatctaccttctggattgaatctggtaagctgaaaggagttcttcttgaaagtgggagccctgaggaatttcaactcctgcctaaacttgccagaagtcagcctctgattgataaagccaaacttcaaaatgcaacatcagtggaggaggccctagagattgctcgggaatccttgcaaggcgaagctgctgtctag

SEQ ID NO: 152256 - protein, 478 aa, Glycine max
MAAISNSLSLKHSFSLSRAPPSSSSIKFKFRRCYAAFANENREYVIVGGGNAAGYAARTFVEHGMADGRLCIVTKEPYAPYERPALTKAYLFPPDKKPARLPGFHTCVGSGGERQTPGWYKENGIEMLYEDPVKDIDIEKHTLTTSSGKLLKYGSLVIATGCTASKFPEKIGGNLPGVHYIRDVGDADALILSLEKAKKVVVVGGGYIGMEVAAAAVGWKLDTTIIFPEDHLLQRLFTPSLARRYEELYQKNGVKILKGASIKNLEAGSNGHVAAVKLGDGSLVEADTVIIGIGAKPAVTPFERVGLNTEVGGIQVDGQFRTSTPGIFAVGDVAAFPLKIYNRISRVEHVDHARRSAQHCVKALLSAQTHTYDYLPYFYSRIFEYEGSPRKVWWQFFGDNVGETVEIGNFDPKISTFWIESGKLKGVLLESGSPEEFQLLPKLARSQPLIDKAKLQNATSVEEALEIARESLQGEAAV

SEQ ID NO: 152257 - DNA, 1302 bp, Glycine max
  CDS (1)..(1302)
atggcgaaaaccttcaaatacatcatcctcggtggaggagtttccgctggttatgcggcgagggagtttgccaaacagggcgttaagccaggggagttggctatcatttcgaaagaagcggtagcaccttatgaacgtcctgctctgagcaaggcttacctttttccagagtcccctgctagacttcctgggttccatgtctgtgttggaagtggaggagaaaggttgcttcctgagtggtacacagagaaagggatagagttaattcttagcacagaaatagtaaaggtagaccttgctgcaaaatctctgatcagtgctggaggagaaacattcagttatcagattttgattgttgcaactggctcaacagttataaggctgacagatttcggtgtagaaggagctgatgcgaaaaacatcttttatttgagggaggttgacgatgctgacaaattgtacgcagcaatcaaggcaaagaagaatgggaaagctgtggttgttgggggaggatacattggtctggagcttagtgcagtgttgaaactcaacaatattgatgttaccatggtctacccggagccttggtgtatgccacgactttttacggctggtatagctgaattctatgagggatattacgcaaataagggtgtaaatatcattaaaggaactgttgctgttggattcacttctaattctgatggagaggtaaaagaagtcaaactaaaggatggcagggtcctggaagctgatattgttgttgttggtgttggaggaaggcctcaaacagtcttagtcaaagggcaggttgaagaggagaagggtggaatcaagaccgatgctttcttcaaaactaatctttccgatgtatatgctgttggtgatgttgctactttccctttgaaattatacggtgaattgagaagagttgaacatgttgatcattctcgcaaatcggctgaacaggctgtgaaggccatcaaggcagctgaggaaggaagaacagttgaggagtatgattaccttccatacttctattcccgttcatttgatctgtcttggcaattctatggcgacaatgtcggcgacacagtactattcggagacaacaatcctgcgtcgtcaaagcctaagtttgggacatactggattaaagatgggaaagttgttggggtctttctggaaggtggaactcctgaagagaaccaggctattgctaaagttgctaaggtccagcctccggttgcagatgtagatcaacttgctaaggaaggcctttcctttgctagtaaaatataa

SEQ ID NO: 152258 - protein, 433 aa, Glycine max
MAKTFKYIILGGGVSAGYAAREFAKQGVKPGELAIISKEAVAPYERPALSKAYLFPESPARLPGFHVCVGSGGERLLPEWYTEKGIELILSTEIVKVDLAAKSLISAGGETFSYQILIVATGSTVIRLTDFGVEGADAKNIFYLREVDDADKLYAAIKAKKNGKAVVVGGGYIGLELSAVLKLNNIDVTMVYPEPWCMPRLFTAGIAEFYEGYYANKGVNIIKGTVAVGFTSNSDGEVKEVKLKDGRVLEADIVVVGVGGRPQTVLVKGQVEEEKGGIKTDAFFKTNLSDVYAVGDVATFPLKLYGELRRVEHVDHSRKSAEQAVKAIKAAEEGRTVEEYDYLPYFYSRSFDLSWQFYGDNVGDTVLFGDNNPASSKPKFGTYWIKDGKVVGVFLEGGTPEENQAIAKVAKVQPPVADVDQLAKEGLSFASKI

SEQ ID NO: 152259 - DNA, 1467 bp, Zea mays
  CDS (1)..(1467)
atggcttccgcggcgacacagtgcttcagctactcctcgttgccggccacgtgggctctgcggcagcggggcggcggtgccagcgtgctccggctctcttcccggcggaccttctcggtctccgcggcggccgggttcgacaaccagaaccgcgagtatgtgatcgtcgggggagggaacgctgcgggttacgccgccaggacgttcgtcgagcatggcatggctgacggccgcctttgcatcgtctccaaggagccagttccaccatacgagcggccagccttgaccaaaggctatctttttcctccggacaagaaaccggctcgcctacctggtttccatacatgcgttggatctggtggacagcgacagactgctgaatggtacaaggagaatggtatagaggtgctgtatgaggatccagttgtagcatttgatggcaaaacgcaaaccttaaagacttcatcggggaaagttctgaaatacggctcacttattatttctactggatgtgaagcatcgagattacctgagaaaattggagggaaattacctggagttcactacatacgggatgttgctgatgctgatgctctagtatcctcattgggaagtgcaaagaaggtggtggttattggtgggggctatattggcatggaggtagctgcagcagcttgtggctggaatcttgacacaactattatattcccagaggaccacattatgccaagattatttacaccctcgcttgctaagaagtatgaggaactgtatcagcaaaatggtgtcaaattcataaagggagctcttatcgaaaaacttggagctggctctgatggaagggtgtcttctgcagtacttaaggatggatctgtagttgaagctgatacagtaattgttggtataggagcaaaaccagttgtcagcccgtttgaagctgttggagttaaccctaaagttggtggaatagaggttgattccttgttcagaactagtgtacctggcatctttgcaattggagatgtagcagcgttccccctgaagatgtacaatagaattgctcgagtggaacatgtggatcatgctcggaagtctgcgcaccactgtgtagagacgctcctaacatcccagacaaaagcgtatgactaccttccatacttctactcgagggtttttgagtacgagggaagttcgaggaaagtctggtggcagttttatggcgacaatgtcggcgaagcagtcgaagtagggaactttgatccaaaggttgcgactttctggatcgactctgatagccggctgaagggtgttttcctcgagagtggaacctcagaggaattctcgcttcttccgcagctcgccaaatctcagcctgttgttgacaagtcaaagctccaggccgcgacttctgttgaagatgcattagagattgcaagaagctcactccggtccagtgccatggtttag

SEQ ID NO: 152260 - protein, 488 aa, Zea mays
MASAATQCFSYSSLPATWALRQRGGGASVLRLSSRRTFSVSAAAGFDNQNREYVIVGGGNAAGYAARTFVEHGMADGRLCIVSKEPVPPYERPALTKGYLFPPDKKPARLPGFHTCVGSGGQRQTAEWYKENGIEVLYEDPVVAFDGKTQTLKTSSGKVLKYGSLIISTGCEASRLPEKIGGKLPGVHYIRDVADADALVSSLGSAKKVVVIGGGYIGMEVAAAACGWNLDTTIIFPEDHIMPRLFTPSLAKKYEELYQQNGVKFIKGALIEKLGAGSDGRVSSAVLKDGSVVEADTVIVGIGAKPVVSPFEAVGVNPKVGGIEVDSLFRTSVPGIFAIGDVAAFPLKMYNRIARVEHVDHARKSAHHCVETLLTSQTKAYDYLPYFYSRVFEYEGSSRKVWWQFYGDNVGEAVEVGNFDPKVATFWIDSDSRLKGVFLESGTSEEFSLLPQLAKSQPVVDKSKLQAATSVEDALEIARSSLRSSAMV

SEQ ID NO: 152261 - DNA, 1500 bp, Zea mays
  CDS (1)..(1500)
atgacttcagctctccggcggaaggcggcgcagatggcttccgcggcgacacagtgcttcagctactcctcgttgccggccacgtgggctctgcggcagcggggcggcggtgccagcgtgctccggctctcttcccggcggaccttctcggtctccgcggcggccgggttcgacaaccagaaccgcgagtatgtgatcgtcgggggagggaacgctgcgggttacgccgccaggacgttcgtcgagcatggcatggctgacggccgcctttgcatcgtctccaaggagccagttccaccatacgagcggccagccttgaccaaaggctatctttttcctccggacaagaaaccggctcgcctacctggtttccatacatgcgttggatctggtggacagcgacagactgctgaatggtacaaggagaatggtatagaggtgctgtatgaggatccagttgtagcatttgatggcaaaacgcaaaccttaaagacttcatcggggaaagttctgaaatacggctcacttattatttctactggatgtgaagcatcgagattacctgagaaaattggagggaaattacctggagttcactacatacgggatgttgctgatgctgatgctctagtatcctcattgggaagtgcaaagaaggtggtggttattggtgggggctatattggcatggaggtagctgcagcagcttgtggctggaatcttgacacaactattatattcccagaggaccacattatgccaagattatttacaccctcgcttgctaagaagtatgaggaactgtatcagcaaaatggtgtcaaattcataaagggagctcttatcgaaaaacttggagctggctctgatggaagggtgtcttctgcagtacttaaggatggatctgtagttgaagctgatacagtaattgttggtataggagcaaaaccagttgtcagcccgtttgaagctgttggagttaaccctaaagttggtggaatagaggttgattccttgttcagaactagtgtacctggcatctttgcaattggagatgtagcagcgttccccctgaagatgtacaatagaattgctcgagtggaacatgtggatcatgctcggaagtccgcacaccactgtatagagacgctcctaacatcccagacaaaagcgtatgactaccttccatacttctactcgagggtttttgagtacgagggaagttcgaggaaagtctggtggcagttttatggcgacaatgtcggcgaagcagtcgaagtagggaactttgatccaaaggttgcgactttctggatcgactctgatagccggctgaagggtgttttcctcgagagtggaacctcagaggaattctcgcttcttccgcagctcgccaaatctcagcctgttgttgacaagtcaaagctccaggccgcgacttctgttgaagatgcattagagattgcaagaagctcactccggtccagcgccacggtttag

SEQ ID NO: 152262 - protein, 499 aa, Zea mays
MTSALRRKAAQMASAATQCFSYSSLPATWALRQRGGGASVLRLSSRRTFSVSAAAGFDNQNREYVIVGGGNAAGYAARTFVEHGMADGRLCIVSKEPVPPYERPALTKGYLFPPDKKPARLPGFHTCVGSGGQRQTAEWYKENGIEVLYEDPVVAFDGKTQTLKTSSGKVLKYGSLIISTGCEASRLPEKIGGKLPGVHYIRDVADADALVSSLGSAKKVVVIGGGYIGMEVAAAACGWNLDTTIIFPEDHIMPRLFTPSLAKKYEELYQQNGVKFIKGALIEKLGAGSDGRVSSAVLKDGSVVEADTVIVGIGAKPVVSPFEAVGVNPKVGGIEVDSLFRTSVPGIFAIGDVAAFPLKMYNRIARVEHVDHARKSAHHCIETLLTSQTKAYDYLPYFYSRVFEYEGSSRKVWWQFYGDNVGEAVEVGNFDPKVATFWIDSDSRLKGVFLESGTSEEFSLLPQLAKSQPVVDKSKLQAATSVEDALEIARSSLRSSATV

SEQ ID NO: 152263 - DNA, 1302 bp, Zea mays
  CDS (1)..(1302)
atggctaggcacttcaagtacgtcatcctcggcggcggtgtcgcggcggggtacgcggcgagggagttcgccaagcagggcgtcaaccccggcgagctcgccatcatctccaaggaaccagtggccccttatgagcgccctgcactcagcaagggatacctcttccctcagaacgctgcaagactgccaggcttccacacgtgtgtgggcagcggtggagagagactacttcctgaatggtactctgagaaaggcattgaactgatcctgagtactgagattgtgaaggccgaccttgcttcaaagactctgaccagtgcagctgcagaaaccttcacatatgagaccttgctcattgctacgggctcctcggtcataaagctcactgattttggtgttcaaggagcagaatccaacaacatattgtatctaagggacattgcggatgccgacaagttggttgcagctatgcaggcaaagaagggtggaaaggctgtgattgttggaggtggttacatagggcttgagcttagcgctgccttgaaaatcaacaacttcgatgtgaccatggtgtaccctgaaccgtggtgcatgccccgtctcttcactgctggtattgctcatttctatgagggctactatgctaacaaaggaatcaaggttgtaaagggcacggttgctgttggtttcgacgctgatgccaacggagatgtcactacagtgaagttgaagaatggaagtgttctcgaagctgatattgttattgttggcgtcggcggcaggccattgacgcgtctcttcataggccaagctgctgacgagaaaggtggactcaagaccgatgcattcttcgaaacaagtgtagccggggtatacgcgatcggcgacgtggccaccttccctctgaagctctacaacgagcagaggagagttgagcacgtggaccacgcccggaagtccgccgagcaggccgtgagggcaatcaaggccaaggagtccggcgaatcggtggccgaatacgactacctgccctacttctactcccggtcgttcgacttggcgtggcagttctacggcgacaacgtcggcgacgacgtgctgttcggcgacaacgacccggcctcggccaagcccaagttcggcagctactgggtgaaggacggcaaggtcgtcggcgtgtttctcgagggcgggtcggccgaggagaaccaggccatcgccagggtcgccagggcgcagccgccggtggccgacgtccaggcgctgaagcaggaggggatcgagttcgcttccaaaatctga

SEQ ID NO: 152264 - protein, 433 aa, Zea mays
MARHFKYVILGGGVAAGYAAREFAKQGVNPGELAIISKEPVAPYERPALSKGYLFPQNAARLPGFHTCVGSGGERLLPEWYSEKGIELILSTEIVKADLASKTLTSAAAETFTYETLLIATGSSVIKLTDFGVQGAESNNILYLRDIADADKLVAAMQAKKGGKAVIVGGGYIGLELSAALKINNFDVTMVYPEPWCMPRLFTAGIAHFYEGYYANKGIKVVKGTVAVGFDADANGDVTTVKLKNGSVLEADIVIVGVGGRPLTRLFIGQAADEKGGLKTDAFFETSVAGVYAIGDVATFPLKLYNEQRRVEHVDHARKSAEQAVRAIKAKESGESVAEYDYLPYFYSRSFDLAWQFYGDNVGDDVLFGDNDPASAKPKFGSYWVKDGKVVGVFLEGGSAEENQAIARVARAQPPVADVQALKQEGIEFASKI

SEQ ID NO: 152265 - DNA, 1308 bp, Zea mays
  CDS (1)..(1308)
atggcgtccgaaaagcacttcaagtacgtcatcctcggcggcggcgtcgcggcggggtacgcggcgcgggagttcgccaagcagggagttaagcctggggagcttgcaatcatctccaaggaggctgtggctccttacgagcgtcctgccctaagcaaaggttacctctttcctacgaatgctgcaagactcccaggattttatgtatgtgtgggaagtggtggagagaagctattgcctgagtggtactcagagaaaggcattgagctgatccttagtacagaaattgtcaaagctgatctttccaccaagactctgactagtgcagctggagcaaactttacatatgagatcttgctcattgctactggctcctcggtcataaagctcaccgattttggcacacaaggagctgattctaacaacattctatatctaagggaaattgatgatgctgacaagctggttgcagctatccaggcaaagaagggtggcaaggcagtggttgttggaggaggttatatcggcctcgaactgagtgcagccctgaagatcaatgactttgatgtcactatggtgtttcctgaaccttggtgcatgcctcgcctcttcactgccgatattgctgctttctatgaggcttactatactaacaaaggtgtaaagatcttgaagggcacgctagctgttggttttgatgctgatgccaatggtgatgtcactgcagttaagctaaaggatggcacagtacttgaagccgatattgttgttgtcggtgttggaggcagaccattgactactctcttcaagggtcaagttgctgaggagaagggtggaatcaagactgacgcttcctttgaaacaagcgttcctggagtatatgccattggtgatgtggctaccttccctttgaagatgtacaatgagttgaggagagtggaacatgttgaccattctagaaagtctgcagagcaggctgtaaaggcgatcaagggcaaagagtccggtgaaccagttccggagtatgactacctgccatacttctactcccgatcattcgacctggcgtggcaattctacggcgacaacgtgggcgaaaccatcctgtttggcgacagtgaccccacctccagcaagcccaagttcggctcgtactggatcaaggacggcaaggtcttgggcgccttcctggagggcgggtcaccggacgagaacaaggccattgccaaggtggcgaaaacccagccgccggtcgctaacctcgaggagctcaagaaggatggcctccagttcgccagcaagatctga

SEQ ID NO: 152266 - protein, 435 aa, Zea mays
MASEKHFKYVILGGGVAAGYAAREFAKQGVKPGELAIISKEAVAPYERPALSKGYLFPTNAARLPGFYVCVGSGGEKLLPEWYSEKGIELILSTEIVKADLSTKTLTSAAGANFTYEILLIATGSSVIKLTDFGTQGADSNNILYLREIDDADKLVAAIQAKKGGKAVVVGGGYIGLELSAALKINDFDVTMVFPEPWCMPRLFTADIAAFYEAYYTNKGVKILKGTLAVGFDADANGDVTAVKLKDGTVLEADIVVVGVGGRPLTTLFKGQVAEEKGGIKTDASFETSVPGVYAIGDVATFPLKMYNELRRVEHVDHSRKSAEQAVKAIKGKESGEPVPEYDYLPYFYSRSFDLAWQFYGDNVGETILFGDSDPTSSKPKFGSYWIKDGKVLGAFLEGGSPDENKAIAKVAKTQPPVANLEELKKDGLQFASKI

SEQ ID NO: 152267 - DNA, 1437 bp, Zea mays
  CDS (1)..(1437)
atggggcgcgcgttcgtgtacgtgatcctgggcggcggcgtggccgcgggctacgccgcgctcgagttcgcccgccgcggtgggtactcccgcggagagctctgcatcatctccgaagaggccgttgctccttatgaacgtcctgcactaagcaaaggctatttactcccagaaggtgctgctcgtcttccaggatttcatacttgtgttggtgctaatgatgagttactgacaccgaaatggtacaaagaacaaggcattgaacttgttcttggaacaaaagtgatttctgctgatgtgaggcgcaagacattgcttacaggcactggtgaaactatcagctacaaaactctaattattgcgacaggtgctcgggctttgaagctgcaagaatttggaatacaaggttcagatgcttcaaacatatgttatttgcgcaacatcgatgacgcggataagttggtgagtgtgatgaaatcatgtcctggtggaaatgctgttgtcattggtggtggctacattggaatggagtgtgcagcggcattggttactaacaagattagggtcaccatggtcttccctgagaaacactgcatgggtcgtctatttacaccaaaaattgcagaattttatgaaaactactacacctcgaaaggggtcacctttgttaaaggaactgtgcttacatcctttgaaaaagatacgacggggaaggtgactgcagtaatactcaaagatggtaggcaccttcctgctgatatggtagtagttggtattggcatccgtgcaaacactagcctttttgaaggtcaactgatgatgtcaacagagaatggtgggataaaggtaaatggacagctgcagacaagcgacagctctgtgtatgccgttggcgatgtggccgcgttccccatcaagctttttgacgatgatatccgacggctcgagcatgtggactcagctcgtagaactggtagacatgctgttgcctccatcttggatccttcaaagacgagggacatcgattacctgccgttcttctactccagagtgttcacgttgtcctggcaattctatggggataatgtcggggaagtggtccactttggagacttcacaagcagcagtccgaggttcggtgcatattgggtcaacaaagggcggatcgcgggtgcgtttcttgaaggcggaagtcgggaagagtacgaggccatatcgatcgctgttcggcgggaagctgtggtcacagacatgggtgaactcgagaaacaaggcctggcactcgccattcaggagagccagaaggaggtgcctgacagtgggcttgctgttgtcggaaaacctacttatgcgtggcatgccacagccggtgtcattgcagctgtgtcgattgctgcaattgggtattggtatggcaggaagcgccgcaggtggtga

SEQ ID NO: 152268 - protein, 478 aa, Zea mays
MGRAFVYVILGGGVAAGYAALEFARRGGYSRGELCIISEEAVAPYERPALSKGYLLPEGAARLPGFHTCVGANDELLTPKWYKEQGIELVLGTKVISADVRRKTLLTGTGETISYKTLIIATGARALKLQEFGIQGSDASNICYLRNIDDADKLVSVMKSCPGGNAVVIGGGYIGMECAAALVTNKIRVTMVFPEKHCMGRLFTPKIAEFYENYYTSKGVTFVKGTVLTSFEKDTTGKVTAVILKDGRHLPADMVVVGIGIRANTSLFEGQLMMSTENGGIKVNGQLQTSDSSVYAVGDVAAFPIKLFDDDIRRLEHVDSARRTGRHAVASILDPSKTRDIDYLPFFYSRVFTLSWQFYGDNVGEVVHFGDFTSSSPRFGAYWVNKGRIAGAFLEGGSREEYEAISIAVRREAVVTDMGELEKQGLALAIQESQKEVPDSGLAVVGKPTYAWHATAGVIAAVSIAAIGYWYGRKRRRW

SEQ ID NO: 152269 - DNA, 1302 bp, Zea mays
  CDS (1)..(1302)
atggctaggcacttcaagtacgtcatcctcggcggcggtgtcgcggcggggtacgcggcgagggagttcgccaagcagggcgtcaaccccggcgagctcgccatcatctccaaggaaccagtggccccttatgagcgccctgcactcagcaagggatacctcttccctcagaacgctgcaagactgccaggcttccacacgtgtgtgggcagcggtggagagagactacttcctgaatggtactctgagaaaggcattgaactgatcctgagtactgagattgtgaaggccgaccttgcttcaaagactctgaccagtgcagctgcggaaaccttcacatatgagaccttgctcattgctacgggctcctcggtcataaagctcactgattttggtgttcaaggagcagaatccaacaacatattgtatctaagggacattgcggatgccgacaagttggttgcagctatgcaggcaaagaagggtggaaaggctgtgattgttggaggtggttacatagggcttgagcttagcgctgccttgaaaatcaacaacttcgatgtgaccatggtgtaccctgaaccgtggtgcatgccccgtctcttcactgctggtattgctcatttctatgagggctactatgctaacaaaggaatcaaggttgtaaagggcacggttgctgttggtttcgacgctgatgccaacggagatgtcactacagtgaagttgaagaatggaagtgttctcgaagctgatattgttattgttggcgtcggcggcaggccattgacgcgtctcttcataggccaagctgctgacgagaaaggtggactcaagaccgatgcattcttcgaaacaagtgtagccggggtatacgcgatcggcgacgtggccaccttccctctgaagctctacaacgagcagaggagagttgagcacgtggaccacgcccggaagtccgccgagcaggccgtgagggcaatcaaggccaaggagtccggcgaatcggtggccgaatacgactacctgccctacttctactcccggtcgttcgacttggcgtggcagttctacggcgacaacgtcggcgacgacgtgctgttcggcgacaacgacccggcctcggccaagcccaagttcggcagctactgggtgaaggacggcaaggtcgtcggcgtgtttctcgagggcgggtcggccgaggagaaccaggccatcgccagggtcgccagggcgcagccgccggtggccgacgtccaggcgctgaagcaggaggggatcgatttcgcttccaaaatctga

SEQ ID NO: 152270 - protein, 433 aa, Zea mays
MARHFKYVILGGGVAAGYAAREFAKQGVNPGELAIISKEPVAPYERPALSKGYLFPQNAARLPGFHTCVGSGGERLLPEWYSEKGIELILSTEIVKADLASKTLTSAAAETFTYETLLIATGSSVIKLTDFGVQGAESNNILYLRDIADADKLVAAMQAKKGGKAVIVGGGYIGLELSAALKINNFDVTMVYPEPWCMPRLFTAGIAHFYEGYYANKGIKVVKGTVAVGFDADANGDVTTVKLKNGSVLEADIVIVGVGGRPLTRLFIGQAADEKGGLKTDAFFETSVAGVYAIGDVATFPLKLYNEQRRVEHVDHARKSAEQAVRAIKAKESGESVAEYDYLPYFYSRSFDLAWQFYGDNVGDDVLFGDNDPASAKPKFGSYWVKDGKVVGVFLEGGSAEENQAIARVARAQPPVADVQALKQEGIDFASKI

SEQ ID NO: 152271 - DNA, 21 bp, Artificial sequence
  primer
atggcggaagagaaaagctac

SEQ ID NO: 152272 - DNA, 22 bp, Artificial sequence
  primer
tcaaagagaggtgctatagaac

SEQ ID NO: 152273 - protein, 424 aa, Artificial sequence
  consensus sequence
  Variant (2)..(2): Xaa in position 2 is any amino acid
  Variant (4)..(4): Xaa in position 4 is any amino acid
  Variant (6)..(10): Xaa in position 6 to 10 is any amino acid
  Variant (13)..(19): Xaa in position 13 to 19 is any amino acid
  Variant (20)..(24): Xaa in position 20 to 24 is any or no amino acid
  Variant (26)..(32): Xaa in position 26 to 32 is any amino acid
  Variant (33)..(33): Xaa in position 33 is any or no amino acid
  Variant (35)..(36): Xaa in position 35 to 36 is any amino acid
  Variant (37)..(37): Xaa in position 37 is any or no amino acid
  Variant (40)..(40): Xaa in position 40 is any amino acid
  Variant (43)..(43): Xaa in position 43 is any amino acid
  Variant (47)..(48): Xaa in position 47 to 48 is any amino acid
  Variant (50)..(61): Xaa in position 50 to 61 is any amino acid
  Variant (62)..(77): Xaa in position 62 to 77 is any or no amino acid
  Variant (79)..(93): Xaa in position 79 to 93 is any amino acid
  Variant (94)..(94): Xaa in position 94 is any or no amino acid
  Variant (96)..(109): Xaa in position 96 to 109 is any amino acid
  Variant (110)..(113): Xaa in position 110 to 113 is any or no amino acid
  Variant (115)..(116): Xaa in position 115 to 116 is any amino acid
  Variant (118)..(119): Xaa in position 118 to 119 is any amino acid
  Variant (123)..(127): Xaa in position 123 to 127 is any amino acid
  Variant (129)..(138): Xaa in position 129 to 138 is any amino acid
  Variant (139)..(144): Xaa in position 139 to 144 is any or no amino acid
  Variant (146)..(148): Xaa in position 146 to 148 is any amino acid
  Variant (150)..(152): Xaa in position 150 to 152 is any amino acid
  Variant (154)..(162): Xaa in position 154 to 162 is any amino acid
  Variant (163)..(171): Xaa in position 163 to 171 is any or no amino acid
  Variant (173)..(174): Xaa in position 173 to 174 is any amino acid
  Variant (176)..(176): Xaa in position 176 is any amino acid
  Variant (178)..(178): Xaa in position 178 is any amino acid
  Variant (181)..(181): Xaa in position 181 is any amino acid
  Variant (183)..(184): Xaa in position 183 to 184 is any amino acid
  Variant (186)..(191): Xaa in position 186 to 191 is any amino acid
  Variant (192)..(193): Xaa in position 192 to 193 is any or no amino acid
  Variant (196)..(223): Xaa in position 196 to 223 is any amino acid
  Variant (225)..(240): Xaa in position 225 to 240 is any amino acid
  Variant (241)..(248): Xaa in position 241 to 248 is any or no amino acid
  Variant (250)..(250): Xaa in position 250 is any amino acid
  Variant (252)..(253): Xaa in position 252 to 253 is any amino acid
  Variant (255)..(258): Xaa in position 255 to 258 is any amino acid
  Variant (259)..(260): Xaa in position 259 to 260 is any or no amino acid
  Variant (263)..(263): Xaa in position 263 is any amino acid
  Variant (265)..(266): Xaa in position 265 to 266 is any amino acid
  Variant (268)..(268): Xaa in position 268 is any amino acid
  Variant (270)..(271): Xaa in position 270 to 271 is any amino acid
  Variant (273)..(285): Xaa in position 273 to 285 is any amino acid
  Variant (286)..(288): Xaa in position 286 to 288 is any or no amino acid
  Variant (290)..(292): Xaa in position 290 to 292 is any amino acid
  Variant (293)..(297): Xaa in position 293 to 297 is any or no amino acid
  Variant (299)..(302): Xaa in position 299 to 302 is any amino acid
  Variant (305)..(309): Xaa in position 305 to 309 is any amino acid
  Variant (310)..(314): Xaa in position 310 to 314 is any or no amino acid
  Variant (316)..(316): Xaa in position 316 is any amino acid
  Variant (319)..(319): Xaa in position 319 is any amino acid
  Variant (321)..(325): Xaa in position 321 to 325 is any amino acid
  Variant (326)..(337): Xaa in position 326 to 337 is any or no amino acid
  Variant (339)..(339): Xaa in position 339 is any amino acid
  Variant (342)..(344): Xaa in position 342 to 344 is any amino acid
  Variant (346)..(366): Xaa in position 346 to 366 is any amino acid
  Variant (367)..(376): Xaa in position 367 to 376 is any or no amino acid
  Variant (378)..(378): Xaa in position 378 is any amino acid
  Variant (380)..(380): Xaa in position 380 is any amino acid
  Variant (382)..(391): Xaa in position 382 to 391 is any amino acid
  Variant (392)..(402): Xaa in position 392 to 402 is any or no amino acid
  Variant (404)..(411): Xaa in position 404 to 411 is any amino acid
  Variant (412)..(423): Xaa in position 412 to 423 is any or no amino acid
IXGXGXXXXXAAXXXXXXXXXXXXGXXXXXXXXEXXXPYXRPXLSKXXLXXXXXXXXXXXXXXXXXXXXXXXXXXXXYXXXXXXXXXXXXXXXXDXXXXXXXXXXXXXXXXXXYXXLXXATGXXXXXLXXXXXXXXXXXXXXXXRXXXDXXXLXXXXXXXXXXXXXXXXXXVXXGXGXIGXEXXAXXXXXXXXVTXXXXXXXXXXXXXXXXXXXXXXXXXXXXGXXXXXXXXXXXXXXXXXXXXXXXXVXLXXGXXXXXXADXVXXGXGXXPXXXXXXXXXXXXXXXXGXXXXXXXXDXXXXTSXXXXXXXXXXAXGDXAXXXXXXXXXXXXXXXXXRXEHXXXAXXXXXXXXXXXXXXXXXXXXXXXXXXXXXXXPXFXSXXXXXXXXXXXXXXXXXXXXXGXXXXXXXXXXXXXXXXXXXXF

SEQ ID NO: 152274 - protein, 12 aa, Artificial sequence
  protein pattern
  Variant (2)..(4): Xaa in position 2 to 4 is any amino acid
  Variant (5)..(5): Xaa in position 5 is Ile or Val
  Variant (6)..(6): Xaa in position 6 is Phe, His, Trp or Tyr
  Variant (8)..(8): Xaa in position 8 is Ala, Ile, Leu or Val
  Variant (9)..(9): Xaa in position 9 is Ala or Gly
  Variant (11)..(11): Xaa in position 11 is any amino acid
SXXXXXAXXDXA

SEQ ID NO: 152275 - DNA, 348 bp, Synechocystis sp.
  CDS (1)..(348): transl_table=11
atgagtgagcgtccccctgaaaagaccctggcggagttggcatccccaaaccatgaatgccgggcctgcggttatgtttacattcccagccaaggggatcaaaagactagtgtttcccccggcactccctttgaggccctaccccttaattggaaatgtccggtgtgtggcgccccccgcaactacttcatcagcaccggggagaccgatgctccctctggttttgccgagaaccttaactacggttttggttttaaccgtatgagtggtggtaaaaagaatttactaattttcggtagtcttttcgtcattttcctatttttcctgagcctttacggcatgggataa

SEQ ID NO: 152276 - protein, 115 aa, Synechocystis sp.
MSERPPEKTLAELASPNHECRACGYVYIPSQGDQKTSVSPGTPFEALPLNWKCPVCGAPRNYFISTGETDAPSGFAENLNYGFGFNRMSGGKKNLLIFGSLFVIFLFFLSLYGMG

SEQ ID NO: 152277 - DNA, 987 bp, Glycine max
  CDS (39)..(632)
ctaaatatgcgtaccttatccaagttgaattgtgatccatgggcatatactatggttgtccttcttctcctccacacaccgtgagggctggctggtcagaaatgagaatggcttcagcattgtccctgcatctctcaacccctttctcccaactccaccctagtctcaaacctaaaaaactccatgatttccccactctctccctctccaaacctcgaaaactcagcgtgaactccgtggacatctccaaagaagacacgcccgtgaaacccgaatcggagctggagaacttggggccgcggcggctggaggagaagttcgcggttctgaacactggaatctacgagtgccgctcctgcggctataaatacgacgaggcagtgggcgacccttcctatcccttaccgcccggctatcagttcgagaagcttccggatgattggcgctgccccacttgtggggccgcccagagtttcttccagagcaagagcgttcagatcgctgggtttgctcagaaccagcaatatgggcttggtggcaattctctcacttcgggtcagaagactattcttatatacggcactttgttgctcttctttgcgctctttttgagtggctacttcctccaatagtctgtttctaactattcatcctattaggtaacctattctattctatgtatctgcaagttctactttcaatgctttatttgttgctatgtatctacgtagtcactagtcatcccaagaaacctggaaggtgcctctggttgttgaaagtggaaactaggctagccgaagcttttcttgctttgctaaatcatggatgagttatacaaatcttaatatttcttatctctctctctctctctttttttttcctatgtttttcttacctttactgttatctttttgtatctcttgtgattgtaaaaatattggtggaatttgttgaataaaaagcaatttctcgttatagattatccct

SEQ ID NO: 152278 - protein, 197 aa, Glycine max
MGIYYGCPSSPPHTVRAGWSEMRMASALSLHLSTPFSQLHPSLKPKKLHDFPTLSLSKPRKLSVNSVDISKEDTPVKPESELENLGPRRLEEKFAVLNTGIYECRSCGYKYDEAVGDPSYPLPPGYQFEKLPDDWRCPTCGAAQSFFQSKSVQIAGFAQNQQYGLGGNSLTSGQKTILIYGTLLLFFALFLSGYFLQ

SEQ ID NO: 152279 - DNA, 654 bp, Oryza sativa (japonica cultivar-group)
  CDS (1)..(654)
atggcattagccatggcgcccaggctagtccaccacccttgctgcatgatgctctccaagaacccaagaacgccgccgccaccgccggcgatgcaccaccaccatgcccacaagccgctcatcaccgcgctcaccagcacgtcgtcgttcttgctccgctccgtcgacgtctccaaggacgacaagccgctggagacggcgactacgacaaccccgcctactccggcaccggcggcggcggctccggagaccgaacaagcggaggcggtggcgtcgccggagttggagttggagctggaggaggggccgaaggtggacccgcggcggctggaggagaagttcgcggtgctgaacacgggggtgtacgagtgccggtcgtgcgggtaccggtacgaccaggccgccggtgacccgtcgtacccggtgccgccggggctgccgttcgagcagctccccgacgactggcggtgcccgacgtgcggcgcggcgcagtccttcttcgagagcaagagcgtcgagatcgccgggttcgcgcagaaccagcagttcggcctcggcggcaactccctcaccggcgaccagaaagcgctgctcatctacggcagcctcctcgtcggcttcctcttcttcctctccggctacttcctccaatga

SEQ ID NO: 152280 - protein, 217 aa, Oryza sativa (japonica cultivar-group)
MALAMAPRLVHHPCCMMLSKNPRTPPPPPAMHHHHAHKPLITALTSTSSFLLRSVDVSKDDKPLETATTTTPPTPAPAAAAPETEQAEAVASPELELELEEGPKVDPRRLEEKFAVLNTGVYECRSCGYRYDQAAGDPSYPVPPGLPFEQLPDDWRCPTCGAAQSFFESKSVEIAGFAQNQQFGLGGNSLTGDQKALLIYGSLLVGFLFFLSGYFLQ

SEQ ID NO: 152281 - DNA, 588 bp, Arabidopsis thaliana
  CDS (1)..(588)
atggcgagtgctaccttctccttctgtcccctctctcaatcccatccccattcttctctaatcaaaccgacaccgtttctcagatatggcaagaaactacaccatcttcaccaccacatcttcatcaccatctcttacccatctcaccattctcgctacttggccgtttcaagagacgatgccgcgacgcctctttcttcttccgaccaaacccaagagacagagaccaaagaagtggaagacactatagagaaacgaagaatggaggagaagtttgctgttctaaacactggaatctatgagtgtagatcatgtggttacaagtacgatgaatcagcgggtgacccatcgtacccgattccaccgggttttcagtttgataagttgcctgaagattggagatgtcctacttgtggagctgctcagagtttctttgagagtaaaatggttgagattgctggttttgctcagaatcagcaatatggacttggtggtaatgctcttacctctggtcagaagactggtttaatctttggctctcttttactcttctttgcgctttttttgagtggctatttcattcaatga

SEQ ID NO: 152282 - protein, 195 aa, Arabidopsis thaliana
MASATFSFCPLSQSHPHSSLIKPTPFLRYGKKLHHLHHHIFITISYPSHHSRYLAVSRDDAATPLSSSDQTQETETKEVEDTIEKRRMEEKFAVLNTGIYECRSCGYKYDESAGDPSYPIPPGFQFDKLPEDWRCPTCGAAQSFFESKMVEIAGFAQNQQYGLGGNALTSGQKTGLIFGSLLLFFALFLSGYFIQ

SEQ ID NO: 152283 - DNA, 336 bp, Thermosynechococcus elongatus BP-1
  CDS (1)..(336): transl_table=11
atgaccgccgaaacccctgatgttgcgcccttagatcggtttgagtgccgtgcctgcggctacatctatgaaccggcaaagggagacgagaatcgctcgattccgcccgggacagcctttgctgatctgcccctgaactggcggtgtccagtgtgtagtgctccaaaaaagcaatttagcaacattggacctgtgggatccccctcaggcttcaaggagaatctcaactatggcttcggtgtgaatcgcctcacccctggccaaaaaaatatcctcatttttggtggtcttgcccttgctgttctttttctactgagtttctataatgttcgctaa

SEQ ID NO: 152284 - protein, 111 aa, Thermosynechococcus elongatus BP-1
MTAETPDVAPLDRFECRACGYIYEPAKGDENRSIPPGTAFADLPLNWRCPVCSAPKKQFSNIGPVGSPSGFKENLNYGFGVNRLTPGQKNILIFGGLALAVLFLLSFYNVR

SEQ ID NO: 152285 - DNA, 432 bp, Prochlorococcus marinus subsp. marinus str. CCMP1375
  CDS (1)..(432): transl_table=11
gtgagcgatgaactaaaacctgcattagatcagacagaagccaataaaattggccaaagtcctattaatgcagagaaaacctcagatcatgaagttactgatctcaaagaggatcttagcctcaatcgatttgaatgcacagattgtgggtatgtttatgatcctaaggaagggctgaagaaatataaaatttcaccaggcacctctttcttggacattgatcagacaaagtttcgatgcccagtttgtagatcaaaatattctgcttacaaagatataggcgctaaatttaaacctagtgatggtttcgaagagaacgttgtttatggctttggctttaacactcttcctccaggtcaaaagaatgtccttatttttggtggtttagcttttgctgctgcttgtttcttatccctttattcactgcattaa

SEQ ID NO: 152286 - protein, 143 aa, Prochlorococcus marinus subsp. marinus str. CCMP1375
MSDELKPALDQTEANKIGQSPINAEKTSDHEVTDLKEDLSLNRFECTDCGYVYDPKEGLKKYKISPGTSFLDIDQTKFRCPVCRSKYSAYKDIGAKFKPSDGFEENVVYGFGFNTLPPGQKNVLIFGGLAFAAACFLSLYSLH

SEQ ID NO: 152287 - DNA, 429 bp, Prochlorococcus marinus subsp. pastoris str. CCMP1986
  CDS (1)..(429): transl_table=11
gtgagtgaaaacattcaaccatcttctgaggaaaaccaaatagttgaggatttaacaaataaagaatctcctgaaaaacttccagaatttaaagataaagagctcattaccaatttagaacaaaatagattcgaatgtagaagttgtggatacatttatgatcctatagaaggaaacaagaaacttaacattcctaaaaatactcctttctcggcaatagatggaaatacttttgcttgtccagtatgtagagcaggtaaaaatttatataaagatataggaccaagagaaaaacctagtggttttgaagaaaatttaacttatggctttggattcaatagtttgccacctggtcagaaaaatattttaatatttggtggtttagcatttgcagctgcatgtttcctttctttgtactctttgcactaa

SEQ ID NO: 152288 - protein, 142 aa, Prochlorococcus marinus subsp. pastoris str. CCMP1986
MSENIQPSSEENQIVEDLTNKESPEKLPEFKDKELITNLEQNRFECRSCGYIYDPIEGNKKLNIPKNTPFSAIDGNTFACPVCRAGKNLYKDIGPREKPSGFEENLTYGFGFNSLPPGQKNILIFGGLAFAAACFLSLYSLH

SEQ ID NO: 152289 - DNA, 429 bp, Prochlorococcus marinus str. MIT 9313
  CDS (1)..(429): transl_table=11
gtgagcgacaaaaccacacctgccgaagactcgacagaagccgaatcagttgctcaaactgacgttgattgtatggccatagacaccatcgcctcagcagagtccgacaccgatcagctcacccatcgctttgagtgccgcagttgcggttacgtctatgacccagaagaaggagtcaagaagcttggcatcacttccggaacagctttcaaggatctcgatccaaccaactttcgttgccccgtatgccgtgcccgcatcgacgccttcaaaaacatcggtcctcgcagtgcacctagcggctttgaccaaaacctcaactacggcatcggcgtcaaccgcttaacacccgggcaaaagaatgtcctgatctttggaggcctggcactggccttcgccttcttcctctccctctactcactgcgttaa

SEQ ID NO: 152290 - protein, 142 aa, Prochlorococcus marinus str. MIT 9313
MSDKTTPAEDSTEAESVAQTDVDCMAIDTIASAESDTDQLTHRFECRSCGYVYDPEEGVKKLGITSGTAFKDLDPTNFRCPVCRARIDAFKNIGPRSAPSGFDQNLNYGIGVNRLTPGQKNVLIFGGLALAFAFFLSLYSLR

SEQ ID NO: 152291 - DNA, 417 bp, Synechococcus sp. WH 8102
  CDS (1)..(417): transl_table=11
gtgagcgacgagcttcagccggccgaacagccgccgacaacggaccagccgccggttgccgatgaggcaaacaccgctgttgaggctcccccggaaagcgatccacgcacccaccgcttcgagtgccgcagctgtggatatgtctacgaccctgaagaaggagtcaagaaagtgggaattgaggccggtacagcctttgacgatctcgacccggccggcttccgctgtccggtatgccgcagtcgtaaaccggccttccgagacatcggcccccgcaccaaagccagtggttttgaggagaacctcaatttcggcatcggagtcaatcgcatgacccctggtcagaaaaacgttctgatcttcggtggtctcgccctggccttcgccttcttcctctccctctattcgctccgctga

SEQ ID NO: 152292 - protein, 138 aa, Synechococcus sp. WH 8102
MSDELQPAEQPPTTDQPPVADEANTAVEAPPESDPRTHRFECRSCGYVYDPEEGVKKVGIEAGTAFDDLDPAGFRCPVCRSRKPAFRDIGPRTKASGFEENLNFGIGVNRMTPGQKNVLIFGGLALAFAFFLSLYSLR

SEQ ID NO: 152293 - DNA, 336 bp, Gloeobacter violaceus PCC 7421
  CDS (1)..(336): transl_table=11
atgacgacccagattaccgacccaacgcaactcgaccgctacgagtgccgtacctgcggctacatctacgagccgaccaagggtgacgctacggtaccggcgggcacacccttcgaggaactcgccgccgactggcgctgtccgatttgctcctcggccaccagccgcttcaaaagcatcggcccgaaggtgggaacggtggccgggttcgaggagaacgccggctacggctggggtgtcaatgtcctcaacgcccagaccaagaacgtcttgatctttggcgctttgttcttgggttttctgtttttcatgagcatctattttttgggcaactga

SEQ ID NO: 152294 - protein, 111 aa, Gloeobacter violaceus PCC 7421
MTTQITDPTQLDRYECRTCGYIYEPTKGDATVPAGTPFEELAADWRCPICSSATSRFKSIGPKVGTVAGFEENAGYGWGVNVLNAQTKNVLIFGALFLGFLFFMSIYFLGN

SEQ ID NO: 152295 - DNA, 429 bp, Prochlorococcus marinus str. AS9601
  CDS (1)..(429): transl_table=11
gtgagtgaaaacattcaaccagcctctgaggaaaacaaaatagttgaagcccttgagaaagaaaaactttctgaaaactcctcaggagtaaatgttgaacaacctgtccttaatttagaacaaaatagattcgaatgtagaagttgtggatatatttatgatccgtctgaaggaaataaaaaattaaacatacctaaaaacactcctttttcagagttagatggaaataccttcgcttgccctgtttgtcgagcgggtaaaaatttttataaggatataggtcctaaatctaaacctagtggttttgaagaaaatttagtttatgggtttggttttaacagtttacctcctggacaaaaaaacatattgatttttggaggtctggcgtttgctgccgctatgttcctttctttgtactctttgcattaa

SEQ ID NO: 152296 - protein, 142 aa, Prochlorococcus marinus str. AS9601
MSENIQPASEENKIVEALEKEKLSENSSGVNVEQPVLNLEQNRFECRSCGYIYDPSEGNKKLNIPKNTPFSELDGNTFACPVCRAGKNFYKDIGPKSKPSGFEENLVYGFGFNSLPPGQKNILIFGGLAFAAAMFLSLYSLH

SEQ ID NO: 152297 - DNA, 429 bp, Prochlorococcus marinus str. MIT 9515
  CDS (1)..(429): transl_table=11
gtgagtgaaaacattcaaccatcttctgatgataaacaaatagttgaggatttagctaaggaagaatcttcggaaaaactccctaaacttaacaacaaagaacttactattaatttagaacaaaatagattcgaatgtagaagttgtggatatatttatgatcctatagaagggaacaagaagcttaatatccccaaaaatactcctttttcattaatagacggtaacatttttgcttgtccagtatgcagggcaggtaaaaatttatataaagatataggaccaagagaaaaaccaagtggttttgaagaaaatttaacttatggctttggatttaatagcttgccacctggtcagaaaaatattttaatttttggtggattagcatttgccgcggcatgtttcctttctttatactctttgcattaa

SEQ ID NO: 152298 - protein, 142 aa, Prochlorococcus marinus str. MIT 9515
MSENIQPSSDDKQIVEDLAKEESSEKLPKLNNKELTINLEQNRFECRSCGYIYDPIEGNKKLNIPKNTPFSLIDGNIFACPVCRAGKNLYKDIGPREKPSGFEENLTYGFGFNSLPPGQKNILIFGGLAFAAACFLSLYSLH

SEQ ID NO: 152299 - DNA, 426 bp, Prochlorococcus marinus str. NATL1A
  CDS (1)..(426): transl_table=11
gtgagtgaagacaaaaaaacagaatcaaatcctttgggagatttgaatcttgatgaaaaacaaaatcaagttatttcatttgaatcaaaaaactcaaacgaggaatttgatccaaaaggaaatcgcttcgaatgtatgagctgtggttttatttatgatcctgatgagggtataaaaaagctaaatattgaaccaggaacagcattcctagacatagatagagagaagtttagatgtccagtctgtcgagtaggatttggtggatacaaggatattggccctaaatcaaagccaagtggatttgaagaaaaccttacttatggctttggatttaataaacttccttcaggccagaaaaacgttcttatttttggaagtctggctttagccgctgcctgttttctctctctttattctttgaaatga

SEQ ID NO: 152300 - protein, 141 aa, Prochlorococcus marinus str. NATL1A
MSEDKKTESNPLGDLNLDEKQNQVISFESKNSNEEFDPKGNRFECMSCGFIYDPDEGIKKLNIEPGTAFLDIDREKFRCPVCRVGFGGYKDIGPKSKPSGFEENLTYGFGFNKLPSGQKNVLIFGSLALAAACFLSLYSLK

SEQ ID NO: 152301 - DNA, 429 bp, Prochlorococcus marinus str. MIT 9303
  CDS (1)..(429): transl_table=11
gtgagcgacaaaaccacacctgccgaagactcgacagaagccgaatcagttgatcaaactgacgttgatggtattgccacagaaaccatcgcctcagcagagtccgacaccgatgagctaacccatcgctttgagtgccgcagttgcggttacgtctatgacccagaagaaggagtaaagaagcttggcatcacttccggaacagctttcaaggatctcgatccaaccaactttcgctgccccgtatgccgtgcccgcatcgacgccttcaaaaacatcggtcctcgcagtgcacctagcggctttgaccaaaacctcaactacggcatcggcgtcaaccgcttaacacccgggcaaaagaatgtcctgatctttggaggcctggcactggccttcgccttcttcctctccctctactcgctgcgttaa

SEQ ID NO: 152302 - protein, 142 aa, Prochlorococcus marinus str. MIT 9303
MSDKTTPAEDSTEAESVDQTDVDGIATETIASAESDTDELTHRFECRSCGYVYDPEEGVKKLGITSGTAFKDLDPTNFRCPVCRARIDAFKNIGPRSAPSGFDQNLNYGIGVNRLTPGQKNVLIFGGLALAFAFFLSLYSLR

SEQ ID NO: 152303 - DNA, 426 bp, Prochlorococcus marinus str. NATL2A
  CDS (1)..(426): transl_table=11
gtgagtgaagacaaaaaaacagaatcaaatcctttgggagatttgaatcttgatgcacaacaaaatcaagttatttcatttgaaccaaaaaactcaaacgaggaatttgatccaaaaggaaatcgcttcgaatgtatgagctgtggttttatttatgatcctgatgagggtataaaaaagctaaatattgaaccaggaacagcattcctagacatagatagagagaagtttagatgtccagtctgtcgagtaggatttggtggatacaaggatattggccctaaatcaaagcctagtggatttgaagaaaaccttacttatggctttggatttaataaacttccttcaggccagaaaaacgttcttatttttggaagtctggctttagccgctgcctgttttctctctctttattctttgaaatga

SEQ ID NO: 152304 - protein, 141 aa, Prochlorococcus marinus str. NATL2A
MSEDKKTESNPLGDLNLDAQQNQVISFEPKNSNEEFDPKGNRFECMSCGFIYDPDEGIKKLNIEPGTAFLDIDREKFRCPVCRVGFGGYKDIGPKSKPSGFEENLTYGFGFNKLPSGQKNVLIFGSLALAAACFLSLYSLK

SEQ ID NO: 152305 - DNA, 420 bp, Synechococcus sp. CC9605
  CDS (1)..(420): transl_table=11
gtgagcgacgaacaacagtccgtccagccggtcgaagcgaccgaagcggtagagccagcgatcgaagcggttaagccagcgatcgaaaccgcttcagagagcgatccacggactcaccgtttcgaatgtcgaagctgcggctacgtctacgaccctgaggaaggagtcaaaaaggttggtatcgaggccggcacggctttcgaagatctcgacccgatgtcgtttcgttgtccggtatgcaggagcagggtggcagcattccgcgacatcggcccgcgggccaaggccagcggcttcgacgaaaatttgaatttcggcctcggtgtcaaccgaatgaccccagggcagaagaatgtactgatctttggcggccttgccctcggcttcgccttcttcttatccctttattccctgcgctga

SEQ ID NO: 152306 - protein, 139 aa, Synechococcus sp. CC9605
MSDEQQSVQPVEATEAVEPAIEAVKPAIETASESDPRTHRFECRSCGYVYDPEEGVKKVGIEAGTAFEDLDPMSFRCPVCRSRVAAFRDIGPRAKASGFDENLNFGLGVNRMTPGQKNVLIFGGLALGFAFFLSLYSLR

SEQ ID NO: 152307 - DNA, 429 bp, Prochlorococcus marinus str. MIT 9312
  CDS (1)..(429): transl_table=11
gtgagtgaaaacattcaaccagcctctgaggaaaacaaaatagttgaaaattttgagaaagaaaaactttctgcaaactcctcaggagtaaatattgaacaaccttacattaatttagaacaaaatagattcgaatgtagaagttgtggatacatttatgatccctctgaaggtaataaaaaattaaatatacccaaaaatacgccctttttagagttagatggtaatacattcgtttgccccgtttgcagagctggtaagaatttttataaagatataggacctaaatctaaggctagtggttttgaagaaaatttaacttacggatttggtttcaatagcttgccttctggccaaaaaaatatattaatttttggaggtttggcttttgccgcagcatgtttcctttctttgtactctttgcattaa

SEQ ID NO: 152308 - protein, 142 aa, Prochlorococcus marinus str. MIT 9312
MSENIQPASEENKIVENFEKEKLSANSSGVNIEQPYINLEQNRFECRSCGYIYDPSEGNKKLNIPKNTPFLELDGNTFVCPVCRAGKNFYKDIGPKSKASGFEENLTYGFGFNSLPSGQKNILIFGGLAFAAACFLSLYSLH

SEQ ID NO: 152309 - DNA, 417 bp, Synechococcus elongatus PCC 7942
  CDS (1)..(417): transl_table=11
atggatacacctgaagcttctaccccgctggccaacaccgagcctgagccggtagaagagggcacccccgaggcagctgccgaaacgtcggagacgaagccactcgtgttcctcgatcgtcacgagtgtcgatcctgtggctacatctacgaacccaatgagggagacccacgccgccaaatcgccgcagggactgtgtttgaagaagtgccctctaactggcgctgcccaatttgcggcagtcctcggagtcagtttcgcaacattggtcccaagggaatcccctctggtttcagcgagaacttgggctacggcctcggcgtgaataccctgaccccaggccaaaaaaacctgctgatcttcggcgcgcttggccttgctgtcctcttcttcctcagcctgtacggcctgaactaa

SEQ ID NO: 152310 - protein, 138 aa, Synechococcus elongatus PCC 7942
MDTPEASTPLANTEPEPVEEGTPEAAAETSETKPLVFLDRHECRSCGYIYEPNEGDPRRQIAAGTVFEEVPSNWRCPICGSPRSQFRNIGPKGIPSGFSENLGYGLGVNTLTPGQKNLLIFGALGLAVLFFLSLYGLN

SEQ ID NO: 152311 - DNA, 342 bp, Trichodesmium erythraeum IMS101
  CDS (1)..(342): transl_table=11
atgagtgaggaaaccactgaggcaaatacacaggaacaggatcggtatgaatgccgagcttgtggctacatatatgaaccgatcaagggaagctctgctagtaatgttcctccaggaactgcttttgcagatttgccagtgcgttggcgctgccccgtttgtggagtatctacagcccaattcgtgaatgttggacctgttgaaggaccttcgggatttaaagaaaaccttggttatggttttggtgtcaatactctcacacccagccagaaaaatatcctcatttttggtggattagccctaggatttctgttcttcctgagcttatatggtttacgataa

SEQ ID NO: 152312 - protein, 113 aa, Trichodesmium erythraeum IMS101
MSEETTEANTQEQDRYECRACGYIYEPIKGSSASNVPPGTAFADLPVRWRCPVCGVSTAQFVNVGPVEGPSGFKENLGYGFGVNTLTPSQKNILIFGGLALGFLFFLSLYGLR

SEQ ID NO: 152313 - DNA, 441 bp, Synechococcus sp. CC9311
  CDS (1)..(441): transl_table=11
gtgagcgacgagatcagcccagcagcggaagttcccgccgacgttgaccccctcgcagaggagttaatcgaagcagaacccaatcaagacgaagcaagcaccagtacagacaaggagacaaccgatccacgcacgcatcggttcgaatgtcgaagctgtggatacgtttacgaccccgatgagggtgtcaaaaagctgggcatcgttgtgggcaccgcttttgaagatctcgaccccatcagattccgttgtccggtctgccgcagcagggttggagcctttaccgacattggccctcgatccaaagcgagtggatttgaggagaaccttaatttcggtctcggcgttaaccgcctcactccagggcaaaaaaatgtgctgatttttggcggcctcgcccttggctttgctttcttcctctccctttattcactgcgctga

SEQ ID NO: 152314 - protein, 146 aa, Synechococcus sp. CC9311
MSDEISPAAEVPADVDPLAEELIEAEPNQDEASTSTDKETTDPRTHRFECRSCGYVYDPDEGVKKLGIVVGTAFEDLDPIRFRCPVCRSRVGAFTDIGPRSKASGFEENLNFGLGVNRLTPGQKNVLIFGGLALGFAFFLSLYSLR

SEQ ID NO: 152315 - DNA, 336 bp, Nostoc punctiforme PCC 73102
  CDS (1)..(336): transl_table=11
atgagcgaaccagctgttgagactccggtgttagaccgctacgagtgtcgcgcctgcggttatgtttacgaacctgaaaagggagacgacaagcatgatattccttcagggatactctttgcagaactgcccacaaattggcgctgtccagtttgtagtgccaagaaaaccgcttttgccaacatcggtcctgcgggtactgcatccggcttcaaagaaaatctcggttacggtttgggtgtcaataacctaacgccaagccaaaagaatatcttaatttttggcgctttggcccttggcttcttgtttttcatcagtctctacggcttacaatga

SEQ ID NO: 152316 - protein, 111 aa, Nostoc punctiforme PCC 73102
MSEPAVETPVLDRYECRACGYVYEPEKGDDKHDIPSGILFAELPTNWRCPVCSAKKTAFANIGPAGTASGFKENLGYGLGVNNLTPSQKNILIFGALALGFLFFISLYGLQ

SEQ ID NO: 152317 - DNA, 348 bp, Crocosphaera watsonii WH 8501
  CDS (1)..(348): transl_table=11
atgactgaaaaaacccaagaaaagaccctagccgaactcgcaccacccgaccacgaatgtcgcctctgtggctacgtttatgagacaaaaaagggcgatgccaaagcaaacgttccccctggaacacttttttccgaactccccagtggctggaaatgccccgtctgcgcagccaaacccaatcagttcgtcagtattggcgcaaccaacgctccctccgggttccaagaaaacctaaactatggctttggtgtcaacactctgaccccaaatcaaaaaaatctcctgatttttggaggattggccgtaggtttcgtgtttttcctcagtttatacgggttaggttaa

SEQ ID NO: 152318 - protein, 115 aa, Crocosphaera watsonii WH 8501
MTEKTQEKTLAELAPPDHECRLCGYVYETKKGDAKANVPPGTLFSELPSGWKCPVCAAKPNQFVSIGATNAPSGFQENLNYGFGVNTLTPNQKNLLIFGGLAVGFVFFLSLYGLG

SEQ ID NO: 152319 - DNA, 435 bp, Prochlorococcus marinus str. MIT 9211
  CDS (1)..(435): transl_table=11
atggtgagcgatgaatcaaaaactgcattagatagggatccagccaatccaattggcaaagattcgatagatgcagatcaaatgaaagatcaggttctctcagattttaagcaagatctgagagaacatcgttttgagtgtagagaatgtggatacatttatgatccaaaggaaggattgagtaagtacaaaatttcaaagggtactgcttttatagatcttgacaagcaaaaattccgttgtccagtttgtaggtcaggttttgaggcctataaagatattggcgctgcatttcaaccaatcgagggatttgaggagaatattaaatatggttttggtttcaatactcttccaccaggacagaagaatgttttgatttttggtggtttagccttaatggcagcctgcttcttatccctttattcattgcattag

SEQ ID NO: 152320 - protein, 144 aa, Prochlorococcus marinus str. MIT 9211
MVSDESKTALDRDPANPIGKDSIDADQMKDQVLSDFKQDLREHRFECRECGYIYDPKEGLSKYKISKGTAFIDLDKQKFRCPVCRSGFEAYKDIGAAFQPIEGFEENIKYGFGFNTLPPGQKNVLIFGGLALMAACFLSLYSLH

SEQ ID NO: 152321 - DNA, 366 bp, Synechococcus sp. RS9917
  CDS (1)..(366): transl_table=11
gtgccagagcagccgaccgaagctcccgaacaggacagcgtcagcagcgatccgcgcacccaccgcttcgagtgtcggagctgcggctatgtgtatgaccccgatgagggggtgaaaaagctgggaatcaccgccggcaccgccttcgaggacctcgacgcgatcagcttccgctgcccggtgtgtcgcagcaaggtgggggccttccgcgacatcggtccgcgcacgaaggccagtggtttcgaagagaacctcaactacggcctcggggtgaaccggctgacgcccggccagaagaatgtgttgatcttcggcagcctcgccctcgccttcgcctttttcctctccctgtattccctccgctga

SEQ ID NO: 152322 - protein, 121 aa, Synechococcus sp. RS9917
MPEQPTEAPEQDSVSSDPRTHRFECRSCGYVYDPDEGVKKLGITAGTAFEDLDAISFRCPVCRSKVGAFRDIGPRTKASGFEENLNYGLGVNRLTPGQKNVLIFGSLALAFAFFLSLYSLR

SEQ ID NO: 152323 - DNA, 498 bp, Synechococcus sp. WH 5701
  CDS (1)..(498): transl_table=11
atgaaacggcccaacctggggcgcagtctggcatccgtcggcagggatcgcctggatagagtccgatctgacggcagtggggccagcgccatggtcaacgggcacgacggcgacgaggaacgagcttcggacaaggccagcaacgaagctccaggcgcgcctgcggccgtcgtggagagcgatcccgacagccaccgctacgagtgccgcagctgcggcttcgtctatgaccccgaggagggcatccgcaagctgtccatcgccccgggcacccccttcacggagctcgatccgatcggctttcgctgcccggtctgccgcagccgcgtgggtgccttccgtgacatcggtccacgcagcaagcccagtggcttcgaggagaacctcaacttcggcctcggcgtgaacaagctcacccccggccagaagaacgtgctgatcttcgggggcttcgcgctggcgttcgccttcttcctctctctctattccctccgctga

SEQ ID NO: 152324 - protein, 165 aa, Synechococcus sp. WH 5701
MKRPNLGRSLASVGRDRLDRVRSDGSGASAMVNGHDGDEERASDKASNEAPGAPAAVVESDPDSHRYECRSCGFVYDPEEGIRKLSIAPGTPFTELDPIGFRCPVCRSRVGAFRDIGPRSKPSGFEENLNFGLGVNKLTPGQKNVLIFGGFALAFAFFLSLYSLR

SEQ ID NO: 152325 - DNA, 417 bp, Synechococcus sp. WH 7805
  CDS (1)..(417): transl_table=11
gtgagcgacgaatcacaggcctcagacaacgttgcagctgcggactctgaagccgaggccccgcaggctcctactgaacagacccttgccgaagcaagcgatccgcgcacccaccgcttcgaatgccgcagttgtggctatgtgtacgaccccgatgaaggggtgaagaagctggcgattccgagtggtaccgccttcgaagatctggatgtggcaagtttccgttgccccgtttgccgcagcagggtcggcgccttccgagacatcggcccccgctccaaggccagtggcttcgaggaaaacctgaattacggcctgggcgtcaatcgactgaccccaggacagaaaaatgttctgatctttggcggcctgctcctcggatttgcctttttcctttcgctttactccctgcgctga

SEQ ID NO: 152326 - protein, 138 aa, Synechococcus sp. WH 7805
MSDESQASDNVAAADSEAEAPQAPTEQTLAEASDPRTHRFECRSCGYVYDPDEGVKKLAIPSGTAFEDLDVASFRCPVCRSRVGAFRDIGPRSKASGFEENLNYGLGVNRLTPGQKNVLIFGGLLLGFAFFLSLYSLR

SEQ ID NO: 152327 - DNA, 465 bp, Synechococcus sp. RS9916
  CDS (1)..(465): transl_table=11
gtggtgaccgacgagatcgcaggatcggagcaagccggtcttccgcagaagcaggcggaggttcaaccctccgctgaagagcaacccgtcgcggtcgaaagcgccgactcccccgcagaagacggaaccgaggcagaacccagcagcgatccccgcacccaccgctttgagtgccgcagttgtggttacgtctacgaccccgctgaaggggtgaagaagctgggaattgtttcaggcacagcttttgaagagctggatgccatcagctttcgttgcccggtatgccgtagccgcgttggcgcattccgtgatattggccccgccaccaaagccagtggctttgaagaaaatctcgactacggcctcggcgtgaaccgcctcactccaggtcagaagaacgtgctgatcttcggcagcctggccctgggcttcgcctttttcctgtccctttattccctgcgctga

SEQ ID NO: 152328 - protein, 154 aa, Synechococcus sp. RS9916
MVTDEIAGSEQAGLPQKQAEVQPSAEEQPVAVESADSPAEDGTEAEPSSDPRTHRFECRSCGYVYDPAEGVKKLGIVSGTAFEELDAISFRCPVCRSRVGAFRDIGPATKASGFEENLDYGLGVNRLTPGQKNVLIFGSLALGFAFFLSLYSLR

SEQ ID NO: 152329 - DNA, 336 bp, Anabaena variabilis
  CDS (1)..(336): transl_table=11
atgagcgaacaagctgttgaaaatacagtgttagaccgctttgagtgtcgctcctgcggttatgtttacgaacctgagaaaggtgacagtaagcatgatattgcgccagagacaccatttgccgaactgccaatcaattggcgctgtccagtttgtacagcgaaaaaggcagctttcagtaacatcggcccggcgggtacagcctccggtttcagagaaaatctcggttatggtttaggtgtcaataagctcacaccagcacaaaaaaatatcctcattttcggtgctttagcattgggattcttgttctttatcagtctttacggcttgcagtaa

SEQ ID NO: 152330 - protein, 111 aa, Anabaena variabilis
MSEQAVENTVLDRFECRSCGYVYEPEKGDSKHDIAPETPFAELPINWRCPVCTAKKAAFSNIGPAGTASGFRENLGYGLGVNKLTPAQKNILIFGALALGFLFFISLYGLQ

SEQ ID NO: 152331 - DNA, 561 bp, Brassica napus
  CDS (1)..(561)
atggcgactgctgtgtcctccttctctcctatcgctcagttccattcttcttcttctttttccctcaaacggacacagtttctcagatatggcaagaaacaacaacagcttcaccacaaagtcttcactaccccaacttaccaatccacaccttcccgctgctcaaccgtttcaagagacgactccgccacaacgcccgaactcgaagaagacgcggtcgagattcgaagaagagaggaggagaaattcgctgttctgaacactggaatctacgagtgcagatcgtgtgggtacaagtacgacgagtccgcgggtgacccatcgtacccgatccctcctgggtttcagttggataagttgcctgaagactggagatgtccaacaggtggagcagctcagagtttcttcgagagtaaaagggttgagatcgctggtttggctcagaatcaacaatatggactgggaggtaatcaacttacctcgggtcagaagacagctcgcatcttcgggagtctcttcctcttcttcttgcttttcttgagtggctatttcatccaataa

SEQ ID NO: 152332 - protein, 186 aa, Brassica napus
MATAVSSFSPIAQFHSSSSFSLKRTQFLRYGKKQQQLHHKVFTTPTYQSTPSRCSTVSRDDSATTPELEEDAVEIRRREEEKFAVLNTGIYECRSCGYKYDESAGDPSYPIPPGFQLDKLPEDWRCPTGGAAQSFFESKRVEIAGLAQNQQYGLGGNQLTSGQKTARIFGSLFLFFLLFLSGYFIQ

SEQ ID NO: 152333 - DNA, 561 bp, Brassica napus
  CDS (1)..(561)
atggcgactgctgtgtcctccttctctcctatcgctcagttccattcttcttcttctttttccctcaaacggacacagtttctcagatatggcaagaaacaacaacagcttcaccacaaagtcttcactaccccaacttaccaatccacaccttcccgctgctcaaccgtttcaagagacgactccgccacaacgcccgaactcgaagaagacgcggtcgagattcgaagaagagaggaggagaaattcgctgttctgaacactggaatctacgagtgcagatcgtgtgggtacaagtacgacgagtccgcgggtgacccatcgtacccgatccctcctgggtttcagtttgataagttgcctgaagactggagatgtccaacatgtggagcagctcagagtttcttcgagagtaaaatggttgagatcgctggttttgctcagaatcaacaatatggacttggtggtaatcaacttacctctggtcagaagacagctctcatcttcgggagtctcttcctcttcttcttgcttttcttgagtggctatttcatccaataa

SEQ ID NO: 152334 - protein, 186 aa, Brassica napus
MATAVSSFSPIAQFHSSSSFSLKRTQFLRYGKKQQQLHHKVFTTPTYQSTPSRCSTVSRDDSATTPELEEDAVEIRRREEEKFAVLNTGIYECRSCGYKYDESAGDPSYPIPPGFQFDKLPEDWRCPTCGAAQSFFESKMVEIAGFAQNQQYGLGGNQLTSGQKTALIFGSLFLFFLLFLSGYFIQ

SEQ ID NO: 152335 - DNA, 24 bp, Artificial sequence
  primer
atgagtgagcgtccccctgaaaag

SEQ ID NO: 152336 - DNA, 20 bp, Artificial sequence
  primer
ttatcccatgccgtaaaggc

SEQ ID NO: 152337 - protein, 98 aa, Artificial sequence
  consensus sequence
  Variant (4)..(4): Xaa in position 4 is any amino acid
  Variant (8)..(8): Xaa in position 8 is any amino acid
  Variant (10)..(10): Xaa in position 10 is any amino acid
  Variant (12)..(13): Xaa in position 12 to 13 is any amino acid
  Variant (15)..(17): Xaa in position 15 to 17 is any amino acid
  Variant (18)..(19): Xaa in position 18 to 19 is any or no amino acid
  Variant (21)..(22): Xaa in position 21 to 22 is any amino acid
  Variant (25)..(25): Xaa in position 25 is any amino acid
  Variant (27)..(28): Xaa in position 27 to 28 is any amino acid
  Variant (30)..(33): Xaa in position 30 to 33 is any amino acid
  Variant (34)..(34): Xaa in position 34 is any or no amino acid
  Variant (38)..(38): Xaa in position 38 is any amino acid
  Variant (40)..(47): Xaa in position 40 to 47 is any amino acid
  Variant (48)..(49): Xaa in position 48 to 49 is any or no amino acid
  Variant (51)..(56): Xaa in position 51 to 56 is any amino acid
  Variant (57)..(57): Xaa in position 57 is any or no amino acid
  Variant (60)..(61): Xaa in position 60 to 61 is any amino acid
  Variant (63)..(64): Xaa in position 63 to 64 is any amino acid
  Variant (67)..(67): Xaa in position 67 is any amino acid
  Variant (69)..(69): Xaa in position 69 is any amino acid
  Variant (71)..(71): Xaa in position 71 is any amino acid
  Variant (73)..(74): Xaa in position 73 to 74 is any amino acid
  Variant (79)..(79): Xaa in position 79 is any amino acid
  Variant (84)..(84): Xaa in position 84 is any amino acid
  Variant (86)..(91): Xaa in position 86 to 91 is any amino acid
  Variant (95)..(95): Xaa in position 95 is any amino acid
  Variant (97)..(97): Xaa in position 97 is any amino acid
ECRXCGYXYXPXXGXXXXXIXXGTXFXXLXXXXXRCPXCXXXXXXXXXXGXXXXXXXGFXXNXXYGXGXNXLXXGQKNXLIFGXLXXXXXXFLSXYXL

SEQ ID NO: 152338 - protein, 41 aa, Artificial sequence
  protein pattern
  Variant (4)..(4): Xaa in position 4 is any amino acid
  Variant (8)..(8): Xaa in position 8 is any amino acid
  Variant (10)..(10): Xaa in position 10 is any amino acid
  Variant (11)..(11): Xaa in position 11 is Glu, Pro, Gln or Thr
  Variant (12)..(13): Xaa in position 12 to 13 is any amino acid
  Variant (15)..(19): Xaa in position 15 to 19 is any amino acid
  Variant (20)..(20): Xaa in position 20 is Ile, Leu or Val
  Variant (21)..(22): Xaa in position 21 to 22 is any amino acid
  Variant (23)..(23): Xaa in position 23 is Glu, Gly or Asn
  Variant (24)..(25): Xaa in position 24 to 25 is any amino acid
  Variant (27)..(34): Xaa in position 27 to 34 is any amino acid
  Variant (35)..(35): Xaa in position 35 is any or no amino acid
  Variant (38)..(38): Xaa in position 38 is any amino acid
  Variant (40)..(40): Xaa in position 40 is any amino acid
  Variant (41)..(41): Xaa in position 41 is Ala, Ser or Val
ECRXCGYXYXXXXGXXXXXXXXXXXFXXXXXXXXXCPXCXX

SEQ ID NO: 152339 - protein, 62 aa, Artificial sequence
  protein pattern
  Variant (2)..(2): Xaa in position 2 is any amino acid
  Variant (4)..(4): Xaa in position 4 is any amino acid
  Variant (5)..(5): Xaa in position 5 is Ala, Ser or Val
  Variant (6)..(9): Xaa in position 6 to 9 is any amino acid
  Variant (10)..(10): Xaa in position 10 is Phe or Tyr
  Variant (11)..(11): Xaa in position 11 is any amino acid
  Variant (12)..(12): Xaa in position 12 is Asp, Asn or Ser
  Variant (13)..(13): Xaa in position 13 is any amino acid
  Variant (15)..(20): Xaa in position 15 to 20 is any amino acid
  Variant (21)..(21): Xaa in position 21 is any or no amino acid
  Variant (24)..(24): Xaa in position 24 is any amino acid
  Variant (25)..(25): Xaa in position 25 is Glu or Gln
  Variant (27)..(27): Xaa in position 27 is Ala, Ile, Leu or Val
  Variant (28)..(28): Xaa in position 28 is any amino acid
  Variant (29)..(29): Xaa in position 29 is Phe or Tyr
  Variant (31)..(31): Xaa in position 31 is any amino acid
  Variant (33)..(33): Xaa in position 33 is Phe or Val
  Variant (35)..(35): Xaa in position 35 is any amino acid
  Variant (36)..(36): Xaa in position 36 is Leu or Met
  Variant (37)..(37): Xaa in position 37 is Asn, Pro, Ser or Thr
  Variant (38)..(38): Xaa in position 38 is Ala, Gly, Pro or Ser
  Variant (39)..(39): Xaa in position 39 is Ala, Gly, Asn, Gln or Ser
  Variant (40)..(40): Xaa in position 40 is any amino acid
  Variant (43)..(43): Xaa in position 43 is Ile, Leu or Val
  Variant (48)..(48): Xaa in position 48 is Ala, Gly or Ser
  Variant (50)..(50): Xaa in position 50 is any amino acid
  Variant (51)..(51): Xaa in position 51 is Phe, Leu or Val
  Variant (52)..(53): Xaa in position 52 to 53 is any amino acid
  Variant (54)..(54): Xaa in position 54 is Ala, Leu or Val
  Variant (55)..(55): Xaa in position 55 is any amino acid
  Variant (56)..(56): Xaa in position 56 is Phe or Leu
  Variant (57)..(57): Xaa in position 57 is Ile, Leu or Met
  Variant (59)..(59): Xaa in position 59 is Phe, Ile or Leu
  Variant (61)..(61): Xaa in position 61 is any amino acid
  Variant (62)..(62): Xaa in position 62 is Leu, Met or Val
PXCXXXXXXXXXXGXXXXXXXGFXXNXXXGXGXNXXXXXXKNXLIFGXLXXXXXXXXSXYXX

SEQ ID NO: 152340 - protein, 40 aa, Artificial sequence
  protein pattern
  Variant (2)..(3): Xaa in position 2 to 3 is any amino acid
  Variant (5)..(6): Xaa in position 5 to 6 is any amino acid
  Variant (9)..(9): Xaa in position 9 is any amino acid
  Variant (11)..(11): Xaa in position 11 is any amino acid
  Variant (13)..(13): Xaa in position 13 is any amino acid
  Variant (14)..(14): Xaa in position 14 is Leu or Met
  Variant (15)..(15): Xaa in position 15 is Asn, Pro, Ser or Thr
  Variant (16)..(16): Xaa in position 16 is Ala, Gly, Pro or Ser
  Variant (17)..(17): Xaa in position 17 is Ala, Gly, Asn, Gln or Ser
  Variant (18)..(18): Xaa in position 18 is any amino acid
  Variant (20)..(20): Xaa in position 20 is Asn or Thr
  Variant (21)..(21): Xaa in position 21 is Ala, Gly, Ile, Leu or Val
  Variant (24)..(24): Xaa in position 24 is Phe or Tyr
  Variant (26)..(26): Xaa in position 26 is Ala, Gly, Ser or Thr
  Variant (28)..(28): Xaa in position 28 is any amino acid
  Variant (29)..(29): Xaa in position 29 is Phe, Leu or Val
  Variant (30)..(31): Xaa in position 30 to 31 is any amino acid
  Variant (32)..(32): Xaa in position 32 is Ala, Leu or Val
  Variant (33)..(33): Xaa in position 33 is any amino acid
  Variant (34)..(34): Xaa in position 34 is Phe or Leu
  Variant (35)..(35): Xaa in position 35 is Ile, Leu or Met
  Variant (37)..(37): Xaa in position 37 is any amino acid
  Variant (39)..(39): Xaa in position 39 is any amino acid
  Variant (40)..(40): Xaa in position 40 is Ile, Leu, Met or Val
FXXNXXYGXGXNXXXXXXKXXLIXGXLXXXXXXXXSXYXX

SEQ ID NO: 152341 - DNA, 1332 bp, Saccharomyces cerevisiae
  CDS (1)..(1332)
atgaaatacaaggaaatcaatttcttcaagggccatccgagctcgaggttgctgcctcgagaagcagtaattcaagcgactgcggctatattggggcccgagaccagggagtacgataacgacccctataacaggcatccgctgacgtacggttcggacgaaggtgccctgtgggtgcgagagcagatttgtacgtttctgaatgatcagctgtttaagttcgaaaatggggctcggagcaggacacgggcagactatttgaatctgaatagcggcgcttcgtatggcatgctgaacatccttctgcaaacaaccttgccacataacgggtataccaggcaggcgttcatcatcacgccaacatatttcttgatcaacaattgcttcacagatgcgggattcaaggggaaaatgaccgccatcaacgagcagggccacgactcgattgatttcgagtcgttgatttctgcccttgagcagcacgaggcggagccgcagccccatagtaccacagagatgattcaggggccaaagttgaccaagaaggtctacaggtacgttatgtactgcatcccgacgtttgcaaacccatcgggaaacacatactcgcttgagaccagacgcagacttatcgacatcgctcggaagtacgacatgctgataatcactgatgacgtgtacgatattctagattacacgacgccctcagatgagctgccctctccgcccctaaggatggtgcacatagacagaagtacagcgccctccggtgaggactcgttcgggaatacagtgtccaacgcaactttctccaagctgatcgcccctgggctcagatttggataccatgagtcaatcaacgcgaatctcgccagacagctatctaaaggtggtgcaaacgtctctggcggaactccctcacaactgaactccatgatcgtgggtgagatgctgcgtagtggtgccgcccagagatgcattgcacatctgagatccgtatactccgagagggccactgtcttgacctcggcgcttaagaaatacatgcccctaggaaccgagattatgccattgaagggcggctattttacttggatcactctcccaccagcgtacaatgccatggagatatccactattcttgccaagaaatttaatgtcatccttgccgacggctccaatttcgaggtcatcggcgatgagaaaaactggggtcagtcatgctttaggctttctattagtttcttagaagttgatgatatcgacaggggcattgagctgtttggtgctgtttgcaaatctcatgcgatcaccaataacataactatgtag

SEQ ID NO: 152342 - protein, 443 aa, Saccharomyces cerevisiae
MKYKEINFFKGHPSSRLLPREAVIQATAAILGPETREYDNDPYNRHPLTYGSDEGALWVREQICTFLNDQLFKFENGARSRTRADYLNLNSGASYGMLNILLQTTLPHNGYTRQAFIITPTYFLINNCFTDAGFKGKMTAINEQGHDSIDFESLISALEQHEAEPQPHSTTEMIQGPKLTKKVYRYVMYCIPTFANPSGNTYSLETRRRLIDIARKYDMLIITDDVYDILDYTTPSDELPSPPLRMVHIDRSTAPSGEDSFGNTVSNATFSKLIAPGLRFGYHESINANLARQLSKGGANVSGGTPSQLNSMIVGEMLRSGAAQRCIAHLRSVYSERATVLTSALKKYMPLGTEIMPLKGGYFTWITLPPAYNAMEISTILAKKFNVILADGSNFEVIGDEKNWGQSCFRLSISFLEVDDIDRGIELFGAVCKSHAITNNITM

SEQ ID NO: 152343 - DNA, 1341 bp, Aspergillus fumigatus
  CDS (1)..(1341)
atgggtgtaattccccccgaagagccaatcgatctcttcagaggctggccaaacccggccctgttgcccacctccgccttggcccaggcatccgccactgtcctgtccacgccgtccattcggaccccagccctgctgtatgggcctgatgatggctatctgcccttgcgaaagagtgttgctgaatggctgacccacttttacaaaccccgcgatccggttgggttcgatcggatctgcattactggcggtgccagccagaatctggcatgtattttccaagtcttcaccgatccaagttataccagacatgtctggatggtagcgcctgcatatcacctggcgtcccggatggtagacgatgccggcttcgcaggtcgtgtcagagccgttccgcaggatgacgcggggcttgatcttgactatctccgtcgggagatggaggcggccgagcggaaagctaatgaagagcagagattcgaaccgaaacataaacctccacggccatgggggaagatctacaaacacctcatctatgccacgccgacattctccaatcccaccacgcggaccatgtccctgtccgatcgggagcaactggtccagctcgcgcgcgagttcgatgccttgatcgtgaccgatgacgtctacgatttcctgcagtggtccgtggatccagactgccccctggctgctccagacgaggcacgcgtgcctcggctggtcgacatcgatcgctacatggatggagggccccaggatgaatggggaaacgtcatcagtaacgggagcttcagcaagttgatcggccctggcatgcggaccggatgggcagaaggcacggccaagcttgcctacggtctctctcaaacaggttcatcgcgctccggaggggccccgtcccaaatcgcctccacgataattgcccagttgctcatcaatgggaccttccagtctcatctaacaggggtcttgcagcccgcctacgcgcgcaggtaccatgtcatgatgtcctccatccgcaagcacctcctccctctgggcgtagggctgcccgactcttcggaagtcgtcggcggatactttatctgggtgcgtcttccaagtccgttacgcgctgctgatatcgtgcaactggctcagaagacgcagaatctcagagtggctgctggtgagattttccaaatccccggggactcggtggaccgaggcaacgactttcatgatttcctgcgcctttgttttgcctggtccgaggaggatcaactcgctgaaggagtgcggcgactcggatgcgttatccatgatgctttggttggaccagcagccaattctacgtag

SEQ ID NO: 152344 - protein, 446 aa, Aspergillus fumigatus
MGVIPPEEPIDLFRGWPNPALLPTSALAQASATVLSTPSIRTPALLYGPDDGYLPLRKSVAEWLTHFYKPRDPVGFDRICITGGASQNLACIFQVFTDPSYTRHVWMVAPAYHLASRMVDDAGFAGRVRAVPQDDAGLDLDYLRREMEAAERKANEEQRFEPKHKPPRPWGKIYKHLIYATPTFSNPTTRTMSLSDREQLVQLAREFDALIVTDDVYDFLQWSVDPDCPLAAPDEARVPRLVDIDRYMDGGPQDEWGNVISNGSFSKLIGPGMRTGWAEGTAKLAYGLSQTGSSRSGGAPSQIASTIIAQLLINGTFQSHLTGVLQPAYARRYHVMMSSIRKHLLPLGVGLPDSSEVVGGYFIWVRLPSPLRAADIVQLAQKTQNLRVAAGEIFQIPGDSVDRGNDFHDFLRLCFAWSEEDQLAEGVRRLGCVIHDALVGPAANST

SEQ ID NO: 152345 - DNA, 1317 bp, Ashbya gossypii
  CDS (1)..(1317)
atgggagatggatcgcagatcaacttcttcaagggccatccttctgtgcgcctacttccccgagagagcatcatcaaaagtaccaaggagttgttggagcctgaacatcgcgggtatgaccagaatccagaggattgccacccactcacgtatggctccgagcagggctcgctatgggtccgctcggccattgctacgctgatcaacgactgctaccgccccgagaaggccactcgtgccgaacatgttaatctcactggcggtgcttcctatggaattatgaacatcctgatgcagacgacgctggctcacgccggctatacccggcgagcgttccttgtctcgcccacgtactttcttatcaaccagatattcctcgacgctggctttggcggccgcatgaccgctgtccgggaaacccaggatggccagcttgaccttgagtatcttgcagagaagctttcggagtttgacgcagagcatccatccactgaggcactcacggaaccgcggcgcacaccgcctaaacgcacctaccgatacgtcatgtatctgataccgacatattcgaatcctagcgggtccacatactccctagagacacgcacgcgcttagtcgagctggcgcgccgctatgatatgctgctcatctcagatgacatctacgatttgctcgcttacgaccaaccgtccgatcaattgcctcgcgcattgcctagccttgtgcacgtggaccgcgccaccctgaacgaagaacaggatagctggggccataccgtggcaaacgccagtttctcgaagattgttgcgccgggtctgcgctgtggttaccaggaatccgtgacctctcgcctggtcggacagctggccaatgggggcgccaacgtgtccggcggctcgcccgcccagctcaacagcatgataattggcaccctcatctccacaggcgaactggcacatctgctccagttgctacgcagtgtttaccaagaccgcgcagaggttttgcaccgagctgtgcgtgaatatctgcccgctgcaaccgattacaaagcacaaaacggcggctatttctcctggtgcacgctgcccgagggctacaactcagaagcgatctgccgcacgctgcagcatgactacggtgttgtattagccaatgggtcacactttgaggtcagcgacgatgagctcgggtggggccgccgctccgtgcgcctctcagtcagctttttagaaccagcggagatcgaagaaggcatgcgcaggtttggagcggtatgccaagagcacgccactgccctgggcctgcctttctag

SEQ ID NO: 152346 - protein, 438 aa, Ashbya gossypii
MGDGSQINFFKGHPSVRLLPRESIIKSTKELLEPEHRGYDQNPEDCHPLTYGSEQGSLWVRSAIATLINDCYRPEKATRAEHVNLTGGASYGIMNILMQTTLAHAGYTRRAFLVSPTYFLINQIFLDAGFGGRMTAVRETQDGQLDLEYLAEKLSEFDAEHPSTEALTEPRRTPPKRTYRYVMYLIPTYSNPSGSTYSLETRTRLVELARRYDMLLISDDIYDLLAYDQPSDQLPRALPSLVHVDRATLNEEQDSWGHTVANASFSKIVAPGLRCGYQESVTSRLVGQLANGGANVSGGSPAQLNSMIIGTLISTGELAHLLQLLRSVYQDRAEVLHRAVREYLPAATDYKAQNGGYFSWCTLPEGYNSEAICRTLQHDYGVVLANGSHFEVSDDELGWGRRSVRLSVSFLEPAEIEEGMRRFGAVCQEHATALGLPF

SEQ ID NO: 152347 - DNA, 1137 bp, Deinococcus radiodurans R1
  CDS (1)..(1137): transl_table=11
atgctcaaaaccgcccagaccaccctgacagagggcgtcatcaacctcgcggtagggcacccctcgctgcacatgctgccgctgcgtgaaatggaacaggccgccgcgcaccgcttcgcgcagggcaatgccgaatttttgcagtacggctacgagtggggcgacgggttcctgcgcaccgaactcgccgcgtatctgactcgtgaatacggctttcccgtgtctgccgagcagaccttcatctcgggcggcacctcgcaggcgattgacctgtgctgcgcgatgcttactcgccccggcgacacggtcatcgtagaagaccctacttacttttttgccttcggcatgttccgcgaccacggactgaacatcgtgacggcgccggtagacgagcagggcctcgacgtggacgccctcgaaacactggtggcgcagcaccggcccaagctcgtttacaccatcccggtgcatcaaaaccccgccggcgtgacgctgccgcaggaacggcgcgaaaagctggtgcggctggcgcaggagcacggctttaccatcctggccgacgaggtgtaccagctcctcacctttgagggcaccccaccgcccagtttcgccgcctgggccgacaccgggcaggtcgtcagcctcggcagcttttccaagattctggcccccggcacccgcctcggctggatcaatgcccgcgaggacgtgctggagcggctcgcgcaaaacggtgcgctggtgagcggcggcggctacagcccgctggggggcggcatggtccgcagcatgctggagctggggctgctccccgagtacatcggcaagctgcgcgaaacctttcgccgccgctcgcgggcgctggcagacgcgctcgacgaactgcgcccgctggggctggattttcagcggcctaccggcggatatttcatctgggtgacgctgcccgctggcgtgtcggccaccgaactgttgccccgcgccctcgaccacggcgtgcgctttcagcccggtcctctcttttctccgaacggcacccagaccgacaaagcgcggctgtgcttcgccttctatgaggaagcagaattggtggaaggcgtgcggcggctgggcgaagtgttgcggcaagtcagataa

SEQ ID NO: 152348 - protein, 378 aa, Deinococcus radiodurans R1
MLKTAQTTLTEGVINLAVGHPSLHMLPLREMEQAAAHRFAQGNAEFLQYGYEWGDGFLRTELAAYLTREYGFPVSAEQTFISGGTSQAIDLCCAMLTRPGDTVIVEDPTYFFAFGMFRDHGLNIVTAPVDEQGLDVDALETLVAQHRPKLVYTIPVHQNPAGVTLPQERREKLVRLAQEHGFTILADEVYQLLTFEGTPPPSFAAWADTGQVVSLGSFSKILAPGTRLGWINAREDVLERLAQNGALVSGGGYSPLGGGMVRSMLELGLLPEYIGKLRETFRRRSRALADALDELRPLGLDFQRPTGGYFIWVTLPAGVSATELLPRALDHGVRFQPGPLFSPNGTQTDKARLCFAFYEEAELVEGVRRLGEVLRQVR

SEQ ID NO: 152349 - DNA, 1263 bp, Deinococcus radiodurans R1
  CDS (1)..(1263): transl_table=11
atgcggtgcatgacccccgcttccaccggccccgtctccactggtcctgtccctattggccccgacctcttggcctgcatctcgcgccgcgcccagaccatgacggcgagcgccatccgcgaaatcctgaaaatcacccagcagcccgacgtgatttctttcgccgggggcctgcccgcaccggagctgtttccgctggacgccgtgcggcaggccgctgaaaccgcgctcagcaagtacggccccgccgcgctgcaatactcgaccaccgagggccacctgccgctgcgcgagtggattgctgggcgtcacggcatccccgccgcgaacgtgcagatcgtgaccggcagccagcaggggctcgacctgctcggcaaaattctgattgacgagggcgacctcgtgctcgtcgaggcgccgacctacctgggcgccctgcaatcgtttcagccgtacctgccgcgctacgccgagatgcccaccgacgagggcggcattgacgtggacgcgcttgccacgctgctcgccgggctggcggcgcagggagaaaagcccaaactgctctacgccatccccaacttccagaaccccaccgggcgcacgctgagtttggaacgccgccgccgtttggtcgagctgaccgcgcagtacggtgtgctggtcatcgaggatgacccctacggccagttgcgcttcagcggcgaggcgctgcccagcctctacgagattggtctggaactcgcgggcgacgtggaccgcaatcacgtcatctacagttcgagcttttccaagacgctggtgccggggctgcgcgacgcctgggtggaggccgccgcgccggtcatcaccaagctgattcaggccaaacagggcgccgacctgcacacgccgacgctcaaccagatgatgattaccgagctgctgccgctgctccccgcgcaaatcgagacggtcaaggccgcctaccgcgagcgcggcgcccacatgctcagccagatggacgaatttttcccggcgggcgtgacctacacccggccccagggcgggatgttcctctgggtgacgctgccggaaggcgtggatacggtcgcgctgctgccccgcgccgtggaaaacaaggtggcctacgtccccggtcagcccttttttgccctcggcggcggcgccaacaccatgcgcatgagctacagcagcgcgacccccgagcagattacccaggggatgcgcgcgctcggcgccactttccgcgaggccctcggttga

SEQ ID NO: 152350 - protein, 420 aa, Deinococcus radiodurans R1
MRCMTPASTGPVSTGPVPIGPDLLACISRRAQTMTASAIREILKITQQPDVISFAGGLPAPELFPLDAVRQAAETALSKYGPAALQYSTTEGHLPLREWIAGRHGIPAANVQIVTGSQQGLDLLGKILIDEGDLVLVEAPTYLGALQSFQPYLPRYAEMPTDEGGIDVDALATLLAGLAAQGEKPKLLYAIPNFQNPTGRTLSLERRRRLVELTAQYGVLVIEDDPYGQLRFSGEALPSLYEIGLELAGDVDRNHVIYSSSFSKTLVPGLRDAWVEAAAPVITKLIQAKQGADLHTPTLNQMMITELLPLLPAQIETVKAAYRERGAHMLSQMDEFFPAGVTYTRPQGGMFLWVTLPEGVDTVALLPRAVENKVAYVPGQPFFALGGGANTMRMSYSSATPEQITQGMRALGATFREALG

SEQ ID NO: 152351 - DNA, 1209 bp, Ralstonia solanacearum GMI1000
  CDS (1)..(1209): transl_table=11
atggatttcctgcaatcgttgctcgccccccgcctgcaaaacgtcgagacttcggccatccgcgaactcttcaaggtgctcggcaagccgggcctgatttcgtttgccggcggctttccggatgcggcgctgttcgacgtcgagggcctgaaggccgccgccgacagcgcgctcgccaccgacgcggcgcgcgcgctgcaatacggcgccaccgaggggttcgagccgctgcgcgaagccatcgtcacgctgatgcaggcgcgcggcgccacggtggccaacaccgacatcctcgtcaccaccggctcgcagcaggggctggacctgctgggcaaggtgctgatcggcgaaggcgacacggtgctgaccgaggccccgaccttcctcgccgccatccaggccttcaagctgtatggcgccaaggtggccggcgtgccgaccgatgaagacggcctggacctcgatgcgctggagcgcgcgctcgccgccggccgccccaagttcctctacgtgatccccaacttcggcaacccgagcggcgcgctgatgagcctggagcgccgccggcgcctgctggcgctggccgtgcgccatgacctgctgatcgtcgaggacgacccgtatggcgagctgtacttcgacgcgccgccgccgccttcgctgttcgcgctcagccagcagaccgacggcgcgcagggccgcgtggtctacctgggcagcctgtccaaggtggtggcgccgggcctgcgggtgggctggatgatcgcgccgtcgctggtgctgtccaacgcggtgatggtcaagcagtttgccgacgcgcacacctccaccttcgcgcaggccaccgccgccgcctacctgcgcagccagcgcatggagaccgtgctgccgcgcacgcgcgccgcctatgccgagcgcgcccacgccatggccgacggcctgcgcgcgctgctgcccgaggccgaactgaccttcaaccgtccgcgcggcggcatgttcctgtggggtcgcctgcccggccgcaacgcggcggacgtcgcccggatcgccatcgagcgcggcgtggccttcgtgccgggggcggcgttctatccggtcgatccggaccgctcgacgctgcgcctgtcgtatgccacctcgtcgcttgcccaggtggaggagggggtacgcaagctggcgggggcgatcggcgagctggcggccgcctga

SEQ ID NO: 152352 - protein, 402 aa, Ralstonia solanacearum GMI1000
MDFLQSLLAPRLQNVETSAIRELFKVLGKPGLISFAGGFPDAALFDVEGLKAAADSALATDAARALQYGATEGFEPLREAIVTLMQARGATVANTDILVTTGSQQGLDLLGKVLIGEGDTVLTEAPTFLAAIQAFKLYGAKVAGVPTDEDGLDLDALERALAAGRPKFLYVIPNFGNPSGALMSLERRRRLLALAVRHDLLIVEDDPYGELYFDAPPPPSLFALSQQTDGAQGRVVYLGSLSKVVAPGLRVGWMIAPSLVLSNAVMVKQFADAHTSTFAQATAAAYLRSQRMETVLPRTRAAYAERAHAMADGLRALLPEAELTFNRPRGGMFLWGRLPGRNAADVARIAIERGVAFVPGAAFYPVDPDRSTLRLSYATSSLAQVEEGVRKLAGAIGELAAA

SEQ ID NO: 152353 - DNA, 1323 bp, Strongylocentrotus purpuratus
  CDS (1)..(1323)
atggagcacaaacgggtttctgttgatgctcttgggcgaatgtccaacgatgaacttaaaagacatggctatttcgcatctgaacaagctgagttgaattttaatcttagccctggcatgattgcgctttcttcgggtagacccggggaagacatccttcgcaaatcatcgcttgaaattcagaaggctacacaccgccgattcactgaagagttagccgatgattgcgatctccttcagtatggatcattgcaaggtgaccccacgtttcgtattcagatggccaagtttcttacaagaaggtaccagagccctgttcacagcgacaacatcttatgcaatgctggggctagccaaggactgaacttcctatcgacccacttcttcaagaagggcgatgtagtctttgtagaagaccctacatacttccttgccctcgcagcctttcaacatgatcagcagcttaatgtagtaccagttgctaaggaagatgatggtgtagatacggaagatctggagaagaagctatcggagcatctaggagacaggcaaccagatgatacgagaccgtttcgtagcttactctacctcatcccctgctttcacaatccaactggatcatgcacttcttcagaaaaaatgaagagtataattaggatggccagaaagtatgacttgctcgtggtgtgtgatgatgtctacaatgtgttgtcatggcaaccagctgacgaaggcagtgaccggaaatacaagtgtcctgctcgcctcttcgccttcgacaatccctctgatcccgacttcaaggggaacgttgtatccaacggtagcgtatccaagttccttgcgcctggattgagactgggctggtttgaggcttcagatcgcatcatcaatctcatgatgaagaatcaatacctggacagcggtggatccttcaatcacttaacaggaggcattgtgggtacaatgctcaagatgggaatcgtagacgatcatctagactttgtctgcaaccattttaagacaaatgtagacgtcatgacgaaggttctcaaagaagaattgccacctggagtgaaattttctactccagaggggggatatttcttctggcttgagctgcccaagagtgtggatgttgctaagctttctgcagtgtgcagagagaagtataaggtcaactttgctccaggccgaaatttttcctccaccccaaagtttgaccacttcatccgactgtccttcagctactaccctgcagagaagctagtagacggggccaagaagatatgccaagccatcaaagaggtcatggggtcgtag

SEQ ID NO: 152354 - protein, 440 aa, Strongylocentrotus purpuratus
MEHKRVSVDALGRMSNDELKRHGYFASEQAELNFNLSPGMIALSSGRPGEDILRKSSLEIQKATHRRFTEELADDCDLLQYGSLQGDPTFRIQMAKFLTRRYQSPVHSDNILCNAGASQGLNFLSTHFFKKGDVVFVEDPTYFLALAAFQHDQQLNVVPVAKEDDGVDTEDLEKKLSEHLGDRQPDDTRPFRSLLYLIPCFHNPTGSCTSSEKMKSIIRMARKYDLLVVCDDVYNVLSWQPADEGSDRKYKCPARLFAFDNPSDPDFKGNVVSNGSVSKFLAPGLRLGWFEASDRIINLMMKNQYLDSGGSFNHLTGGIVGTMLKMGIVDDHLDFVCNHFKTNVDVMTKVLKEELPPGVKFSTPEGGYFFWLELPKSVDVAKLSAVCREKYKVNFAPGRNFSSTPKFDHFIRLSFSYYPAEKLVDGAKKICQAIKEVMGS

SEQ ID NO: 152355 - DNA, 1422 bp, Magnaporthe grisea 70-15
  CDS (1)..(1422)
atggctacaacaactcccaagcaactggacccagccaatgccaagcgccagatcaacctgatacgtggatggccggcaccacacacgctgccggccgagcatctccggaccgcagcggaccgcatgctcacggaacccgacgtcttcgtcccaggcctgcagtacgccccggacccgggctttcaaccgctgcgggaggagctcgcgcgcttcatggccccgtactactaccacagtcgggggcgcacgccggacccggcccgcatctgcatcactggcggcgccagccagaacctgggctgcgtgctcagctcctttacggaccccggcttcacaaaggctgtctgggtcgtcgcgccgtgctatcacctctcgaatcccatctttgaagatgcagggttcaggggacgtctgagagccgttccggaggatgacgagggtattgatctggagtggttggagaggggtttgaaggagtttggctctgatgacccaagcgagcctgtctttaaaaacctagccccttcacgtaaggcataccgtcatgtcatctactgcgtgcccaccagcgccaacccctcgggcaaaaccatgagcgtggcgcggcgcgaggggctggtccggctggcgcgggagtatgacgcgctggtgataagcgacgacgtctacgactttctacagtggccactcgggcaacaacggcaggggtccccgcagcagcagtacatccctcccctgacgccgccgccgcgcctggtcgacatcgaccgagacctgacggacagtctcggtgcgagccgtttcgactcgggcggcttcggccacaccgtgagcaacggttcattcagcaagattatcgctcccggggtgaggaccggctgggccgagggcactcccgcctttgccctggggctggccacaacggggagcaacaagagtggtggcgcagcaagccagctcgccgctgtgatgatttgggagatgatacgcaccggcgccctagcggcccacatagacgggaccgtacgcccagacttgcaaaagaggcacgccctgctgctcaacgccgttcggcagcacctctccccgctgggcgtgacctttgaggagccgaagtcgacgtacggtggatactttgtgtggctgacgctgccggacagcggaccatcggcgagcatcgtagccagccgcgcgctgcaggacgaaaacttgatcctcgccgccggtagcatgttccaagtcaagggcgatgaggatgcggtgcggttcccacggaacctgaggctatgcttctcctgggagaacgaggataccattgttgagggcgttgagaggctggccggtttgcttaagcgattgcaggacgagccgcctgtggaggagaaggatcaagatgagcaaaagtcgtttgggtttgtgtag

SEQ ID NO: 152356 - protein, 473 aa, Magnaporthe grisea 70-15
MATTTPKQLDPANAKRQINLIRGWPAPHTLPAEHLRTAADRMLTEPDVFVPGLQYAPDPGFQPLREELARFMAPYYYHSRGRTPDPARICITGGASQNLGCVLSSFTDPGFTKAVWVVAPCYHLSNPIFEDAGFRGRLRAVPEDDEGIDLEWLERGLKEFGSDDPSEPVFKNLAPSRKAYRHVIYCVPTSANPSGKTMSVARREGLVRLAREYDALVISDDVYDFLQWPLGQQRQGSPQQQYIPPLTPPPRLVDIDRDLTDSLGASRFDSGGFGHTVSNGSFSKIIAPGVRTGWAEGTPAFALGLATTGSNKSGGAASQLAAVMIWEMIRTGALAAHIDGTVRPDLQKRHALLLNAVRQHLSPLGVTFEEPKSTYGGYFVWLTLPDSGPSASIVASRALQDENLILAAGSMFQVKGDEDAVRFPRNLRLCFSWENEDTIVEGVERLAGLLKRLQDEPPVEEKDQDEQKSFGFV

SEQ ID NO: 152357 - DNA, 1440 bp, Gibberella zeae PH-1
  CDS (1)..(1440)
atgagaacgaaaacaactcacgcttcagaggttgcctcagatcctcaatcgggaaaacatcaaatcaatctcattcgtggctggccaaacccaggtcttcttcctgttgatctcatctcagcagctgcccagcgtaatctttctgacccgtccatttacgtcccggccctacaatatggtgctgatccaggataccagccactgcgtgaagcattggcgacctggttgtctgagcactaccatgtcgagcgcgatcccaatcgcatttgtatttcaggcggcgcaagtcagaatgtcgcatgcattctacaaagctttactgaccctcacgtaacccaagccgtgtggtgtatttctccatcttaccatctagtctttcaggtctttcgagataatggctttgatggcaggctgagagctacgcctgaagacgaagagggtgttgacgttgagacactagaggctaaaatcgccgagtttgagaagaatgccccagaagccaagcctcctttgagcgatgctgggaaggaccgtaaacattatcgtcatgtcatctacgctgttcccacatgctcgaatccttctggcaagacgatgtcactacgtcgtcgagaagcgctcgtccgacttgctcgcaaatatgacgctctcattatctgcgatgatgtttatgacttcctccagtggcgcattgacagcaatcctaaccaagtatctgcgcgtgtggacgaccaggagcaccctgagatgctactccctcgcctatgcgacatcgacctcgccatgggacaagcggacaatgatccccaaggttttggccatgccataagtaacggatctttcagtaagcttgtcgggccaggaatgcgaactggttggctggaaggctcgcccgcgtttgcttatggtcttgctcagactggtgcaaccaagtccggcggttcacccagtcagttctgtgcatctttgatggccgatctattgcagtctgggtctctccaggatcgacttgctacaacaataaggcctcagcttcagcaccgtcatcggatcatgatggaagcaattcacaaacacctgggacccctgagtgttggcattcgagatgctggtctccctgagggactcgtttacgggggatactttgtgtggctcacgttcgaagaaggaatctcagccaaggttgtttcccaagctgcgatagcggaagagaacttggtggtcggtaatgggactatgttccaagtgcctggagatgagaagacggttcatctggacaacgcggtccgactgacattcgcgtatatcccagaggaagacttgactgagggcgttgagaggttagcgggcgtgctgcgaaggatcaaagaaaaccctgaaaagtacaaagcatctgccagcacgactgcagatagcgacatcattaatgccaacaaataa

SEQ ID NO: 152358 - protein, 479 aa, Gibberella zeae PH-1
MRTKTTHASEVASDPQSGKHQINLIRGWPNPGLLPVDLISAAAQRNLSDPSIYVPALQYGADPGYQPLREALATWLSEHYHVERDPNRICISGGASQNVACILQSFTDPHVTQAVWCISPSYHLVFQVFRDNGFDGRLRATPEDEEGVDVETLEAKIAEFEKNAPEAKPPLSDAGKDRKHYRHVIYAVPTCSNPSGKTMSLRRREALVRLARKYDALIICDDVYDFLQWRIDSNPNQVSARVDDQEHPEMLLPRLCDIDLAMGQADNDPQGFGHAISNGSFSKLVGPGMRTGWLEGSPAFAYGLAQTGATKSGGSPSQFCASLMADLLQSGSLQDRLATTIRPQLQHRHRIMMEAIHKHLGPLSVGIRDAGLPEGLVYGGYFVWLTFEEGISAKVVSQAAIAEENLVVGNGTMFQVPGDEKTVHLDNAVRLTFAYIPEEDLTEGVERLAGVLRRIKENPEKYKASASTTADSDIINANK

SEQ ID NO: 152359 - DNA, 1272 bp, Apis mellifera
  CDS (1)..(1272)
atggaaacaataagtgatccatatcgaagacatctattcgacaacgattctatatttaatgtttacaatgaagaaacaacgaatttatcagttggtgctcccggccctgatctactccaatattgtgtagaaatgataaaaaaagcaacagatcatcgattggaagaagaaaagaaagaaggaaagtattatttgtttcaatatggcatcacagcaggcttatgggaatgtcgtgaagaattagcaaaatttttaactagacgttacggtgatcctgtaaaacgtgaaaatttaattttaacatgtggagcttcacatggtctgcaacttttattgaatactattatcgctccaaatggaataatatttgtagaggaagtcacttatatgatagccttagatacttttaaacaatttccattaatgaaaataatcacagtaccaatgaaaaacgatatggtagatgttaatgcatttgaaaaaatagttatggaacagaaatgtgaccataattttttaacaaatgagcaaaaaatattctgggctatgttttatacaatacccacttttcataatccaactggatcaactttacttgttggaaattgtaaacgtctcgttgaaatagcacgaaaaaattctataataatcgtttgtgatgatgtatacaacttattgtattatggagatggtttaccaccacatagattatttttttatgaccaaccaacagattctgaatatcgagatggcaatattatatctaatgggacattctcaaaaattttttctcctggtcttcgtttcggatggatagaatgtagtccacgaattgccaagatttttagacaatcaggaattttatgcagcggtggtgcagttaatcattatatatccggtattgtcacaagtttattacaattaaatatgcaagataattacctcgataaattaatacaaatatataaggaacgattatctgtattatgtaatatattggatcattgtttaccacaaggctgttcatataaaagaccagaaggtggttattttgtatggattcatcttcccttagatataaaagctagtaattttattgaatggtgtcaagaaacatttaaagtatctgccataccagggatacgtttttcatatttagaaaaatctaataattttctacgacttagtataagttttcataaaaaagaaattttagaaactgccacaaaaactctttgcaaagctctttttaattatatgcataatgtataa

SEQ ID NO: 152360 - protein, 423 aa, Apis mellifera
METISDPYRRHLFDNDSIFNVYNEETTNLSVGAPGPDLLQYCVEMIKKATDHRLEEEKKEGKYYLFQYGITAGLWECREELAKFLTRRYGDPVKRENLILTCGASHGLQLLLNTIIAPNGIIFVEEVTYMIALDTFKQFPLMKIITVPMKNDMVDVNAFEKIVMEQKCDHNFLTNEQKIFWAMFYTIPTFHNPTGSTLLVGNCKRLVEIARKNSIIIVCDDVYNLLYYGDGLPPHRLFFYDQPTDSEYRDGNIISNGTFSKIFSPGLRFGWIECSPRIAKIFRQSGILCSGGAVNHYISGIVTSLLQLNMQDNYLDKLIQIYKERLSVLCNILDHCLPQGCSYKRPEGGYFVWIHLPLDIKASNFIEWCQETFKVSAIPGIRFSYLEKSNNFLRLSISFHKKEILETATKTLCKALFNYMHNV

SEQ ID NO: 152361 - DNA, 1311 bp, Candida glabrata CBS 138
  CDS (1)..(1311)
atgagtatggaccaacctgccagaatcaacttcttcaaaggacaccccagtttccggttgttgcctaatgaagagatagtagaagccaccagacaattgctcaccagcgaaactagagattatgacgatgacacaaggaataggcacccattgacatatggtcctgatgaaggcgctctatgggtgaggcaacagatatgtgatttcaacaacaggctgtttggtagtgactcaaaaccggagtttttaaacttgagcagtggttcctcatacggatgcctgagtgtcttattacatactacattacctcacacaaattttactagacaggcgttcattatatcaccaacttattttctgatcaatgattgttttattgatgctggatttggttcaaagctaactgcaattgatgaggaaggagaagactccattaactttgaacaattactaagcaaattgaggcactttgaagaattatatggtaatagcaatggcgatgtatcgattatccagaacccaaataaaccaacaaaaaaggtgtacaaatatgtaatgtactgtgtgccaacctttgcaaatccgagcggcaagagttactctttggaaacgagaactaaattgatagagatagcaagaagatatgatatgttaataatatgtgatgatgtctacgatctattagattactcgacagatgttcatgagtggccaagacctcaaaaaaggcttgtacatattgatagggctacggcacctgatgataatgaatttggcaacactatatctaatgcgacattttccaagatcattgcccctggtctaaggtttggttaccatgagactataaatgataaattagctgctcagctctctagaggtggtgccaatgtgtctggtggtacaccttcacaattaaattcaatgatagttggcaccatacttcaaaatgggagtatggaaagaatattaggtaaactaagagaaacttataaaactagatcagttgcaatgtgggattcattgcagaaacacatgccaaaggacacacatatctcgtctcccaaaggtggctatttcgtttgggtaaccttaccacccgggtatgatgccaagaaaataggaaaaaagctaaaagatgagcatggagtaatactggcaaatggatcagactttgaagttataggagatgaaagagggtggggtgacagatcagtgcgtctttccattagttttctcgagactcctgatatcattgaaggttgcgagttatgggggaaagtgtgcaaggagatggcacccagttcatag

SEQ ID NO: 152362 - protein, 436 aa, Candida glabrata CBS 138
MSMDQPARINFFKGHPSFRLLPNEEIVEATRQLLTSETRDYDDDTRNRHPLTYGPDEGALWVRQQICDFNNRLFGSDSKPEFLNLSSGSSYGCLSVLLHTTLPHTNFTRQAFIISPTYFLINDCFIDAGFGSKLTAIDEEGEDSINFEQLLSKLRHFEELYGNSNGDVSIIQNPNKPTKKVYKYVMYCVPTFANPSGKSYSLETRTKLIEIARRYDMLIICDDVYDLLDYSTDVHEWPRPQKRLVHIDRATAPDDNEFGNTISNATFSKIIAPGLRFGYHETINDKLAAQLSRGGANVSGGTPSQLNSMIVGTILQNGSMERILGKLRETYKTRSVAMWDSLQKHMPKDTHISSPKGGYFVWVTLPPGYDAKKIGKKLKDEHGVILANGSDFEVIGDERGWGDRSVRLSISFLETPDIIEGCELWGKVCKEMAPSS

SEQ ID NO: 152363 - DNA, 1338 bp, Kluyveromyces lactis NRRL Y-1140
  CDS (1)..(1338)
atgggcgaaaatcagagaccgattaacttctttaaagggcatccatcattccgtttgttacctcgcgaagcaattgtcgaggctaccagtcaattattattacccgagtgcagagattatgatgatattgatgaagatagacacccattaacgtacggtccagatgagggttcaaagtgggttcgcacagcgattgctgccttcagtaatgactgtttccagttgccatcggaagagatgaaaaccaagccggagcatatcaatttaacagctggagcatcatacggtgtcatgaatattttggaacaaaccactttaccacacaccggttataccagacaagcgttcatagtgtcaccaacatatttccttatcaatgagacatttatcgacgcagggttcggtgggaagttgaccgcaattgatgaactgggccacggaaagatcgactttgacactctacagcaaaagttggaatattttgattccatatctaacgacaacagctcagaattgcaattaataactgcacccaatgcgaacaaaaaagtgtatcgttatgtcatctatttggttcccacttattctaaccctggaggtcagacctattctttagaaactagagtgaaattaattgaacttgcaagaaagcatgacatgttgattgtatcggatgatgtttacgatttattgagatatgatgactctcttgatgaacttcctcacccacttccacgactcacccacgttgatagaatgtcatataagcatggtgatagtggctatggtaacactatctcaaacgctactttttcaaagataatcgcaccgggtttaagatttggataccaggaaactgtgaatgaaaatttggcttatcaactttctcaaggtggagccaatgtttctggtgggacgccgtcacaattaaattcaatgattgtgggtaccttaatacaaaatgggaaagcgaaagaaatcatctgcagcttgaggaaggaataccagctaagagcagcttgtctctatcaatcggtaaaaagctacttgccaagggcaactcaatatcacctgcagcttggtggatatttttcttggtgtacattaccagagggttacgatgctaaaaaaatcggtcaagagttaaaagagaggttcaatgttactctagctaatggcagctcttttgaagttattggagatgaaaggaattggggtgaaagatctgttagattgtcaaatagcttcctcgagattgcagatattgaacaaggtattaagttatggggaactgtatgtgaagattatgctaaaagacataacctaccattccgttag

SEQ ID NO: 152364 - protein, 445 aa, Kluyveromyces lactis NRRL Y-1140
MGENQRPINFFKGHPSFRLLPREAIVEATSQLLLPECRDYDDIDEDRHPLTYGPDEGSKWVRTAIAAFSNDCFQLPSEEMKTKPEHINLTAGASYGVMNILEQTTLPHTGYTRQAFIVSPTYFLINETFIDAGFGGKLTAIDELGHGKIDFDTLQQKLEYFDSISNDNSSELQLITAPNANKKVYRYVIYLVPTYSNPGGQTYSLETRVKLIELARKHDMLIVSDDVYDLLRYDDSLDELPHPLPRLTHVDRMSYKHGDSGYGNTISNATFSKIIAPGLRFGYQETVNENLAYQLSQGGANVSGGTPSQLNSMIVGTLIQNGKAKEIICSLRKEYQLRAACLYQSVKSYLPRATQYHLQLGGYFSWCTLPEGYDAKKIGQELKERFNVTLANGSSFEVIGDERNWGERSVRLSNSFLEIADIEQGIKLWGTVCEDYAKRHNLPFR

SEQ ID NO: 152365 - DNA, 1323 bp, Debaryomyces hansenii CBS767
  CDS (1)..(1323)
atgtcaaaaagtacacaaccactcattaactttctcaaggggcatccgacaaacagtttgcttccttccaaggagattgctaattcctacaagaacgtattattagagtacgactacactaaatatgataacgatccattgaacagacatgcgttgacatatggtgcagatgcgggtaatttggacacgagaaaggctatcagtaagtggaatgataagtattttggaaggaacggcacggatcctgattgtattaatcttacgggtggggcatcatatgggtttgccaacattttggcctcgatgaccgacaccaaggatatcactcggagagggtttattgtttcgcctacatactacttaattactccttcgttcattgatgctggttttgaagataaattgacggctgtggttgagactccggggcaggaatacgaaattgacttgaaatttttggaggagcagttggagttctacgatagaggattaccaccggttgggaacaaagaaataaacattatttctgatccatctggaagacctgaccgtaaattgtatcgttatgtgatctatattgttcctacatattcaaacccaggaggattggtctattccgcaaagacaagaactaagttgatagaattggcaagaaaacacgatatgttaattgtgagtgacgacgtttatgagttattgaactacactgatgctgacactccaataccacgattctgctacttagaccgtgactcactccctgaagatttcaagtttggtaactcaatctccaacgcaaccgtttccaaacttctcgctccgggactcaggtttggatggcaagagactcccacccctaatttagtgcagcagctagctataacaggtgctaacctttctggaggtacccctggtcagcttgcctctattgtggtgcaagacttaattacaagtggtcaagccgacattattatagccggtcttatcaaggtatacaaatcaagagcacaaacaatgattagaagtatcaagaaatacctccctgcgtgcaccaacgtatacggaggtgaaggaggttatttcttgtgggtgacaattaatgccgatatcgaccacaccaaaatagtcgacatgttaaaagaagaacataacatcattcttgcgtctggaaacaattttgaagtgtgtggcgatgagaaaggctggggtaagaacagtgttaggttatctgtcagctttcttaacgagcatgaaattgaaaaaggtatcagaaaatggggagacgtgctccgcagaaagcatatagaggtattcaaaaactag

SEQ ID NO: 152366 - protein, 440 aa, Debaryomyces hansenii CBS767
MSKSTQPLINFLKGHPTNSLLPSKEIANSYKNVLLEYDYTKYDNDPLNRHALTYGADAGNLDTRKAISKWNDKYFGRNGTDPDCINLTGGASYGFANILASMTDTKDITRRGFIVSPTYYLITPSFIDAGFEDKLTAVVETPGQEYEIDLKFLEEQLEFYDRGLPPVGNKEINIISDPSGRPDRKLYRYVIYIVPTYSNPGGLVYSAKTRTKLIELARKHDMLIVSDDVYELLNYTDADTPIPRFCYLDRDSLPEDFKFGNSISNATVSKLLAPGLRFGWQETPTPNLVQQLAITGANLSGGTPGQLASIVVQDLITSGQADIIIAGLIKVYKSRAQTMIRSIKKYLPACTNVYGGEGGYFLWVTINADIDHTKIVDMLKEEHNIILASGNNFEVCGDEKGWGKNSVRLSVSFLNEHEIEKGIRKWGDVLRRKHIEVFKN

SEQ ID NO: 152367 - DNA, 1296 bp, Yarrowia lipolytica CLIB122
  CDS (1)..(1296)
atgatcaacctgttcaaaggccaccccagcgacgacttatttccggaaaaggaagtgttggccgccgccgcgtcattgctgtcacgtgaccgcccggaagacgacgacgacgaaaaccgacatccccttacctatgggcctgatcagggtgctttgtacgtccggcagctgatcgccaagtgggtcacggagcgggagctgctggaaaagactccgattgccgccaattgcattaatctcacctgtggcgcttcttttggttttgcagatattctgcagtcttgcactcttccccagactggttacactcgacgggcattcattgtttcgccgtgctactacctcatcaattcggttttcattgattgtgggttcaagggcaaactgaccgcaattcgagaggatttcggacgcctggatctgaccaaactggaagcggatctggagaagtactcttccgaggagggccatgaacacgaaaagtcacctctggacgttgtgggagacgaatcgcgacccaccaagaagatttacaagtttgtcttctactttgtgcccacattcagcaaccccggaagtgcaatcatccctctggaggacagagtcaagctgctggaactcgctcgaaagtacgacatgctcattgtgtctgacgacgtgtatgactttctggagcactcgattgagcgggagaatctgcctcccagaatggtcaccctcgatcgtgagactgtaacctctacccatggaaacacagtctccaacctcagctgcagtaaactactgggccctggtctgcgtgttgggtggcaggagactgctaccggcgctctcgccctccaactggccgattccggtgcctctagatctggaggtacccctgctcacctcaacaccatgattgtgggcgagatgattaagctgggtctgtttgataaggtcgttaaccatctcaacaagatttacaatgcacgagctaccgtctacaaggaagccctcaagaaataccttcccgaaggtacccatatcgagggtggcgatggaggctacttcatttgggtgactctggacaaagtggatgcgcgaaagatggttgagcttgccaaggagcgaggtctggttctggcgtctggagacaaatttgaggtaaatggtgatccccagaactggggaaagaccagtgtccgtgtctctgttagttatactgatgctgataaggctctggagggaatcaaaatctggggcggggtttgcgatgatctgatcaagtgggacgaggccattgatgtgtgttaa

SEQ ID NO: 152368 - protein, 431 aa, Yarrowia lipolytica CLIB122
MINLFKGHPSDDLFPEKEVLAAAASLLSRDRPEDDDDENRHPLTYGPDQGALYVRQLIAKWVTERELLEKTPIAANCINLTCGASFGFADILQSCTLPQTGYTRRAFIVSPCYYLINSVFIDCGFKGKLTAIREDFGRLDLTKLEADLEKYSSEEGHEHEKSPLDVVGDESRPTKKIYKFVFYFVPTFSNPGSAIIPLEDRVKLLELARKYDMLIVSDDVYDFLEHSIERENLPPRMVTLDRETVTSTHGNTVSNLSCSKLLGPGLRVGWQETATGALALQLADSGASRSGGTPAHLNTMIVGEMIKLGLFDKVVNHLNKIYNARATVYKEALKKYLPEGTHIEGGDGGYFIWVTLDKVDARKMVELAKERGLVLASGDKFEVNGDPQNWGKTSVRVSVSYTDADKALEGIKIWGGVCDDLIKWDEAIDVC

SEQ ID NO: 152369 - DNA, 1314 bp, Aspergillus nidulans FGSC A4
  CDS (1)..(1314)
atggattacgacacagttgatctcttcacgggatggcccaatccgtcgctcctccctacgggcgcgctcgcggacgcattcgccacggtgatggccgaccccgccatccgcacgccggccctgatgtacggccccgacgaggggtacgggccactgcgcgagcacgtcgctcaatggctgacttcattctaccgtccagccgaccctgtcacaggcagtcgtatctgcatcacgggcggcgcaagtcagaatctcgcctgtatcctgtcggtcttctccgacccaagctatacgcggaatgtctggttggtggcgccgacctaccacctggtctgccgcatttttgatgatgcaggtttcgcgggccggctgagagccattccccaggatgagcgcgggctggatttggattatctgcggcgggagttggctgccgccaatgaccgcggggctaagggggatagggaaccgattacacctctacggccatgggcgaggctctacagacatgttatctatgcaacgcccgcgttctcgaatccgtctacgataacaatgtcacggtcggaccgcgaggctctcgttcggctggcgcgcgagttcgatgccctcgtggtcacagatgatgtctacgatttcctgcaatggccgtccgatcccgagaagccgctcgacgggcccgcgaccgccttacaccctcgtctcgtagacgtcgaccggtatctggacggcggcccgaaagacgaatggggcaacgtcgtgagcaacggcagtttcagcaagctcatcggaccggggatccgtacaggatgggcagagggttcaggaaaggtcgcctacggtatctcacaagcaggctgccagcgctccggcggcgccccgtcccagttctcatcgactgcggtcgaccagctcgtctcctccggtttcctccaaaagcacatcgacgaagtcctacgccccgcatacgcatcacgatactaccgcctgatgtccgctatcaaaacccacctttacccccttggtgtaacggtccccttcacgggaccatccgtcgcaggcggctacttcatctgggctgcattgccggggtccttgcgcgcgagtgacctggtcccggtcgcactgcaggatcaccgtgtgagagtcgctgcaggaactctgttccgagtccagggcgaccaggcggaggacaagaacgagtttgggtcatttatccgtctgtgcttcgcgtgggaaccggaggagaagctggcagaaggagtgcgacggttggcgagtgcgatccggcagatgatcgggcaacgaacatga

SEQ ID NO: 152370 - protein, 437 aa, Aspergillus nidulans FGSC A4
MDYDTVDLFTGWPNPSLLPTGALADAFATVMADPAIRTPALMYGPDEGYGPLREHVAQWLTSFYRPADPVTGSRICITGGASQNLACILSVFSDPSYTRNVWLVAPTYHLVCRIFDDAGFAGRLRAIPQDERGLDLDYLRRELAAANDRGAKGDREPITPLRPWARLYRHVIYATPAFSNPSTITMSRSDREALVRLAREFDALVVTDDVYDFLQWPSDPEKPLDGPATALHPRLVDVDRYLDGGPKDEWGNVVSNGSFSKLIGPGIRTGWAEGSGKVAYGISQAGCQRSGGAPSQFSSTAVDQLVSSGFLQKHIDEVLRPAYASRYYRLMSAIKTHLYPLGVTVPFTGPSVAGGYFIWAALPGSLRASDLVPVALQDHRVRVAAGTLFRVQGDQAEDKNEFGSFIRLCFAWEPEEKLAEGVRRLASAIRQMIGQRT

SEQ ID NO: 152371 - DNA, 1248 bp, Candida albicans SC5314
  CDS (1)..(1248): transl_table=12
atgataaacttcttcaagggccaccccaccagggaattgcttcctgtcaatgaaattgcagactcatacaaaagagtattgttagattccgattacttgtcttatgataccgaccccaacaaccagcacccattgcagtatggtactgacccaggtaatttagatgttcgtgaggttattgcccaatgggtcaacaaaaagtttggcgcacaggtctcagaccccaattgtatcaatttgactgctggcgcttcttatggtgttggcaatatattgacctcagtcacgtcccccaaaatcacccaacgggtatttgttgttactcctacatattttttgatcaatagttgtttcgtcgatgttgggttggacgacagattgactgcaattgaagagacacacaacggcaagtacagtattgatttggtgtatctcgagcagcaattgcaaaagtactcccaagacttggagccagtgcatgatgacattaatgtttttcccgaccctgttagaggaaccagaaagtattatcggttcgtaatgtaccttgttccaacattctcaaaccctggaggattgaactatactttagaaacaagacagaagttggtggagattgcaagaaaatatgacttgttgcttatcagcgatgatgtatacgagtttctcgactataccgattccaagccgttgcctcgattgaaccaattagataaagcgggtgccacgaagtatgggaacaccatttccaacgccacattctccaaaatcattgcaccggggttacgagtcggatggcaagaaactgcaaccccaaaattggtcgaccagctatccatcactgggtcaaacagatcaggcggcacgccaaaccagttgtcaaccctcgttgttgccgatttaataaagacaggaacaatagacgaaatcattgcgaaattcaaaaacgtctacaaagaaagagttgcggtgttgaaagagagtattgccaagtacttgccacaagacacacaagtatacggcggagacggaggatactttgtttgggtcgtcacaccgtcagcaaactgtttcgatgtagttgctaaattggctaaacaaaacgttgtgcttgctggcggtgaacattttgaagtcactggcgacaaaagaaattggggccagcactgtgttcgattgtcaattagttatttgacaaccgaagaaatccaacaaggaatcaagatttggggagaacttttagaatag

SEQ ID NO: 152372 - protein, 415 aa, Candida albicans SC5314
MINFFKGHPTRELLPVNEIADSYKRVLLDSDYLSYDTDPNNQHPLQYGTDPGNLDVREVIAQWVNKKFGAQVSDPNCINLTAGASYGVGNILTSVTSPKITQRVFVVTPTYFLINSCFVDVGLDDRLTAIEETHNGKYSIDLVYLEQQLQKYSQDLEPVHDDINVFPDPVRGTRKYYRFVMYLVPTFSNPGGLNYTLETRQKLVEIARKYDLLLISDDVYEFLDYTDSKPLPRLNQLDKAGATKYGNTISNATFSKIIAPGLRVGWQETATPKLVDQLSITGSNRSGGTPNQLSTLVVADLIKTGTIDEIIAKFKNVYKERVAVLKESIAKYLPQDTQVYGGDGGYFVWVVTPSANCFDVVAKLAKQNVVLAGGEHFEVTGDKRNWGQHCVRLSISYLTTEEIQQGIKIWGELLE

SEQ ID NO: 152373 - DNA, 1248 bp, Candida albicans SC5314
  CDS (1)..(1248): transl_table=12
atgataaacttcttcaaggcgcacgcggtgggggaatgtggtcctgtcaatgaaatcgcagactcatacaaaagagtattgttagattccgattacttgtcttacgataccgaccccaacaaccagcacccattgcagtatggtactgacccaggtaatttagatgttcgtgaggttattgcccaatgggttaacaaaaagtttggcgcacaggtctcagaccccaattgtatcaatttgactgctggtgcttcttatggtgttggcaatatattgacctcagtcacgtcccccaaaatcacccagcgggtatttgttgttactcctacatattttttgatcaatagttgttttgttgatgttgggttggacgacagattgactgcaattgaagagacacacaacggcaagtacagtatagatttggcgtatctcgaacagcaattgcaaaagtactcccaaaacttggagccagtgcatgataacattaatgtttttcccgacccaggtagaggaaccagaaagtattatcggttcgtaatgtaccttgttccaacattctcaaaccctggaggattgaactataccttagaaacaagacagaagttggtggagattgcaagaaaatatgacttgttgcttatcagcgatgatgtatacgagtttctcgactataccgattccaagccgttgcctcgattgaaccaattagataaagcgggtgccacgaagtatgggaacaccatttccaacgctacattctccaaaatcattgcacaggggttacgagtcggatggcaagaaactgcaaccccaaaattggtcgaccagctatccatcactgggtcaaacagatcaggcggcacgccaaaccagttgtcaaccctcgttgttgccgatttaataaagacaggaacaatagacgaaatcattgcgaaattcaaaaacgtctacaaagaaagagttgcggtattgaaagagagtatcgccaagtacttgccacaagacacacaagtatatggcggtgacggaggatactttgtttgggtcgtcacaccgtcagcaaactgtttcgatgtagttgctaaattggctaaacgaaacgttgtgcttgctggcggtgaacattttgaagtcactggcgacaaaagaaattggggccagcactgtgttcgattgtcaattagttatttgacaaccgaagaaatccaacaaggaatcaagatttggggagaacttttagaatag

SEQ ID NO: 152374 - protein, 415 aa, Candida albicans SC5314
MINFFKAHAVGECGPVNEIADSYKRVLLDSDYLSYDTDPNNQHPLQYGTDPGNLDVREVIAQWVNKKFGAQVSDPNCINLTAGASYGVGNILTSVTSPKITQRVFVVTPTYFLINSCFVDVGLDDRLTAIEETHNGKYSIDLAYLEQQLQKYSQNLEPVHDNINVFPDPGRGTRKYYRFVMYLVPTFSNPGGLNYTLETRQKLVEIARKYDLLLISDDVYEFLDYTDSKPLPRLNQLDKAGATKYGNTISNATFSKIIAQGLRVGWQETATPKLVDQLSITGSNRSGGTPNQLSTLVVADLIKTGTIDEIIAKFKNVYKERVAVLKESIAKYLPQDTQVYGGDGGYFVWVVTPSANCFDVVAKLAKRNVVLAGGEHFEVTGDKRNWGQHCVRLSISYLTTEEIQQGIKIWGELLE

SEQ ID NO: 152375 - DNA, 1221 bp, Myxococcus xanthus DK 1622
  CDS (1)..(1221): transl_table=11
atgagcgccgacgcgatgagcgccccccttcccccgccgcccgtatggcggttggcccagcggatgtcccgcatcaagacgtccgcggtgcgcgaaatcctgaaggtcgccgagcggcccgacatcctctccttcgcgggaggcctgccagccccggagctcttcccgctggaggccatcgccgaggcgcacgccgaggccctggcgaccgagggccgcgccgcgctccagtacagcaccaccgagggcttcggcccgctgcgtgagtggatttgcggccacctccagaagcgcggccgccagtccaacgcggaccaggtgctcatcaccaacggctcgcagcagggcatcgacctggtggccaaggtgatgctggaccccggtgacctcgtcatcgtggagaaccccagctacctggcggcgctgcagacgttcggcgcctatgaggcgcgcttcgccacggtgggcagcgacgaccagggcatgcgcaccgacgacctggagcgcctgctggccacgcacaagcccaagctggtgtacgtggtcgccaacttccagaaccccaagggcaccaccctgtcgctggagcggcggcgcgaactggtccgcctggcccagcagtaccgcttcctcatcctggaggacgacccgtacggcgagctgcgcttccgcggcgagcacgtgccgtccctgtccgccttcgacgacgagggcgtcgtcgtgtcgctgggcaccttctccaagacgctggccccgggcatgcgcctgggctgggtggtgggcccgcgcgacttcgtgcgcagcctggccatcgccaagcagtccaccgacctgcacacggccacgctggctcagcgcgcggtggtgaagctgctggcgcgcttcgattacgcggcccacctggagtcgctgcgccccgtctacggcgagcgcgcccaggccatgctggacgccctccaggcgcacatgcccgcgggcacccagtggacgcaccccgaaggcggcatgttcctgtgggtggagctgcccggcgggctggacgcccaggcgctgctgcccaaggcggtggagcagaaggtggccttcgtgccgggcgcgcccttctacgccaacaacccgcgcccggagttcatgcgcctcaactactccaaccgcccgccggacctgattgccgagggcatgcgccgcctgggcgccgtgattgccgccgagctgggttga

SEQ ID NO: 152376 - protein, 406 aa, Myxococcus xanthus DK 1622
MSADAMSAPLPPPPVWRLAQRMSRIKTSAVREILKVAERPDILSFAGGLPAPELFPLEAIAEAHAEALATEGRAALQYSTTEGFGPLREWICGHLQKRGRQSNADQVLITNGSQQGIDLVAKVMLDPGDLVIVENPSYLAALQTFGAYEARFATVGSDDQGMRTDDLERLLATHKPKLVYVVANFQNPKGTTLSLERRRELVRLAQQYRFLILEDDPYGELRFRGEHVPSLSAFDDEGVVVSLGTFSKTLAPGMRLGWVVGPRDFVRSLAIAKQSTDLHTATLAQRAVVKLLARFDYAAHLESLRPVYGERAQAMLDALQAHMPAGTQWTHPEGGMFLWVELPGGLDAQALLPKAVEQKVAFVPGAPFYANNPRPEFMRLNYSNRPPDLIAEGMRRLGAVIAAELG

SEQ ID NO: 152377 - DNA, 27 bp, Artificial sequence
  primer
atgaaatacaaggaaatcaatttcttc

SEQ ID NO: 152378 - DNA, 26 bp, Artificial sequence
  primer
ctacatagttatgttattggtgatcg

SEQ ID NO: 152379 - protein, 457 aa, Artificial sequence
  consensus sequence
  Variant (2)..(5): Xaa in position 2 to 5 is any amino acid
  Variant (7)..(7): Xaa in position 7 is any amino acid
  Variant (9)..(13): Xaa in position 9 to 13 is any amino acid
  Variant (15)..(33): Xaa in position 15 to 33 is any amino acid
  Variant (34)..(43): Xaa in position 34 to 43 is any or no amino acid
  Variant (45)..(45): Xaa in position 45 is any amino acid
  Variant (48)..(50): Xaa in position 48 to 50 is any amino acid
  Variant (52)..(55): Xaa in position 52 to 55 is any amino acid
  Variant (57)..(74): Xaa in position 57 to 74 is any amino acid
  Variant (75)..(87): Xaa in position 75 to 87 is any or no amino acid
  Variant (89)..(89): Xaa in position 89 is any amino acid
  Variant (91)..(111): Xaa in position 91 to 111 is any amino acid
  Variant (112)..(115): Xaa in position 112 to 115 is any or no amino acid
  Variant (117)..(117): Xaa in position 117 is any amino acid
  Variant (119)..(124): Xaa in position 119 to 124 is any amino acid
  Variant (126)..(142): Xaa in position 126 to 142 is any amino acid
  Variant (143)..(147): Xaa in position 143 to 147 is any or no amino acid
  Variant (149)..(151): Xaa in position 149 to 151 is any amino acid
  Variant (153)..(164): Xaa in position 153 to 164 is any amino acid
  Variant (165)..(190): Xaa in position 165 to 190 is any or no amino acid
  Variant (192)..(193): Xaa in position 192 to 193 is any amino acid
  Variant (195)..(197): Xaa in position 195 to 197 is any amino acid
  Variant (200)..(200): Xaa in position 200 is any amino acid
  Variant (202)..(208): Xaa in position 202 to 208 is any amino acid
  Variant (210)..(211): Xaa in position 210 to 211 is any amino acid
  Variant (213)..(215): Xaa in position 213 to 215 is any amino acid
  Variant (217)..(221): Xaa in position 217 to 221 is any amino acid
  Variant (223)..(225): Xaa in position 223 to 225 is any amino acid
  Variant (228)..(228): Xaa in position 228 is any amino acid
  Variant (230)..(231): Xaa in position 230 to 231 is any amino acid
  Variant (233)..(245): Xaa in position 233 to 245 is any amino acid
  Variant (246)..(263): Xaa in position 246 to 263 is any or no amino acid
  Variant (265)..(266): Xaa in position 265 to 266 is any amino acid
  Variant (267)..(281): Xaa in position 267 to 281 is any or no amino acid
  Variant (283)..(285): Xaa in position 283 to 285 is any amino acid
  Variant (287)..(290): Xaa in position 287 to 290 is any amino acid
  Variant (293)..(295): Xaa in position 293 to 295 is any amino acid
  Variant (298)..(298): Xaa in position 298 is any amino acid
  Variant (300)..(300): Xaa in position 300 is any amino acid
  Variant (302)..(303): Xaa in position 302 to 303 is any amino acid
  Variant (305)..(320): Xaa in position 305 to 320 is any amino acid
  Variant (321)..(321): Xaa in position 321 is any or no amino acid
  Variant (325)..(354): Xaa in position 325 to 354 is any amino acid
  Variant (355)..(357): Xaa in position 355 to 357 is any or no amino acid
  Variant (359)..(380): Xaa in position 359 to 380 is any amino acid
  Variant (381)..(388): Xaa in position 381 to 388 is any or no amino acid
  Variant (393)..(393): Xaa in position 393 is any amino acid
  Variant (395)..(418): Xaa in position 395 to 418 is any amino acid
  Variant (419)..(421): Xaa in position 419 to 421 is any or no amino acid
  Variant (423)..(424): Xaa in position 423 to 424 is any amino acid
  Variant (426)..(435): Xaa in position 426 to 435 is any amino acid
  Variant (436)..(442): Xaa in position 436 to 442 is any or no amino acid
  Variant (445)..(456): Xaa in position 445 to 456 is any amino acid
IXXXXGXPXXXXXPXXXXXXXXXXXXXXXXXXXXXXXXXXXXXLXYGXXXGXXXXRXXXXXXXXXXXXXXXXXXXXXXXXXXXXXXXGXSXXXXXXXXXXXXXXXXXXXXXXXXXPXYXXXXXXFXXXXXXXXXXXXXXXXXXXXXXDXXXLXXXXXXXXXXXXXXXXXXXXXXXXXXXXXXXXXXXXXXYXXPXXXNPXGXXXXXXXRXXLXXXAXXXXXLXXXDDXYXXLXXXXXXXXXXXXXXXXXXXXXXXXXXXXXXXDXXXXXXXXXXXXXXXXXGXXXSXXXXSKXXXPGXRXGXXEXXXXXXXXXXXXXXXXXSGGXXXXXXXXXXXXXXXXXXXXXXXXXXXXXXXXXRXXXXXXXXXXXXXXXXXXXXXXXXXXXXXXGGYFXWXXXXXXXXXXXXXXXXXXXXXXXXXXXGXXFXXXXXXXXXXXXXXXXXRLXXXXXXXXXXXXG

SEQ ID NO: 152380 - protein, 37 aa, Artificial sequence
  protein pattern
  Variant (3)..(4): Xaa in position 3 to 4 is Gly, Ser or Thr
  Variant (5)..(7): Xaa in position 5 to 7 is any amino acid
  Variant (8)..(8): Xaa in position 8 is Pro, Ser or Thr
  Variant (9)..(14): Xaa in position 9 to 14 is any amino acid
  Variant (15)..(15): Xaa in position 15 is Ile or Leu
  Variant (16)..(16): Xaa in position 16 is Ile, Leu or Val
  Variant (17)..(17): Xaa in position 17 is any amino acid
  Variant (18)..(18): Xaa in position 18 is Ile, Leu or Met
  Variant (19)..(19): Xaa in position 19 is Ala or Thr
  Variant (20)..(21): Xaa in position 20 to 21 is any amino acid
  Variant (22)..(22): Xaa in position 22 is Phe, His or Tyr
  Variant (23)..(23): Xaa in position 23 is Asp or Gly
  Variant (24)..(24): Xaa in position 24 is any amino acid
  Variant (26)..(26): Xaa in position 26 is Ile, Leu or Val
  Variant (27)..(27): Xaa in position 27 is Ile or Val
  Variant (28)..(28): Xaa in position 28 is any amino acid
  Variant (31)..(31): Xaa in position 31 is Ile, Pro or Val
  Variant (33)..(33): Xaa in position 33 is any amino acid
  Variant (34)..(34): Xaa in position 34 is any or no amino acid
  Variant (36)..(36): Xaa in position 36 is any amino acid
  Variant (37)..(37): Xaa in position 37 is Phe, His, Trp or Tyr
NPXXXXXXXXXXXXXXXXXXXXXXLXXXDDXYXXLXX

SEQ ID NO: 152381 - protein, 29 aa, Artificial sequence
  protein pattern
  Variant (2)..(2): Xaa in position 2 is any amino acid
  Variant (3)..(3): Xaa in position 3 is Ala, Ser, Thr or Val
  Variant (4)..(4): Xaa in position 4 is Ile or Val
  Variant (5)..(6): Xaa in position 5 to 6 is any amino acid
  Variant (7)..(7): Xaa in position 7 is Ala, Gly or Leu
  Variant (8)..(8): Xaa in position 8 is Ser or Thr
  Variant (9)..(9): Xaa in position 9 is any amino acid
  Variant (12)..(12): Xaa in position 12 is any amino acid
  Variant (13)..(13): Xaa in position 13 is Ile, Leu or Val
  Variant (14)..(14): Xaa in position 14 is Ala or Gly
  Variant (17)..(17): Xaa in position 17 is any amino acid
  Variant (19)..(19): Xaa in position 19 is any amino acid
  Variant (21)..(21): Xaa in position 21 is Trp or Tyr
  Variant (22)..(23): Xaa in position 22 to 23 is any amino acid
  Variant (24)..(24): Xaa in position 24 is Ala, Gly, Ser or Thr
  Variant (25)..(28): Xaa in position 25 to 28 is any amino acid
  Variant (29)..(29): Xaa in position 29 is Ala, Ile, Leu or Val
GXXXXXXXXSKXXXPGXRXGXXXXXXXXX

SEQ ID NO: 152382 - DNA, 2670 bp, Saccharomyces cerevisiae; identical to SEQ ID NO: 65209
  CDS (1)..(2670)

SEQ ID NO: 152383 - protein, 889 aa, Saccharomyces cerevisiae; identical to SEQ ID NO: 65210

SEQ ID NO: 152384 - DNA, 2802 bp, Gibberella zeae PH-1; identical to SEQ ID NO: 65183
  CDS (1)..(2802)

SEQ ID NO: 152385 - protein, 933 aa, Gibberella zeae PH-1; identical to SEQ ID NO: 65184

SEQ ID NO: 152386 - DNA, 4059 bp, Candida glabrata CBS 138; identical to SEQ ID NO: 65185
  CDS (1)..(4059)

SEQ ID NO: 152387 - protein, 1352 aa, Candida glabrata CBS 138; identical to SEQ ID NO: 65186

SEQ ID NO: 152388 - DNA, 3210 bp, Kluyveromyces lactis NRRL Y-1140; identical to SEQ ID NO: 65187
  CDS (1)..(3210)

SEQ ID NO: 152389 - protein, 1069 aa, Kluyveromyces lactis NRRL Y-1140; identical to SEQ ID NO: 65188

SEQ ID NO: 152390 - DNA, 3153 bp, Debaryomyces hansenii CBS767; identical to SEQ ID NO: 65189
  CDS (1)..(3153)

SEQ ID NO: 152391 - protein, 1050 aa, Debaryomyces hansenii CBS767; identical to SEQ ID NO: 65190

SEQ ID NO: 152392 - DNA, 2913 bp, Yarrowia lipolytica CLIB122; identical to SEQ ID NO: 65191
  CDS (1)..(2913)

SEQ ID NO: 152393 - protein, 970 aa, Yarrowia lipolytica CLIB122; identical to SEQ ID NO: 65192

SEQ ID NO: 152394 - DNA, 2490 bp, Aspergillus nidulans FGSC A4; identical to SEQ ID NO: 65193
  CDS (1)..(2490)

SEQ ID NO: 152395 - protein, 829 aa, Aspergillus nidulans FGSC A4; identical to SEQ ID NO: 65194

SEQ ID NO: 152396 - DNA, 3663 bp, Ustilago maydis 521
  CDS (1)..(3663)
atgctcgagcatatcagcccccgctccctgccaaccgccgcccgcaccaccctccgctccctctctcgttggtgtggcagcaacctcaacttttaccgagtgcacgtcctcgtctttacctttaccccgcttcttgccgcctgtatcttctacgcttgcaacggcgaaacgcatatcagcttcgtcgatggcctctatgtctgcgtatccgccatgaccgtcactggcttggtcaccttcaacatcagcaccgccaacccaggtcagcaggccatcctcttcatcctcatgtgcatcggcaacatctcggccgtcagcatcaccatgatctggatccgtagaagcttcttccgcaagaagttcgatcacgttgtccgtcgaagcgcaaaggttcgtaagcgcatgcacgacgtcgaagagcaggagcgaagggagcgacgccacaacattgcaaagatccagcgcatggtcggtctcaaatcctccgacagcgtcaccactatcagcgacaccgaagagcacgaccgtaccgacaccagctccagcagccaaatcgaactccgccgcctcgaaaagaacaagcaaaagagcaaggcaaaacgcaaaccgctccgcgcagacatgattcgtcgaatcgacggccctgcctttctcatcaactcggccggcgatccctccaacaccatccccgattcggccaacaccacgccattcaccaacgatccgcatgcttcgctcacccaagagcccgcctcgctacgctcaactacaccacctcccgcgcaagccgccgtcggcatcctcaacgcccaacaagaccatcacgcctcagtcacatccgacgatcccagccaccagcccagcatccgaatttcgcttcctcatcactctttgccctccgacgagttcacccagcacaaggccactgctgatccaactcagccacctcgtcaaactttctcccttccgcgttgcgaccatcgccatgaccccgacgccgacaccgactcggatcaagcatctctcacacaccaaggcgatacgcacttcacccaaccaccgctctcgcctcctcttcgcgctcgcttccccgatcatcaaatccctggcagagcaaggcgagtatcagatccgccccaatctcagttccgtcgcggttccgacaccggcctcgttcacacatatgccacgcacgagaagcacgacatgttcccgcgcgcccaaaccgtcgaattcgccatacccagcaactaccgttctcccatcgatgcgcaacagcgagagcaaagctacacaaccggtcacggcgtcaatcctactggcggcttgcgccaccgcaacactaccttcaatcgtaccgtcacctcacgctcctacgtctcgggtcgtcttagcaatggcaggtccggcgttccgcttgcacgtacccaaacctcggccaaacagcgtggctttggtggcttccccacgccattcgagattgccggcatggcgctcaaaaaggccgcccctggtgttcaggagcgctttcaaagaaccatgaccatgcctcgcaccgccacatttacatccgtgcgctccggcggtggtctcaccgaaacggccaacaaggcagcgccttacctttccttcgatgccaccgtcaccggcaactcgcgctttcacgccctcaccgaaacccagcgcgatgagctcggaggcgtcgaatatcgtgcactcgacctgctcgcaaaacttgtgcctgcctactggctcattgtcaacctcggcatggtcacgctcgtcgccccctacatcagtagcaacgcctttcgaaagtatcgcccgccctttgaagcacaaggcaacaacagacccgacaatacctggttctggttcttccaagtcatctcggcctattcgaacacgggcatgtccctgatcgacacgagcatgacccagatgcaagacgcctactttctgctcatccccatgggcttcctcatcctcgcgggcaacaccggcttccccattctcctgcgtttcttcatctggaccatctcggtgtgcgtgccatccaattcgagaatctacgagacattgcgcttcttgctcgaccacccgcgtcgatgctttgtatacctcttcccctcgagtcagacctggttcctgtttttcgtccttgtcctcttcaactcggtcgattggcttgccttcctgattctcgacattggtaatccggtcatcgagtcgattacgctcagcatccgtatctttgacggtctcttccagtcgatcgccgtgcgcgccgcaggtttcaccgtagtcagtttgctggcgctcgcccccgcggtgcagttcctgtacgtcatcatgatgtacctgtccgcgttcccgcttgcgctctcggtgcgcagcaccaacgtctacgaagaaaagtcgcttggcgtctacgtcgacgagcccgcggatccgggtctagctccgcaagagtccgacaaccccaaggtgtggggttcgttcttggcatcgcatgcacgtcgacagttggcgttcgatatttggtggctcggatttgcgctatggcttatttgcatcatcgagcgcaatgacatcttggatccgaactcaaacgggtggttcaccatcttcagctgcctctttgagctcacctcggcctacggcacggtcgggctgagtctcggcacaccatttgacaacttcagcttgtccggacgcttccatacactctcgaaattggtggtgtgtgccgtcatgatccgtggccgacatcgaggattgccagtggccattgatcgtgctatcctgttgccgtccgagttggagcaggaggatatgttggacgatgacctttcgcaccttggagattcgtgggatcgcgacagcacgtttgtctctgatccgctggtcccgacgcctggcgcgccacgtccatcgatgaatgggcccgatcaacagcgcagcaatagcatcggcagtgtcgctggcgaaagcaacagtggcatgtcgagcgtccgacgcacaccatccggcgtgtcgtttgccgtccacccgctggcgtccaagccgaggcgcagcagcagcatgtcgccaatggccatggagccactttctcccaagcaacaggctgaactagcattacaggaaccaaggaggagcctgaccctcacgctcccacccagcagtcttcccgcgcattatgcaggaccgacgctcggtgtgggtggatttgcgcaccatcttggcgggctaggaggagcattacctccgagcagcagcagcaacgccagcactgtcggtggcgtcttgggagcaatgatggtctcgtcgcctggccaattgacggcgattgacgaaatgccaagcggactaggtgcgatgccgaccagcgagagtcgctgcgagtctccagccggtgtcaacgcaagtgctgctgcttcgaacgcacagagccaagcacacgtgttaccgaccactttctgcaccaatgtcgagagcaccagcagcaccagcagcggcagcggcggcagtggatgcagcgtgaagggcaaggaacgtgcagcgatgcgaattgcggacgaggatcgcgaacgactagttgcccagcatgcaggttgttcgacgcccgatggacgacatgatcctgtggatggccaagattag

SEQ ID NO: 152397 - protein, 1220 aa, Ustilago maydis 521
MLEHISPRSLPTAARTTLRSLSRWCGSNLNFYRVHVLVFTFTPLLAACIFYACNGETHISFVDGLYVCVSAMTVTGLVTFNISTANPGQQAILFILMCIGNISAVSITMIWIRRSFFRKKFDHVVRRSAKVRKRMHDVEEQERRERRHNIAKIQRMVGLKSSDSVTTISDTEEHDRTDTSSSSQIELRRLEKNKQKSKAKRKPLRADMIRRIDGPAFLINSAGDPSNTIPDSANTTPFTNDPHASLTQEPASLRSTTPPPAQAAVGILNAQQDHHASVTSDDPSHQPSIRISLPHHSLPSDEFTQHKATADPTQPPRQTFSLPRCDHRHDPDADTDSDQASLTHQGDTHFTQPPLSPPLRARFPDHQIPGRARRVSDPPQSQFRRGSDTGLVHTYATHEKHDMFPRAQTVEFAIPSNYRSPIDAQQREQSYTTGHGVNPTGGLRHRNTTFNRTVTSRSYVSGRLSNGRSGVPLARTQTSAKQRGFGGFPTPFEIAGMALKKAAPGVQERFQRTMTMPRTATFTSVRSGGGLTETANKAAPYLSFDATVTGNSRFHALTETQRDELGGVEYRALDLLAKLVPAYWLIVNLGMVTLVAPYISSNAFRKYRPPFEAQGNNRPDNTWFWFFQVISAYSNTGMSLIDTSMTQMQDAYFLLIPMGFLILAGNTGFPILLRFFIWTISVCVPSNSRIYETLRFLLDHPRRCFVYLFPSSQTWFLFFVLVLFNSVDWLAFLILDIGNPVIESITLSIRIFDGLFQSIAVRAAGFTVVSLLALAPAVQFLYVIMMYLSAFPLALSVRSTNVYEEKSLGVYVDEPADPGLAPQESDNPKVWGSFLASHARRQLAFDIWWLGFALWLICIIERNDILDPNSNGWFTIFSCLFELTSAYGTVGLSLGTPFDNFSLSGRFHTLSKLVVCAVMIRGRHRGLPVAIDRAILLPSELEQEDMLDDDLSHLGDSWDRDSTFVSDPLVPTPGAPRPSMNGPDQQRSNSIGSVAGESNSGMSSVRRTPSGVSFAVHPLASKPRRSSSMSPMAMEPLSPKQQAELALQEPRRSLTLTLPPSSLPAHYAGPTLGVGGFAHHLGGLGGALPPSSSSNASTVGGVLGAMMVSSPGQLTAIDEMPSGLGAMPTSESRCESPAGVNASAAASNAQSQAHVLPTTFCTNVESTSSTSSGSGGSGCSVKGKERAAMRIADEDRERLVAQHAGCSTPDGRHDPVDGQD

SEQ ID NO: 152398 - DNA, 2001 bp, Aspergillus oryzae
  CDS (1)..(2001)
atgcccccctaccctgagccacaggctgattcctctcccctacgacttcaccatcattatttttatatcatcatctgggctctggtggcttcaatcattctttacattccagggggtctaagttttgtcgatgccttgcttctcgcctccggtgccgctacccaaactgggctcaatcccatcgacctgaaagatctgcatatatcgcaacagataacgctatggctggtccctatggtgaccaacgtagtgttccttcatacattacttgttttgatcaggatttactggtttcggaaacgcttcaaaagtgccatccgtgaggccaaagcagtatgtcacagtcagcgacagcgaatgaaccaggcactcgactatgaagcccgaaggccgataggcttgaacagaactattacggatacgacagatacgactactactgcatttgactcttcagatagggacgacgaagagcaacccctactcggaagtacggacgacgagatctcccctggagcatctcccaggacacaagtcggggatcagtctcccgtcggttaccaaactttcaagccagctgccataggcccttctagtccacgtatcacattttatgaatctgacagggaccttgaagcaagacagaagcgacgatcctcgttttcccgtcgtcgctcgttttctgaggctgtcaatgaggctttcccacggacagacagccctaacacgcctgttttgccgtcgttgatgtggcagcattcgattgcgagctattccgactgggatgaggatcagaaggaagagctaggagggatcgaatacagggcgttgaaaacattgatggtcatcttggtcgggtactttctggctttccatctactcggcattatcctgtttattccgtggattatgacggactccaagtatggagggatggtcaaggacatgggcttgaacagaccgtggtgggcagtatttactgctggttcagcttttcatgatctagggtatactttgagccccgactccatggcttcgttccgaaacgccgcatttccactattagtgatgacctttttggtggttatcgggaacacaggctttccgtgcatgctgcgcttgatcatctggttgatatccaaatttacaacgtacgggtctccgttagacgaagagttacattatttgctcgaacatccccgacgatgctttacgatgctctttcctggatcagagacgtggagactagcaggtgtcctcctcctgctcaacgctctggacctttttgttttctacacacttcaagagaacccacaaagcaatcccttctcacccggtctccgtctcgtagacgggctattccaaatcgcctccacccgaaccgccggcttctcaatcacctctctcgggacactccaccccgcagtccaagtctccttcgtagtaatgatgtacatctcggcgttcccaatcgcaatcgccatccgcaaaactaacgtctacgaagaaaaaagcctcggcatctacgacgacgaagacaagcccaacccccacggcctggccgcccacatccagcgccaactcggctttgacctgtggtacgtaatgctcgggttcttcctcatctccgtcacagagggcaagcggatccaacaaacccacggccgcgacttcgcgttctctcttttcccccttctgttcgagattgtctccgcgtatggaacggtggggctctcgttgggctatccaaagacggagacgagtctcagtgcgcagtttaacccgatgtcgaagttgatcattattgctatgcaggtgcgggggaggcatcgtggtttgccgcatgcgttggatcatgctattttgttgccgtgtgatgtgcatcaggatcagcatggggagtggtggtggaagcggtggttgaagcggaagagttcgaatattagcaatttcttttcgcatggggatgctaatgaggatattgagcggcttgctttgtga

SEQ ID NO: 152399 - protein, 666 aa, Aspergillus oryzae
MPPYPEPQADSSPLRLHHHYFYIIIWALVASIILYIPGGLSFVDALLLASGAATQTGLNPIDLKDLHISQQITLWLVPMVTNVVFLHTLLVLIRIYWFRKRFKSAIREAKAVCHSQRQRMNQALDYEARRPIGLNRTITDTTDTTTTAFDSSDRDDEEQPLLGSTDDEISPGASPRTQVGDQSPVGYQTFKPAAIGPSSPRITFYESDRDLEARQKRRSSFSRRRSFSEAVNEAFPRTDSPNTPVLPSLMWQHSIASYSDWDEDQKEELGGIEYRALKTLMVILVGYFLAFHLLGIILFIPWIMTDSKYGGMVKDMGLNRPWWAVFTAGSAFHDLGYTLSPDSMASFRNAAFPLLVMTFLVVIGNTGFPCMLRLIIWLISKFTTYGSPLDEELHYLLEHPRRCFTMLFPGSETWRLAGVLLLLNALDLFVFYTLQENPQSNPFSPGLRLVDGLFQIASTRTAGFSITSLGTLHPAVQVSFVVMMYISAFPIAIAIRKTNVYEEKSLGIYDDEDKPNPHGLAAHIQRQLGFDLWYVMLGFFLISVTEGKRIQQTHGRDFAFSLFPLLFEIVSAYGTVGLSLGYPKTETSLSAQFNPMSKLIIIAMQVRGRHRGLPHALDHAILLPCDVHQDQHGEWWWKRWLKRKSSNISNFFSHGDANEDIERLAL

SEQ ID NO: 152400 - DNA, 2820 bp, Podospora anserina; identical to SEQ ID NO: 65199
  CDS (1)..(2820)
  misc_feature (2023)..(2023): n is a, g, c or t
  misc_feature (2025)..(2025): n is a, g, c or t

SEQ ID NO: 152401 - protein, 939 aa, Podospora anserina; identical to SEQ ID NO: 65200
  misc_feature (675)..(675): The Xaa at location 675 stands for Ile, Leu, Met, Phe, or Val.

SEQ ID NO: 152402 - DNA, 3057 bp, Debaryomyces occidentalis; identical to SEQ ID NO: 65201
  CDS (1)..(3057)

SEQ ID NO: 152403 - protein, 1018 aa, Debaryomyces occidentalis; identical to SEQ ID NO: 65202

SEQ ID NO: 152404 - DNA, 4932 bp, Kluyveromyces lactis
  CDS (689)..(3901)
aagctttgcctcgccttcttatcttccggttattccgtaatatagaagaaaacaaagcgaaccacagtttaaaacccactaatccaaaaatcagccttgctccatttattttccagcgcttgtcataatatttcagaactacaaacctgtttacatgccatttatttagcgcaaaattcattacgtttattccaatgcatcaattactaccgacaatacatttattggactgatattatatactgtgtaatttgtatgaaccgctatcatctttatggtagcatttaatattttgagaaaaataggtcctaccatattctatcaatgattatgattccattaggatcactcaaatgttggtgaaaaattcgtagcgtctttaatgtcaagcgcaccaacgcttttatcgacttgtgtcaggttttcctgtttggccgcatttcgctgagaatgttccttcgaggatttaaagcctctcatgaaaagttatgaaattgatggaaaaaaaaaaaaattgaacatatgccaacctaaaatgatttatttagtaccgaggtttctaaagtataaaagcattgaattcagacaaataaacttttggtaagctactcaagttaccgtcaataataacaattctcagtgttaactactggtaacctgtattagtaattaccaggtaagcggagagatgatcttccgcaaagtggtacgaaatcctactgttcaaaacatacaaatatacagaaagactttaggtcatcagattcgtgacattatcgaaaagttaacaaagaaaatcgatcctttcgtcaaatttatatttccaaacttcattgcattccattacttttacatcattgcatttgcattactatgttctattcttatttatcccgttaagaactttgcatacatcgatattttgtttctagccacgggggccgcaacccagggtggtttaaacacagtagacttaaatgagctgtcattgtaccaacaaattgttctgtatattactaccgcgctaactaccccaattttcattcatagtggcttggcatttgtgcggttttactggtttgaacgatattttgatggtattcgtgattggtccaagagagattttgagatgagaaggaccatgacactgcgccaaagggaactgaccaaaaataatacgatggaaaatgcttctaggagtactggtcaaggtcctctcaattttcttaccagaacttttactcacggagatagagatgctagtaattttcaaggtaggcttttcagaggagaagtggtcaaaagagacgaagacaataacgacgatagctcagtcgatacaaggccaccggaggcccatagcgatcatactgagaaattcatcggtaggcggaaatccagagatatcaatccagctgatatgtacagatcgattgccatgttacagaataggcatgaaagtaatgataacataaagggaccagcgcttgtcatcaaaagcccagcggaacgggaaaaagaaatagaagaacaacgtagattacaaaaagagcgtgaggaacagcaaggtcaatctattcagtttaaagtggaaccgcgcccgacaaagtcaacgaggtcaacttttgaaccctcgggaattaggaaatcatttacccgaagaaagaggcctagcttcttcaaaggttcccaatctgccagaataatacgagacaagttgagaagaagatccaaaggttctgatgtcaacaatgttgatgatgaggaagaagaacaggatgggcatgatgcagatatggaaggatcttctgaagacgatagtgttattgaatcttcagatggacagtcagagtctatatctgctcccaattttgaccatcactcatctgagccaacactacagagtggtggtacagtatctgcaccttcttctttagagagtaatgaaatcgaagaagaagatgaggaactaagcgatttacccactggtgtttcttattatgggctgcattcaggaggcgatcctcgaaataggttaaacagggtcatgagtacaaattatttatcatatgagcctaaaattggaagaaactcaacttttgttggattatcagaatcgcaaaaagttgaattaggaggggttgaatataggtccaccaaggttttatgtctacttttgtcgatatattatctcggttttagtattttagctatgatcatattcgctgcgtggatacaacctatgaacaattataaagaaattgttagatctcaaggtgtttcgccaacatggtgggggttttggactggaatgagtgcatttggtaatcttggattaacattgactccgaactccatgatatcatttcacaagtcaatatacacgttaatttggatgatgtggttcattgttattggtaacactggatttccaatttttctccgtttcgttatttggatacttttcaaactaagtccagatctgtccttgagaaaagatagtctagggtttttattagaccatcctcgtagatgtttcacaatgctatttcctaaagcggctacatggtggctttttctgattctcattggaatgaatgctattgatttgatattattcatcattttggatttgaatacagatgttgtaaaagatctaactgctggattcaaggtacttaacggtttatttcaagctgttagcacaagaaccgcagggtttgccgtgctagatctaagtcaattgcatccatctgtacaggtatcgtacatgttaatgatgtatgtttctgtgatgcccttagctatttcaattagaagaactaatgtctacgaagagcaatcgcttggtgtttacggggaatgggagaaaaatcaagaagatgatgggtcggaaaagaatacaaaaagtttcattggagcacatttacgtagacaattgtctttcgatctatggtatatgtttttgggtctctttattatctgtatctgcgaaggtgggaagatccaagatccaagcaaacccagtttcaccgtttttcaatgtctcttcgaagttgtaagtgcttatggtaccgttggattgtcccttggataccctggctccaatcaatcgttttcaggacaattcacaactatatcaaaactagtcatcattgcaatgttgataagaggaagacacagaggtttgccctatactttggatcgtgccatcatcttaccaagtgcgaaattgaaggaaaatgatttactccatgagttgactcactctaggagacccacaactttaggattgaatggatctacatctcatgataacagaaccacctctgtcgctgattcgacatcttcgattggtaacaaacatatagaccggttccgtgaccgttcacgttccgtatggcacggtttaacctctgcgtttagtatgggtcatcaaccacggccacatagaaccatgacgtctagatcgttagatgataccattacaacggaccgcatgatgtccacgcaaagtaaccaatcttttaacaatgaatcacaacaacaaacattttcggatggtaacaactatccaatgcacagcatgaactcaaaccaccattatgacaacagatctatgacccccaaccaatatcacgtgtttagagattcctttgatctgagatcgggtattactgagcacaaaggtttggatggtgtacatgcaaataccgtggaagcattcgaccattcgaactataattccaacagtaatagcaacagtaacagcaattcaaacagcaagaatacggaaacttcaagctcaggaccaatcttcaatcacatcaattcctctacctcattgcattcaccacattctacaggttcaatgcaatctctgaatagctcacccagatagcaacgatggtacaaaagaccacattctacaccctaaattaaatatgctattaaatagcatgagttattctatcacctctaatttccagactgactgaagaacagaattgaacactcgtaaaatcatgggtaaaacataataggtagacacattatggactttctagtaatcaaaccttattcattgtgctttctttgtcccagaatgcgcgttactgccgtatagtatgcattgcatcgagatgatctcatcactgttaccctgatatccgatggaaaacggtgacatcaccgtcggaggtattggaagccctaacgagtcattatcaagtcacatcaaacgaacagtggtgtacggattctatgtccataatgtttttctgcatgtctgtaatttttgggaaacatttatcgatttgtctacaaatgtccatcgaaaagaaacaattccatctaaaaaattttccgcggtttgccaaactcatctcagtcgcatctagagatcctacagccaaacaaccgagagaaaattttttttcttcacctagccgcccatcaagagtgattttgtatataaggaggggtacgaatcccattgaattgttatatcgttttccttttaatgatacttctgaagatctgtcacaacttttttttacttgtactttcttgaagtattttagtttcggtgattactgtactattatactcattattctctcagtatattttagaataatcattttgttctaaattattcgtattcctttttccattcacccattactatatgttcctgttttaaatacttttattacttagtcttcttcctttgttctcagtagtcagctaattaataaactttacagccgcccccctttcctctaagtcccacctttgagagagatagagagagtgttaatagcagagaaagttcgtgtatcagtcgttgaaactattcgttttagtatgttctttttttttgttttctgtttggttttctaagtggctactaagcaatgctttaagctt

SEQ ID NO: 152405 - protein, 1070 aa, Kluyveromyces lactis; identical to SEQ ID NO: 65206

SEQ ID NO: 152406 - DNA, 2526 bp, Schizosaccharomyces pombe
  CDS (1)..(2526)
atggtcctaaattacattcaaagatggttcaagtgggtgataccaacttttggattcttggcaattcattatatttacattatatccttaactatcattgcctctatcctactttttaccggagggaccaccacgaaaatcaagtatatcgatgctttattcttagctagcagcgcaactacccaaacaggccttaacagtgttgacttaaattctttatctatctggcagcagtttatcctgtatggatttactgctattacggttcctatatggatgcacggaagtatttccttcatccggctgtattggtttcgacgaaaatttaaagacgttgttcgtcaaaatcgtactcgaaaatttcagagaaagctccgtaaaagcttaatgaaaaaaagcgaggatgacgaagaacagggtgttcgtggtagaaaaattcgtgtaatgttaccatacctacattcactaaggagtccaacgtctctaaaaaacttctcgagatttgacacgcatgacagtacgaacaatccgtactttcctgacaaccccccttctcccaaggcagatatatctaaagacgagtattttggaaagtatctcccaaaaaagtctgatacgctagacatggatttggaaagtcacaacatgacttttcatgactatgaaccttccattgaaaataaaaattacgattttggtagttcgcattcagcctcgatgcaaatgtatgaaatggatgaccttcatccccgacttcgtagacaaagctcttttatttcctccgttaatcctttagaggctgacgacacccgtgaaactttatctgaaggcgccttagttcaggaatctctccctatggcttatagttattctgatactaatttggttgtatcgagggattcatttactctcactggggacgacaatcttttcccagaaggtggtttaaggcctgccaatacaatagacggaatagtaaggtcgtctctgtcttcttcctccctatctaaagacactgaaccatcgacagttgacatgcatattgctttcaccggacttaataagcccaccatagagcgtgaacgtaatcttaaacttagaaaaaaaagtcgtttttataaaaaatctttacgttccagattttcgcgaggacttcatcgtccaatacgttggacaaagtcattcacttctaaccgacgaaacttgactcttgaacgagtcctttcttctgcctttgctaaaaaacgtgagccttctatttcatcaagacacactactatgtcacttccctatttgtcgtataatcctactgtcgatcgtaattctgctttcgttgctttgtctaaagaacagcgggacgagctgggtggaattgaatatagagctttgaaatgcgtctgctccatggttaccctttattttatcatttttaatattgctgcctttgtgaccttcattgtttttgcttatacggcagtgggatcgcgagaggtaatagattcttatgacttacgtcgtgggtggtgggcgttattctcgtctgcttcttcatttaatgatttggggttttctttaataccatcgtcttttgtgccaatgaatcgaaacatttttcttttgttgatttcatctttattcattatcgcaggtaacacgggattcccttgtttttttagaacattcatttggacaacgtataagctatacccttttagttttgagaagaaagaagctatggcatttctccttgatcatcctcgacgatgtttcactttattgtttccatctggagcaacctgggtcttgttttttgttttgctgctgcttaatgtcattgatctggtattgttcatggtcttagatactggaagtaaagcagtcgctagccttcctaaaggtattagggttgtaaatgcaatatttcaatcagtttgtacaagaaccgcaggattcacgagtgtatcaattagtgaacttcacccagcagtactggtcagttacatggttatgatgtatatttctgtttatccagttgctatcaacatgagaaataccaatgtttatgaggagcgatctttgggtgtttacagaactgaagatgatgaggggaaatctttcttaaaagatcaccttactgaacaattaagttacgatttatggtatatttttctagggctattcatcatatgcatttgtgaaggaggtaaaatctccaatcctctagataccgatttcagtatttttactgtcctttttgaagtagtctctgcttacggtacggtgggacttagtactggattaagctcctcaaattgttcactttcagcaagatttactactataagtaaactagttattatagcacttgaactgcgcggtagacatagaggtttacccagggctgttgatcgagccatccttcttccttctgaaaaaaataatctgaaagaagaagaagattatcaacgtcgtcacggattttccatagacaacgcacgtggcagtattgcagtttctcgagactga

SEQ ID NO: 152407 - protein, 841 aa, Schizosaccharomyces pombe
MVLNYIQRWFKWVIPTFGFLAIHYIYIISLTIIASILLFTGGTTTKIKYIDALFLASSATTQTGLNSVDLNSLSIWQQFILYGFTAITVPIWMHGSISFIRLYWFRRKFKDVVRQNRTRKFQRKLRKSLMKKSEDDEEQGVRGRKIRVMLPYLHSLRSPTSLKNFSRFDTHDSTNNPYFPDNPPSPKADISKDEYFGKYLPKKSDTLDMDLESHNMTFHDYEPSIENKNYDFGSSHSASMQMYEMDDLHPRLRRQSSFISSVNPLEADDTRETLSEGALVQESLPMAYSYSDTNLVVSRDSFTLTGDDNLFPEGGLRPANTIDGIVRSSLSSSSLSKDTEPSTVDMHIAFTGLNKPTIERERNLKLRKKSRFYKKSLRSRFSRGLHRPIRWTKSFTSNRRNLTLERVLSSAFAKKREPSISSRHTTMSLPYLSYNPTVDRNSAFVALSKEQRDELGGIEYRALKCVCSMVTLYFIIFNIAAFVTFIVFAYTAVGSREVIDSYDLRRGWWALFSSASSFNDLGFSLIPSSFVPMNRNIFLLLISSLFIIAGNTGFPCFFRTFIWTTYKLYPFSFEKKEAMAFLLDHPRRCFTLLFPSGATWVLFFVLLLLNVIDLVLFMVLDTGSKAVASLPKGIRVVNAIFQSVCTRTAGFTSVSISELHPAVLVSYMVMMYISVYPVAINMRNTNVYEERSLGVYRTEDDEGKSFLKDHLTEQLSYDLWYIFLGLFIICICEGGKISNPLDTDFSIFTVLFEVVSAYGTVGLSTGLSSSNCSLSARFTTISKLVIIALELRGRHRGLPRAVDRAILLPSEKNNLKEEEDYQRRHGFSIDNARGSIAVSRD

SEQ ID NO: 152408 - DNA, 3708 bp, Saccharomyces cerevisiae; identical to SEQ ID NO: 65181
  CDS (1)..(3708)

SEQ ID NO: 152409 - protein, 1235 aa, Saccharomyces cerevisiae; identical to SEQ ID NO: 65182

SEQ ID NO: 152410 - DNA, 2643 bp, Schizosaccharomyces pombe; identical to SEQ ID NO: 65207
  CDS (1)..(2643)

SEQ ID NO: 152411 - protein, 880 aa, Schizosaccharomyces pombe; identical to SEQ ID NO: 65208

SEQ ID NO: 152412 - DNA, 23 bp, Artificial sequence
  primer
atgccaacagctaagaggacgtc

SEQ ID NO: 152413 - DNA, 25 bp, Artificial sequence
  primer
ttaatgcttcccccaaaactttgtt

SEQ ID NO: 152414 - protein, 1277 aa, Artificial sequence
  consensus sequence
  Variant (2)..(2): Xaa in position 2 is any amino acid
  Variant (3)..(4): Xaa in position 3 to 4 is any or no amino acid
  Variant (7)..(8): Xaa in position 7 to 8 is any amino acid
  Variant (9)..(26): Xaa in position 9 to 26 is any or no amino acid
  Variant (29)..(34): Xaa in position 29 to 34 is any amino acid
  Variant (36)..(38): Xaa in position 36 to 38 is any amino acid
  Variant (40)..(46): Xaa in position 40 to 46 is any amino acid
  Variant (47)..(53): Xaa in position 47 to 53 is any or no amino acid
  Variant (56)..(56): Xaa in position 56 is any amino acid
  Variant (58)..(62): Xaa in position 58 to 62 is any amino acid
  Variant (64)..(64): Xaa in position 64 is any amino acid
  Variant (67)..(67): Xaa in position 67 is any amino acid
  Variant (71)..(74): Xaa in position 71 to 74 is any amino acid
  Variant (76)..(76): Xaa in position 76 is any amino acid
  Variant (78)..(80): Xaa in position 78 to 80 is any amino acid
  Variant (83)..(85): Xaa in position 83 to 85 is any amino acid
  Variant (87)..(93): Xaa in position 87 to 93 is any amino acid
  Variant (96)..(104): Xaa in position 96 to 104 is any amino acid
  Variant (106)..(106): Xaa in position 106 is any amino acid
  Variant (110)..(112): Xaa in position 110 to 112 is any amino acid
  Variant (114)..(128): Xaa in position 114 to 128 is any amino acid
  Variant (129)..(134): Xaa in position 129 to 134 is any or no amino acid
  Variant (136)..(265): Xaa in position 136 to 265 is any amino acid
  Variant (266)..(805): Xaa in position 266 to 805 is any or no amino acid
  Variant (809)..(811): Xaa in position 809 to 811 is any amino acid
  Variant (813)..(813): Xaa in position 813 is any amino acid
  Variant (818)..(818): Xaa in position 818 is any amino acid
  Variant (820)..(820): Xaa in position 820 is any amino acid
  Variant (821)..(821): Xaa in position 821 is any or no amino acid
  Variant (823)..(825): Xaa in position 823 to 825 is any amino acid
  Variant (827)..(828): Xaa in position 827 to 828 is any amino acid
  Variant (833)..(833): Xaa in position 833 is any amino acid
  Variant (837)..(840): Xaa in position 837 to 840 is any amino acid
  Variant (842)..(844): Xaa in position 842 to 844 is any amino acid
  Variant (846)..(847): Xaa in position 846 to 847 is any amino acid
  Variant (849)..(863): Xaa in position 849 to 863 is any amino acid
  Variant (865)..(872): Xaa in position 865 to 872 is any amino acid
  Variant (873)..(873): Xaa in position 873 is any or no amino acid
  Variant (875)..(877): Xaa in position 875 to 877 is any amino acid
  Variant (879)..(882): Xaa in position 879 to 882 is any amino acid
  Variant (883)..(887): Xaa in position 883 to 887 is any or no amino acid
  Variant (890)..(892): Xaa in position 890 to 892 is any amino acid
  Variant (894)..(895): Xaa in position 894 to 895 is any amino acid
  Variant (897)..(897): Xaa in position 897 is any amino acid
  Variant (899)..(900): Xaa in position 899 to 900 is any amino acid
  Variant (903)..(904): Xaa in position 903 to 904 is any amino acid
  Variant (906)..(908): Xaa in position 906 to 908 is any amino acid
  Variant (911)..(911): Xaa in position 911 is any amino acid
  Variant (914)..(922): Xaa in position 914 to 922 is any amino acid
  Variant (924)..(926): Xaa in position 924 to 926 is any amino acid
  Variant (928)..(928): Xaa in position 928 is any amino acid
  Variant (936)..(937): Xaa in position 936 to 937 is any amino acid
  Variant (941)..(941): Xaa in position 941 is any amino acid
  Variant (944)..(956): Xaa in position 944 to 956 is any amino acid
  Variant (958)..(958): Xaa in position 958 is any amino acid
  Variant (960)..(960): Xaa in position 960 is any amino acid
  Variant (972)..(972): Xaa in position 972 is any amino acid
  Variant (976)..(978): Xaa in position 976 to 978 is any amino acid
  Variant (981)..(981): Xaa in position 981 is any amino acid
  Variant (984)..(985): Xaa in position 984 to 985 is any amino acid
  Variant (987)..(989): Xaa in position 987 to 989 is any amino acid
  Variant (991)..(992): Xaa in position 991 to 992 is any amino acid
  Variant (994)..(996): Xaa in position 994 to 996 is any amino acid
  Variant (998)..(999): Xaa in position 998 to 999 is any amino acid
  Variant (1002)..(1009): Xaa in position 1002 to 1009 is any amino acid
  Variant (1010)..(1012): Xaa in position 1010 to 1012 is any or no amino acid
  Variant (1014)..(1018): Xaa in position 1014 to 1018 is any amino acid
  Variant (1023)..(1025): Xaa in position 1023 to 1025 is any amino acid
  Variant (1032)..(1035): Xaa in position 1032 to 1035 is any amino acid
  Variant (1037)..(1038): Xaa in position 1037 to 1038 is any amino acid
  Variant (1042)..(1043): Xaa in position 1042 to 1043 is any amino acid
  Variant (1049)..(1049): Xaa in position 1049 is any amino acid
  Variant (1053)..(1053): Xaa in position 1053 is any amino acid
  Variant (1055)..(1056): Xaa in position 1055 to 1056 is any amino acid
  Variant (1058)..(1058): Xaa in position 1058 is any amino acid
  Variant (1062)..(1062): Xaa in position 1062 is any amino acid
  Variant (1064)..(1064): Xaa in position 1064 is any amino acid
  Variant (1071)..(1071): Xaa in position 1071 is any amino acid
  Variant (1075)..(1075): Xaa in position 1075 is any amino acid
  Variant (1077)..(1089): Xaa in position 1077 to 1089 is any amino acid
  Variant (1090)..(1174): Xaa in position 1090 to 1174 is any or no amino acid
  Variant (1176)..(1176): Xaa in position 1176 is any amino acid
  Variant (1178)..(1178): Xaa in position 1178 is any amino acid
  Variant (1181)..(1181): Xaa in position 1181 is any amino acid
  Variant (1186)..(1188): Xaa in position 1186 to 1188 is any amino acid
  Variant (1193)..(1193): Xaa in position 1193 is any amino acid
  Variant (1195)..(1195): Xaa in position 1195 is any amino acid
  Variant (1197)..(1197): Xaa in position 1197 is any amino acid
  Variant (1200)..(1206): Xaa in position 1200 to 1206 is any amino acid
  Variant (1207)..(1211): Xaa in position 1207 to 1211 is any or no amino acid
  Variant (1213)..(1214): Xaa in position 1213 to 1214 is any amino acid
  Variant (1216)..(1217): Xaa in position 1216 to 1217 is any amino acid
  Variant (1221)..(1222): Xaa in position 1221 to 1222 is any amino acid
  Variant (1234)..(1238): Xaa in position 1234 to 1238 is any amino acid
  Variant (1239)..(1239): Xaa in position 1239 is any or no amino acid
  Variant (1241)..(1241): Xaa in position 1241 is any amino acid
  Variant (1243)..(1244): Xaa in position 1243 to 1244 is any amino acid
  Variant (1246)..(1248): Xaa in position 1246 to 1248 is any amino acid
  Variant (1256)..(1257): Xaa in position 1256 to 1257 is any amino acid
  Variant (1267)..(1268): Xaa in position 1267 to 1268 is any amino acid
  Variant (1274)..(1274): Xaa in position 1274 is any amino acid
FXXXHYXXXXXXXXXXXXXXXXXXXXIIXXXXXXSXXXYXXXXXXXXXXXXXXIDXLXXXXXAXTQXGLNXXXXNXLXXXQQXXXYXXXXXXXPIXXXXXXXXXRXYWFXXXFXXXXXXXXXXXXXXXXXXXXXRXXXXXXXXXXXXXXXXXXXXXXXXXXXXXXXXXXXXXXXXXXXXXXXXXXXXXXXXXXXXXXXXXXXXXXXXXXXXXXXXXXXXXXXXXXXXXXXXXXXXXXXXXXXXXXXXXXXXXXXXXXXXXXXXXXXXXXXXXXXXXXXXXXXXXXXXXXXXXXXXXXXXXXXXXXXXXXXXXXXXXXXXXXXXXXXXXXXXXXXXXXXXXXXXXXXXXXXXXXXXXXXXXXXXXXXXXXXXXXXXXXXXXXXXXXXXXXXXXXXXXXXXXXXXXXXXXXXXXXXXXXXXXXXXXXXXXXXXXXXXXXXXXXXXXXXXXXXXXXXXXXXXXXXXXXXXXXXXXXXXXXXXXXXXXXXXXXXXXXXXXXXXXXXXXXXXXXXXXXXXXXXXXXXXXXXXXXXXXXXXXXXXXXXXXXXXXXXXXXXXXXXXXXXXXXXXXXXXXXXXXXXXXXXXXXXXXXXXXXXXXXXXXXXXXXXXXXXXXXXXXXXXXXXXXXXXXXXXXXXXXXXXXXXXXXXXXXXXXXXXXXXXXXXXXXXXXXXXXXXXXXXXXXXXXXXXXXXXXXXXXXXXXXXXXXXXXXXXXXXXXXXXXXXXXXXXXXXXXXXXXXXXXXXXXXXXXXXXXXXXXXXXXXXXXXXXXXXXXXXXXXXXXXXXXXXXXXXXXXXXXXXXXXXXXXYLSXXXTXGRNSXFXXLXXXQXXELGGXEYRXXXXLXXXLXXYXXXXXXXXXXXXXXXIXXXXXXXXXVXXXGXXXXXXXXXWWXXXTXXSXFXXLGXXLXXXSMXSFXXXXXXXXXMXXXIXIGNTGFPXXLRFXIWXXXXXXXXXXXXXEXLXFLLDHPRRCFTXLFPXXXTWXLFXXLXXXNXXDXXXFXXLDXXXXXXXXXXXGXXXXXGLFQXXXTRTAGFXXXXLXXLHPXXQVSYMXMMYXSXXPXAISXRXTNVYEEXSLGXYXXXXXXXXXXXXXXXXXXXXXXXXXXXXXXXXXXXXXXXXXXXXXXXXXXXXXXXXXXXXXXXXXXXXXXXXXXXXXXXXXXXXXXXXXXXXXXXXXXHXRXQLXFDLWXXXLGLFXIXIXEGXXXXXXXXXXXXFXXFXXLFEXXSAYGTVGLSLGXXXXXXSXSXXFXXXSKLVIIAXXIRGRHRGLPXXLDRAIXLPS

SEQ ID NO: 152415 - protein, 60 aa, Artificial sequence
  protein pattern
  Variant (2)..(4): Xaa in position 2 to 4 is any or no amino acid
  Variant (7)..(8): Xaa in position 7 to 8 is any amino acid
  Variant (9)..(9): Xaa in position 9 is Ala, Cys or Ser
  Variant (10)..(10): Xaa in position 10 is Thr or Val
  Variant (12)..(12): Xaa in position 12 is Ala or Thr
  Variant (16)..(16): Xaa in position 16 is Ala, Asn, Ser or Thr
  Variant (17)..(18): Xaa in position 17 to 18 is any amino acid
  Variant (19)..(19): Xaa in position 19 is Asp or Ser
  Variant (20)..(20): Xaa in position 20 is Ile or Leu
  Variant (21)..(22): Xaa in position 21 to 22 is any amino acid
  Variant (24)..(24): Xaa in position 24 is any amino acid
  Variant (25)..(25): Xaa in position 25 is Pro or Ser
  Variant (26)..(26): Xaa in position 26 is Ala or Ser
  Variant (27)..(27): Xaa in position 27 is Ile, Leu or Val
  Variant (28)..(28): Xaa in position 28 is Pro or Gln
  Variant (29)..(29): Xaa in position 29 is Phe or Val
  Variant (30)..(30): Xaa in position 30 is any amino acid
  Variant (31)..(31): Xaa in position 31 is Phe or Tyr
  Variant (32)..(32): Xaa in position 32 is Met or Val
  Variant (33)..(33): Xaa in position 33 is Ile, Leu or Val
  Variant (37)..(37): Xaa in position 37 is Ile, Leu or Val
  Variant (38)..(38): Xaa in position 38 is Ala or Ser
  Variant (39)..(39): Xaa in position 39 is Ala, Ile or Val
  Variant (40)..(40): Xaa in position 40 is Phe, Leu or Met
  Variant (42)..(42): Xaa in position 42 is Ile or Leu
  Variant (44)..(44): Xaa in position 44 is Ile or Leu
  Variant (45)..(45): Xaa in position 45 is Ala or Ser
  Variant (46)..(46): Xaa in position 46 is Ile, Leu or Val
  Variant (48)..(48): Xaa in position 48 is any amino acid
  Variant (55)..(55): Xaa in position 55 is any amino acid
  Variant (59)..(59): Xaa in position 59 is Ile, Leu or Val
  Variant (60)..(60): Xaa in position 60 is Phe or Tyr
LXXXFQXXXXRXAGFXXXXXXXLXXXXXXXXXXMMYXXXXPXAXXXRXTNVYEEXSLGXX

SEQ ID NO: 152416 - protein, 40 aa, Artificial sequence
  protein pattern
  Variant (11)..(11): Xaa in position 11 is Leu or Met
  Variant (15)..(16): Xaa in position 15 to 16 is any amino acid
  Variant (17)..(17): Xaa in position 17 is Ala or Pro
  Variant (18)..(18): Xaa in position 18 is Asn or Thr
  Variant (20)..(20): Xaa in position 20 is any amino acid
  Variant (22)..(22): Xaa in position 22 is Phe or Leu
  Variant (23)..(24): Xaa in position 23 to 24 is any amino acid
  Variant (26)..(26): Xaa in position 26 is Ala, Ile, Leu or Val
  Variant (27)..(27): Xaa in position 27 is Ala, Gly, Ile, Leu or Val
  Variant (28)..(28): Xaa in position 28 is Leu or Met
  Variant (30)..(31): Xaa in position 30 to 31 is any amino acid
  Variant (33)..(33): Xaa in position 33 is any amino acid
  Variant (34)..(34): Xaa in position 34 is Ile, Leu, Met or Val
  Variant (35)..(35): Xaa in position 35 is Phe or Leu
  Variant (37)..(37): Xaa in position 37 is Ile, Met or Val
  Variant (38)..(38): Xaa in position 38 is Ile or Val
LLDHPRRCFTXLFPXXXXWXLXXXLXXXNXXDXXXFXXLD

SEQ ID NO: 152417 - protein, 40 aa, Artificial sequence
  protein pattern
  Variant (2)..(2): Xaa in position 2 is any amino acid
  Variant (3)..(3): Xaa in position 3 is any or no amino acid
  Variant (5)..(5): Xaa in position 5 is any amino acid
  Variant (6)..(6): Xaa in position 6 is any or no amino acid
  Variant (8)..(9): Xaa in position 8 to 9 is any amino acid
  Variant (10)..(10): Xaa in position 10 is Ile, Leu, Met or Val
  Variant (11)..(11): Xaa in position 11 is Gly or Ser
  Variant (14)..(14): Xaa in position 14 is Ile or Val
  Variant (15)..(15): Xaa in position 15 is Ile, Met or Val
  Variant (16)..(16): Xaa in position 16 is any amino acid
  Variant (17)..(17): Xaa in position 17 is Ala or Cys
  Variant (18)..(18): Xaa in position 18 is Leu, Met or Val
  Variant (19)..(19): Xaa in position 19 is any amino acid
  Variant (20)..(20): Xaa in position 20 is Ile, Leu or Val
  Variant (23)..(23): Xaa in position 23 is Lys or Arg
  Variant (24)..(24): Xaa in position 24 is any amino acid
  Variant (29)..(29): Xaa in position 29 is any amino acid
  Variant (30)..(30): Xaa in position 30 is Ala, Gly, Ser or Thr
  Variant (31)..(31): Xaa in position 31 is Ile, Leu or Val
  Variant (33)..(33): Xaa in position 33 is His or Arg
  Variant (35)..(35): Xaa in position 35 is Ile or Val
  Variant (36)..(36): Xaa in position 36 is Ile, Leu or Met
  Variant (39)..(39): Xaa in position 39 is Cys, Asp or Ser
  Variant (40)..(40): Xaa in position 40 is Ala, Asp or Glu
SXXSXXFXXXXKLXXXXXXXRGXXRGLPXXXDXAXXLPXX

SEQ ID NO: 152418 - protein, 59 aa, Artificial sequence
  protein pattern
  Variant (3)..(3): Xaa in position 3 is any amino acid
  Variant (4)..(4): Xaa in position 4 is any or no amino acid
  Variant (6)..(6): Xaa in position 6 is any or no amino acid
  Variant (8)..(8): Xaa in position 8 is Ala, Gly or Ser
  Variant (9)..(9): Xaa in position 9 is any amino acid
  Variant (11)..(11): Xaa in position 11 is Ala, Ser or Thr
  Variant (13)..(13): Xaa in position 13 is any amino acid
  Variant (14)..(14): Xaa in position 14 is Asp or Asn
  Variant (15)..(15): Xaa in position 15 is Leu or Val
  Variant (17)..(17): Xaa in position 17 is any amino acid
  Variant (18)..(18): Xaa in position 18 is Ser or Thr
  Variant (20)..(20): Xaa in position 20 is Ser or Thr
  Variant (21)..(21): Xaa in position 21 is Ala or Pro
  Variant (22)..(22): Xaa in position 22 is Asp or Asn
  Variant (25)..(25): Xaa in position 25 is any amino acid
  Variant (27)..(27): Xaa in position 27 is Phe or Tyr
  Variant (28)..(29): Xaa in position 28 to 29 is any amino acid
  Variant (30)..(30): Xaa in position 30 is Ala or Ser
  Variant (31)..(31): Xaa in position 31 is any amino acid
  Variant (32)..(32): Xaa in position 32 is Phe, Trp or Tyr
  Variant (33)..(33): Xaa in position 33 is any amino acid
  Variant (34)..(34): Xaa in position 34 is Leu or Met
  Variant (35)..(35): Xaa in position 35 is Ile, Leu, Met or Val
  Variant (36)..(36): Xaa in position 36 is any amino acid
  Variant (37)..(37): Xaa in position 37 is Met or Val
  Variant (38)..(38): Xaa in position 38 is any amino acid
  Variant (39)..(39): Xaa in position 39 is Phe or Trp
  Variant (40)..(40): Xaa in position 40 is Phe or Leu
  Variant (41)..(42): Xaa in position 41 to 42 is Ile or Val
  Variant (50)..(50): Xaa in position 50 is any amino acid
  Variant (51)..(51): Xaa in position 51 is Phe, Leu or Met
  Variant (54)..(54): Xaa in position 54 is any amino acid
  Variant (55)..(55): Xaa in position 55 is Ile, Met or Val
  Variant (58)..(58): Xaa in position 58 is any amino acid
  Variant (59)..(59): Xaa in position 59 is Ile, Leu or Met
WWXXFXTXXSXFXXXGXXLXXXSMXSXXXXXXXXXXXXXXXXIGNTGFPXXLRXXIWXX

SEQ ID NO: 152419 - protein, 28 aa, Artificial sequence
  protein pattern
  Variant (2)..(3): Xaa in position 2 to 3 is any amino acid
  Variant (4)..(5): Xaa in position 4 to 5 is any or no amino acid
  Variant (7)..(8): Xaa in position 7 to 8 is any or no amino acid
  Variant (10)..(10): Xaa in position 10 is Gly or Ser
  Variant (11)..(11): Xaa in position 11 is Phe, His or Tyr
  Variant (15)..(15): Xaa in position 15 is Phe or Tyr
  Variant (16)..(16): Xaa in position 16 is Ile, Leu, Met or Val
  Variant (17)..(17): Xaa in position 17 is any amino acid
  Variant (20)..(20): Xaa in position 20 is any amino acid
  Variant (22)..(22): Xaa in position 22 is Ile, Leu or Val
  Variant (24)..(24): Xaa in position 24 is Cys, Ser or Thr
  Variant (25)..(25): Xaa in position 25 is Ile or Val
  Variant (26)..(26): Xaa in position 26 is Ala, Cys, Thr or Val
  Variant (28)..(28): Xaa in position 28 is Gly or Asn
LXXXXQXXLXXDLWXXXLGXFXIXXXEX

SEQ ID NO: 152420 - protein, 18 aa, Artificial sequence
  protein pattern
  Variant (4)..(4): Xaa in position 4 is Ile, Leu or Val
  Variant (5)..(5): Xaa in position 5 is any amino acid
  Variant (15)..(15): Xaa in position 15 is any amino acid
  Variant (17)..(17): Xaa in position 17 is any amino acid
  Variant (18)..(18): Xaa in position 18 is Pro or Ser
LFEXXSAYGTVGLSXGXX

SEQ ID NO: 152421 - protein, 25 aa, Artificial sequence
  protein pattern
  Variant (2)..(5): Xaa in position 2 to 5 is any or no amino acid
  Variant (10)..(10): Xaa in position 10 is Ile or Val
  Variant (14)..(14): Xaa in position 14 is Ala or Ser
  Variant (15)..(15): Xaa in position 15 is any amino acid
  Variant (16)..(16): Xaa in position 16 is Asp, Lys or Arg
  Variant (17)..(17): Xaa in position 17 is any amino acid
  Variant (19)..(20): Xaa in position 19 to 20 is any amino acid
  Variant (21)..(22): Xaa in position 21 to 22 is Ile, Leu or Val
  Variant (23)..(24): Xaa in position 23 to 24 is any amino acid
EXXXXELGGXEYRXXXXLXXXXXXY

SEQ ID NO: 152422 - protein, 58 aa, Artificial sequence
  protein pattern
  Variant (3)..(3): Xaa in position 3 is any amino acid
  Variant (5)..(5): Xaa in position 5 is Phe, Leu or Met
  Variant (6)..(6): Xaa in position 6 is any amino acid
  Variant (7)..(7): Xaa in position 7 is Ala, Cys, Ser or Thr
  Variant (8)..(8): Xaa in position 8 is Ala, Gly, Ser or Thr
  Variant (9)..(9): Xaa in position 9 is Cys, Gly or Ser
  Variant (10)..(10): Xaa in position 10 is Ala or Ser
  Variant (11)..(11): Xaa in position 11 is Ala, Cys, Asn, Ser, Thr or Val
  Variant (14)..(14): Xaa in position 14 is Ala, Gly, Ser or Thr
  Variant (17)..(17): Xaa in position 17 is Ala, Asn or Gln
  Variant (18)..(18): Xaa in position 18 is Pro, Ser or Thr
  Variant (19)..(19): Xaa in position 19 is any amino acid
  Variant (20)..(20): Xaa in position 20 is Asp, Asn or Ser
  Variant (21)..(21): Xaa in position 21 is any amino acid
  Variant (22)..(22): Xaa in position 22 is Asn or Thr
  Variant (23)..(23): Xaa in position 23 is any amino acid
  Variant (24)..(24): Xaa in position 24 is Phe, Ile or Leu
  Variant (25)..(26): Xaa in position 25 to 26 is any amino acid
  Variant (27)..(27): Xaa in position 27 is Phe, Trp or Tyr
  Variant (30)..(31): Xaa in position 30 to 31 is any amino acid
  Variant (32)..(32): Xaa in position 32 is Phe, Ile, Leu or Val
  Variant (33)..(38): Xaa in position 33 to 38 is any amino acid
  Variant (39)..(39): Xaa in position 39 is Ala, Cys, Ser or Thr
  Variant (40)..(40): Xaa in position 40 is Asn, Thr or Val
  Variant (43)..(43): Xaa in position 43 is any amino acid
  Variant (44)..(44): Xaa in position 44 is Ile, Leu, Met or Val
  Variant (45)..(47): Xaa in position 45 to 47 is any amino acid
  Variant (48)..(48): Xaa in position 48 is Ile, Leu or Val
  Variant (49)..(50): Xaa in position 49 to 50 is any amino acid
  Variant (51)..(51): Xaa in position 51 is Phe, Ile, Leu, Met or Val
  Variant (52)..(52): Xaa in position 52 is Lys or Arg
  Variant (53)..(53): Xaa in position 53 is Phe or Leu
  Variant (54)..(54): Xaa in position 54 is His or Tyr
  Variant (55)..(55): Xaa in position 55 is Phe or Trp
  Variant (56)..(56): Xaa in position 56 is Phe or Tyr
  Variant (57)..(57): Xaa in position 57 is Glu, Asn or Arg
  Variant (58)..(58): Xaa in position 58 is Lys or Arg
IDXLXXXXXXXTQXGLXXXXXXXXXXXQQXXXXXXXXXXXPIXXXXXXXXXXXXXXXX

SEQ ID NO: 152423 - protein, 17 aa, Artificial sequence
  protein pattern
  Variant (4)..(4): Xaa in position 4 is Trp or Tyr
  Variant (5)..(5): Xaa in position 5 is any amino acid
  Variant (6)..(6): Xaa in position 6 is Ala or Pro
  Variant (7)..(7): Xaa in position 7 is any amino acid
  Variant (8)..(8): Xaa in position 8 is Phe, Ile, Met or Val
  Variant (9)..(9): Xaa in position 9 is Asp or Gly
  Variant (13)..(13): Xaa in position 13 is any amino acid
  Variant (15)..(16): Xaa in position 15 to 16 is any amino acid
YLSXXXXXXRNSXFXXL

SEQ ID NO: 152424 - DNA, 2700 bp, Saccharomyces cerevisiae
  CDS (1)..(2700)
atggcaaaaaagaaatctaagagcagatccaagagttctagaagagttttggatgctttgcaacttgctgagagagaaattaatggtgaattcgataactccagcgacaatgacaaaagacatgatgctcgtcgtaatggtacagttgtcaacttgttaaaaaggtcaaaaggtgacactaacagtgatgaagatgatatcgattctgagtcgtttgaagatgaggagttgaactctgatgaagcgttgggctctgatgatgactatgacattttgaattccaaattctcacaaactattcgtgacaagaaggagaatgcaaactaccaagaagaagaggatgaaggtgggtatacttccattgatgaagaagatttgatgccactgtctcaagtgtgggacatggatgagaaaaccgcacagagtaacggcaatgatgacgaagacgcttctccacaattaaaattgcaagatacagatataagttccgaatcaagcagttccgaagaaagcgaatcggaatctgaagatgatgaagaggaagaggatcccttcgacgaaatatctgaagatgaagaagacatcgaattgaatacaattacctcaaaactgattgatgaaaccaaaagtaaagctccaaagagactagatacgtatggctcaggtgaggccaatgagtatgttttgccctctgcaaatgcagctagtggagcttctgggaaattgagtttgacggatatgatgaacgttattgatgacaggcaagttattgaaaacgctaacttgcttaagggtaagtcgtcgacgtatgaagttccgctaccacaacgtatccaacaaagacacgatcgtaaggcagcatacgagatctctaggcaagaagtgagtaagtggaatgatatcgtccaacagaacagaagggctgatcatttaatcttcccgctgaacaaacccaccgaacataaccacgcctcggctttcactagaactcaagatgttcctcaaacagaattacaggagaaggtagatcaagttcttcaagagagtaatttagcgaacccagaaaaagactcaaagtttgaagagttgagcactgctaaaatgacacccgaggagatgagaaagaggactaccgaaatgagattgatgagagaattgatgtttagagaagaaagaaaagctaggaggttgaagaaaataaaatctaagacatatcgtaagatcaagaaaaaggaattgatgaaaaatagagagctagctgctgtttccagcgacgaagacaacgaagatcatgatatcgctagggctaaagaaagaatgactctaaaacacaagacaaattccaagtgggctaaagatatgatcaaacatggtatgacaaatgacgctgaaaccagagaagaaatggaagagatgctaagacaaggtgaacgtttaaaggcaaaaatgttggatagaaattctgatgatgaagaggatggtcgtgtgcaaacattaagtgatgttgaaaatgaggagaaagagaatatagactcagaagcattgaagagtaaattgggtaaaactggcgtaatgaatatggcctttatgaagaatggtgaagctagagaaagagaggcgaacaaagaaaccttacgtcaattaagggccgttgaaaatggtgatgatattaagctcttcgaaagtgacgaggaagagacgaatggagagaatattcaaataaataagggcagaagaatatataccccaggttccttggaatccaacaaagacatgaatgaactaaatgaccacactagaaaagagaataaagttgacgaatcaagaagtttggaaaaccgactaagggccaagaatagtgggcaatcgaaaaatgcaagaactaacgcagaaggcgcaataattgtggaggaggaaagtgatggtgaacctcttcaagacggtcagaataatcaacaggatgaagaagcaaaagatgttaatccttggttagctaatgaaagtgatgaagaacacactgtcaagaaacaatcttccaaagttaacgttattgacaaagacagttctaaaaatgttaaggccatgaacaaaatggagaaagctgagctaaagcaaaagaaaaagaagaaaggtaagtcaaacgatgatgaagatctcttgttgacggcggatgattctacacggctaaagatagtcgatccatatggtggttctgatgacgaacaaggggataatgtattcatgttcaagcagcaagacgtcattgcggaagcctttgctggcgacgacgtggtagcagaatttcaggaggaaaagaaacgtgtcattgatgatgaagatgataaagaagttgataccactttacctggttggggtgaatgggccggtgcaggttctaaaccaaaaaataagaagcgtaaattcatcaaaaaggttaagggtgttgttaataaagacaaaagaagagataagaatctacaaaatgtgatcataaatgaaaaagttaataagaaaaacttgaaataccaatcttcagcggtaccattcccattcgaaaatagagaacaatatgaaagatctttacgtatgccgataggtcaagaatggacatccagagcatctcatcaagagcttatcaaaccgagaatcatgactaagccaggccaagttattgatcctttgaaggcaccatttaagtaa

SEQ ID NO: 152425 - protein, 899 aa, Saccharomyces cerevisiae
MAKKKSKSRSKSSRRVLDALQLAEREINGEFDNSSDNDKRHDARRNGTVVNLLKRSKGDTNSDEDDIDSESFEDEELNSDEALGSDDDYDILNSKFSQTIRDKKENANYQEEEDEGGYTSIDEEDLMPLSQVWDMDEKTAQSNGNDDEDASPQLKLQDTDISSESSSSEESESESEDDEEEEDPFDEISEDEEDIELNTITSKLIDETKSKAPKRLDTYGSGEANEYVLPSANAASGASGKLSLTDMMNVIDDRQVIENANLLKGKSSTYEVPLPQRIQQRHDRKAAYEISRQEVSKWNDIVQQNRRADHLIFPLNKPTEHNHASAFTRTQDVPQTELQEKVDQVLQESNLANPEKDSKFEELSTAKMTPEEMRKRTTEMRLMRELMFREERKARRLKKIKSKTYRKIKKKELMKNRELAAVSSDEDNEDHDIARAKERMTLKHKTNSKWAKDMIKHGMTNDAETREEMEEMLRQGERLKAKMLDRNSDDEEDGRVQTLSDVENEEKENIDSEALKSKLGKTGVMNMAFMKNGEAREREANKETLRQLRAVENGDDIKLFESDEEETNGENIQINKGRRIYTPGSLESNKDMNELNDHTRKENKVDESRSLENRLRAKNSGQSKNARTNAEGAIIVEEESDGEPLQDGQNNQQDEEAKDVNPWLANESDEEHTVKKQSSKVNVIDKDSSKNVKAMNKMEKAELKQKKKKKGKSNDDEDLLLTADDSTRLKIVDPYGGSDDEQGDNVFMFKQQDVIAEAFAGDDVVAEFQEEKKRVIDDEDDKEVDTTLPGWGEWAGAGSKPKNKKRKFIKKVKGVVNKDKRRDKNLQNVIINEKVNKKNLKYQSSAVPFPFENREQYERSLRMPIGQEWTSRASHQELIKPRIMTKPGQVIDPLKAPFK

SEQ ID NO: 152426 - DNA, 2655 bp, Oryza sativa (japonica cultivar-group)
  CDS (1)..(2655)
atggctgggacgaagcccagagggaagccgaaatccagggctctggttgccggggcagctcacggggggaaggagaagaagggcgtgacgggcggggcggggaagcgcggggacaggcgcggcggccgccatggcccgcgcctccccacggcgctgcgccggcagctcgacgcgctggggcccggcacctcgaggggttccgacgaggacgaggaggccgggtccgacgacgagggggcacacgacgtgtacgagtacgaggaaggggtccccgaggaggaggccgggaagaacggccgctacgacgccgtcgagaagtacgagtacgagttcgacagcgacgcctccaatgcggatgaagacgtgccatcagatgaaggtgaggatatggaggaagatgatgccggcgaggatgaagatgaggagaagcagataagaatacttcaggagacgactggcatgcctagggaagcgtttgatgggggtaagaggaagaaacagccattggagctgccgtttcagcctggagttggagatggtccagtcacaattcatgatctcttgaataatattcagggtaagcctgggtatagcaagctccgaaagaggctgcaacagcaggagaaaaagccaatagtcgtgcaggccccacttgcaaaagtggagagagagaagctcgagcgtggtgtggtataccagcaatccaagaaggaggtcaccaagtgggagccattagttaagaggaaccgtgaggcacccacactctactttgaaaatgatctcaacttaggggttaacacagttggggcaatagctagtgaatttaaaccaagaaatgaatttgagaagcagatggctgagattatgcgtagcacagaaatgatggaagcacacaagaacgatggtgttaaaatactggaacttaacaagattgacatggaagatgtgagagaacgtcaaaatcgacttgctaaaatgcgcagccttctgttccgtcatgagatgaaagcaaaacggataaagaagatcaagtccaggacttatcaccggatgttgaaaaaggataaactgaaggcagcatcagcagactttgaggcagatccggaagctgccaaagagcatgctatgaaacaggaatttaaacgtgcagaggaacgaatgagattaaagcacaagaatacttccaaatgggctaagcgaatcttgaagcgtggattggatgttcaagatgaaggcactcgtgctgctattgcagcacaactccaacaaaatgctcttcttactagaaaaatgaattccacaaaagacgattctagtagtagtgaggaaagttctgatgatgaggaagatgacgatgaatcagaagcaaacattctgaacaaaggaaaagaaaagattcttaaaattcttggggatgataatgagataccaacatctggagtcttttcgttgcctttcatggagcgcgctatgaagaagcatgaggaagcaacttatgaggaagcacggctagctctagaagagtgtgatgaatcattgaggaaattggaggatggtaacactgaagagaatggagattcagtgaaggttactggtaaaagaacttttggacctgccgaagatacaaacaaagtgacaaataagaagcaaaaattagatgacggcgacaagaacagtgatagcgaatatgagtctgactctgctcaacatctggatgacaatgaagtacataagatagatgatgtgcaaattgggactgcactcctggatgatgatgaaccacaggatgatctgttcaaaagcttcgatgatattataaaaaatcctggccgcaaaacaactgttgaagttggaatgttagctgataattcatggaagaagttcaagagtagcaaaggaaatgatgggagcaataccaatggtgatatagataaatccacagtgaaggtttcttatatggcagaccaaaagcttaagcaattggatcacaattctgattcagattcggaggatgagatggttgagggtttattgaccatctccgatgcaaaggaaaattataaaattccgtcgcaagctgatcttatacgccaggcttttgctggtgatgatgttgaggctgaatttgagaaggacaaactggatgttttaaatgaagagaatcctgaacctgaaaaacctgctcttgttcctggttggggacagtggactgacattcaacagaaaaaaggacttccttcttggatggtgaaagaacatgaaaatgcgaaaaggaagagggaagaagccttgaagaggaggaaggatgctaagctcaagcatgttatcatttctgaacatgttgacaagaaggctgaaaagcttttagtgaggaatctgccttttccttacacttcaaaggatgtatatgagcagagtatccgtatgcctattggacctgatttcaatccagcgatatcagttgctgctctcaatcgacctgcgattgttaagaagcctggagttgttatcaagccaatacaatatgaagaggttgatccccatgagaagcctgatgaaccgaaaagggtcatccagagagctgttccaaaccccaaagcaaagagaacctctgcgaagcaagcaaaggcgatagcttcaaataagaggaagtga

SEQ ID NO: 152427 - protein, 884 aa, Oryza sativa (japonica cultivar-group)
MAGTKPRGKPKSRALVAGAAHGGKEKKGVTGGAGKRGDRRGGRHGPRLPTALRRQLDALGPGTSRGSDEDEEAGSDDEGAHDVYEYEEGVPEEEAGKNGRYDAVEKYEYEFDSDASNADEDVPSDEGEDMEEDDAGEDEDEEKQIRILQETTGMPREAFDGGKRKKQPLELPFQPGVGDGPVTIHDLLNNIQGKPGYSKLRKRLQQQEKKPIVVQAPLAKVEREKLERGVVYQQSKKEVTKWEPLVKRNREAPTLYFENDLNLGVNTVGAIASEFKPRNEFEKQMAEIMRSTEMMEAHKNDGVKILELNKIDMEDVRERQNRLAKMRSLLFRHEMKAKRIKKIKSRTYHRMLKKDKLKAASADFEADPEAAKEHAMKQEFKRAEERMRLKHKNTSKWAKRILKRGLDVQDEGTRAAIAAQLQQNALLTRKMNSTKDDSSSSEESSDDEEDDDESEANILNKGKEKILKILGDDNEIPTSGVFSLPFMERAMKKHEEATYEEARLALEECDESLRKLEDGNTEENGDSVKVTGKRTFGPAEDTNKVTNKKQKLDDGDKNSDSEYESDSAQHLDDNEVHKIDDVQIGTALLDDDEPQDDLFKSFDDIIKNPGRKTTVEVGMLADNSWKKFKSSKGNDGSNTNGDIDKSTVKVSYMADQKLKQLDHNSDSDSEDEMVEGLLTISDAKENYKIPSQADLIRQAFAGDDVEAEFEKDKLDVLNEENPEPEKPALVPGWGQWTDIQQKKGLPSWMVKEHENAKRKREEALKRRKDAKLKHVIISEHVDKKAEKLLVRNLPFPYTSKDVYEQSIRMPIGPDFNPAISVAALNRPAIVKKPGVVIKPIQYEEVDPHEKPDEPKRVIQRAVPNPKAKRTSAKQAKAIASNKRK

SEQ ID NO: 152428 - DNA, 2568 bp, Arabidopsis thaliana
  CDS (1)..(2568)
atgggagaaaagagaaaatctacttcgaaaaccctagctaagaacaagaagaggaaaggtcctcatttgcctaattcaatcctgaagactattgccaatgagaaacgtcctttgaactctgacgaagatgacgatgagatcgattccgacgatgaaaacgtcgatttgtatgagtatgaagaaggtgtgcctgaggaagagtctaagaaaaacaatcgctatgaccgcgtcgataactacgactacgagcttcccgaggatttcgaggatgaaaatgtggagtcagatgatgatgaagatggtggaaacagcgagaatgaggaaggtgaaggtgatgacgatagacacacacggatgttgcaaggtctcactggaatgccaagtgctgcctttcaagaagagagtaagaagagacctgtactctatactgaagcgtatccagagtctgaattcaatcctacccgtgatgttctggagggtaaaggcctcatctcagttgaggaccttttggcgcctcttgaaggaaaacctgggtttaacgatctaaataagaggatcaaccggatgcagaaagatactcagtctgttgttcatgcacctttgcctaagccagaacgagaaagactagagcggaaagctgtgaaaggactagttgagaaggactttaataagtgggtgcatctggtcaagaggaatagggaggcaccaactgtttactttaatcaacctgtcaatgttgggtattctacagtcggtgcaatagcatcagagtttcaacccaggactgaatttgagaagaaaatggcttctgtactcaaagataacgagcttggggaggctcacaaagaagatggcgctaagcttcttgaattgaatgaggtgtcgatggaagaccacatcaagtaccgtgaccacattgccaagatgcggagcctgctattccgccatgaactgaaaagtaaacgtatcaagaagattaagtctaaaacttatcatcgccttaaagggaaggacctgaagaaatcagcgatgggagcattaatggacccagaaatggctaaagaagaggctattaagcaggagactagacgagtagaggaacggatgactttgaagcacaaaaacacaggaaaatgggccaaacgcatgttaagccgtggactgactgagagatatgatggaactagggcagctatatctgaacaacttcagattaatgctactttgtccagaaagatgaactccacgaacgatggaagtagtagtgatgagagcgacgatgaggaagagttgagttgtggttcagatcaggatactccttctaaattgatagcgaaagccagggagaagacactgaaaactatggaagatgatgatgtacccaattctggtcttctttcattacctttcatggctcgtgctatgaaaaagaaaaatgaggaagctaatgaagaagctaaacgtgcatttggggagtataaagaattggagaattttggtggagaagataatcctaaaaaatccgctgatgttagtggtagaagagtatttggtgccacctctaaagtcgaagctccaaaagagtctaaaaaggactcggacaatttttatgacaacagtgatagtgacaatgatatggaaggtatagaaaataatgaccttggggctgttggagatactgcttcacctgctagaaacactggagccataacagagaccgagaagtgttgtggtgatgttgaaaatccagcttctaagacaacatttgatgttgccttatttgcgtcaggctcttggaagaagatgaaaggctcccaaaatgcagaatccaaaaaagctccaaagactcgtgtaccaatctcaaagggccaagataaaaaggaatcgagagatgaagaaagtgaagattcagagagtgaagctgagcaaatggttgatgggattttgacatctgcttcgaaggagacctatgaaatcccttctcaagcagagcttatacaacgtgcttttgctggtgatgacgttgtagaagaatttgagaaggataagcaagaagttctaaatcaggaagttcctgaaccggaaaagccggttctagttcctggttggggacaatggaccaatgtccaaaagaagagaggtttaccttcatggatggttagagaacatgaagatgcaaataaaaagagaaagctagatctcaaaacaaggaaagactatcgtctcagaaatgttatcatatcagagaaagtcgataaaaaggctgacaaacttcatacaacgactctacctttcccatatacatctaaggaagttttcgaacacagcatgcgcatgcctataggacccgagtttaatcctgcgactattgttggagctctcaaccgacccgaggttgtgaagaaagctggtgtgataattaaaccggtcaaatttgaggaagtgaatccaaacgagaaagcagatgacgaaaaccctcgaagccatcaaaaacaaagacccaaaaagggtagtaaaaccagtaaaggtcaaggcaaaaacaagtccaagctaaagaccaaagcttag

SEQ ID NO: 152429 - protein, 855 aa, Arabidopsis thaliana
MGEKRKSTSKTLAKNKKRKGPHLPNSILKTIANEKRPLNSDEDDDEIDSDDENVDLYEYEEGVPEEESKKNNRYDRVDNYDYELPEDFEDENVESDDDEDGGNSENEEGEGDDDRHTRMLQGLTGMPSAAFQEESKKRPVLYTEAYPESEFNPTRDVLEGKGLISVEDLLAPLEGKPGFNDLNKRINRMQKDTQSVVHAPLPKPERERLERKAVKGLVEKDFNKWVHLVKRNREAPTVYFNQPVNVGYSTVGAIASEFQPRTEFEKKMASVLKDNELGEAHKEDGAKLLELNEVSMEDHIKYRDHIAKMRSLLFRHELKSKRIKKIKSKTYHRLKGKDLKKSAMGALMDPEMAKEEAIKQETRRVEERMTLKHKNTGKWAKRMLSRGLTERYDGTRAAISEQLQINATLSRKMNSTNDGSSSDESDDEEELSCGSDQDTPSKLIAKAREKTLKTMEDDDVPNSGLLSLPFMARAMKKKNEEANEEAKRAFGEYKELENFGGEDNPKKSADVSGRRVFGATSKVEAPKESKKDSDNFYDNSDSDNDMEGIENNDLGAVGDTASPARNTGAITETEKCCGDVENPASKTTFDVALFASGSWKKMKGSQNAESKKAPKTRVPISKGQDKKESRDEESEDSESEAEQMVDGILTSASKETYEIPSQAELIQRAFAGDDVVEEFEKDKQEVLNQEVPEPEKPVLVPGWGQWTNVQKKRGLPSWMVREHEDANKKRKLDLKTRKDYRLRNVIISEKVDKKADKLHTTTLPFPYTSKEVFEHSMRMPIGPEFNPATIVGALNRPEVVKKAGVIIKPVKFEEVNPNEKADDENPRSHQKQRPKKGSKTSKGQGKNKSKLKTKA

SEQ ID NO: 152430 - DNA, 2637 bp, Candida glabrata CBS 138
  CDS (1)..(2637)
atggcaaaacgtaaaggaaatacaagatctaaaagctccaagagagctttaaatgcccttgaacttgcagagagggaagttggaggtcaagattctgaagaagaagaagaattttatgatagaaataagaagaatggtactgttgttaatcttttgaagatggtaaacgggggtgacgatgaagatgttgaggatggcggtgattcttttgaagatgaagagctagactctgatgaagcgcttggttcagacgatgactatgatatcctaaattcaaagatgtctcaaactatccgtgacaagaagaaaagaggtgaatataatagtgaagaggaggaggagaattatacttctatcgatgaagatgaacttatgccactatcgcaaatttgggatatggacaccaagggtggagatgataccaaaggttcaacgacaagagatgaaagcttacaacttgctagtgatgtagatagctcatctgaaggttcatcttcctctgatgaggaatccagcgatgatgaaagccaagaaagtgaggatccatttgatgaaatttcagatgatgaagaagatattgatcttgctaatgttacttcaaagttagtaaaagagactgaaatgcacgttccaaaaaaactaagtaactatggtcatggtgaagctaatgattttgctctgccatcattaactagcgaatccgggattcagaagttgagtatggaagaaatgatgggcgccatagatgataaacatgcagtgacacaagccagtcttctgaaaggtaagtcattagcaactgcagttccactaccacagagaattcagcaaagaaatgagcgtaaagcagcctatgaaatctctaaagaagaaatgaataaatggactgaagttgttcagcagaatagaagagccgagcacctagtattaggttcgaataaagaaaaagttcacaatgacgcttcagcttttacaagaatgacagagaagcctacttctgaacttcaaagtaaggtcgatgaactactaggcgaaagtaatttagttgatcctcaaaaggaatccacttttgaagagcttgctactgcaaagatgactcctgaagagatgaagaaaaggacggctgagatgaggctgatgagggagcttatgtttagagaagagcgcaaagctaagagattaaagaaaattaagtcgaaaacttatagaagaatcaaaaagaaagaagctatgaagaacagagaacttgccggattgtctgatgagagtgatactgaacatgacattagaagagcaaaggaaagaatgacgctaaaacataagacaagctctaagtgggctaaagacatgataaaacatggtatggcaaatgacaaggaaaccagagaagaaatggaagaaatgttgagacaaggtgaaaaactaagagataagatcattgataggcaatcgggtgactcagataataatattagcgatattgaacaagactcagagcaagatattgatgtggaaaaggttggaaaaactggtgtgatgaatatggctttcatgaaaaatgctgaagccagagaaaaggcagaaaacaaacagtttattgagaaattaagggaatttgaaaagacaggtgatgatgatctctttgaaagcgatgatgaaaagccagtcattgagggtaaggacacagtaacatccattaataaaggaagaagaacttatgctcctggtgatttggaaatgaggcatgaaatgaaaaaaattaaagaagaagttaggaaggaaaaggaaatagacgagtccagaactttagttaacagattaaagcgtagaaatgaaaataatgaggaagaaataattgatgttgttgaagaagttgtgccgcctaaagaagaaaaaactgccccaaaatcaaaaactaaatcagagtccagtaatccatggcttgatgggagtgatgatgaagatgttaatgtcaagcagtctagcaaagtacatatcattgacaaagatagctcaaagctttctaagagtgctaacaagattgagaaagccaaggccaagagtaagaaatctaataaaagagaaaatgatagtgatgaattactgctaactacagataagtccaattctctgaagattgttgatccttatggtggatctgatgatgaaggtcaggaatttatgttcaaacaacaagatgtcattgcggaagcgtttgcaggtgatgatgttgttgcggaatttgaacaagagaagaccagagttgctgatgatgaaggtgataaagaagaagatgttacattacctggctggggtgattgggcaggttctggtgtgaaccctagaaagaagaggaaatttatcaagaagatcaagggtgttgttgataaagataagagaaaggacaagtacttaaagaatgtcataataaatgaaaaggtgaataagaaaaatatgaaataccaatcatctgccgttccattcccatttgagagcagggaacagtacgagagatcgttgcgtatgccacttggtcaagaatggactgccagatctactcatcaaaagatgatcaaacctagagtcataaccaaacctggtcaagtcattgatccattaaaaaatccattcagttag

SEQ ID NO: 152431 - protein, 878 aa, Candida glabrata CBS 138
MAKRKGNTRSKSSKRALNALELAEREVGGQDSEEEEEFYDRNKKNGTVVNLLKMVNGGDDEDVEDGGDSFEDEELDSDEALGSDDDYDILNSKMSQTIRDKKKRGEYNSEEEEENYTSIDEDELMPLSQIWDMDTKGGDDTKGSTTRDESLQLASDVDSSSEGSSSSDEESSDDESQESEDPFDEISDDEEDIDLANVTSKLVKETEMHVPKKLSNYGHGEANDFALPSLTSESGIQKLSMEEMMGAIDDKHAVTQASLLKGKSLATAVPLPQRIQQRNERKAAYEISKEEMNKWTEVVQQNRRAEHLVLGSNKEKVHNDASAFTRMTEKPTSELQSKVDELLGESNLVDPQKESTFEELATAKMTPEEMKKRTAEMRLMRELMFREERKAKRLKKIKSKTYRRIKKKEAMKNRELAGLSDESDTEHDIRRAKERMTLKHKTSSKWAKDMIKHGMANDKETREEMEEMLRQGEKLRDKIIDRQSGDSDNNISDIEQDSEQDIDVEKVGKTGVMNMAFMKNAEAREKAENKQFIEKLREFEKTGDDDLFESDDEKPVIEGKDTVTSINKGRRTYAPGDLEMRHEMKKIKEEVRKEKEIDESRTLVNRLKRRNENNEEEIIDVVEEVVPPKEEKTAPKSKTKSESSNPWLDGSDDEDVNVKQSSKVHIIDKDSSKLSKSANKIEKAKAKSKKSNKRENDSDELLLTTDKSNSLKIVDPYGGSDDEGQEFMFKQQDVIAEAFAGDDVVAEFEQEKTRVADDEGDKEEDVTLPGWGDWAGSGVNPRKKRKFIKKIKGVVDKDKRKDKYLKNVIINEKVNKKNMKYQSSAVPFPFESREQYERSLRMPLGQEWTARSTHQKMIKPRVITKPGQVIDPLKNPFS

SEQ ID NO: 152432 - DNA, 2580 bp, Kluyveromyces lactis NRRL Y-1140
  CDS (1)..(2580)
atggcaaagagacctagaagtactggccgtacaaaaaagcagtctaagagaagagctttctctgctttggaaatcgcgagaagagaacttgaaggtgatgatagttcatcagataatgaaaccggaaaacacggtgccattctaaatgctaggaaaaaagaggatgcagattctggtgaggatagtttcgaagatgaagaactagactctgatgaggctctaggatccgatgatgattacgatgttttaagttccaaattctcacagaccatcagagaccaaaaaaaggcaaagaagaatgtccctaagtactacgattcagaagaagacgatggtggatatacttctatagaagaggatgagttagtgtcattatctgcagcctgggatatggacgataaggaatctaagggcgatgatgatgctgattcgaaattaaatctaaatgataacctatcagaccaagaaactagtgcctcagaagagtcctcgagcgaagaggaagaagtcagcgaagaggaagatccatttgcagatatttctgaagacgaggatgagacaaacctaagtaatgttgtcactttactaaacaaagataaagacaagaaacagatgaaaaaacttgagaattatactgttggagaggaaaacgaatttgctcttccaaccaataaatctggtgataagttagatatttctgctatgttggctgctgtcgatgacccattagtatcgcaaaaggctagtctactgaaagggaagcaaactgccttggctactcctctaccgcaaagaattcaaaagaggttggaaagaaaggcagcatatgaaatctccaaggatgaagttaataaatggcaggatgcagttcagcatttaagacaagcagaacacatatcatttcctttgaatccagaaactcaacataacgaatcgaatgtcttcatcaaggaacagcctaatgttgaaactgaagtggaatccaaggtctcagcagtactagaaaagagcgatctggctgctcctttgaaagaatctactttcgaagaaattgagactgctaagatgacgcctgccgaaatgaagaagagaacagctgaattgagactcatgagagaattgatgttcagagaagaaagaaaggctaagagaataaagaagataaagtcaaaggcatatcgccgtataaagaagaaagaaatgcttaaaaatcaagaatttattgagtcagatgaaagtgacactgatcatgatatagcaagagctaaggaaagaatgacgttaaagcacaagacacaaggaaaatgggctaaggatatgatcaagcatggtatgactaaggacaaagaaacaagggaagagatggaagaaatgctaaggcaaggtgaaagattgaaggaaaaaattcttggcagagacggcgatgaacagagtgcagatgaagacatagatacactagaagctgacgggaatgatgctgattcggaggaggaatcctcggccagagaaaaggttggtaaaaccggtgttctcaatatggcttttatgcggaatgcagaagcgagggaaaaagaggctaatgaagaacagctaaaggcacttagagatatggaaagaaatggtgaagctgacattttcgatgctggtgagaatagcaatgctaacaagactttgaaccaaggtagaagagtatatacaccaggaaccgctgaatcccgtgaagaattgaccaagttgaataatgaaattgcggaggaaattgaaatcgatcaatcaaaatcactagtcagtcgtttatctaaggatcaaaagaaatctaactccaaatcaaagtcaactaagaaagactcatccagtgaaaccgatgtaaatgctaatccatggttgaatgatagtgatgatgaaagtaatgtcaaaaaatcatccaaggttcacgtagttgatcaagacagttcccagttatctaaagctgcgcacaagatcagaaaagagatggtaaaacaaagcaagaagaaacccagttccacaaaagatgaagacgttctacttgatcttgaggatagcaacactttgaacatcgttgatgcttatggtggttctgatgatgaaacttctacaaataccatgtttaaacaacaagaggtcatagccgatgcattcgctggggacgatgttgtttctaaatttgaagaggaaaaaaggagagtcgctgttgatgaagatgataaggaagaggacgtcacattgcctggctggggtgattgggccggtgctggtgctgaaaccaaaagaaagcggaaattcatcaagaagacgaaaggtgtggtggaaaaagacaaaagaagagacaaatcattgaagaacgtcatcataaatgagagagttaacaaaaagaacttaaaatatcaatcgtcctctgtccctttcccattcgaaagcagagaacaatacgaaagatctttaagaatgccactagggcaagaatggacttccagaacatctcatcaaaagatgataaagccaagaattttgaccaagggaagtacagttatagacccattaaaagcgcctttcaaatag

SEQ ID NO: 152433 - protein, 859 aa, Kluyveromyces lactis NRRL Y-1140
MAKRPRSTGRTKKQSKRRAFSALEIARRELEGDDSSSDNETGKHGAILNARKKEDADSGEDSFEDEELDSDEALGSDDDYDVLSSKFSQTIRDQKKAKKNVPKYYDSEEDDGGYTSIEEDELVSLSAAWDMDDKESKGDDDADSKLNLNDNLSDQETSASEESSSEEEEVSEEEDPFADISEDEDETNLSNVVTLLNKDKDKKQMKKLENYTVGEENEFALPTNKSGDKLDISAMLAAVDDPLVSQKASLLKGKQTALATPLPQRIQKRLERKAAYEISKDEVNKWQDAVQHLRQAEHISFPLNPETQHNESNVFIKEQPNVETEVESKVSAVLEKSDLAAPLKESTFEEIETAKMTPAEMKKRTAELRLMRELMFREERKAKRIKKIKSKAYRRIKKKEMLKNQEFIESDESDTDHDIARAKERMTLKHKTQGKWAKDMIKHGMTKDKETREEMEEMLRQGERLKEKILGRDGDEQSADEDIDTLEADGNDADSEEESSAREKVGKTGVLNMAFMRNAEAREKEANEEQLKALRDMERNGEADIFDAGENSNANKTLNQGRRVYTPGTAESREELTKLNNEIAEEIEIDQSKSLVSRLSKDQKKSNSKSKSTKKDSSSETDVNANPWLNDSDDESNVKKSSKVHVVDQDSSQLSKAAHKIRKEMVKQSKKKPSSTKDEDVLLDLEDSNTLNIVDAYGGSDDETSTNTMFKQQEVIADAFAGDDVVSKFEEEKRRVAVDEDDKEEDVTLPGWGDWAGAGAETKRKRKFIKKTKGVVEKDKRRDKSLKNVIINERVNKKNLKYQSSSVPFPFESREQYERSLRMPLGQEWTSRTSHQKMIKPRILTKGSTVIDPLKAPFK

SEQ ID NO: 152434 - DNA, 2679 bp, Debaryomyces hansenii CBS767
  CDS (1)..(2679)
atggcacgtaagaacactaagaataagtcttctagtaggaagagaagttcccaaaaggttcttgatgcgtttcaaattgcagaacgtgcagaaaatagatcagaagatgattcggacaatcgtccgggagatgaagatgacttagaagtacacgatgggattatggatgctagtaaatttttggctaataaaagcaaagatgatgaaggactcagtgacgaagaattagactcggatgaagcattaggatctgatgacgattatgatattttaacttcaaaattttcccaaaccattagagacaaagaaaagaaaaggaagttgaacgaaaagaaaagaaagagaggcgaatatagagacagtgaaagtgaagatgaggaagaagatgaagggtatgcaagtatagacgaaagtcaattggttaccttatcacaagcatgggatatggatgaaaaagatgcaaagagccttcaaaagtctaatgataataatgatcttgtattggatgatgcatgggaatctgaatcttccgaagaagaaagtgaagaagaaagtgaggaagaaagtgatgatgatgaagatatcttcaagtctgcatctgaaaatgagaatgacgacgaggttgatttagcaaacaccgtatctcaattacaatcgcaattaaagaagccagccaaagaaagaaaaagattgattgctgaggctactgatgaaaatgaattcaacttgccaacaaagggtgtgacattatcgttacaagatatgatatcggcggttgacccatctgtatcgaaagatgccatcttaatcgataatgaagataatagcaaacaaaaagcattagctactccacttccaaagcgtatacaagaaagaaatgaaagacaaatcgcttatgagattaccaatgaagatatcagtaaatgggaagatacggtccaacaaaacagacaggccgaagtattaaaatttccattgaacccagagatcaagcataatgataccgctaccacattcagatcctcgaatgagcctagtacagaattggagaagaagattcaaggcattcttaaagactctgcattaactgatgataggaaggaagccacattcgaagagattgcggctgcaaaattatcttcagaagaattgaaaaagagaactaatgagttgaggttaatgagagaattaatgttccgtgatgaaaagagggccaagcgtattaagaagataaaatccaagacatatcataaaatcaaaaagaaggaaagattaagaactcaagagatggttgaggggtctgatatggaatctgataatgaagatcatgatatgaagagagccaaagagaggatgttattgaagcataaaactcagtctaaatgggccaaatcaatgattaagagtggattatcaaaagacgcatcaaatagagatgacttggaagaaatgttaagacaaggtgaaaaattgagatctaagcaattgggttatgaagatggagatcaaagtgaccaggacgtttctgatattgaagatgaatatgccaaggacgatgagaccaatgagactgatgatataaatagaaataagttaggtaagggtgtattggcaatggacttcatgaaatcggccgacaaacgtcacaaacaagaaaatttgaaagaattagaattattaaagaaattagaaaatggtggtgacttagatgaatttcaagaagacgccacctctattaatgttacaaagaatcaaggtagaagagtctacactccaagtgcatcatccatgaaatccgatattaatgaagtcaatcaaaaaaccttaaacgaacttagagatgatgaatctaacaacttagagaatagattaagtaagaaatttaaagtggtggataattcaatttccaataaaaagccaaataatttatctaaggatgttgaggaagaaaagaaactgaaagcatctgatgaagctgaggatgtcaatccttggttagcaggcaatgattctgaagaagcgatgcagaagtctagaaagattcataaggttgacaaaacttcatctaaattatcaaagtcggctcaaaagatttctaaaaataaaaagagaagtgcttcacaaagagatgatgaagatactataattgatatgcatgaaactttgaaggccagagatatccatgatgatgataatgagaattcaaatgatgaagataaggacgatggacttatgttcaagcaaaagaacttaattaaacaagcattcgcgggggacgacgttgtacgagaattcgagaaagaaaaaagacaggttgttaaagatgaaggtgataaagtagaagatgtaacattaccaggatggggtgattgggcaggagggaagaaaaaagctaagaagatagtgcgtaaaattgacggtgttgttcaaaaagataagagaaaggataagaatttaaaggacgttatcattaatgaaagagtcaacaaaaagaacttgaaataccaatcatcaggagttccattcccttacgagtctagagagcaatacgaaagagctttgagaatgcctgtgggtcaagaatggacttctagagagacccatcaaaaattgactatgcctagaatcatcactaagcaaggtaccgttattgatccattaaaagcgccattcaagtag

SEQ ID NO: 152435 - protein, 892 aa, Debaryomyces hansenii CBS767
MARKNTKNKSSSRKRSSQKVLDAFQIAERAENRSEDDSDNRPGDEDDLEVHDGIMDASKFLANKSKDDEGLSDEELDSDEALGSDDDYDILTSKFSQTIRDKEKKRKLNEKKRKRGEYRDSESEDEEEDEGYASIDESQLVTLSQAWDMDEKDAKSLQKSNDNNDLVLDDAWESESSEEESEEESEEESDDDEDIFKSASENENDDEVDLANTVSQLQSQLKKPAKERKRLIAEATDENEFNLPTKGVTLSLQDMISAVDPSVSKDAILIDNEDNSKQKALATPLPKRIQERNERQIAYEITNEDISKWEDTVQQNRQAEVLKFPLNPEIKHNDTATTFRSSNEPSTELEKKIQGILKDSALTDDRKEATFEEIAAAKLSSEELKKRTNELRLMRELMFRDEKRAKRIKKIKSKTYHKIKKKERLRTQEMVEGSDMESDNEDHDMKRAKERMLLKHKTQSKWAKSMIKSGLSKDASNRDDLEEMLRQGEKLRSKQLGYEDGDQSDQDVSDIEDEYAKDDETNETDDINRNKLGKGVLAMDFMKSADKRHKQENLKELELLKKLENGGDLDEFQEDATSINVTKNQGRRVYTPSASSMKSDINEVNQKTLNELRDDESNNLENRLSKKFKVVDNSISNKKPNNLSKDVEEEKKLKASDEAEDVNPWLAGNDSEEAMQKSRKIHKVDKTSSKLSKSAQKISKNKKRSASQRDDEDTIIDMHETLKARDIHDDDNENSNDEDKDDGLMFKQKNLIKQAFAGDDVVREFEKEKRQVVKDEGDKVEDVTLPGWGDWAGGKKKAKKIVRKIDGVVQKDKRKDKNLKDVIINERVNKKNLKYQSSGVPFPYESREQYERALRMPVGQEWTSRETHQKLTMPRIITKQGTVIDPLKAPFK

SEQ ID NO: 152436 - DNA, 2913 bp, Yarrowia lipolytica CLIB122
  CDS (1)..(2913)
atgggaaaacgaagcaaaagcagccggtccgggcgaaccacgaccgccggcaaggtgttttcgtccaagcgagccacgtcgtacaaaaacgaaaccgagccctccaagcccgtacccaagtctcgaggcaagcatgctctgttgaacgcctttgaaatcgccgaggctgaggagcgaaagaaggcccgtaagaacggggaggagtactccgacgactccgaggatcacgacattgacgatgtttacgatgacggtattgttcggttcaacaaggacggaactagaaaggtgtatcagcctggcgatgaggaggaggaggaagacgactcggaaatcgactctgacgaggcgtttggctctgacgacggcgacgaggagattctggactctttcggcgtcaagtccaaggccaaggccaagttcaaggccatggaggacgagtacgactctgtggacgaggaggagtttgtggatctttccgaggcctgggatctggacgatcgtcagcaggagaacctcaagaagaagagcggtgagaaggctgcccaaaaggaggatgcaaagaagagctcaaagaccaaggctaccacttctttcaatcttcaggaggaggaggatgacgagtcacatggagatgatgagtctgaggagggaggatctgagcaggaacaggatgcggattccgaggacgtttctgacggagaggagatcgactctgataacgacgacgattctgatgacggtgacgacgactctgatgaggaggactcggacggatctgtcttttccgatatcgataccgagtttgatgaggagaaggccgacaagcttcgatctctcatttccaacatgtacgagaacgacgaggatgctgagtacgagaaacgacgacgatacgagaacaacaaccaagaggaaaatgagtttggcgtgacagtgtcgaaaaagaacaatgatggcaagctgtctctttcggacctgacttcaggtgtggacaagaaggcagctgctagtctgtctcttcttggcaagcccgacggcaagtccaaaaacaagccccaacatgtggctgtgcctctcagtaaacgtctccaggacaaggtggaacgtaaggcagctcttgatctgacgcgagaggagctgaccaagttcgacgacctgattgcccaggacgaggatgctgagcatctggttttcccccgtcttcccgtctacgactctgatgaggaggccaagcagctgcccaacaccggtatttctgcgctggcccccgagagtgctatggagaagaagattgccggtatcctcaagacttctgctcttgccgacgagtcgcaggcacaaaagtttgaggagctggccaccaaaaacatgtctatggaggagctagctgcccgacgaaacgagcttcgacgaatgcgagagctaatgttccgagaggagcaaaaggcgcggcgaatcaagaagatcaagtccaaaacgtaccgaaagatccacaagcgagagcgagaacggctccgagacgccatgatgtccgacgaggagagtgaccaggaggaccacgacatcaagcgagctcaggagcgaatgtcgctcaagcacaagaaccagggcaagtgggccaagcgaatggtatcgcagggtctgaccaaggatgccgagactcgaggagagatggaggagatgcttcgacgaggtgaaagtctgcgaaagaagatgtctgctcgggacgacaacgatggcgacgagcagattgactctaatctgggcgacgaccagtttctgtcccagaacagagacgctctggttgatcctgatgagcctgctgagggagctaatctgggcaagggtctgcttggcatgaagttcatgcgagaggctgaggctcgtcagaagacggagaaccagcagcgaatccaggagctcgatcgagccaaggccaactgggaacttgggcagagtgacgacgaggacgaaggtcgagttgacactgccaacgagattctcaaccagggtcgacgaaagtacgcgcccggaaccaaacggtctattgccgatgtgcttgctgtcaagattgactctgagcgaaaggctgatcttcagtctgatgatgatgaggatgataatgacgacagagataacgacaacgtgactactgtggtcaagagcgacaaaaagaaggaaggaggtgcacaggacgacgattctgattcagatgacgacgcctccaacccctggttcaccgaaaccaacatccacaagagcaacaaggtcaagcctgtgatggaggctgaggcttctgcacgagaccggctggcccacaaggtggccaagcatcagagccgggtggtggagagtgcgaagagcaaaaaggcccgcaagcaagataacattctcattgacacttccgatactcttgatctcgtgactcaggatcgagaggccgacactgacaagggtatctctttcaagcaggatatgatcaagcgggcctttgcaggagacgatatcgtcgaggaagagttcatggccgaaaagagacagcgaatcgccgacgaaggagatcaggaaatcgacatgaccctgcccgggtggggaggctggggaggagagggcatgaaggcgcccaagaagcggtttgtcaagaagatccagggtgtggccgtcgagaagcgtcaggatcgagatctcaagaacgtgatcatttcggaaaagtcggacaaaaagtcggacaagtaccaggtcaagtcggtcccctatcccttcgagtctgtcgagcagtacgaggcctacctcaagatgcccatgggccagcagtggaccacggagactacccaccagaagctcatcaagccccgagtcattgtcaagcccggagctatcatcaaccctctggatgctcctcaaaagtag

SEQ ID NO: 152437 - protein, 970 aa, Yarrowia lipolytica CLIB122
MGKRSKSSRSGRTTTAGKVFSSKRATSYKNETEPSKPVPKSRGKHALLNAFEIAEAEERKKARKNGEEYSDDSEDHDIDDVYDDGIVRFNKDGTRKVYQPGDEEEEEDDSEIDSDEAFGSDDGDEEILDSFGVKSKAKAKFKAMEDEYDSVDEEEFVDLSEAWDLDDRQQENLKKKSGEKAAQKEDAKKSSKTKATTSFNLQEEEDDESHGDDESEEGGSEQEQDADSEDVSDGEEIDSDNDDDSDDGDDDSDEEDSDGSVFSDIDTEFDEEKADKLRSLISNMYENDEDAEYEKRRRYENNNQEENEFGVTVSKKNNDGKLSLSDLTSGVDKKAAASLSLLGKPDGKSKNKPQHVAVPLSKRLQDKVERKAALDLTREELTKFDDLIAQDEDAEHLVFPRLPVYDSDEEAKQLPNTGISALAPESAMEKKIAGILKTSALADESQAQKFEELATKNMSMEELAARRNELRRMRELMFREEQKARRIKKIKSKTYRKIHKRERERLRDAMMSDEESDQEDHDIKRAQERMSLKHKNQGKWAKRMVSQGLTKDAETRGEMEEMLRRGESLRKKMSARDDNDGDEQIDSNLGDDQFLSQNRDALVDPDEPAEGANLGKGLLGMKFMREAEARQKTENQQRIQELDRAKANWELGQSDDEDEGRVDTANEILNQGRRKYAPGTKRSIADVLAVKIDSERKADLQSDDDEDDNDDRDNDNVTTVVKSDKKKEGGAQDDDSDSDDDASNPWFTETNIHKSNKVKPVMEAEASARDRLAHKVAKHQSRVVESAKSKKARKQDNILIDTSDTLDLVTQDREADTDKGISFKQDMIKRAFAGDDIVEEEFMAEKRQRIADEGDQEIDMTLPGWGGWGGEGMKAPKKRFVKKIQGVAVEKRQDRDLKNVIISEKSDKKSDKYQVKSVPYPFESVEQYEAYLKMPMGQQWTTETTHQKLIKPRVIVKPGAIINPLDAPQK

SEQ ID NO: 152438 - DNA, 2868 bp, Aspergillus nidulans FGSC A4
  CDS (1)..(2868)
atgcctcgccagtttacccaacagcgcggtccgcgcgacgaggtgtcgaagaaaaaacccgcgcagaagagaaaatccggcaaaatcctcaacgcgctttcgatcgcagaagccgaaaatcctacgagggccaaaattcgacggaaccggcttggagacgatgatgattacttcaagcgcaagcgggacaccgatcgagacgaggacgattcacacggtcctggtaacaagcgtcgccgcactggcgatgacgaggattccgaaatagactcgaacgaggggagtgatggtgaaggccacaaatggaagattggcgtcgacagtgataatgacagtgagctggatagtgatgaagctatgggttccagcgacgaggagaggtttgagggcttcactttccgcggaagttcgacgttccagggaaagtcaaaggcaaagaaaaaacaaaagccgaggcatgagcgggagattaatctctcagagggagaagagtctgatgcggatgaagatatggaagatgatgacagtcttggtgaggatgccattgacttggttgctgcgtgggatatgaatgccgctgaggaagaggccgaagctaagaaggcggccaaatccaagaagcaggacgagagtgaggggtctgatgaggaggcctccgaaagcgaagacgaaagtgagtcagatgacgaagacggatccgaactttcattgtccgacgacgatcttgaagacgaagatggcctctcaaaacttcaaagctttgtggattccatgagagcggaaaatgctaagccagcaaagaaaacaaaaagcggcgaagagcatctcaacccgtccgagtttggattgccatctacacgaaaactaacagtcgccgacctccttccgtcggtcactgattctcggcttaagaactcactcaaacatgtcgactccgcaatatccgaacagaagacttcatcaggcattccagggaagctggatgctcctcttgccaagcgccaacaggaccgtctcgaacgtgaagccgcgtatgagaagagcaaagagactcttagccgctggattgagacggtcaaggccaaccgcagggctgagcacctgatgttcccactgcctgatccagatgcgcaagttgtgcaccgcatgggcgtcatcaaaccgcaaaccagccttgagaacacaatccaagatatcctcgtggagagtggacttgctgataagcaaggaaagtctgccgaagaccaagtgcaggaattcgaagagctgcaggcgcggaaaataccgatcgaagaaatccgagcccgtcgtgccgagttgcgcaagcaccgcgacctcatgttcagagaggaagtccgagctaagcggatcaagaagatcaagagcaagtcctaccgccgtgtccatcgcaaggagcaagagcgcatggaggagaaggagcgtcaagctctgcttgatgccggcatcgacctggatgagcaggaccgggagaagaatgagcgactacgagccgaggcacgaatgggcaacaagcacaaggaaagcaagtgggcaaagagcctgaaacagactggccgaactgcctgggatgaagatgcccgacatggtgctcttgagttagcccagcgggaggaagaattacggcaacgcatcgaaggcaagcgtgtgactagaggtgatgacgactacctgggatccagctctgaatctgagtcggaagatgagaatccttgggaagaacaggactctgattcagaaaagcgcaagctgctgaagaagctcaacaaaatcgaaggcgacgaagctgtggatgaggaattcaaaggcccgcatgctaagctactgtccatgaaatttatgcagaatgcagaggctgctcgtaaggccgcgaatgatgccgaaatccgtcgcctgaaccgtgagctacaaggccaggattctcagtccgaagcagaatcggaagagggacgtcgcaagttcggcgtcacggacaagaaggccgataagggcaagaagcaagtcaacggcaatgagttcgaggaagcaccagggtcagatgaggagccagaacgtgatgatgaacaggagacgaaggctgccactaccggaaccaagacaacctcaaaagcaaacgacaagccccgcgctccaccgaagcctgaacccgtcccccaggagtcggacgccgaagaagaaaacccctggctcatgccaacagcagaagagaagcgccgatccaaggacgacgatgtgcagccaaccatcgacatcacgccggacgcaaagcccccaaaacctgcgaagtcctcgaagaagacggcagatccgaaaataaaagaaactccagccccgaaacaaagcaccacccaagactacgataccagcgacgatgaagctaaggtcccggttctcttgaaaaaccatgaccttgtgaaacgcgcattcgccggcgatgaggtcgttcaagagttcgagcaggagaaacttgacactatcgaggacgagggcgacaaggtcatcgacgagacactccctggctggggcagctggactggagacggcattagcaggaaggaaaggaagcggcagaagcgcgttttgacaaaggttgagggagtgaagcccgaaaatcggaaggatgcgaaactttctcgtgttatcatcaacgaaaagcgtattaagaagaacaacaagtaccttgcgacgcaactgcctcacccgttcgagtcgaagcagcagtacgagaggtcgcttcgtgtcccgattggtcccgagtggtctacaaaggagactttccagtcttctaccaagccccgtgttatgatcaaacagggcgtcatcaagccgatggagaagccgatggtttag

SEQ ID NO: 152439 - protein, 955 aa, Aspergillus nidulans FGSC A4
MPRQFTQQRGPRDEVSKKKPAQKRKSGKILNALSIAEAENPTRAKIRRNRLGDDDDYFKRKRDTDRDEDDSHGPGNKRRRTGDDEDSEIDSNEGSDGEGHKWKIGVDSDNDSELDSDEAMGSSDEERFEGFTFRGSSTFQGKSKAKKKQKPRHEREINLSEGEESDADEDMEDDDSLGEDAIDLVAAWDMNAAEEEAEAKKAAKSKKQDESEGSDEEASESEDESESDDEDGSELSLSDDDLEDEDGLSKLQSFVDSMRAENAKPAKKTKSGEEHLNPSEFGLPSTRKLTVADLLPSVTDSRLKNSLKHVDSAISEQKTSSGIPGKLDAPLAKRQQDRLEREAAYEKSKETLSRWIETVKANRRAEHLMFPLPDPDAQVVHRMGVIKPQTSLENTIQDILVESGLADKQGKSAEDQVQEFEELQARKIPIEEIRARRAELRKHRDLMFREEVRAKRIKKIKSKSYRRVHRKEQERMEEKERQALLDAGIDLDEQDREKNERLRAEARMGNKHKESKWAKSLKQTGRTAWDEDARHGALELAQREEELRQRIEGKRVTRGDDDYLGSSSESESEDENPWEEQDSDSEKRKLLKKLNKIEGDEAVDEEFKGPHAKLLSMKFMQNAEAARKAANDAEIRRLNRELQGQDSQSEAESEEGRRKFGVTDKKADKGKKQVNGNEFEEAPGSDEEPERDDEQETKAATTGTKTTSKANDKPRAPPKPEPVPQESDAEEENPWLMPTAEEKRRSKDDDVQPTIDITPDAKPPKPAKSSKKTADPKIKETPAPKQSTTQDYDTSDDEAKVPVLLKNHDLVKRAFAGDEVVQEFEQEKLDTIEDEGDKVIDETLPGWGSWTGDGISRKERKRQKRVLTKVEGVKPENRKDAKLSRVIINEKRIKKNNKYLATQLPHPFESKQQYERSLRVPIGPEWSTKETFQSSTKPRVMIKQGVIKPMEKPMV

SEQ ID NO: 152440 - DNA, 2619 bp, Candida albicans SC5314
  CDS (1)..(2619): transl_table=12
atggctcgtaataataaacaacagaaatctaaatccaagaacaacaagaagaaacaacagaatcatagaaaaaatgacgatgaaggaaatgaactctccatatatgataacaaaataagagaattcgaagatgggatattagatgctagaaaatatttacaatctgatgatattaaagttgatttagatgaagaaatcgattcagatgatgcattaggatcagatgatgattatgatgttttgaattccaaattttcacaaactattagagataaggctagaaagaaaagactgggtaaaaaggtcaatgaaagtgaaagtgaagatgaaggatatagtagtattgacgaagggcaattagtcactttatctgaagcttgggatatggatgatcgtgacttagatgagactttggggaacacatcccaaaatgatattgtgttgaatgatacatgggaaacagaatctagtgaagacgaggaggagggggaggacgatgatcaagacgaagaagacgaagacgaagacgacgactcttttgaagaatcaacagatgaggaagaaatatttggaaatcatgatgacgatgaagatattgatttattgaaaactgttgacagattacaatcgaaaattgcttccaggcaacccaaggaacgtaaaaagttgattgttgaaaccagacaagaaaatgaatataatttacccacagggggtaatcagttatcattgcaagacatgatggctaatattaatgaagatgaaaataataaagcgattttacttgataaagagtctaaagccattgccatcccattacctaaacgtattcaacaaagaaatgatcgtgcagctgcctatgaattatcaaagaaagaaatcagtaaatggaaagattctgttcaagctttgagacaagctgaagttttaaaatttccaatgatcaatcaagagcaagatactattcgggattcagcccttacttttagatcagataatgtgccgactactgaacttgaaaaaagaatcaataatgtgttaacagaatcttcgcttgttgacgacaagaaagaggcaacatttgaagaaattgctgtggctaagttgagtcccgaagagatgaaaaagagaaccaacgaattgagattgatgcgtgaattgatgttccgagatgaaaaaagagccaagagaatcaagaaaatcaaatccaaacagtatcataaaattcaaaagcgtgaacgattaaagaatcaagaaatggttgaaggtgaagattttgacatggaagatgaagaccacgatactaaaagagcaactgaaagaatgagtttgaaacacaagacacaatcacaatgggctaaatcgatgataaaaagcggattatcaaaagatgcctccaatagagctgaattggaagaaatgttaagacaaggtgaaaagttgcgtaccaaacaaatgggttttgaagacggagaccaaagcgatgaaaatgctgatgatattataaatgaatacgatcaagatgatatagacgatgaaaataacttgagaagcaaattgggtaaaggtgttatgaatatggatttcatgaaaaaagctgaagctcggaaaagagaagagaatttgaaagaattggaaatgttgagaaaattagagaatggcgaaggtgatttggaaattttcgaagaagacaatagcgcagttaatgtcactaagaatcaaggaagaagaatatatacaccagcagcagcatcccaaataaatgacaataccaatgagcaagcattagaagacattgaaaatgacaacgctaaatctttagataaaaaattagccaaaaaatacaaagtcattgataaccaagaaacaaaaacatcagctaaatcagaatctaaccctgaagttttgcctgtcgatgaatcaaatccatggttgtcatctaatactagtgctaataacgacaccacaaaaaagaactctgccaaaataactacagttgataaagagtcttcaaaattggctaaagcagctgccaaattagccaaatcaaaattgaaaaaacacaaatctagtgatgataataccttaattgatgtgaatgagacattggctgttaatgatatttaccaagatggttccgaggatgaagatgaatcggttccaacaatgtttaaacaaaaggatttgattaaacaagcttttgcaggtgatgatgttgttagtgagtttgagaatgaaaagaaacgtgtcatcgaagaagaagacgacaaagaagaggatttgacattacctggatggggtgattgggctggaggtgattcaaaacccaagaagagaaaagtggtgcgtaagattgacggggtaatggcaaaagatcgtcgtaaagataaaaacatgaagaatgtaatcataaacgaaaaagtcaataagaagaatttgaaatatcaaagtagtcacgttccatatccatttgaaactagagaacaatatgaaagatcattgagaatgccagtgggtcaagaatggacatcaaaagaaacccatcagaaattgactatgccaagagttattgtcaaacaaggtacagttatcgatccattaaaagcacctttcaaataa

SEQ ID NO: 152441 - protein, 872 aa, Candida albicans SC5314
MARNNKQQKSKSKNNKKKQQNHRKNDDEGNELSIYDNKIREFEDGILDARKYLQSDDIKVDLDEEIDSDDALGSDDDYDVLNSKFSQTIRDKARKKRSGKKVNESESEDEGYSSIDEGQLVTLSEAWDMDDRDLDETLGNTSQNDIVLNDTWETESSEDEEEGEDDDQDEEDEDEDDDSFEESTDEEEIFGNHDDDEDIDLLKTVDRLQSKIASRQPKERKKLIVETRQENEYNLPTGGNQLSLQDMMANINEDENNKAILLDKESKAIAIPLPKRIQQRNDRAAAYELSKKEISKWKDSVQALRQAEVLKFPMINQEQDTIRDSALTFRSDNVPTTELEKRINNVLTESSLVDDKKEATFEEIAVAKLSPEEMKKRTNELRLMRELMFRDEKRAKRIKKIKSKQYHKIQKRERLKNQEMVEGEDFDMEDEDHDTKRATERMSLKHKTQSQWAKSMIKSGLSKDASNRAELEEMLRQGEKLRTKQMGFEDGDQSDENADDIINEYDQDDIDDENNLRSKLGKGVMNMDFMKKAEARKREENLKELEMLRKLENGEGDLEIFEEDNSAVNVTKNQGRRIYTPAAASQINDNTNEQALEDIENDNAKSLDKKLAKKYKVIDNQETKTSAKSESNPEVLPVDESNPWLSSNTSANNDTTKKNSAKITTVDKESSKLAKAAAKLAKSKLKKHKSSDDNTLIDVNETLAVNDIYQDGSEDEDESVPTMFKQKDLIKQAFAGDDVVSEFENEKKRVIEEEDDKEEDLTLPGWGDWAGGDSKPKKRKVVRKIDGVMAKDRRKDKNMKNVIINEKVNKKNLKYQSSHVPYPFETREQYERSLRMPVGQEWTSKETHQKLTMPRVIVKQGTVIDPLKAPFK

SEQ ID NO: 152442 - DNA, 2922 bp, Aspergillus niger
  CDS (1)..(2922)
atgcctcgcaggcaaacgcaaatgcgcggtcccaaagaccgggaccagtccttgcagaaatcgaagaagcccgcacccaagaacaagaagtccggaaactacctaaatgcatttgcgatcgcagagagcgaaaatcctggaaaactgggagtcaagcgcacccgtctaggcaaggaggacgaacctttcaaacgcaagcgacacaatgctcgagatgccgacgactcggacggcccggattacagcaagcgccgtcgcactggagacgatgaggcgtcggaaatggactcgaatgctggtagcgatggcgaaggacaccggtggaggattggtgaggtcggcagtgacgatgacagcgagttggacagtgacgaagccatgggttccagtgatgaggagaggttcgagggcttcacgttccgcggcagttctacgatgaaaaacaaaccgaagcagaaggccccggaacgcaaaaagcgcactcgcgaaattaacttgtccgaggacgctgaagtatcagaggacgaggacgatctcgaagacgactcggacgacctcggagaggatgcgatagacctgactacggcttgggatatgaacatggcagaggaagaagaggaaaaggctaagaaggccaagtctaagtctaagcaatcggctgagagcgatgaatcggaagaatacgactccgaaagcgaggacagcgactcggacgacaatgacgatgaactgccattatcgggagacgacatggacgaagatgaggtggatgagcatggtctttccaagctacagagctttgtcaacgctatgaacaccgagggtactacgaagacagcacgaaagaccggtggaaagcaggaacaaggggcccctacggagttcggtctgacttctacgcgaaaactcactattgccgatcttttgccatcaattacagattctcgcctcaagagttccctcaagcatgtcgacgctactacgacctcaaacacgaagacgtccggtgttcctggaaagctggatgcgcctcttgcaaaacgccaacaggatcggctggaccgagcggccgcatatgagaagagcaaagagactcttgaccgctggctggagactgtcaaggcgaaccgccgagccgagcatcttgtgttccctttgcctgatcccgaagcaaaccagacgcaccggatgggtgctgctgaaccgcgcacggatcttgaaagcactatccaaaatattcttcaggagagcgggcttattgaaaataatggaaagtcagcggaagaacaggtgcaagagtttgaagaactccaggcgcggaaattgcctattgaggagatcagggctcgcagggcggaactacggaagcgtcgtgatctgctcttccgggaggaagtacgcgccaagcgcatcaagaagattaagagcaagtcgtaccgtcgtgtgcatcgcaaggagagagagaggcttgagcaacaggaacgacaggctctcttagaagccggcgtggacctggatgaagaggagagggagaagaacgatcgcctgagagcagaggccagaatgggttcgaagcacaaggagagcaagtgggcgaagagcctgaagcagactggtcggaccgcttgggatgaggacgctcgacgtggcacgcaggatctggccttgcgggaggaagaactacggaagaggatcgaaggaaagcgcgtcaccaacggcgatgaagactatcttggctcatccagttctgagtccgaagacgaggacccatgggatgaagaggctgggtcggatgctgagaagcgcaagatccgccagaagcttagccagctggaaggtgacgatgatgctgacacagagttgaaggggccccacgccaagctcctttcgatgaagttcatgcagaatgcggatgctgcgcgtaaagcagaaaatgatgctgaagttcgccgtctcaatcgggagctccacggtgaagagtcgcagtctgaggcggaatccgaagtcggtcgccggaagtttggccgcaagaaggaggaggcgaagacagcaaaggaatccaaagcgaagctggctcggaatgaattcgaagaagcaccgggttctgatgatgaggctcagcaagaggcggatcaagaggtcgacattgttgttgaccgtcccgcaaagaagggaccggcagccccccagaataagcctcgtggtcgtcctcagaaggaaatcgcagaagaagaagatgctgctgctgtggaggagaacccgtggctcgtgcagacgaaccgcaataaccgtcgcgccatagtgaacgactcacagcaaaccgttgacatcacgctagatgacgcgaatgccagcagcggtaaatcgaagagtgcacccaaagcccaaaaggcatcagcacctagcaaaaagaaggttgatgccgaggtgtacggtagcgacgatgaggagagcgtgccggtgcttctcaagaaccatgatctggtgaagagggcctttgcgggcgatgaagtcgtgcaggactttgagcaagagaaattcgacaccatcaaggaggaagacgatcaagtgatcgacaacaccctccccggctggggtagctgggctggtgatggcatcagcaagaaacagcaaaagcgccagaaacggttcctcactaaggtcgagggagtgaagccggaagaccggaaggatgccaagctctcccgggtcatcatcaacgagaaacgggtcaagaagaacaccaagtacatggccacgcagctcccccaccccttcgaaacgaagcagcagtacgagagatcgctccgtctgccaatcggtcctgaatggtctactaaggagactttccaaaatgcaaccaagccacgcgtgatgatcaagcaaggtgtcatcaagccgatggaaaagcccatggcttaa

SEQ ID NO: 152443 - protein, 973 aa, Aspergillus niger
MPRRQTQMRGPKDRDQSLQKSKKPAPKNKKSGNYLNAFAIAESENPGKLGVKRTRLGKEDEPFKRKRHNARDADDSDGPDYSKRRRTGDDEASEMDSNAGSDGEGHRWRIGEVGSDDDSELDSDEAMGSSDEERFEGFTFRGSSTMKNKPKQKAPERKKRTREINLSEDAEVSEDEDDLEDDSDDLGEDAIDLTTAWDMNMAEEEEEKAKKAKSKSKQSAESDESEEYDSESEDSDSDDNDDELPLSGDDMDEDEVDEHGLSKLQSFVNAMNTEGTTKTARKTGGKQEQGAPTEFGLTSTRKLTIADLLPSITDSRLKSSLKHVDATTTSNTKTSGVPGKLDAPLAKRQQDRLDRAAAYEKSKETLDRWLETVKANRRAEHLVFPLPDPEANQTHRMGAAEPRTDLESTIQNILQESGLIENNGKSAEEQVQEFEELQARKLPIEEIRARRAELRKRRDLLFREEVRAKRIKKIKSKSYRRVHRKERERLEQQERQALLEAGVDLDEEEREKNDRLRAEARMGSKHKESKWAKSLKQTGRTAWDEDARRGTQDLALREEELRKRIEGKRVTNGDEDYLGSSSSESEDEDPWDEEAGSDAEKRKIRQKLSQLEGDDDADTELKGPHAKLLSMKFMQNADAARKAENDAEVRRLNRELHGEESQSEAESEVGRRKFGRKKEEAKTAKESKAKLARNEFEEAPGSDDEAQQEADQEVDIVVDRPAKKGPAAPQNKPRGRPQKEIAEEEDAAAVEENPWLVQTNRNNRRAIVNDSQQTVDITLDDANASSGKSKSAPKAQKASAPSKKKVDAEVYGSDDEESVPVLLKNHDLVKRAFAGDEVVQDFEQEKFDTIKEEDDQVIDNTLPGWGSWAGDGISKKQQKRQKRFLTKVEGVKPEDRKDAKLSRVIINEKRVKKNTKYMATQLPHPFETKQQYERSLRLPIGPEWSTKETFQNATKPRVMIKQGVIKPMEKPMA

SEQ ID NO: 152444 - DNA, 2613 bp, Arabidopsis thaliana
  CDS (1)..(2613)
atgggagaaaagagaaaatctacttcgaaaaccctagctaagaacaagaagaggaaaggtcctcatttgcctaattcaatcctgaagactattgccaatgagaaacgtcctttgaactctgacgaagatgacgatgagatcgattccgacgatgaaaacgtcgatttgtatgagtatgaagaaggtgtgcctgaggaagagtctaagaaaaacaatcgctatgaccgcgtcgataactacgactacgagcttcccgaggatttcgaggatgaaaatgtggagtcagatgatgatgaagatggtggaaacagcgagaatgaggaaggtgaaggtgatgacgatagacacacacggatgttgcaaggtctcactggaatgccaagtgctgcctttcaagaagagagtaagaagagacctgtactctatactgaagcgtatccagagtctgaattcaatcctacccgtgatgttctggagggtaaaggcctcatctcagttgaggaccttttggcgcctcttgaaggaaaacctgggtttaacgatctaaataagaggatcaaccggatgcagaaagatactcagtctgttgttcatgcacctttgcctaagccagaacgagaaagactagagcggaaagctgtgaaaggactagttgagaaggactttaataagtgggtgcatctggtcaagaggaatagggaggcaccaactgtttactttaatcaacctgtcaatgttgggtattctacagtcggtgcaatagcatcagagtttcaacccaggactgaatttgagaagaaaatggcttctgtactcaaagataacgagcttggggaggctcacaaagaagatggcgctaagcttcttgaattgaatgaggcaagttctgtgtcgatggaagaccacatcaagtaccgtgaccacattgccaagatgcggagcctgctattccgccatgaactgaaaagtaaacgtatcaagaagattaagtctaaaacttatcatcgccttaaagggaaggacctgaagaaatcagcgatgggagcattaatggacccagaaatggctaaagaagaggctattaagcaggagactagacgagtagaggaacggatgactttgaagcacaaaaacacaggaaaatgggccaaacgcatgttaagccgtggactgactgagagatatgatggaactagggcagctatatctgaacaacttcagattaatgctactttgtccagaaagatgaactccacgaacgatggaagtagtagtgatgagagcgacgatgaggaagagttgagttgtggttcagatcaggatactccttctaaattgatagcgaaagccagggagaagacactgaaaactatggaagatgatgatgtacccaattctggtcttctttcattacctttcatggctcgtgctatgaaaaagaaaaatgaggaagctaatgaagaagctaaacgtgcatttggggagtataaagaattggagaattttggtggagaagataatcctaaaaaatccgctgatgttagtggtagaagagtatttggtgccacctctaaagtcgaagctccaaaagagtctaaaaaggactcggacaatttttatgacaacagtgatagtgacaatgatatggaaggtatagaaaataatgaccttggggctgttggagatactgcttcacctgctagaaacactggagccataacagagaccgagaagtgttgtggtgatgttgaaaatccagcttctaagacaacatttgatgttgccttatttgcgtcaggctcttggaagaagatgaaaggctcccaaaatgcagaatccaaaaaagctccaaagactcgtgtaccaatctcaaagggccaagataaaaaggaatcgagagatgaagaaagtgaagattcagagagtgaagctgagcaaatggttgatgggattttgacatctgcttcgaaggagacctatgaaatcccttctcaagcagagcttatacaacgtgcttttgctggtgatgacgttgtagaagaatttgagaaggataagcaagaagttctaaatcaggaagttcctgaaccggaaaagccggttctagttcctggttggggacaatggaccaatgtccaaaagaagagaggtttaccttcatggatggttagagaacatgaagatgcaaataaaaagagaaagctagatctcaaaacaaggaaagactatcgtctcagaaatgttatcatatcagagaaagtcgataaaaaggctgacaaacttcatacaacgactctacctttcccatatacatctaaggaagttttcgaacacagcatgcgcatgcctataggacccgagtttaatcctgcgactattgttggagctctcaaccgacccgaggttcctttttattatttgttaaactcattgcaccatgttgtgaagaaagctggtgtgataattaaaccggtcaaatttgaggaagtgaatccaaacgagaaagcagatgacgaaaaccctcgaagccatcaaaaacaaagacccaaaaagggtagtaaaaccagtaaaggtcaaggcaaaaacaagtccaagctaaagaccaaagcttag

SEQ ID NO: 152445 - protein, 870 aa, Arabidopsis thaliana
MGEKRKSTSKTLAKNKKRKGPHLPNSILKTIANEKRPLNSDEDDDEIDSDDENVDLYEYEEGVPEEESKKNNRYDRVDNYDYELPEDFEDENVESDDDEDGGNSENEEGEGDDDRHTRMLQGLTGMPSAAFQEESKKRPVLYTEAYPESEFNPTRDVLEGKGLISVEDLLAPLEGKPGFNDLNKRINRMQKDTQSVVHAPLPKPERERLERKAVKGLVEKDFNKWVHLVKRNREAPTVYFNQPVNVGYSTVGAIASEFQPRTEFEKKMASVLKDNELGEAHKEDGAKLLELNEASSVSMEDHIKYRDHIAKMRSLLFRHELKSKRIKKIKSKTYHRLKGKDLKKSAMGALMDPEMAKEEAIKQETRRVEERMTLKHKNTGKWAKRMLSRGLTERYDGTRAAISEQLQINATLSRKMNSTNDGSSSDESDDEEELSCGSDQDTPSKLIAKAREKTLKTMEDDDVPNSGLLSLPFMARAMKKKNEEANEEAKRAFGEYKELENFGGEDNPKKSADVSGRRVFGATSKVEAPKESKKDSDNFYDNSDSDNDMEGIENNDLGAVGDTASPARNTGAITETEKCCGDVENPASKTTFDVALFASGSWKKMKGSQNAESKKAPKTRVPISKGQDKKESRDEESEDSESEAEQMVDGILTSASKETYEIPSQAELIQRAFAGDDVVEEFEKDKQEVLNQEVPEPEKPVLVPGWGQWTNVQKKRGLPSWMVREHEDANKKRKLDLKTRKDYRLRNVIISEKVDKKADKLHTTTLPFPYTSKEVFEHSMRMPIGPEFNPATIVGALNRPEVPFYYLLNSLHHVVKKAGVIIKPVKFEEVNPNEKADDENPRSHQKQRPKKGSKTSKGQGKNKSKLKTKA

SEQ ID NO: 152446 - DNA, 2907 bp, Aspergillus oryzae
  CDS (1)..(2907)
atgccccgcaagcaaacccagttgcgcggtcctcgagatcaagcacctaaaaaacaacctcaaaagaagaaatctagcaaagctttgaatgctcttgctatcgcagaggcccaatttcccatcaaaccaaagattcgacggaaccgtttaggcgatgatgatgacctatccaagcggaagcggcattccggtcgcgacatggacgattcagacgagcccgataacaagcgtcgtcggacaggtgccgagtcctccgacctaagtgaaaacggtggtagtgatggagaaggccataagtggagacttggggaagtcgatagtgacgatgatagcgaagtggacagtgatgaggccatgggctctagtgatgaggaaagattcgaaggcttcagtttccggggaagctcttcggccaaaccgatccgaaagggctccgaaccaaagaaaagtggtcgccagattaacttgtccgaagatgtggaagattccgaagatggcgaaatggacgaagatgaagatgatcttggtgaagatgcagtggatttgactacagcttgggatatgaatacagcagaagaggaagaagcagaaaagcgaaagtcctcgaaggcgaagaaagcagccgaggaattcgatgatgatgatcactcagaggaaggcggctccgaaagtgacgaggacgacgatgatagcagtttcggtgatgagagcgagctggagctctctgacaacgaggatactggtaatgagcacggtctttcgaaactacaagattttgtcaactctatggaaacagattctgctaagaagtcaacgcgcaaaacaaacggtggacaggaacatggcaatccaacggaattcggattgtcatctacacggaaattgactgtggccgaccttttaccctctattacagactcgcgcttgaagagctccctgaaacatgtagattcagctatttctacgcacaaatcgtccggcgtacctggaaaactagatgctcctcttgcaaagcgtcaacaagaccggctggaccgagctgctgcgtatgagaagagcaaggaaaccttggatcgctggctagagactgttaaggcaaatcgcagggcggaacaccttatgtttccccttcccgatcctgaaggcaatcagacgcaccgcttaggtgctgcagagccccgaacggatctcgaaagcactatccaaaatatcctaatcgagagtggcttggcagaagcaaacggcaaatcagccgaagaccaagtacaggaattcgaggaactacaagcgcgaaaactgcctattgaggagattcgggcacgcagagcagagttgcggaaacgacgtgatttacttttccgagaagaagtgcgagctaaacggatcaagaagatcaagagcaagtcataccgtcgagtgcatcgtaaagagcgagagaagttggagcagcaagaacggcaggcccttctcgaagccggtgtggacattgatgaacaagagcgagaacaaaatgaacggcgcagggcagaggcgagaatgggctcaaaacataaggagagcaaatgggcaaagagccttaagcagacgggtcgaactgcatgggatgaggaagcccgactcggcacagctgacttggccttaaaggaggaggagttacggcggcgtatcgagggaaagcgtatatcgcatggggacgaagactatctgggttcgtccagttcggaatctgaggatgatgatccttggaacgaagaagatagctctgatgcggagaagcgcaaacttcgcgagaagctagataagctcgaacatggcagtgatgtcgaatcagaactgaagggccctcacgccaagctgctttcgatgaagttcatgcagaacgcggaggctgcgcgcaaagcgcagaacgacgctgaaatccgacgcctcaatcgtgaactccatggagaagaatcccactcagaagccgaatccgaggttggccgacgtaaatttggtcattctaaggattcgaagtcagccccagagagcaaatcaaaatcacacgctcgtaatgagttcgaagaggccccaggatcagatgatgaagatgctcgagcttccgaggtggaccaagatgttgacattatagtcaatcggcctgacaagagaaaaccggcagggtctgataagaagtctcgtacacgtggcacatctgcgtcctccagccagaaagaagatgctgctgaagatgagaatccctggttaattcagacgagtaggaacaaccgtcgaacaacagcggatgattcacagcaagggcttgacattgctgtggatggagggaagcctgataacacaaagtccaagtccataccccacaatcagaaagagaagccggtcatacctcccaaaaagcaacatatggacgagggcgatgatagtgatgatgacggcaacgtgccagtgcttctcaagaatcatgacctcgttaagagagcatttgctggggatgaggttgtgcaagactttgaacaagagaaacatgacactatcaaggaggaagatgaccaagtgattgataataccttgccaggttggggcaattgggcgggtgatggcatcagtaaaaagcagcagaagcgacagaaacggttccttaccactgttgagggtgttaagcctgagaacagaaaagacgccaaactctcccgcgtcatcatcaacgagaaacgggttaagaagaacaataaatatttggccacccagctccctcaccccttcgagtccagacaacagtacgagagatctctccgtttgcctattggccccgagtggtcgacgaaggaaactttgcagaacgcaaccaagcctcgtgtgatgatcaaacagggcatcatcaagcccatggagaagcctatgatctaa

SEQ ID NO: 152447 - protein, 968 aa, Aspergillus oryzae
MPRKQTQLRGPRDQAPKKQPQKKKSSKALNALAIAEAQFPIKPKIRRNRLGDDDDLSKRKRHSGRDMDDSDEPDNKRRRTGAESSDLSENGGSDGEGHKWRLGEVDSDDDSEVDSDEAMGSSDEERFEGFSFRGSSSAKPIRKGSEPKKSGRQINLSEDVEDSEDGEMDEDEDDLGEDAVDLTTAWDMNTAEEEEAEKRKSSKAKKAAEEFDDDDHSEEGGSESDEDDDDSSFGDESELELSDNEDTGNEHGLSKLQDFVNSMETDSAKKSTRKTNGGQEHGNPTEFGLSSTRKLTVADLLPSITDSRLKSSLKHVDSAISTHKSSGVPGKLDAPLAKRQQDRLDRAAAYEKSKETLDRWLETVKANRRAEHLMFPLPDPEGNQTHRLGAAEPRTDLESTIQNILIESGLAEANGKSAEDQVQEFEELQARKLPIEEIRARRAELRKRRDLLFREEVRAKRIKKIKSKSYRRVHRKEREKLEQQERQALLEAGVDIDEQEREQNERRRAEARMGSKHKESKWAKSLKQTGRTAWDEEARLGTADLALKEEELRRRIEGKRISHGDEDYLGSSSSESEDDDPWNEEDSSDAEKRKLREKLDKLEHGSDVESELKGPHAKLLSMKFMQNAEAARKAQNDAEIRRLNRELHGEESHSEAESEVGRRKFGHSKDSKSAPESKSKSHARNEFEEAPGSDDEDARASEVDQDVDIIVNRPDKRKPAGSDKKSRTRGTSASSSQKEDAAEDENPWLIQTSRNNRRTTADDSQQGLDIAVDGGKPDNTKSKSIPHNQKEKPVIPPKKQHMDEGDDSDDDGNVPVLLKNHDLVKRAFAGDEVVQDFEQEKHDTIKEEDDQVIDNTLPGWGNWAGDGISKKQQKRQKRFLTTVEGVKPENRKDAKLSRVIINEKRVKKNNKYLATQLPHPFESRQQYERSLRLPIGPEWSTKETLQNATKPRVMIKQGIIKPMEKPMI

SEQ ID NO: 152448 - DNA, 2790 bp, Schizosaccharomyces pombe
  CDS (1)..(2790)
atggctaggaaaggaaaagttaatacattgccacaaccgcagggaaaacatcaaagaaaaggaaaaaaacaattagaaaataagattttacattcttatgaagaagagtccgctggttttgattctgaagaactagaagacaacgatgaacaaggctacagttttggcgtaaactcagaagatgatgaagaaattgatagtgatgaagcctttgatgaagaagatgaaaaaagatttgcagattggtccttcaatgcttccaagagtggcaagagtaataaggatcataaaaatttaaataatacgaaggaaatatcattaaatgaagaagacgattctgatgattctgtaaattctgataagttggaaaacgagggaagtgttggtagcagcattgacgaaaacgaacttgttgatttggataccttgttggataatgaccaacccgaaaaaaatgagtctaacactgcttctactatccgtcctccatggattggcaacaatgaccatgcaacggataaggagaatttattggaaagtgatgcctcgagctctaacgactcggaatcagaacttacagactccgctgataatatgaatgaatctgactcggaatctgaaatagaaagctccgatagtgatcatgatgatggcgaaaactctgattcgaagctggataatttaaggaattatattgtttctctaaaccaaaaacgaaaaaaagatgaagctgatgcagaatcagtgttatcgtctgatgataatgattcaattgaggaaatatcaattaaaaaggttaaatatgatcctcatgaaaccaacaaagagtcagagtataatttaattggttcttccgagaaaactattgacataactgatttgcttgattctataccgatgaatgagcagttaaaagtatccctaaaaccactagttagtgagtcctcctccatttcctctaagaaattagatgctcctttggccaagtccatacaggatcggttagaaagacaggctgcctatgaacaaacaaaaaacgatttagaaaaatggaagcctatcgtggctgataatcgcaagtctgatcagctcattttccccatgaatgaaacagctcgccctgtccctagtaataatggactggcctctagctttgagcctaggactgaatctgagagaaagatgcaccaggctttactagatgcaggtcttgaaaatgaatcagcgctgaaaaaacaagaagaattagccttaaataaactttctgttgaagaagttgctgaaagaactcgtcagcttcgatttatgcgagagctaatgttccgtgaggaaagaaaggccaaacgtgttgctaaaataaaaagcaaaacttacaggaagatcagaaagaatcgtaaagaaaaagaaatggctttaattcctaagagtgaagaggatcttgagaatgaacggattaaatctgaagaagctcgtgctttggaaagaatgactcaacgtcacaaaaacacaagctcttggacccgtaaaatgcttgaaagggcgtcacatggtgaaggaacccgtgaagcagtcaatgagcaaatacggaaaggagacgagcttatgcaacgtatccatggtaaagagatatctgaaatggatggagaagatgtttctgagttctcggatagcgattatgacacaaatgaacaggtgtcaaccgcttttgaaaaaatacgaaatgaagaggaaccaaagttaaaaggtgtactgggcatgaaatttatgcgtgatgcgtccaatcgacaaaaggctttagtgcaagatgaaatgcaagcattcgaagacgaactcgcaggagtacccaatgaagatgatacatctcaaaaaggagaggacggggttcctggagtattaatagggaataatacaggccgtcgttcatttaagccttccgaagaagctgcaaaattatctttgccatcaaggaaaaatccctttgtttctgattcagcggtgctgaaagtcaacaaaccggaaatgaaggaaggacaaaagaaggccgaagctcgaaaaaaaaaggaatcaccattagaagcaactgaggaaactaatccatggttgcaagtacctgaccaaaggacctcttctgccaaaaagttggataaaaacagctctaaggcagacaaaaagaatcacaagttaaaaatggacaaagttgcctcccttcaagaacttgtcgaagaacctaaagttcagcctgatttaatttttgaagaaaaggcttttgaatcagcgtcggaagcggaatcggatgttgatgtttcggtacctatgttaaagccaaccaaaggtcgtttgtcaattaagcagagagagcttgttgctaaagcatttgctggcgacgatgttgtcgctgaatttgaaaaggataaagaagactgggttcaagaggatgcaccgaaagaagaagatcatagtttgcccggttggggttcatggggaggtgttggcgtaaaacaaagaaagactaagcctaaggttaaaaaaattgctggactagatccgtcaaagcggaaggattctaagctaaagcatgtgattattaatgaaaaacgcaacaagaaagctgctaagcttactgctgatagtgttccgttcccatttgaatcacgagaacagtatgaacgatctcttaacttgcctatgggaccagaatggactactcgagcttcacatcataaggctgttgctcccagagttgttaccaaacgtggtaaagtcattaatcctattaaggcacctaattag

SEQ ID NO: 152449 - protein, 929 aa, Schizosaccharomyces pombe
MARKGKVNTLPQPQGKHQRKGKKQLENKILHSYEEESAGFDSEELEDNDEQGYSFGVNSEDDEEIDSDEAFDEEDEKRFADWSFNASKSGKSNKDHKNLNNTKEISLNEEDDSDDSVNSDKLENEGSVGSSIDENELVDLDTLLDNDQPEKNESNTASTIRPPWIGNNDHATDKENLLESDASSSNDSESELTDSADNMNESDSESEIESSDSDHDDGENSDSKLDNLRNYIVSLNQKRKKDEADAESVLSSDDNDSIEEISIKKVKYDPHETNKESEYNLIGSSEKTIDITDLLDSIPMNEQLKVSLKPLVSESSSISSKKLDAPLAKSIQDRLERQAAYEQTKNDLEKWKPIVADNRKSDQLIFPMNETARPVPSNNGLASSFEPRTESERKMHQALLDAGLENESALKKQEELALNKLSVEEVAERTRQLRFMRELMFREERKAKRVAKIKSKTYRKIRKNRKEKEMALIPKSEEDLENERIKSEEARALERMTQRHKNTSSWTRKMLERASHGEGTREAVNEQIRKGDELMQRIHGKEISEMDGEDVSEFSDSDYDTNEQVSTAFEKIRNEEEPKLKGVLGMKFMRDASNRQKALVQDEMQAFEDELAGVPNEDDTSQKGEDGVPGVLIGNNTGRRSFKPSEEAAKLSLPSRKNPFVSDSAVLKVNKPEMKEGQKKAEARKKKESPLEATEETNPWLQVPDQRTSSAKKLDKNSSKADKKNHKLKMDKVASLQELVEEPKVQPDLIFEEKAFESASEAESDVDVSVPMLKPTKGRLSIKQRELVAKAFAGDDVVAEFEKDKEDWVQEDAPKEEDHSLPGWGSWGGVGVKQRKTKPKVKKIAGLDPSKRKDSKLKHVIINEKRNKKAAKLTADSVPFPFESREQYERSLNLPMGPEWTTRASHHKAVAPRVVTKRGKVINPIKAPN

SEQ ID NO: 152450 - DNA, 26 bp, Artificial sequence
  primer
atggcaaaaaagaaatctaagagcag

SEQ ID NO: 152451 - DNA, 25 bp, Artificial sequence
  primer
ttacttaaatggtgccttcaaagga

SEQ ID NO: 152452 - protein, 931 aa, Artificial sequence
  consensus sequence
  Variant (2)..(2): Xaa in position 2 is any amino acid
  Variant (4)..(9): Xaa in position 4 to 9 is any amino acid
  Variant (11)..(118): Xaa in position 11 to 118 is any amino acid
  Variant (119)..(213): Xaa in position 119 to 213 is any or no amino acid
  Variant (215)..(239): Xaa in position 215 to 239 is any amino acid
  Variant (240)..(250): Xaa in position 240 to 250 is any or no amino acid
  Variant (253)..(258): Xaa in position 253 to 258 is any amino acid
  Variant (260)..(261): Xaa in position 260 to 261 is any amino acid
  Variant (263)..(263): Xaa in position 263 is any amino acid
  Variant (265)..(275): Xaa in position 265 to 275 is any amino acid
  Variant (277)..(279): Xaa in position 277 to 279 is any amino acid
  Variant (281)..(283): Xaa in position 281 to 283 is any amino acid
  Variant (285)..(285): Xaa in position 285 is any amino acid
  Variant (287)..(290): Xaa in position 287 to 290 is any amino acid
  Variant (292)..(308): Xaa in position 292 to 308 is any amino acid
  Variant (309)..(315): Xaa in position 309 to 315 is any or no amino acid
  Variant (317)..(320): Xaa in position 317 to 320 is any amino acid
  Variant (322)..(327): Xaa in position 322 to 327 is any amino acid
  Variant (329)..(332): Xaa in position 329 to 332 is any amino acid
  Variant (334)..(342): Xaa in position 334 to 342 is any amino acid
  Variant (343)..(348): Xaa in position 343 to 348 is any or no amino acid
  Variant (350)..(355): Xaa in position 350 to 355 is any amino acid
  Variant (356)..(358): Xaa in position 356 to 358 is any or no amino acid
  Variant (360)..(363): Xaa in position 360 to 363 is any amino acid
  Variant (365)..(371): Xaa in position 365 to 371 is any amino acid
  Variant (373)..(373): Xaa in position 373 is any amino acid
  Variant (375)..(375): Xaa in position 375 is any amino acid
  Variant (378)..(378): Xaa in position 378 is any amino acid
  Variant (380)..(381): Xaa in position 380 to 381 is any amino acid
  Variant (385)..(385): Xaa in position 385 is any amino acid
  Variant (392)..(392): Xaa in position 392 is any amino acid
  Variant (394)..(420): Xaa in position 394 to 420 is any amino acid
  Variant (421)..(430): Xaa in position 421 to 430 is any or no amino acid
  Variant (433)..(434): Xaa in position 433 to 434 is any amino acid
  Variant (437)..(438): Xaa in position 437 to 438 is any amino acid
  Variant (442)..(443): Xaa in position 442 to 443 is any amino acid
  Variant (444)..(444): Xaa in position 444 is any or no amino acid
  Variant (449)..(453): Xaa in position 449 to 453 is any amino acid
  Variant (455)..(460): Xaa in position 455 to 460 is any amino acid
  Variant (461)..(462): Xaa in position 461 to 462 is any or no amino acid
  Variant (464)..(475): Xaa in position 464 to 475 is any amino acid
  Variant (477)..(517): Xaa in position 477 to 517 is any amino acid
  Variant (518)..(547): Xaa in position 518 to 547 is any or no amino acid
  Variant (550)..(551): Xaa in position 550 to 551 is any amino acid
  Variant (553)..(559): Xaa in position 553 to 559 is any amino acid
  Variant (560)..(560): Xaa in position 560 is any or no amino acid
  Variant (562)..(743): Xaa in position 562 to 743 is any amino acid
  Variant (744)..(777): Xaa in position 744 to 777 is any or no amino acid
  Variant (783)..(783): Xaa in position 783 is any amino acid
  Variant (786)..(787): Xaa in position 786 to 787 is any amino acid
  Variant (788)..(788): Xaa in position 788 is any or no amino acid
  Variant (791)..(792): Xaa in position 791 to 792 is any amino acid
  Variant (794)..(799): Xaa in position 794 to 799 is any amino acid
  Variant (801)..(809): Xaa in position 801 to 809 is any amino acid
  Variant (810)..(810): Xaa in position 810 is any or no amino acid
  Variant (815)..(815): Xaa in position 815 is any amino acid
  Variant (817)..(838): Xaa in position 817 to 838 is any amino acid
  Variant (839)..(846): Xaa in position 839 to 846 is any or no amino acid
  Variant (848)..(848): Xaa in position 848 is any amino acid
  Variant (850)..(851): Xaa in position 850 to 851 is any amino acid
  Variant (853)..(854): Xaa in position 853 to 854 is any amino acid
  Variant (858)..(858): Xaa in position 858 is any amino acid
  Variant (860)..(862): Xaa in position 860 to 862 is any amino acid
  Variant (865)..(866): Xaa in position 865 to 866 is any amino acid
  Variant (868)..(873): Xaa in position 868 to 873 is any amino acid
  Variant (875)..(875): Xaa in position 875 is any amino acid
  Variant (877)..(882): Xaa in position 877 to 882 is any amino acid
  Variant (885)..(885): Xaa in position 885 is any amino acid
  Variant (887)..(887): Xaa in position 887 is any amino acid
  Variant (889)..(889): Xaa in position 889 is any amino acid
  Variant (891)..(891): Xaa in position 891 is any amino acid
  Variant (893)..(893): Xaa in position 893 is any amino acid
  Variant (895)..(906): Xaa in position 895 to 906 is any amino acid
  Variant (908)..(911): Xaa in position 908 to 911 is any amino acid
  Variant (912)..(923): Xaa in position 912 to 923 is any or no amino acid
  Variant (925)..(925): Xaa in position 925 is any amino acid
  Variant (927)..(927): Xaa in position 927 is any amino acid
  Variant (928)..(928): Xaa in position 928 is any or no amino acid
  Variant (930)..(930): Xaa in position 930 is any amino acid
DXDXXXXXXDXXXXXXXXXXXXXXXXXXXXXXXXXXXXXXXXXXXXXXXXXXXXXXXXXXXXXXXXXXXXXXXXXXXXXXXXXXXXXXXXXXXXXXXXXXXXXXXXXXXXXXXXXXXXXXXXXXXXXXXXXXXXXXXXXXXXXXXXXXXXXXXXXXXXXXXXXXXXXXXXXXXXXXXXXXXXXXXXXXXXXXXXXXXXXXXXXXXXXXXXXXXDXXXXXXXXXXXXXXXXXXXXXXXXXXXXXXXXXXXXPLXXXXXXRXXRXAXXXXXXXXXXXWXXXVXXXRXAXXXXFXXXXXXXXXXXXXXXXXXXXXXXXPXXXXEXXXXXXLXXXXLXXXXXXXXXXXXXXXEXXXXXXXXXEXXXXRXXXXXXXRXLXFRXEXXAKRXKKIKSKXYXXXXXXXXXXXXXXXXXXXXXXXXXXXXXXXXXXXXXRAXXRMXXKHKXXXKWAKXXXXXGXXXXXXXXRXXXXXXXXXXXXLXXXXXXXXXXXXXXXXXXXXXXXXXXXXXXXXXXXXXXXXXXXXXXXXXXXXXXXXXXXXXXXXXXXXXXXFMXXAXXXXXXXXNXXXXXXXXXXXXXXXXXXXXXXXXXXXXXXXXXXXXXXXXXXXXXXXXXXXXXXXXXXXXXXXXXXXXXXXXXXXXXXXXXXXXXXXXXXXXXXXXXXXXXXXXXXXXXXXXXXXXXXXXXXXXXXXXXXXXXXXXXXXXXXXXXXXXXXXXXXXXXXXXXXXXXXXXXXXXXXXXXXXXXXXXXXXXXXXXXXXXXXXXXXXXXXXXXXXXXXXXAFAGDXVVXXXFEXXKXXXXXXEXXXXXXXXXXPGWGXWXXXXXXXXXXXXXXXXXXXXXXXXXXXXXXRXDXXLXXVIIXEXXXKKXXKXXXXXXPXPXXXXXXYEXSXRXPXGXEXXXXXXXXXXXXPXXXXXXXXXXXXXXXXKXGXXIXP

SEQ ID NO: 152453 - protein, 56 aa, Artificial sequence
  protein pattern
  Variant (2)..(5): Xaa in position 2 to 5 is any or no amino acid
  Variant (7)..(7): Xaa in position 7 is Lys or Arg
  Variant (8)..(9): Xaa in position 8 to 9 is any amino acid
  Variant (12)..(12): Xaa in position 12 is Ala or Asn
  Variant (13)..(13): Xaa in position 13 is any amino acid
  Variant (15)..(16): Xaa in position 15 to 16 is any amino acid
  Variant (17)..(17): Xaa in position 17 is Ala, Ser or Thr
  Variant (18)..(18): Xaa in position 18 is Asp, Ser or Thr
  Variant (19)..(19): Xaa in position 19 is any amino acid
  Variant (20)..(20): Xaa in position 20 is Leu or Val
  Variant (22)..(22): Xaa in position 22 is Phe, His or Tyr
  Variant (24)..(24): Xaa in position 24 is Phe or Tyr
  Variant (25)..(25): Xaa in position 25 is Glu or Thr
  Variant (26)..(26): Xaa in position 26 is Asn, Ser or Thr
  Variant (27)..(27): Xaa in position 27 is Lys or Arg
  Variant (28)..(28): Xaa in position 28 is Glu or Gln
  Variant (29)..(29): Xaa in position 29 is any amino acid
  Variant (30)..(30): Xaa in position 30 is Phe or Tyr
  Variant (32)..(32): Xaa in position 32 is His or Arg
  Variant (33)..(33): Xaa in position 33 is Ala or Ser
  Variant (34)..(34): Xaa in position 34 is Leu or Met
  Variant (35)..(35): Xaa in position 35 is Asn or Arg
  Variant (36)..(36): Xaa in position 36 is Leu, Met or Val
  Variant (38)..(38): Xaa in position 38 is Ile, Leu, Met or Val
  Variant (40)..(40): Xaa in position 40 is Pro or Gln
  Variant (42)..(42): Xaa in position 42 is Phe or Trp
  Variant (43)..(43): Xaa in position 43 is Asn, Ser or Thr
  Variant (44)..(44): Xaa in position 44 is Ala, Pro, Ser or Thr
  Variant (45)..(45): Xaa in position 45 is any amino acid
  Variant (46)..(46): Xaa in position 46 is Ala, Glu, Ser or Thr
  Variant (47)..(53): Xaa in position 47 to 53 is any amino acid
  Variant (55)..(55): Xaa in position 55 is Glu or Arg
  Variant (56)..(56): Xaa in position 56 is Ile or Val
NXXXXEXXXKKXXKXXXXXXPXPXXXXXXXEXXXXXPXGXEXXXXXXXXXXXXPXX

SEQ ID NO: 152454 - protein, 51 aa, Artificial sequence
  protein pattern
  Variant (2)..(4): Xaa in position 2 to 4 is any amino acid
  Variant (5)..(6): Xaa in position 5 to 6 is any or no amino acid
  Variant (8)..(10): Xaa in position 8 to 10 is any amino acid
  Variant (11)..(11): Xaa in position 11 is any or no amino acid
  Variant (13)..(14): Xaa in position 13 to 14 is any amino acid
  Variant (15)..(15): Xaa in position 15 is Glu, Gln or Arg
  Variant (16)..(16): Xaa in position 16 is Leu or Met
  Variant (17)..(19): Xaa in position 17 to 19 is any amino acid
  Variant (21)..(21): Xaa in position 21 is Asp, Glu or Ser
  Variant (23)..(23): Xaa in position 23 is Leu or Met
  Variant (26)..(26): Xaa in position 26 is Asp, Glu or His
  Variant (28)..(28): Xaa in position 28 is any amino acid
  Variant (29)..(29): Xaa in position 29 is Lys or Arg
  Variant (31)..(31): Xaa in position 31 is Lys or Arg
  Variant (33)..(33): Xaa in position 33 is Ile, Leu or Val
  Variant (34)..(34): Xaa in position 34 is any amino acid
  Variant (39)..(39): Xaa in position 39 is Lys or Arg
  Variant (40)..(40): Xaa in position 40 is Ala, Gln, Ser or Thr
  Variant (42)..(42): Xaa in position 42 is His or Arg
  Variant (43)..(43): Xaa in position 43 is Lys or Arg
  Variant (44)..(44): Xaa in position 44 is Ile, Met or Val
  Variant (45)..(45): Xaa in position 45 is any amino acid
  Variant (46)..(46): Xaa in position 46 is Lys or Arg
  Variant (47)..(47): Xaa in position 47 is any amino acid
  Variant (48)..(48): Xaa in position 48 is Asp, Glu or Arg
  Variant (49)..(50): Xaa in position 49 to 50 is any amino acid
  Variant (51)..(51): Xaa in position 51 is Lys or Arg
KXXXXXEXXXXRXXXXXXXRXLXFRXEXXAXRXXKIKSXXYXXXXXXXXXX

SEQ ID NO: 152455 - protein, 15 aa, Artificial sequence
  protein pattern
  Variant (2)..(2): Xaa in position 2 is any amino acid
  Variant (3)..(5): Xaa in position 3 to 5 is any or no amino acid
  Variant (7)..(7): Xaa in position 7 is any or no amino acid
  Variant (12)..(12): Xaa in position 12 is Asp, Glu, Gly, Gln or Ser
  Variant (14)..(14): Xaa in position 14 is Ala, Gly or Thr
  Variant (15)..(15): Xaa in position 15 is Asp, Gly or Asn
EXXXXLXPGWGXWXX

SEQ ID NO: 152456 - protein, 49 aa, Artificial sequence
  protein pattern
  Variant (2)..(3): Xaa in position 2 to 3 is any or no amino acid
  Variant (5)..(9): Xaa in position 5 to 9 is any amino acid
  Variant (10)..(11): Xaa in position 10 to 11 is any or no amino acid
  Variant (13)..(13): Xaa in position 13 is any amino acid
  Variant (14)..(14): Xaa in position 14 is Asp or Glu
  Variant (16)..(16): Xaa in position 16 is any amino acid
  Variant (17)..(17): Xaa in position 17 is Ala or Ile
  Variant (18)..(18): Xaa in position 18 is Ala or Val
  Variant (19)..(19): Xaa in position 19 is any amino acid
  Variant (20)..(20): Xaa in position 20 is Glu or Gly
  Variant (21)..(21): Xaa in position 21 is any amino acid
  Variant (22)..(22): Xaa in position 22 is Ser, Thr or Val
  Variant (23)..(24): Xaa in position 23 to 24 is any amino acid
  Variant (25)..(25): Xaa in position 25 is Asp, Glu or Thr
  Variant (26)..(26): Xaa in position 26 is Phe, Ile, Leu, Met or Val
  Variant (27)..(27): Xaa in position 27 is Asp, Glu, Asn or Ser
  Variant (28)..(28): Xaa in position 28 is Lys or Arg
  Variant (30)..(32): Xaa in position 30 to 32 is any amino acid
  Variant (34)..(36): Xaa in position 34 to 36 is any amino acid
  Variant (38)..(38): Xaa in position 38 is any amino acid
  Variant (39)..(39): Xaa in position 39 is Ala or Ser
  Variant (40)..(40): Xaa in position 40 is Asp, Glu or Pro
  Variant (41)..(41): Xaa in position 41 is any amino acid
  Variant (42)..(42): Xaa in position 42 is Ile, Leu or Val
  Variant (43)..(43): Xaa in position 43 is any amino acid
  Variant (44)..(44): Xaa in position 44 is Phe or Leu
  Variant (45)..(45): Xaa in position 45 is Gly, Asn or Pro
  Variant (46)..(48): Xaa in position 46 to 48 is any amino acid
  Variant (49)..(49): Xaa in position 49 is Glu, Asn, Pro, Gln or Thr
LXXPXXXXXXXRXXRXXXXXXXXXXXXXWXXXVXXXRXXXXXXXXXXXX

SEQ ID NO: 152457 - protein, 11 aa, Artificial sequence
  protein pattern
  Variant (6)..(6): Xaa in position 6 is Asp or Glu
  Variant (9)..(9): Xaa in position 9 is any amino acid
  Variant (10)..(10): Xaa in position 10 is Asp, Glu or Lys
AFAGDXVVXXF

SEQ ID NO: 152458 - protein, 12 aa, Artificial sequence
  protein pattern
  Variant (2)..(2): Xaa in position 2 is Ala or Val
  Variant (3)..(3): Xaa in position 3 is any amino acid
  Variant (4)..(4): Xaa in position 4 is Ala or Glu
  Variant (7)..(8): Xaa in position 7 to 8 is any amino acid
  Variant (12)..(12): Xaa in position 12 is Glu, Asn or Thr
RXXXRMXXKHKX

SEQ ID NO: 152459 - protein, 10 aa, Artificial sequence
  protein pattern
  Variant (5)..(5): Xaa in position 5 is Asp, Arg or Ser
  Variant (6)..(6): Xaa in position 6 is Ile, Leu or Met
  Variant (7)..(9): Xaa in position 7 to 9 is any amino acid
KWAKXXXXXG

SEQ ID NO: 152460 - DNA, 1332 bp, Saccharomyces cerevisiae
  CDS (1)..(1332)
atgtcattaccgttcttaacttctgcaccgggaaaggttattatttttggtgaacactctgctgtgtacaacaagcctgccgtcgctgctagtgtgtctgcgttgagaacctacctgctaataagcgagtcatctgcaccagatactattgaattggacttcccggacattagctttaatcataagtggtccatcaatgatttcaatgccatcaccgaggatcaagtaaactcccaaaaattggccaaggctcaacaagccaccgatggcttgtctcaggaactcgttagtcttttggatccgttgttagctcaactatccgaatccttccactaccatgcagcgttttgtttcctgtatatgtttgtttgcctatgcccccatgccaagaatattaagttttctttaaagtctactttacccatcggtgctgggttgggctcaagcgcctctatttctgtatcactggccttagctatggcctacttgggggggttaataggatctaatgacttggaaaagctgtcagaaaacgataagcatatagtgaatcaatgggccttcataggtgaaaagtgtattcacggtaccccttcaggaatagataacgctgtggccacttatggtaatgccctgctatttgaaaaagactcacataatggaacaataaacacaaacaattttaagttcttagatgatttcccagccattccaatgatcctaacctatactagaattccaaggtctacaaaagatcttgttgctcgcgttcgtgtgttggtcaccgagaaatttcctgaagttatgaagccaattctagatgccatgggtgaatgtgccctacaaggcttagagatcatgactaagttaagtaaatgtaaaggcaccgatgacgaggctgtagaaactaataatgaactgtatgaacaactattggaattgataagaataaatcatggactgcttgtctcaatcggtgtttctcatcctggattagaacttattaaaaatctgagcgatgatttgagaattggctccacaaaacttaccggtgctggtggcggcggttgctctttgactttgttacgaagagacattactcaagagcaaattgacagcttcaaaaagaaattgcaagatgattttagttacgagacatttgaaacagacttgggtgggactggctgctgtttgttaagcgcaaaaaatttgaataaagatcttaaaatcaaatccctagtattccaattatttgaaaataaaactaccacaaagcaacaaattgacgatctattattgccaggaaacacgaatttaccatggacttcataa

SEQ ID NO: 152461 - protein, 443 aa, Saccharomyces cerevisiae
MSLPFLTSAPGKVIIFGEHSAVYNKPAVAASVSALRTYLLISESSAPDTIELDFPDISFNHKWSINDFNAITEDQVNSQKLAKAQQATDGLSQELVSLLDPLLAQLSESFHYHAAFCFLYMFVCLCPHAKNIKFSLKSTLPIGAGLGSSASISVSLALAMAYLGGLIGSNDLEKLSENDKHIVNQWAFIGEKCIHGTPSGIDNAVATYGNALLFEKDSHNGTINTNNFKFLDDFPAIPMILTYTRIPRSTKDLVARVRVLVTEKFPEVMKPILDAMGECALQGLEIMTKLSKCKGTDDEAVETNNELYEQLLELIRINHGLLVSIGVSHPGLELIKNLSDDLRIGSTKLTGAGGGGCSLTLLRRDITQEQIDSFKKKLQDDFSYETFETDLGGTGCCLLSAKNLNKDLKIKSLVFQLFENKTTTKQQIDDLLLPGNTNLPWTS

SEQ ID NO: 152462 - DNA, 1173 bp, Drosophila melanogaster
  CDS (1)..(1173)
atgctcaagttccaggtccattctccgggcaaggtcatactccatggcgaacacgccgtggtctatcatcgtcccgccctcgccgccgtagtgggtttgggcactactctgagatttcggcagctggaggacagccaggtggcaagttttcaactggaggcccttaactgcacactggagatccagttgccggagttcaatggatttttggctgaatttaggagtaaatacccatcagatagcacggccaatctgttggaagccgtccgcgcagaggtgtccaaacaacttgaacgatccggaggcaatgcaccgaagcagcacacccagcgggcattcatctccatatactatttgctggccggcgctgtactctccgcacccggcgacaagaaactgacgctgcaaaccggtttccaggtgcaggtagacagccagctaaccgtgggtgcgggtttgggcagttccgcctctttcggagcagctttggccacgacatttctcattttggccggacactttgatagagacagctacttgtcggaggcaaaccaggcgttgatctcgtcctgggcttatgaatcggagcgtgttaatcatggcacgccctcgggtctggacaacactgtatgcacctacggcggaatgttgcggtatgtcaagggccagggcttccagtcgctgaagatccagaaaccactaaacatcctgctggtggacagtcgtgtgagtcgcagcaccgccgacattgtggccaaggttcgtcatctgggagatgcctttccgcagctcatcgaggccatttggcaggcttgcgaggagcttgttgccgccgccgttccactctacgaaagctttggcaacgcccaagacgatagctcgaaattcgagcaacttgaacgcctgttccagatcaacaatgatctgttgaaggctatcggagtgtcgcacccgaaactggagcaaatcttcaccatcgcttttaagcgtggcttcttttcaaagctgacgggcgccggcgcaggtggctatgtcatcgttctgcttccagagaactacgagtgcaacgaggtctactggaagcttaaagaggagctcgaatcggcgggttttggtgttcatgttacgactgccggcggcgagggattgcgcgttagttcgctggatgactga

SEQ ID NO: 152463 - protein, 390 aa, Drosophila melanogaster
MLKFQVHSPGKVILHGEHAVVYHRPALAAVVGLGTTLRFRQLEDSQVASFQLEALNCTLEIQLPEFNGFLAEFRSKYPSDSTANLLEAVRAEVSKQLERSGGNAPKQHTQRAFISIYYLLAGAVLSAPGDKKLTLQTGFQVQVDSQLTVGAGLGSSASFGAALATTFLILAGHFDRDSYLSEANQALISSWAYESERVNHGTPSGLDNTVCTYGGMLRYVKGQGFQSLKIQKPLNILLVDSRVSRSTADIVAKVRHLGDAFPQLIEAIWQACEELVAAAVPLYESFGNAQDDSSKFEQLERLFQINNDLLKAIGVSHPKLEQIFTIAFKRGFFSKLTGAGAGGYVIVLLPENYECNEVYWKLKEELESAGFGVHVTTAGGEGLRVSSLDD

SEQ ID NO: 152464 - DNA, 1206 bp, Oryza sativa (japonica cultivar-group)
  CDS (1)..(1206)
atggaggtttgcgccgcccgcgccccaggcaagattatccttgccggcgagcacgccgtcgtccatggctcagccgccgtcgccgccgccatcgacctctacacgcgctgctccctctgcctcatgcccctcgctgacgacgaggcggccgccacgttggagctggacctcaaggatcctggcctcaccttctcgtggccgtgcgggcgcctccgcgaggtgctgctgacagatgaggcggcgggggcacgggaggcgaggccatgctccccggaccggctggcctccattgccaggctcttggaggagcacgagatccctgaggccaagatctggctctccgccggtctctctgccttcctcttcctctacacctccatattggggtgtagacccgggaaggtgacggtgagctcggacctgcccatggggtcggggcttgggtcatcggccgccttctgcgtgtcgatgtcgggggtgttgctgacagctgccggcgtggttactgcagtcggcggcatcagcggcgagggcatggggtgggagttggtcgggaaggatgatcttgagctagttaaccggtgggctttccagggggagaagattatccatgggaagccttctggcatcgacaatgctgtcagcactttcggaagcatgatcaaattcaagaaaggggaattgacaaaccttaaatctagcaacccagtgaaaatgcttattacggatacaagagttggtaggaacacaaaggctctggttgctggtgtctctgaaagagcctccaggcattcagatgctatggcttctgtattcaacgcagtgaactccattagtgaagaggtgtcaagcattgttgagttagcagctaatgatgagatagctatcacctcaaaggaggaaaagctggcggaactcatggagatgaaccaaggtttgcttcagtgcatgggtgttagccattcttcaatagaaactgtactgcggacaacattgaaattcaacttggtctccaagttaacaggagctggaggtggtggttgtgttttgaccctgataccaactatgctatccaacttagttctggagaaagtcattgcagagctggagtcgcatagttttcgctgctttaaagttgaggttggtggacagggtcttcaagtttgccaaggaggctgctcctattttaatggagatgttgtataa

SEQ ID NO: 152465 - protein, 401 aa, Oryza sativa (japonica cultivar-group)
MEVCAARAPGKIILAGEHAVVHGSAAVAAAIDLYTRCSLCLMPLADDEAAATLELDLKDPGLTFSWPCGRLREVLLTDEAAGAREARPCSPDRLASIARLLEEHEIPEAKIWLSAGLSAFLFLYTSILGCRPGKVTVSSDLPMGSGLGSSAAFCVSMSGVLLTAAGVVTAVGGISGEGMGWELVGKDDLELVNRWAFQGEKIIHGKPSGIDNAVSTFGSMIKFKKGELTNLKSSNPVKMLITDTRVGRNTKALVAGVSERASRHSDAMASVFNAVNSISEEVSSIVELAANDEIAITSKEEKLAELMEMNQGLLQCMGVSHSSIETVLRTTLKFNLVSKLTGAGGGGCVLTLIPTMLSNLVLEKVIAELESHSFRCFKVEVGGQGLQVCQGGCSYFNGDVV

SEQ ID NO: 152466 - DNA, 1242 bp, Bombyx mori
  CDS (1)..(1242)
atgttgacggccgtcgataatttgtttaccgtgagcgtttccgcgcccgggaaagtcattttgcatggagagcattcggtcgtgtacggaaaaactgcgatcgctgtcagcctcggcctaaggagctccatagtgataaaggaagtaaacactccacacgaaccagcagtccacatacatttgccgtgcgtggatctacaggagaccattccattggagccgacagtcaaaagtctgttccatcctaaactggcaccagggataaccggcaaattctcttggagattaccccacaaaatcgaccatgactatcacttgcgaagggtggaggaatacctgcatttgatcaagcctaactttgactcgttgcccaacaatcaaaagaattccttgcgtagtttcctatacgtgttttccgggattttcggtagcacatatctaccggtaaagtctatggatatttcgatgggatctgagctcaccattggcgcgggtactggcagctcggcgtcttttgccgtctgtctagcaggagcattgatacagctgttgaaattgaagagttcttcggggaatttcgatgcatattacgatcagagcagccaagattttacggataccgaaaaggagattatatcggaatgggccttcaattgtgagaagataatgcacggaacaccttcaggtattgacaacgcgacctgcacattcgggaacttggtatcgttcaagaaaggcgctaaaccacgtcatctcgacataaggatggagctgcgcgtgttgctggtcgattcgcgggtgtccagagaaacgaggaccctggtcgttcgtgtggcggccctaaggcaaaggaacacggccgccgtggaccacatcatggaggcctgtgaacacgttgcgcacactgccactcaggttttagagaaactttccagcggcaagtgtgatcccgacacggaggcggactatcaacatttatcagagctttgggacatgaaccactgtctgctgtcggctctgggcgtgtctcatccctcgctcgaggtgatccgagctgcagccaagagcaaggggctcgcctgcaagctcaccggagccggaggtggaggatacgccatgatcttaattccaccatcgactcctcgttcggcgatagactcgctgtccggccagctgctacagaacggtttccgggtcacggagaccaggcttggtggaccgggcgtctccatagagatgtga

SEQ ID NO: 152467 - protein, 413 aa, Bombyx mori
MLTAVDNLFTVSVSAPGKVILHGEHSVVYGKTAIAVSLGLRSSIVIKEVNTPHEPAVHIHLPCVDLQETIPLEPTVKSLFHPKLAPGITGKFSWRLPHKIDHDYHLRRVEEYLHLIKPNFDSLPNNQKNSLRSFLYVFSGIFGSTYLPVKSMDISMGSELTIGAGTGSSASFAVCLAGALIQLLKLKSSSGNFDAYYDQSSQDFTDTEKEIISEWAFNCEKIMHGTPSGIDNATCTFGNLVSFKKGAKPRHLDIRMELRVLLVDSRVSRETRTLVVRVAALRQRNTAAVDHIMEACEHVAHTATQVLEKLSSGKCDPDTEADYQHLSELWDMNHCLLSALGVSHPSLEVIRAAAKSKGLACKLTGAGGGGYAMILIPPSTPRSAIDSLSGQLLQNGFRVTETRLGGPGVSIEM

SEQ ID NO: 152468 - DNA, 933 bp, Lactococcus lactis subsp. lactis Il1403
  CDS (1)..(933): transl_table=11
atgactatcaataaaatggggacgggaattgcccattccaaactaatcttaattggagaacattccgttgtatatggtcagccagcaattgccttacctgtaacaattcttaaaactacagtgacaattacctcatcaaaatatggccaatacattgaaaataacgaatttcgtagaagacttgatttaatgggagatgaatttgaaggaattcgtcaactcattatgcgcttactctctaaatttcattcatcaaaaatgccattctctttagaaattgattcaaatattcctcaaggacgtggcttgggagcttctgcttcattggcaactgccattatcagagctttttatgatttctttgatgctgaacttccgcaaaaagatttactcttttatgccaacttttcagaaaatattactcacggaaaatcttctggaattgatgtggcaactgtaaattctgaacaccctttgtggtttattaaagacagcacaattgaaccctttgaactcaatcttcatggctttatcgtgattggcgatactggtgttcacggctttacgagtcaagccatcaatattgttcgcgaaaaacttgttgaagaaaaagaaaaaacacaagattcaattaatcatttaggtcaattagcgaccgattcaaaagattttttgatgacagacaaactcaaagaatttggtcatgtcatgaataaagctcacgaaagattatctgatttgggagtttctcatccacgtctagataatttagtcgaaactgctcgtaaaaatggtgcacttggtgctaaattaactggttcagggctaggtggcgtcatggttgcccttgctgaaaatgaaaaagatgctattcgtatcagtcaacgtcttctaaaaaatggcgctaaaaatacttggatttactcattttaa

SEQ ID NO: 152469 - protein, 310 aa, Lactococcus lactis subsp. lactis Il1403
MTINKMGTGIAHSKLILIGEHSVVYGQPAIALPVTILKTTVTITSSKYGQYIENNEFRRRLDLMGDEFEGIRQLIMRLLSKFHSSKMPFSLEIDSNIPQGRGLGASASLATAIIRAFYDFFDAELPQKDLLFYANFSENITHGKSSGIDVATVNSEHPLWFIKDSTIEPFELNLHGFIVIGDTGVHGFTSQAINIVREKLVEEKEKTQDSINHLGQLATDSKDFLMTDKLKEFGHVMNKAHERLSDLGVSHPRLDNLVETARKNGALGAKLTGSGLGGVMVALAENEKDAIRISQRLLKNGAKNTWIYSF

SEQ ID NO: 152470 - DNA, 993 bp, Halobacterium sp. NRC-1
  CDS (1)..(993): transl_table=11
atgaccacgacttcgagtgcgccggggaaggtctacctgttcggcgagcacgccgtcgtgtacggggagccggcggttccgtgcgcgatcgagcgccgcgcacacgtgacggtctccgagcgcgaggacagccgccttcgggtgtgttcgggcgatctgtccatcgacgggttcaccgtggagtacagcggcgaccgcgacgccggcggcacgccggacgtggacgtgcccgcgccgatcgttgacgcggcgatggggtacgtcgacgccgccgtcgagcaggcgcgggcggccgcggacgcgccgacggccggcttcgacgtgaccatcgacagcgagatccccctgggggcggggctcgggtcgtcggccgcagtggtcgtggccgggatcgacgcggcaacccgagagctcggcgtggaactggacgcccgcgaggtcgccgaccgggcgtaccaggtcgagcacaccgtccaggacggcgaggcgtcgcgcgcggacaccttctgttcggcgatgggcggggtagtgcgcgtgtccggcgacgactgcaccacgcttgacgcgccggcgttgccgttcgtgatcggctacgacggcaccagccacgacacgggcgaactcgtggcgggggtgcgcgcgctccgcgaggagttcgggttcgtcgcggacacggtcaccgcgatcggcgacctcgtgcgccgtggggaggcggcgctggcggacggcgacgtggcgacactggggcggttgatggatatcaaccacgggctgctgtccggactcggcgtctccggtcgcacacttgatgcgatggtgtgggcggccagggacggcggcgccgacggggcgaagctcacgggcgccggcggcggcgggtcgatcgttgccctcgacgcgggcagcggtgctgaaacggcgctgtcgctgacgccggactgcgaggcggcgtttcgcgcggacctcgcgcgggagggcgtgcgcgtcgaatga

SEQ ID NO: 152471 - protein, 330 aa, Halobacterium sp. NRC-1
MTTTSSAPGKVYLFGEHAVVYGEPAVPCAIERRAHVTVSEREDSRLRVCSGDLSIDGFTVEYSGDRDAGGTPDVDVPAPIVDAAMGYVDAAVEQARAAADAPTAGFDVTIDSEIPLGAGLGSSAAVVVAGIDAATRELGVELDAREVADRAYQVEHTVQDGEASRADTFCSAMGGVVRVSGDDCTTLDAPALPFVIGYDGTSHDTGELVAGVRALREEFGFVADTVTAIGDLVRRGEAALADGDVATLGRLMDINHGLLSGLGVSGRTLDAMVWAARDGGADGAKLTGAGGGGSIVALDAGSGAETALSLTPDCEAAFRADLAREGVRVE

SEQ ID NO: 152472 - DNA, 945 bp, Sulfolobus solfataricus P2
  CDS (1)..(945): transl_table=11
atgatggttgaagctaaggttccgttgaagctgacattatttggggaacatgctgtagtttacgatagaccagcaatcgcaatgactatttcagaaagtttaaaggtaaaggtaagtgaaaacgacaagttcctaattatatctccatcccttaatataaaaggggttaagttagatttaaatgagatgaaaattgagagcgatgaggctaagaaagtacttagatatgtatttgaggtgttgaactattttgaaatgaagaagccagttaaaatagaaataaattcaacagtcgaaccttctgttggattaggtactagtgctgcagttattgttggcactgttgctgcttactctaaatatttgggtattgatttaagcagagatgaaatagccaaaatctcgcacaatatagagttaaaggttcaaggaatagccagtaggatggatacttatactgaaacttatggtgggctaatttactttccagctggtggaaagggatttgaaaaaatagataccaattttgaactgactgcaggatacataaggaggagtatgagtactgctgatgttttatggcgtgttagaacgcttaaggagtcaaacaaggaagtctttgagaacatattagatgtgataggcgagataactaatagggctaaatctttaatagtcgaacaaaatttcgaggaattaggactcttaatgtacgtaaatcatggattattgttttcattaggaataacttcaccagaagctgatgagattgtttctagagctaaacaattgggaataaaaggttgtaagatcagtgggggaggggctgggggttccataatatgtataaagtccgttgaggctgaagttcttctgaggagttacaacgctagaatagttaattctacactaactaaagatggtgtcattttttcgatactataa

SEQ ID NO: 152473 - protein, 314 aa, Sulfolobus solfataricus P2
MMVEAKVPLKLTLFGEHAVVYDRPAIAMTISESLKVKVSENDKFLIISPSLNIKGVKLDLNEMKIESDEAKKVLRYVFEVLNYFEMKKPVKIEINSTVEPSVGLGTSAAVIVGTVAAYSKYLGIDLSRDEIAKISHNIELKVQGIASRMDTYTETYGGLIYFPAGGKGFEKIDTNFELTAGYIRRSMSTADVLWRVRTLKESNKEVFENILDVIGEITNRAKSLIVEQNFEELGLLMYVNHGLLFSLGITSPEADEIVSRAKQLGIKGCKISGGGAGGSIICIKSVEAEVLLRSYNARIVNSTLTKDGVIFSIL

SEQ ID NO: 152474 - DNA, 945 bp, Pyrobaculum aerophilum str. IM2
  CDS (1)..(945): transl_table=11
atggttaaaattttcgtcccagcggcggtaaaacttttcggcgagcacgcagtggtatacggcaagcccgccatatcagcggctataaacaagggcgtatatgttgagtgcgagaaaagcgacaaattatcaattgagaccgcgggttatccctcagcgctgaggttctacccaggggaggggcgcgtagaggcagtaggggcggagaggttttttgcgtatatcaacgccgccttaaggctcgccgaggagaagtggggcggcttggcggcgaggttttatataaaaagcgaattgccaccaggcgcgggggcagctacttcggctgcagtttccatagggctgttgaaggcctacgccttatgcgcgggaggggatgtggaggggattgagctggcgaagatgggccaccgggtggagcttgaggtccaggggatagcgtctcccatggactcaactaccgtcactcttggcggggtgttaaaaattaagacaaacccatttagcgttgacaagctaaacgcgaatctgccgcccttttacatcgcgtttctcccacgttttgagaccacgggcgagatcgtccggggagttaaagcgctgttagagaggaggcgctcagcggcgtttgtaatagaggctattgggcgcgtggtggaggaggctgagcagtgtcttttaaacagagatttagaatgcgtcggcgagttaatgggaattaacaactggctgttaggcgcgttgggcgttgtggacgagagggcaattaacttgctcaacgcggcgaggccttttatatacggggggaaaatcagcggggccggccggggcggcgctgtgatattattgccgaggtcagaagacgccttggagagagtcctctccgcctcgggctacgtttaccacaaggtcactatctacgaggggggcgtaaccgtattatga

SEQ ID NO: 152475 - protein, 314 aa, Pyrobaculum aerophilum str. IM2
MVKIFVPAAVKLFGEHAVVYGKPAISAAINKGVYVECEKSDKLSIETAGYPSALRFYPGEGRVEAVGAERFFAYINAALRLAEEKWGGLAARFYIKSELPPGAGAATSAAVSIGLLKAYALCAGGDVEGIELAKMGHRVELEVQGIASPMDSTTVTLGGVLKIKTNPFSVDKLNANLPPFYIAFLPRFETTGEIVRGVKALLERRRSAAFVIEAIGRVVEEAEQCLLNRDLECVGELMGINNWLLGALGVVDERAINLLNAARPFIYGGKISGAGRGGAVILLPRSEDALERVLSASGYVYHKVTIYEGGVTVL

SEQ ID NO: 152476 - DNA, 987 bp, Methanopyrus kandleri AV19
  CDS (1)..(987): transl_table=11
ttgcgtatttccgtcaaggctccactgaaggctatcctggcgggcgagcacgccgtcgtttacgggtatccggcggtcgcagtggcattagatacctatgttagggtcacggcggaacccggagacgacagcttcagggtggaaaccgagctgagctgcgaggggaacgtaagggctgagatcacacgtgacggaaatgtaaagggcttccgatccgagagcttgcacgaggaactgacgtacgtggctacggcggtgcgaaaggcatcggaggagttcgacgctcctccctctaacctgaggattctgtcggaagctcccccggcgagtggtctaggcacatcggctgcggtcacggcggcagtgctactcggactagccgaggtatcgggtgtaaacgtctccagggaagagatacggagacttgtccgtgaggtggagctcgaggtgcaggggaaggcgagttggaccgacgccacggtggtcacgtacggcgggttcgtgagggtttcagggcgggagttcgagctgattgaaccggagcgtaaccccgtgctggtcgtggcgcactcccaggaacccagtcgtacgggtgagatggtgcgccgggtggccgaactccgcgagaggttggacatcgtcgacggggtcatggagctgataggggagctcgtcgatgacctcgaggcggctctgcgtgatggggacttaaggaccgtaggggagctcatgaacgccaaccacgggctgttggcggccctgaacgtctccacgcgtgccctggaggagatcgtacacgtattcaggagcgcgggcgccttaggggcgaaggttaccggcgccggaggaggaggatgcgcggtcgcgttattcgagagggaggaggatgcgaaacgtgccgtcgaaacgctaagcgccttaggttacgaggcgttcgtcactcgtccgagcccttgcggtgtgaaaaccgaggactcgggatcttag

SEQ ID NO: 152477 - protein, 328 aa, Methanopyrus kandleri AV19
MRISVKAPLKAILAGEHAVVYGYPAVAVALDTYVRVTAEPGDDSFRVETELSCEGNVRAEITRDGNVKGFRSESLHEELTYVATAVRKASEEFDAPPSNLRILSEAPPASGLGTSAAVTAAVLLGLAEVSGVNVSREEIRRLVREVELEVQGKASWTDATVVTYGGFVRVSGREFELIEPERNPVLVVAHSQEPSRTGEMVRRVAELRERLDIVDGVMELIGELVDDLEAALRDGDLRTVGELMNANHGLLAALNVSTRALEEIVHVFRSAGALGAKVTGAGGGGCAVALFEREEDAKRAVETLSALGYEAFVTRPSPCGVKTEDSGS

SEQ ID NO: 152478 - DNA, 918 bp, Methanosarcina acetivorans C2A
  CDS (1)..(918): transl_table=11
ttgaggaataatatgatttcgtgttctgcccccgggaaaatctatcttttcggagaacatgcggttgtttacggagaaaccgcaataggatgtgcaattgaattaaggacccgtgtgcgggtggaattatgtgactctataataattcagtcggaaattggccgaacagggattgattttgaaaaacatccttatatctccgcagtggttgagaaaatgagtgaaatagtgccaatagatggtgttcatctgaaagttaattctgagattcctgtaggctcgggactcagttcctctgccgctgttacgattgcaagtataggtgcactcaataaaatgtttggttgtggtctctctctagaagaaatcgctaaaatggggcatgaaatcgaaatacaggtacagggagctgcaagtccgactgacacttatgtttctacattcggaggggttgtgaccattcccgataggaagaagctgaaaacgcctgattgcgggatagttatcggggatacaggagtttttgcttctacaaaagagctggtagcaaatgtgagaaaactccgtgaaagttatccacatcttatagagcctctaatgattgttattggaggcatttccaagaccgcagaaccatttttccaaacaggagattactcttcaattggcaaacttatgaatgtgaaccagggtcttctggacgcacttggagtaaatactttagaactctccaaattaatatactcatctcggggagctggagctttcggatcaaagagtacaggaggtggaggcgggggatgtatggttgcccttgcagcatctgacaaatgtacacaggttgctgaagccattacaggtgcagggggtaaagcaatcgtaacaaaacccacagaacagggcttaaggttagaatga

SEQ ID NO: 152479 - protein, 305 aa, Methanosarcina acetivorans C2A
MRNNMISCSAPGKIYLFGEHAVVYGETAIGCAIELRTRVRVELCDSIIIQSEIGRTGIDFEKHPYISAVVEKMSEIVPIDGVHLKVNSEIPVGSGLSSSAAVTIASIGALNKMFGCGLSLEEIAKMGHEIEIQVQGAASPTDTYVSTFGGVVTIPDRKKLKTPDCGIVIGDTGVFASTKELVANVRKLRESYPHLIEPLMIVIGGISKTAEPFFQTGDYSSIGKLMNVNQGLLDALGVNTLELSKLIYSSRGAGAFGSKSTGGGGGGCMVALAASDKCTQVAEAITGAGGKAIVTKPTEQGLRLE

SEQ ID NO: 152480 - DNA, 906 bp, Methanosarcina mazei Go1
  CDS (1)..(906): transl_table=11
atggtttcatgttctgcgcccgggaaaatctatcttttcggagaacatgcggttgtttacggagaaaccgcaatagcgtgtgcagtagagttaaggacccgggtgcgggcggagttaaatgactccataactatccagtctcagatcggcaggacaggtcttgattttgaaaaacatccctatgtctctgcagtgattgaaaaaatgagaaaatctatccccataaatggtgtttttttaactgttgattccgacattcctgttgggtcagggctcggctcatctgctgctgttacgattgcaagcataggagctctcaacgaacttttcggattcgggctttcgcttcaggaaattgcgaaactggggcatgaaattgagataaaagttcagggtgcagcgagccctactgacacctatgtttctactttcggaggagtcgttaccatccctgaaaggagaaagcttaagactcctgactgtggaattgttataggggacaccggagttttttcttctacaaaagagcttgtggcaaacgtcaggcagctccgcgaaagttaccctgatcttatcgaacctcttatgacttctattggcaaaatctccagaatcggtgagcaacttgtactttccggggactatgcttctattggcaggcttatgaatgtaaatcagggactgcttgatgcacttggagttaatatccttgagctttcacagcttatctattctgcaagggcagcaggagctttcggggcaaaaattactggagcaggaggcggtggttgtatggttgcgctaactgcaccggagaaatgtaatcaggtagcggaagccgttgcaggtgcagggggcaaagtgaccattacaaaacccacggaacaggggttgaaggtcgattga

SEQ ID NO: 152481 - protein, 301 aa, Methanosarcina mazei Go1
MVSCSAPGKIYLFGEHAVVYGETAIACAVELRTRVRAELNDSITIQSQIGRTGLDFEKHPYVSAVIEKMRKSIPINGVFLTVDSDIPVGSGLGSSAAVTIASIGALNELFGFGLSLQEIAKLGHEIEIKVQGAASPTDTYVSTFGGVVTIPERRKLKTPDCGIVIGDTGVFSSTKELVANVRQLRESYPDLIEPLMTSIGKISRIGEQLVLSGDYASIGRLMNVNQGLLDALGVNILELSQLIYSARAAGAFGAKITGAGGGGCMVALTAPEKCNQVAEAVAGAGGKVTITKPTEQGLKVD

SEQ ID NO: 152482 - DNA, 999 bp, Streptococcus mutans UA159
  CDS (1)..(999): transl_table=11
atgattgattctcaattaaaggaaaaaagaaaagtcattattgaaaagaagattgctttgggcaaagcttctgggaaaattattttaatgggggagcatgctgtcgtttatggacagccagccattgctatccctttttctgctgttgagactgtggcagaagttaaagaagacggcgaagccttaacagttacctgcgaattttatgacggtcttgttcataagatgcctgaaattttggaaagtctcaagcatgccattcgtttttccctttatcgtattggagcaccgcaagatccagccattcatattgatattcactctaccattcctgctgaacgtggaatggggtcaagtgcagcggtggctgtagctattgctagaagtctttttaacttttatggtaaggtattgacggataaggaattatgggaaattgttcaatcatcagaaaagattgcacacggtaatccttctgggattgataccgtaacgactagtggcaaatctccagttttttttgttaaagatcagcccattgaacagttgtcaatcaatatggatgcctatttgattgttgctgataccggtcagactgggcagaccttaaaagctattcaatcggtaaaagcacttcttagcaaagtaacttatcaaattgatagcctttcagatcctaagcaagccattaaggaattaggtcaattgacaaaattggcaaaggaagctctattaaataattacattttagaattaggcgaagtgatgaatcaggcccaccaacttttagcaagtctaacggtttccaatcaaactttggacagactggctcaagctgctagacaagcaggagctttaggagctaaattaacaggtggtggccgaggtggatgcctcattgctcttgcgaaagataaagaaagtgcagaaaagattgcaagatccttattagaacaaggtgctaagcaagcatggtgccaatatttaggaaatctctaa

SEQ ID NO: 152483 - protein, 332 aa, Streptococcus mutans UA159
MIDSQLKEKRKVIIEKKIALGKASGKIILMGEHAVVYGQPAIAIPFSAVETVAEVKEDGEALTVTCEFYDGLVHKMPEILESLKHAIRFSLYRIGAPQDPAIHIDIHSTIPAERGMGSSAAVAVAIARSLFNFYGKVLTDKELWEIVQSSEKIAHGNPSGIDTVTTSGKSPVFFVKDQPIEQLSINMDAYLIVADTGQTGQTLKAIQSVKALLSKVTYQIDSLSDPKQAIKELGQLTKLAKEALLNNYILELGEVMNQAHQLLASLTVSNQTLDRLAQAARQAGALGAKLTGGGRGGCLIALAKDKESAEKIARSLLEQGAKQAWCQYLGNL

SEQ ID NO: 152484 - DNA, 939 bp, Lactobacillus plantarum WCFS1
  CDS (1)..(939): transl_table=11
ttgaaagatctagctaccggtactagtcatgccaaaattattttaattggcgagcatggtgtggtttacggacaacccgccattgccttaccgatttcgaccatccaaatgcaggccattattcaccgccgtgatgcagcgcagacggtcaaaagccgttacttcaacggcgactttaagatgatgtctgccaacttaggcggtattcagacgctcattagaaccttgcttgcacgttttgatgcccccgagcagggcttcgatattcacatcacgagcgatattccctctgaacgcggaatggggtcctcagccgcagcggccgtggccgtaacgcgggctttttatgatttcttcgaccgaccactctcccaccaagaattattggccactgccaatgtggcggaaagttacacgcatggtcaacccagcggcctagacgttgcgacggccagtgccaaaagtcccgtctggtttgtcaagggtcgtgagaactttccgattccggtaaagcttcccggctatttagtcatcgcggacacgggtattaaaagtcagaccaaagttgcagtggcgaccgttcgcaacttactaatggttgagggcgcgacgattcaagcacgcattgatgacttgggccgattgactcgtcagacccgaaccgcgcttgaagatggtgacatgggggccctggcaacagccctgaatggtgcgcaagatgacttacgttccatgggtgtcagtcatcctgcccttgaacaactactcgcagtggctcgccaaaatggtgcgctcgctgccaaattaaccggtagtggtcagggcggttgcttgatcgcgctcgctccggaagccagcatcgccaaccaattatcacaaaaattggccgcagccggtgcgactgcgacttgggtcgaaccacttttgtgcgatgactaa

SEQ ID NO: 152485 - protein, 312 aa, Lactobacillus plantarum WCFS1
MKDLATGTSHAKIILIGEHGVVYGQPAIALPISTIQMQAIIHRRDAAQTVKSRYFNGDFKMMSANLGGIQTLIRTLLARFDAPEQGFDIHITSDIPSERGMGSSAAAAVAVTRAFYDFFDRPLSHQELLATANVAESYTHGQPSGLDVATASAKSPVWFVKGRENFPIPVKLPGYLVIADTGIKSQTKVAVATVRNLLMVEGATIQARIDDLGRLTRQTRTALEDGDMGALATALNGAQDDLRSMGVSHPALEQLLAVARQNGALAAKLTGSGQGGCLIALAPEASIANQLSQKLAAAGATATWVEPLLCDD

SEQ ID NO: 152486 - DNA, 1023 bp, Coxiella burnetii RSA 493
  CDS (1)..(1023): transl_table=11
atgaaaaaagaatttttaaaaacccgaacacctgcgaaattaattctttccggcgaacacgccgtggtttacggtcaccccgcgctttcagtcgctattaaccgttacatggaagccacggtgcggtggtctttaccgctgcatttttcttttcattttatgggaattgattttcgccgggaagtcactttacaggcacttcgcaacttaaaaagaaaacttaaaaagcaataccataaatacagcttgggtcacctgagtattcgggaagtgctgcaaaaaccttttgaattgtcgcttttcacgttcattaacgttcttgatcgattaaaaaataaattgccaacgggcatcgatatcgtcactgattccaatattcctgtcggttgtggaatgggttcctccgctgccagcgttgtaagcttgatctatgcactgacccaatttcttgggatggatttacatttggaggactatttatccctcggtgtggaatcagaaaatttgcagcatggctattcaagcggtctcgatgtacataccgtctatcacggcggttgcctgcgctatgagaaagggcaatttgaaaagcgtcctatccctgatttcccaatgcaattaatacaaacgggctgcccacaaagcagcaccggtgaatgcatctccgaggccgctcctttttttaagaatagtaaaattggcgaagatttttctgcggtgactaatgcccttgatcaagctttacaaaatcacaataacgacagcattaaaggctgcattcgagaaaatcatcgactattgcgatcgatcggcgttgtccccgataaaattaataactttgtcattgacgtggaaaaactcggcggtgctgcaaaaatttgtggcgctggtagtgttgttggcgataatgggggtattgttttagtcatcgctgatgatctcattacagatttagcaaaacagtacggttactccatcattcccattcaaaccgacagtcaagggacttgtattatcgaataa

SEQ ID NO: 152487 - protein, 340 aa, Coxiella burnetii RSA 493
MKKEFLKTRTPAKLILSGEHAVVYGHPALSVAINRYMEATVRWSLPLHFSFHFMGIDFRREVTLQALRNLKRKLKKQYHKYSLGHLSIREVLQKPFELSLFTFINVLDRLKNKLPTGIDIVTDSNIPVGCGMGSSAASVVSLIYALTQFLGMDLHLEDYLSLGVESENLQHGYSSGLDVHTVYHGGCLRYEKGQFEKRPIPDFPMQLIQTGCPQSSTGECISEAAPFFKNSKIGEDFSAVTNALDQALQNHNNDSIKGCIRENHRLLRSIGVVPDKINNFVIDVEKLGGAAKICGAGSVVGDNGGIVLVIADDLITDLAKQYGYSIIPIQTDSQGTCIIE

SEQ ID NO: 152488 - DNA, 954 bp, Methanococcus maripaludis S2
  CDS (1)..(954): transl_table=11
atgaatacgataaaaaccccctcaaaaattatactatttggagaacatgcggtagttgacggttatccggcaatttcaatggcacttgatttaaaaacaactggcgaaattgaggaaaattttgatacaatttcaatagatcttgtagatttaaatgaaatttttgaaataactcctgaattaattaagaatttagaaatttcaaatttcagccctgctttaaagtacgtaatttgcgctgtaaaatctgtaatattttatttatccgaatttaaaaatttaaaagagataaaaccctttaaattaaaattatattctgaaataccgcttagttgtggattgggatcatctgcatccgtagttgtaacagttatccgttcgatttcaaatttttatggaattgagttagacaatgatgaaacaataaatcttgcatactctgttgaaaaagaagttcagggaagagcaagtgtaacggacactgcaacgatttcacttggtggtatgattgaaattataaatggaaaatacaaaccaatgcccaaagatttggaagaatttataaaaacttgcaaatttttggttgtaaatgttgaagagagaactagaaaaactgcagaacttgtacatgacgtttcaaagcaccctgaaaaagagcaaatttttgaagaaattggaaaaataattcaaaatgtaaggcaagtaactgacaaagcagaacttggaaaattgatgaatgaaaaccacgaacttcttaaaaaatttggaatttcaactgaaaaattagatttggttgcaaaagcaggtcaaaaatacgcttacgggggaaaattaacaggtgccggaggaggaggttctgcaataattttgttaaaggaagatcgtgaagaattgttaaaagaactaaaaaaaattggtgtaattggaatttacgaatgtaaaatggccaattaa

SEQ ID NO: 152489 - protein, 317 aa, Methanococcus maripaludis S2
MNTIKTPSKIILFGEHAVVDGYPAISMALDLKTTGEIEENFDTISIDLVDLNEIFEITPELIKNLEISNFSPALKYVICAVKSVIFYLSEFKNLKEIKPFKLKLYSEIPLSCGLGSSASVVVTVIRSISNFYGIELDNDETINLAYSVEKEVQGRASVTDTATISLGGMIEIINGKYKPMPKDLEEFIKTCKFLVVNVEERTRKTAELVHDVSKHPEKEQIFEEIGKIIQNVRQVTDKAELGKLMNENHELLKKFGISTEKLDLVAKAGQKYAYGGKLTGAGGGGSAIILLKEDREELLKELKKIGVIGIYECKMAN

SEQ ID NO: 152490 - DNA, 1242 bp, Strongylocentrotus purpuratus
  CDS (1)..(1242)
atgacagctgaacttgccaataattccacatctgagccagtctccatcttcatctctgcacccggcaagatcatcctccatggggaacatgcggttgtccacgggaagacggcactcgccgcaggtctcaatctccggtcctacctctgtctgaaggagaaagacagcggacgcctccacctcaatctgccggacatcgaccttgaaagatcttgggacgtcctcgaactgcaggagcaattccgagatctgctcaacagcgatgtcatggaggtgaaaccaagtgtggagatcatgcagcggttgcgactgttcctaggttacagtgacacagagaccacaaaacgattagccgtgatggcttttctgtacttgtacctgtgtatcgctggtaggaatgggaagttcccaatcctggacacactggtttcctctgcccttcctccaggtgcagggcttggatcttctgccgctttttctgtctgtcttgccgcagggttactgacgtgggccaaagccataatccctttatctttatctgacaatactcttgattggagcagagaagacatggagttaatcaatacatgggcttacgaaggggagcgtgtgattcatgggaatccctctggaatcgataactcaataagcgttcacggtggtgctatagaatacaggcagaaggtcattactcctcttgagaacatgccagagctgtccatcctacttgttaacacctgtgttgcaaggagcaccaaggaactcgtggcaggtgtgcagagacgtcatgacaagtaccccaaggtatacggccccatcctcgattccatagaggagatatcgcaggagtgtaagcgaactctgcaagctctaaagacgggagaatccttggacaaggacggtgccttcaagagcctaggagagcttgtggatatcaaccaacagctgttatacgtgattggagtgtcccatccagcaatcaacaacatagtccgttcagctgcggcttacaagatccacgccaagctaacgggagcgggtggaggcggttgcgtctttgccctcctgcctcccgacattccaaaggactcggtcaaggccctccaggcagacctcttccgccataattacgaatcctggataacaagtctaggagctcatggggtcatgatgcatcggagcaaggaaacgctgctcggtgatggtctgctactccctgaatctttcctgaagtatgcttaa

SEQ ID NO: 152491 - protein, 413 aa, Strongylocentrotus purpuratus
MTAELANNSTSEPVSIFISAPGKIILHGEHAVVHGKTALAAGLNLRSYLCLKEKDSGRLHLNLPDIDLERSWDVLELQEQFRDLLNSDVMEVKPSVEIMQRLRLFLGYSDTETTKRLAVMAFLYLYLCIAGRNGKFPILDTLVSSALPPGAGLGSSAAFSVCLAAGLLTWAKAIIPLSLSDNTLDWSREDMELINTWAYEGERVIHGNPSGIDNSISVHGGAIEYRQKVITPLENMPELSILLVNTCVARSTKELVAGVQRRHDKYPKVYGPILDSIEEISQECKRTLQALKTGESLDKDGAFKSLGELVDINQQLLYVIGVSHPAINNIVRSAAAYKIHAKLTGAGGGGCVFALLPPDIPKDSVKALQADLFRHNYESWITSLGAHGVMMHRSKETLLGDGLLLPESFLKYA

SEQ ID NO: 152492 - DNA, 1167 bp, Nasonia vitripennis
  CDS (1)..(1167)
atggcttcgttcagaatctcagccccgggaaaagtgatcctttttggcgagcactcggttgtctacggcaagaccgcggtggcggccagtctcgggctccgaagcagcctccattttaccgagttgcctcatgaagagtgtatcattcacatcaagatgccaaagctcggtatatcgaagattctctcgttgcaccaggtagaggaagatttccatcgtctagacttttacagcggcatcgcaatgaatcacgatgcgattaatcagaagctccagaaatacgttgcgacgcttggcttcgaaaatccggatcagaggctcagtatggagtgttttttctacgctatgatgcaagtgataagatccgatcaactgaggctgagctcttttattcttgagctcgacagcgagctttccatcggtgccggtgccggcagctcggcatctttcactgtctgtctcgtagcttgcttcctgcactggtcccagcttcaaaaaggtactaatcttccaaatgaatttgattctcctactttgaacaagatatcccactatgcactcaattgtgagaagattatgcacggcaaaccttccggaattgataattccgtgtgcacctttggctcggtcattgaatttcggaaacccgagcctcctaagtttataactctgggttcgaagagcttgcgagttcttctagtcgacaccaaggtcgctcgcagtaccaagttgctcgtcgaaaagttcggcgctttgtcatccagctttccaacaatatttaaggatatgctacaagtttacgatgaactggccatgcaagctcttgatattattaagaagatccatgccacacccgagaatgaccaagatcgcctactgaaacattatgatgagctttcgcttctagttgatattaatcaaggactattggccacatgtcaagtttcgcacgaaacgcttgatacgatctgtaaaactgccaaaaagtacggattttcagccaagcttacaggagccggtggcggaggttttgcatatgtactgattccaccgaacgtaaacaatgcgaaagtggaagatttaaccaacgagttgaaaatacaaggtttctcggtaacagagaccaaattaggaggctcgggcgtagaggttaacgacatggattga

SEQ ID NO: 152493 - protein, 388 aa, Nasonia vitripennis
MASFRISAPGKVILFGEHSVVYGKTAVAASLGLRSSLHFTELPHEECIIHIKMPKLGISKILSLHQVEEDFHRLDFYSGIAMNHDAINQKLQKYVATLGFENPDQRLSMECFFYAMMQVIRSDQLRLSSFILELDSELSIGAGAGSSASFTVCLVACFLHWSQLQKGTNLPNEFDSPTLNKISHYALNCEKIMHGKPSGIDNSVCTFGSVIEFRKPEPPKFITLGSKSLRVLLVDTKVARSTKLLVEKFGALSSSFPTIFKDMLQVYDELAMQALDIIKKIHATPENDQDRLLKHYDELSLLVDINQGLLATCQVSHETLDTICKTAKKYGFSAKLTGAGGGGFAYVLIPPNVNNAKVEDLTNELKIQGFSVTETKLGGSGVEVNDMD

SEQ ID NO: 152494 - DNA, 1209 bp, Anopheles gambiae str. PEST
  CDS (1)..(1209)
atggcgacgaccgccatcaaacacttcgaagtgtccgcaccggggaaggtgatcctgcacggcgagcattccgtcgtgtacggtcatcccgccatcgccggttcgattggactgcacacctacctcaactataccgcgctggagcgttccgtcatcatcgagttccgttcgatcccgttcactgccacgctgacgctcgattcgttcggtgcctttctgcgggaagtggactgcagcgaaacgctgcaaccggaagctttcctcgagcagttgcgctcggagggtgcatttccctttgcacgctttctatcgcccggcccggtgccgcccgttttagaggaaacatcctcaaaggaacgcatgtcactcggttcgatcgattcgaccttcttcagtgaggaggcttctggtggcggcggtttccgactgtccctctactccgagatgagcatcggcgctgggctgggaagttcggccagctatggcgtttgtttggcggccggtgcgtaccaactttcgcgcattcttaagcgcgaagcgacggtcacccagctgggcgaagatgtgctcaaaaagatttaccagtggtcgttcgattccgagatcataatgcacgtgaaaccgtccggcattgataatgagatcgcgacgaacggggggctcgtacggtttcggcgcggatccggcgtgaacaagatcatcgccctgcgccgtcccgtgcacgtgttgatcgttgatacgggtgttagtcgtagcacggccaatctggtggccagtgctgctaaacgactggaactgttcccccgtacggttgggcccattctgcagggtatgggcgggttggtggatgaagcgatcgcactgctcgaatcggacgaagccccggaaacggtgtacgagcgactggggacgctcgtcagcattaacaacaatttgctgcgctcgctcggtgtgagtcatccggcgctggagcgcattttcaccattgccgagggggcagggttcgccagcaagctgaccggggcgggcggtggtggatgtgcgtttgtgctgctgccggcgggttacaaggagctcgagtcgttccgggcactgatgggcgcactggatgaggctggatttcggtcgatcgaaacgacggttggtacgggtgcgggcgtttcgctttcctacgaccaccaacaccaccagccgcagggtgacaaatga

SEQ ID NO: 152495 - protein, 402 aa, Anopheles gambiae str. PEST
MATTAIKHFEVSAPGKVILHGEHSVVYGHPAIAGSIGLHTYLNYTALERSVIIEFRSIPFTATLTLDSFGAFLREVDCSETLQPEAFLEQLRSEGAFPFARFLSPGPVPPVLEETSSKERMSLGSIDSTFFSEEASGGGGFRLSLYSEMSIGAGLGSSASYGVCLAAGAYQLSRILKREATVTQLGEDVLKKIYQWSFDSEIIMHVKPSGIDNEIATNGGLVRFRRGSGVNKIIALRRPVHVLIVDTGVSRSTANLVASAAKRLELFPRTVGPILQGMGGLVDEAIALLESDEAPETVYERLGTLVSINNNLLRSLGVSHPALERIFTIAEGAGFASKLTGAGGGGCAFVLLPAGYKELESFRALMGALDEAGFRSIETTVGTGAGVSLSYDHQHHQPQGDK

SEQ ID NO: 152496 - DNA, 1485 bp, Magnaporthe grisea 70-15
  CDS (1)..(1485)
atgccaccaactacagtaactactaatggtatacacaaggaagtaggggagcttcatatcaacggcaacggtaatggtattgtcaagaaccagcgggccaggatggccaggaaacagtcaagcccaatgatgcccgcattcatggtctcggctcctggaaaggttatcgtatttggagagcactcggtagtatacggcaagaaagctgtcgccgccgccataaacctccgatcataccttcttgtaacggcgctgtccaagtcgaagagaaccatcacactcagatttccagacatcgacctcatccacacttggaacatcgacgacctgccgtggtctacattttcgcagcccagcaagaaaaaatactactatgaccttgtcacgtcgctggaccccgatttgatggatgcgattcagccccacctcgagcctgtttcaagcgatgcccccgacgcccagcgcaaggtccacatgagcgcggcggcagccttcctctacctgttcatgtcccttggatcacatgccttcccaggaggcatttacacgttgaggtcgacgatacccatcggcgcaggcctggggtcgagcgcctccatttcggcatgcctctcagcagcactcctactgcagatcaggacattatcaggccctcacccggaccagccaccggacgaggcccgcgtgcaggtcgagcggatcaacaggtgggcctttgtggccgagatgtgcatacacggcaacccgtctggagtggacaatacggtctcgacccaaggcaaggccgtggttttccaacggctggactatgccaggccacctgtcgtcacccccatgtgggactttcctgagctcccgctgctcgtggtggacacaaaacaagccaagtcgaccaagtacgaggttgagaaggtggccaagcttagggaaacacaccccaagattgtcaactcaatattggactcgatggacaaacttacccaagcggcaacagatgtgctaacggacgaggattttgacaatgaggatgtcgagagcctgcagaaggtgggcgagctcatgggcatgaaccacggtctgcttgtgtctttgggagtgtcgcatcctagactggaaagagtgcgggagctcgtggatcatgagggaataggatggacaaagctgacgggtgccggtggcggtggatgttcgatcacgctgatgaggcccgatgtcccaagggagaagctggagcgtctgaaggagaggctagatcacgagggatacctcaagttcaggacgaccttgggcggtggcggcgttggtgtactgtggcctgccgtactgaggaatggaatggacgaagatgatgagggtgggatggagattgacgtcgagaagttcctgaatgcggacgggaacgaaggcgtcgagaggctcgttggtgtgcacggcaccagtggcgagagggaaggctggaagttttggagggtcggtaatgcatga

SEQ ID NO: 152497 - protein, 494 aa, Magnaporthe grisea 70-15
MPPTTVTTNGIHKEVGELHINGNGNGIVKNQRARMARKQSSPMMPAFMVSAPGKVIVFGEHSVVYGKKAVAAAINLRSYLLVTALSKSKRTITLRFPDIDLIHTWNIDDLPWSTFSQPSKKKYYYDLVTSLDPDLMDAIQPHLEPVSSDAPDAQRKVHMSAAAAFLYLFMSLGSHAFPGGIYTLRSTIPIGAGLGSSASISACLSAALLLQIRTLSGPHPDQPPDEARVQVERINRWAFVAEMCIHGNPSGVDNTVSTQGKAVVFQRLDYARPPVVTPMWDFPELPLLVVDTKQAKSTKYEVEKVAKLRETHPKIVNSILDSMDKLTQAATDVLTDEDFDNEDVESLQKVGELMGMNHGLLVSLGVSHPRLERVRELVDHEGIGWTKLTGAGGGGCSITLMRPDVPREKLERLKERLDHEGYLKFRTTLGGGGVGVLWPAVLRNGMDEDDEGGMEIDVEKFLNADGNEGVERLVGVHGTSGEREGWKFWRVGNA

SEQ ID NO: 152498 - DNA, 1527 bp, Gibberella zeae PH-1
  CDS (1)..(1527)
atgcctccttcgaacccagccatggttaacgggctcaacggcagccatgccaacggcaacggcaatggtcacaatcatatatctgattctggttcggaaacatctggcgaatcaagcaacggcagcggccgtcgtcgcatgaaactgaaccgcaagatgtccagccctatggcacctcctttcatggtatcggcaccaggaaaggtcattgtttttggagaacactctgttgttcatggcaaggcagccatcgccgcagccatttctctgcggtcatacctacacgttaccaccctttccaagtcgaaacgaaccgtctcgctccgattcgccgatattggtctcgttcacacctggaacatcgaagacctaccgtgggaagcctttcaacagccatccaagaagaagtcgtactattctctcgtgacagagctcgaccccgatctcgtcgccgccattcaaccacacatcgaagttgtctcccccaaccaccccgaggaaatccgaagagtgcaccacagctccgtctccgccttcctatatcttttcttatccctgggatctccttcgttccctccttgtctatacactctccgctcgactatacccattggtgctggcttgggcagcagcgcatcggtttcagtatgcctcgcgtccgcccttcttctacagctacggacgttgtccggcccccacccagatcaacctgcagacgaggctcgacttcaagttgaaaggattaacagatgggcgtttgtgtctgagatgtgtattcatggcaacccttcaggcgtcgacaataccgttgcgacacaaggaaaggctgtggtgtttcaacgaacagattactccaaaccacccaacgttcgcccactgtgggacttccccgaactgcctctattgttggtagacactcgccaggccaagtccactgcacacgaggttgccaaggttgcaaagctgaaacaaacccaccccaagcttgtgaatagcattttagatgctatggataaagtcacagatgctgcttccgaattaatcgaagagacctcttttgataatggatctgtggaggaccttagtaaggttggtgagctgatgaccatcaaccatggcctgttagtatcgctaggagtttcccacccgcgcctggaacgagtacgagagctggtagaccacgagggtattggatggaccaagttgactggcgctggtggtggcggctgctccattacccttctccgccctgatgttcctgctgagaagcttcagaagcttgaagaacgactcgaaaccgaaaattacgccaagtttgagacgacacttggaggtgatggtattggtgtcctctggccagctgttcttaagaacggcaccgaggaagacgaagagggcggcatggagattgatttagagaagttcttagaggctgaaggcacggagggtgtcgagaagctcgttggagtacatggcgatactggggaaagagaaggctggaagttctggagagtggaaagccagtga

SEQ ID NO: 152499 - protein, 508 aa, Gibberella zeae PH-1
MPPSNPAMVNGLNGSHANGNGNGHNHISDSGSETSGESSNGSGRRRMKLNRKMSSPMAPPFMVSAPGKVIVFGEHSVVHGKAAIAAAISLRSYLHVTTLSKSKRTVSLRFADIGLVHTWNIEDLPWEAFQQPSKKKSYYSLVTELDPDLVAAIQPHIEVVSPNHPEEIRRVHHSSVSAFLYLFLSLGSPSFPPCLYTLRSTIPIGAGLGSSASVSVCLASALLLQLRTLSGPHPDQPADEARLQVERINRWAFVSEMCIHGNPSGVDNTVATQGKAVVFQRTDYSKPPNVRPLWDFPELPLLLVDTRQAKSTAHEVAKVAKLKQTHPKLVNSILDAMDKVTDAASELIEETSFDNGSVEDLSKVGELMTINHGLLVSLGVSHPRLERVRELVDHEGIGWTKLTGAGGGGCSITLLRPDVPAEKLQKLEERLETENYAKFETTLGGDGIGVLWPAVLKNGTEEDEEGGMEIDLEKFLEAEGTEGVEKLVGVHGDTGEREGWKFWRVESQ

SEQ ID NO: 152500 - DNA, 1293 bp, Candida glabrata CBS 138
  CDS (1)..(1293)
atgactgtagagcgggacttgccatttctggtctctgctcctggtaaagttattctgtttggagagcattccgcggtttataatgagcctgctgttgctgcaagtgtctcatctttaagaacttatttgttggtctcgccagcaggttctaatgctgaggactcaattgagctaagtttcccggacattggatttgaccacgtatggaagcgcaaggagctggagccggttttgcgtgagactgcgttgttgcaagccgctcgtgaagatacgaagaacctaaatgaggagttagtgggcctgctgaatgttattctggaaccactgaaggagtctttgcattatcatgctgctttttgcttcctgtacttgttttgtacactatgcccatctgcaactaacatcaaattctcagttaaatcaacgttgccgatcggagcagggctgggatcaagtgcagctatatccgtgtctttggccatggccatgcttagattgggtggtaagctagttactggggagagtttgtcaggggaggataaagcacttattaatgagtgggcattcattggtgaaaaatgtatacacggtactccatcgggtatagacaatgcggtagccacttacggtaatgcagtactattcaagagaagtgccgatggtaccacggacttcgaatttttggataagtttcatgagctcaagatcccaatggtactcacgtatactagaattccaagatccaccaaagtattggtctcttcagtacgagacttatcaaataaatatccgaaggtcattcaagatcatgtcataaaagcaatgggagagctcgctttggaaagtgtagatatattgaatagtggcattggtggaaatgacagcaattatgaaagacttctagaccttgtcaatattaatcacggtctattagtagccattggggtttcacatcctgggttggaaattattaggaatctatccataacaaacagtattggtgctaccaaactaactggagcaggcggtggtggttgtgctttcaccgttctaaataaagacgttccacaaacagaggtggacaaattcaaagaagaattgtctaagaaacacggctacctatctttcacatcagagcttggcggtgctggttcatgtatgacgccaacgctagtagcagagcaatataacctagtcgcaccgctgttcgaaaatactgaaaataataaggaagaactggataagaccttgcttcctgctacagcaacaaattcactgttctggatccattag

SEQ ID NO: 152501 - protein, 430 aa, Candida glabrata CBS 138
MTVERDLPFLVSAPGKVILFGEHSAVYNEPAVAASVSSLRTYLLVSPAGSNAEDSIELSFPDIGFDHVWKRKELEPVLRETALLQAAREDTKNLNEELVGLLNVILEPLKESLHYHAAFCFLYLFCTLCPSATNIKFSVKSTLPIGAGLGSSAAISVSLAMAMLRLGGKLVTGESLSGEDKALINEWAFIGEKCIHGTPSGIDNAVATYGNAVLFKRSADGTTDFEFLDKFHELKIPMVLTYTRIPRSTKVLVSSVRDLSNKYPKVIQDHVIKAMGELALESVDILNSGIGGNDSNYERLLDLVNINHGLLVAIGVSHPGLEIIRNLSITNSIGATKLTGAGGGGCAFTVLNKDVPQTEVDKFKEELSKKHGYLSFTSELGGAGSCMTPTLVAEQYNLVAPLFENTENNKEELDKTLLPATATNSLFWIH

SEQ ID NO: 152502 - DNA, 1260 bp, Kluyveromyces lactis NRRL Y-1140
  CDS (1)..(1260)
atgactgtgacatctgctgttccaactccatttatcgtttctgctcccggtaaggtgattatattcggcgaacattcagccgtgttcaataagaatgctatagctgctagtgtatcttctctaaggacgtatttactgatcgaacaatctaaggatggcgatggggtagagctagacttcccagatatcaattatgattcaaaatggagcacggaagaattgaaaacaatcgacagcgaagttgtaaaacaagctgctggcctgaaacatttatgtccaaagcttaaagagcagttgaatttacttttggaaggtttgaaggattctttgaactactatgctgcattgtcattcctatacttgtacctaagtttgtgtcccaatgtgaaaggcttaaaattcacggtgaaatcaactttaccgattggagctggacttggatctagtgcgtcaatttctgtatgtcttgctcttgcaatggcaagaatgggcggtcatatctcatgtgataaaagtatctcccaagaggagaaagagtttatcaatcattgggctttcatcggtgaatgttgtatccatggaactccttctggaatcgataacgctgtggctacatatggtaacgcagttaaattcaaaaggcaagaggatggcagcaccaagtttgatcaaataagcaatttcccacaactgccaatggtcttaactaatacaagaattaaaagatccactaaaattcttgtgtctggagtaggtgaccttgtcaacagaaagccgttgatcactgaacctattttagaagccatgaaccaagtggctctcaggggttcagagctattatctgatatctcaaaagacattcattatgatgaattgctagagttaataagaattaatcatgggttgttggttgctataggtgtatcacatccgggtctagaagttattaaacagttaagtgatgaattgaaaattggtcaaacaaagcttactggggctggtggtggtggatgcgccttcacacttctcaataaggatgtagatcattcctcagtaagaaaattccatgaaaagttacattcaaactatggataccaaattttcgaaaccggacttggtggtgtaggctgctgttttgtggatttaaaaaatgaacaatacgaatctttgaaacacttatttatagactctgccactgtgcaagaagtttcattggctcttttaccaagtcctgacggttcacttacttggaccgcatga

SEQ ID NO: 152503 - protein, 419 aa, Kluyveromyces lactis NRRL Y-1140
MTVTSAVPTPFIVSAPGKVIIFGEHSAVFNKNAIAASVSSLRTYLLIEQSKDGDGVELDFPDINYDSKWSTEELKTIDSEVVKQAAGLKHLCPKLKEQLNLLLEGLKDSLNYYAALSFLYLYLSLCPNVKGLKFTVKSTLPIGAGLGSSASISVCLALAMARMGGHISCDKSISQEEKEFINHWAFIGECCIHGTPSGIDNAVATYGNAVKFKRQEDGSTKFDQISNFPQLPMVLTNTRIKRSTKILVSGVGDLVNRKPLITEPILEAMNQVALRGSELLSDISKDIHYDELLELIRINHGLLVAIGVSHPGLEVIKQLSDELKIGQTKLTGAGGGGCAFTLLNKDVDHSSVRKFHEKLHSNYGYQIFETGLGGVGCCFVDLKNEQYESLKHLFIDSATVQEVSLALLPSPDGSLTWTA

SEQ ID NO: 152504 - DNA, 1302 bp, Debaryomyces hansenii CBS767
  CDS (1)..(1302)
atgtcggtctctcctttcttggttagtgcgcctggtaaggtaatcatatatggagaacactcagcagtttatggtaaaccagctattgccgcggcacttagtttgagagcatatttgttagttacaccatgcgaagatgtgaacgatataagattggattttccagatattgggttatcgcattcttggaataaagaaaacataccctgggaagatatcagaaaattcgttacgtttaaagatgaaaagcctgttgttacggaggaattagtaccagaaatcgttgatttattgagcacggttttggctgatgttgaatctaaattgcattataccgcttgtctttgcttcctctacttgtatgcaaatttatctaacaaggacgttccaggtatgaggtttattgtcaaatcgacattacccattggagcagggttaggatcttcagcctgtacagccgtatgcctcgctagcgcattggctcgtcttggtaaacatgtttcagcggcatgccatacttctactgagaaagtttataagaaagaaaattctgatctagacttcattgatagctggtctttaatgggtgaaaaatgctttcacggtaatccttcgggaattgataacgctgtggctacgtacggtggtgctgtcatgtttcaaaggacaacgataccatccaaaccatctgtccgtactactatgagaaattttccacctatcaaattgatacttataaataccaaagtgccaagaagcacagctgcattagtgggtaatgttgctcaagtaaataggacctatcctaaatgcgcaggctcgattttagatgcaatggagcatttagtatttgaggcatatcaaataatgatcagaccatcttttggtaaagaagagaaagatcaattacgtgaattagtcaatattaatcatggattattggttgctttgggtgtttcccaccctgccttggaaaaaatcaaaattatcggagatacccatggtataggttctactaaattaactggcgctggaggtggtggctgtgctattagtttggttcatgatgacgtagaggaagaagtgattcaaaaggcaatcaaagaatttgaaaacgaaggatatgaaactttcgaaacttcgttaggcggtaaaggagtaggatcattatcattagaggatgttgacaaagacaaaagggatactgtattttcagccgaagtcttttctagttacaaggatagagacgaagttgaaaaggcattaaaatccgacatatacgaatcttggaggttttggtag

SEQ ID NO: 152505 - protein, 433 aa, Debaryomyces hansenii CBS767
MSVSPFLVSAPGKVIIYGEHSAVYGKPAIAAALSLRAYLLVTPCEDVNDIRLDFPDIGLSHSWNKENIPWEDIRKFVTFKDEKPVVTEELVPEIVDLLSTVLADVESKLHYTACLCFLYLYANLSNKDVPGMRFIVKSTLPIGAGLGSSACTAVCLASALARLGKHVSAACHTSTEKVYKKENSDLDFIDSWSLMGEKCFHGNPSGIDNAVATYGGAVMFQRTTIPSKPSVRTTMRNFPPIKLILINTKVPRSTAALVGNVAQVNRTYPKCAGSILDAMEHLVFEAYQIMIRPSFGKEEKDQLRELVNINHGLLVALGVSHPALEKIKIIGDTHGIGSTKLTGAGGGGCAISLVHDDVEEEVIQKAIKEFENEGYETFETSLGGKGVGSLSLEDVDKDKRDTVFSAEVFSSYKDRDEVEKALKSDIYESWRFW

SEQ ID NO: 152506 - DNA, 1350 bp, Yarrowia lipolytica CLIB122
  CDS (1)..(1350)
atggactacatcatttcggcgccaggcaaagtgattctatttggtgaacatgccgctgtgtttggtaagcctgcgattgcagcagccatcgacttgcgaacatacctgcttgtcgaaaccacaacatccgacaccccgacagtcacgttggagtttccagacatccacttgaacttcaaggtccaggtggacaagctggcatctctcacagcccagaccaaggccgaccatctcaattggtcgactcccaaaactctggataagcacattttcgacagcttgtctagcttggcgcttctggaagaacctgggctcactaaggtccagcaggccgctgttgtgtcgttcttgtacctctacatccacctatgtcccccttctgtgtgcgaagattcatcaaactgggtagttcgatcaacgctgcctatcggcgcgggcctgggctcttccgcatccatttgtgtctgtttggctgcaggtcttctggttctcaacggccagctgagcattgaccaggcaagagatttcaagtccctgaccgagaagcagctgtctctggtggacgactggtccttcgtcggtgaaatgtgcattcacggcaacccgtcgggcatcgacaatgctgtggctactcagggaggtgctctgttgttccagcgacctaacaaccgagtccctcttgttgacattcccgagatgaagctgctgcttaccaatacgaagcatcctcgatctaccgcagacctggttggtggagtcggagttctcactaaagagtttggctccatcatggatcccatcatgacttcagtaggcgagatttccaaccaggccatggagatcatttctagaggcaagaagatggtggaccagtctaaccttgagattgagcagggtatcttgcctcaacccacctctgaggatgcctgcaacgtgatggaagatggagctactcttcaaaagttgagagatatcggttcggaaatgcagcatctagtgagaatcaatcacggcctgcttatcgctatgggtgtttcccacccgaagctcgaaatcattcgaactgcctccattgtccacaacctgggtgagaccaagctcactggtgctggaggaggaggttgcgccatcactctagtcacttctaaagacaagactgcgacccagctggaggaaaatgtcattgctttcacagaggagatggctacccatggcttcgaggtgcacgagactactattggtgccagaggagttggtatgtgcattgaccatccctctctcaagactgttgaagccttcaagaaggtggagcgggcggatctcaaaaacatcggtccctggacccattag

SEQ ID NO: 152507 - protein, 449 aa, Yarrowia lipolytica CLIB122
MDYIISAPGKVILFGEHAAVFGKPAIAAAIDLRTYLLVETTTSDTPTVTLEFPDIHLNFKVQVDKLASLTAQTKADHLNWSTPKTLDKHIFDSLSSLALLEEPGLTKVQQAAVVSFLYLYIHLCPPSVCEDSSNWVVRSTLPIGAGLGSSASICVCLAAGLLVLNGQLSIDQARDFKSLTEKQLSLVDDWSFVGEMCIHGNPSGIDNAVATQGGALLFQRPNNRVPLVDIPEMKLLLTNTKHPRSTADLVGGVGVLTKEFGSIMDPIMTSVGEISNQAMEIISRGKKMVDQSNLEIEQGILPQPTSEDACNVMEDGATLQKLRDIGSEMQHLVRINHGLLIAMGVSHPKLEIIRTASIVHNLGETKLTGAGGGGCAITLVTSKDKTATQLEENVIAFTEEMATHGFEVHETTIGARGVGMCIDHPSLKTVEAFKKVERADLKNIGPWTH

SEQ ID NO: 152508 - DNA, 1080 bp, Apis mellifera
  CDS (1)..(1080)
atgattcaatttaaagtatctgcaccaggaaaagttattctttttggagaacatgctgtagtatatggaaaaacagctgttgcagctagcatagatttacgtacagttctaaattttacagaattacctgaagcagaacaattttttattaataaaaacgtggaatttatagaaaattatgagatattttataataaaataaaggaatttgtctgtattgttagttatgcaaattttcaacaaaaattaagtttagaagcatttttctatactcttatttatattgcacaaaaagaagaaatggaaataaaaccatttcaaattcaattaaatacagaattggcaattaattctggacttggtagttccgcttcttttgcagtttgtcttgctgcatgttttgtacattggtcacatttacaaaaaaatatttataaagtatttgatttttctactttagatgttatttcaaaatatgctttaaattgtgaaagaattatgcatggtaatccatctggaatagataattgtatttgtacatatggatcaataatagaatttaaaaagggtaattatatacaaccaataaataccaataatatacaggcaatgaaaattttattagtagatacaagagtaaatagaagtactaaagctttacttgaaaaagtattagaattaaaacatacatatccagttatcattgatctgattatggattcaatagataatatatcaaaagaagcagttaaaattattcaaaaattgaaaactttctcaaataccaatgagttttttttggaaggatacaaacaattaatgatacttattaacatgaatcaaggattgttagccacatgtcaaatttctcatccatctttggatagaatttgtgcagaagcacaaaattatggtttagcagcaaaacttacaggtgccggtggtggcggacatgcatatattctcttattaccagatacacaaccagaaactatttcaagtatttcgcgaaaattaattgcagacggatttactgttaaattaacaactttggggtgctctggtgtacaaattaattaa

SEQ ID NO: 152509 - protein, 359 aa, Apis mellifera
MIQFKVSAPGKVILFGEHAVVYGKTAVAASIDLRTVLNFTELPEAEQFFINKNVEFIENYEIFYNKIKEFVCIVSYANFQQKLSLEAFFYTLIYIAQKEEMEIKPFQIQLNTELAINSGLGSSASFAVCLAACFVHWSHLQKNIYKVFDFSTLDVISKYALNCERIMHGNPSGIDNCICTYGSIIEFKKGNYIQPINTNNIQAMKILLVDTRVNRSTKALLEKVLELKHTYPVIIDLIMDSIDNISKEAVKIIQKLKTFSNTNEFFLEGYKQLMILINMNQGLLATCQISHPSLDRICAEAQNYGLAAKLTGAGGGGHAYILLLPDTQPETISSISRKLIADGFTVKLTTLGCSGVQIN

SEQ ID NO: 152510 - DNA, 2208 bp, Aspergillus nidulans FGSC A4
  CDS (1)..(2208)
atggcttcttacttgctgttgcttcttcatcgggacttcgttctatcttgccttgtaccctattttggctacaagctgacataccgcacgaagttttgtgatccccggacggtcgatctgcagccgggacgaaggcctctaggtgtcaaggagatcaaggaactcgacgattataagagtattgccccctggagggaatccgtttctttcgtgcaattgtgccgagaacgagcgatgtatacgaggatcgatctggagctgctccagccacagtacaacacgtcgtgtcctgtgactgctgtcagcttcaggtgcaggaatcccggtgaaatgtcctgccattcgggagacgatgccgttgagagagcgacagggacgatggacaatcgaatacgagcacgtctgactaaaaggagataccttgaccatgattggtggtcgctctcttcttctacacgttctctcgtccgtctcggcgtcattcttcagctctgcgctgtcctgctcccttcattccgtctgaccgccagccagtcatggtcgctgcccgatcacattaatacccctgtcttctgctctcactcgttgcttccagccgctcgaacctcgtacgacctgtccctaaagctaatcgagccgtatacactcagcacagcttccgacatgacctcactgttacctgtccgccctcgctcagtccggccaactgcccccgtaactatcagcgacgaccacgaaagctccgacgcttcgactatcccttctccttccaccacaaccagctccaggagcttctccaacccatcgacgacgccagatcagaagagaatcaagatgcagcggaaacaatcgtctccattggctccggcctttatggtgtccgccccgggaaaggttattgtgtacggcgagcatgccgtcgtgcacggcaaggccgcaatggccgcagccatctctctccgctcatatctccttgtcaccactctcagcaagtcgcagcgcacgatcactctgaatttccgcgatacaaacttgaatcacacttgggatatcgatcaattgccctgggatcttttccaccacccgtcaaagaagaagtattactacgacctcgtcaccactcttgatcaggagctctacgatgcgattcagccccacgtcgaagatatttccccagatgcccccgaggagatgcgcaaaatccacaagcgatccgcgagcgcgtttctctaccttttcctttcactaggctctccacagagcgcgggcgccatctacaccctgcgatctacaattccgatcggtgctggtttagggagcagtgcgagtgtctgcgtatgcatgagcgctgcgctacttgtccagatccgaacccttgccggtcctcaccccgatcaacccccagatgaagcagaggtccagattgagcggatcaatcgctgggcctttgtcggtgagatgtgcattcacggaaaccccagcggggtagacaacacggtgtccgcgggcggaaaagccgtgattttcagacggggagattattccaagccgccctccgtcacctccctgcccaccttcccggaactcccgctgctccttgtcgacacgcgacagggccgctccactgccgttgaagtcgctaaagtgggagctttgcgaaaagaatggccagtggtaaccgaatcgatccttgatgcgattgacaatgtaaccgcatccgccgagaaagttatccgagaacctaaccctgagggcttgtctgagaaaactcttcagcaattaggcaccctgatccggatcaaccatggctttcttgtctctcttggcgtatcccatccgcgactagaacgaatccgcgagctcgtggattacgccgacattggctggacgaagttgaccggcgctggcggtggtggctgtgcgattaccttgttgcgccctgacctaaatgatgattctctccgccaacttaagagtcaacttcaggacgagaactttggcatatacgagactacccttggcggtgacggagtgggcgtgctttggcctgctgtcctccgcaacggaaccgacgaagaaggcggcgaggagattgaccagcaaaagtttgaaaatgccgtcggcaccgagggtattgagcgtcttgttggcgttggtgtccaggagaaacgcgagggctggaagttctggaagcgagctgttgcttga

SEQ ID NO: 152511 - protein, 735 aa, Aspergillus nidulans FGSC A4
MASYLLLLLHRDFVLSCLVPYFGYKLTYRTKFCDPRTVDLQPGRRPLGVKEIKELDDYKSIAPWRESVSFVQLCRERAMYTRIDLELLQPQYNTSCPVTAVSFRCRNPGEMSCHSGDDAVERATGTMDNRIRARLTKRRYLDHDWWSLSSSTRSLVRLGVILQLCAVLLPSFRLTASQSWSLPDHINTPVFCSHSLLPAARTSYDLSLKLIEPYTLSTASDMTSLLPVRPRSVRPTAPVTISDDHESSDASTIPSPSTTTSSRSFSNPSTTPDQKRIKMQRKQSSPLAPAFMVSAPGKVIVYGEHAVVHGKAAMAAAISLRSYLLVTTLSKSQRTITLNFRDTNLNHTWDIDQLPWDLFHHPSKKKYYYDLVTTLDQELYDAIQPHVEDISPDAPEEMRKIHKRSASAFLYLFLSLGSPQSAGAIYTLRSTIPIGAGLGSSASVCVCMSAALLVQIRTLAGPHPDQPPDEAEVQIERINRWAFVGEMCIHGNPSGVDNTVSAGGKAVIFRRGDYSKPPSVTSLPTFPELPLLLVDTRQGRSTAVEVAKVGALRKEWPVVTESILDAIDNVTASAEKVIREPNPEGLSEKTLQQLGTLIRINHGFLVSLGVSHPRLERIRELVDYADIGWTKLTGAGGGGCAITLLRPDLNDDSLRQLKSQLQDENFGIYETTLGGDGVGVLWPAVLRNGTDEEGGEEIDQQKFENAVGTEGIERLVGVGVQEKREGWKFWKRAVA

SEQ ID NO: 152512 - DNA, 1296 bp, Candida albicans SC5314
  CDS (1)..(1296): transl_table=12
atgtcacaattgccatttattgttggtgctccaggtaaagtgattatttttggtgagcatgcggctgtctacggtaaaccggctattgctgcggccttgagtttgagatgttatcttttggtttccccttcatctgattccaataccattagattgcaattccctgatatcaaattggatcactcttggaatatcaaagatttgccatgggaggagatcaaaccatatttgacttatgacagtgcaaacaaaccacaaataccttcagaattggttcctgaaattgtggacaagttatcaagttttttgaatggttttgataacaaaatgcattattatgcttgcttttgttttctttacttgttgatgaatttatgtgattcaaaagtgtcgggaatgaattttattgtcagatcaactttacccattggtgcaggattgggatcatctgcttctacatctgtatgtttatcatcagctttggcacttatgggtggttggatcaacaaaccgctgttgcatgaaaatgataagttggatacagctgatatacctgatttggagtttatagataagtggtctttaattggtgagaaatgtttccatggtaatccatcagggattgataacgcagtggctacttttggaggagcggtgatgtttcaacgaacatcaactccagaacaaccatcaatccgtacaaacatgagaaatttccctgcaataaaattacttttaacgaatactaaagttccgaagagtacagccgatttagttgctggtgttggcagattaaacgcagaatttaatctgatttcaacatcgattttgacagctatagaacatttgtcacaagaagcttacaaggttatgatgaatccaatgtttggcaaagaagaaacaaatgttttgagaaagttggtgaatattaatcatggtttattggtagcgctaggtgtatcacatccagcattggaaacagtaaaaattattggtgataaacatagaattggggcgactaaattgacaggtgctggtggtggaggttgcgcgatcactctagtgaacgacgatgtagaagaatctgtcatacacaatgctatcaaagagtttgaagacagtggatacgagagtttcgagacttcgttaggtggtaaaggagtaggtattttgttccatgaagatttagacgatgccacaaagttctcagagtcccaaatttgcaattacgtagatcgtgccgctattgaggattcgttaggaatggcaaatgtgaaagaatggaagttttggtga

SEQ ID NO: 152513 - protein, 431 aa, Candida albicans SC5314
MSQLPFIVGAPGKVIIFGEHAAVYGKPAIAAALSLRCYLLVSPSSDSNTIRLQFPDIKLDHSWNIKDLPWEEIKPYLTYDSANKPQIPSELVPEIVDKLSSFLNGFDNKMHYYACFCFLYLLMNLCDSKVSGMNFIVRSTLPIGAGLGSSASTSVCLSSALALMGGWINKPSLHENDKLDTADIPDLEFIDKWSLIGEKCFHGNPSGIDNAVATFGGAVMFQRTSTPEQPSIRTNMRNFPAIKLLLTNTKVPKSTADLVAGVGRLNAEFNSISTSILTAIEHLSQEAYKVMMNPMFGKEETNVLRKLVNINHGLLVALGVSHPALETVKIIGDKHRIGATKLTGAGGGGCAITLVNDDVEESVIHNAIKEFEDSGYESFETSLGGKGVGILFHEDLDDATKFSESQICNYVDRAAIEDSLGMANVKEWKFW

SEQ ID NO: 152514 - DNA, 1473 bp, Tribolium castaneum
  CDS (1)..(1473)
atgtgtaaaacgttccgaggaatcgattggtgtcgagcaaagtgcaaaattctatgtaaacactgctccttgacccttcaggaagtcattgacgaatccgacggctgcggcggcaaattctcgtgcgtcatcgtctccgacaagttccgtggcaagccactactccaaagacaccggctggtgaattcagtgcttcaagaagaactcaaatcaattcacgccttctcgcaaaaaacctacaccccagaacattacataacgaattttttctacaactttccactttcagaaattcgtgtgtccgcccccggtaaagtgattttacacggtgaacattcagtggtttatgataagttggcggtggcggccagtttgggtctaaggacgcgattggagtattgcgaggagggggcggggctaagggtggagtttggcgaccttgggctcacgcaatgttacaacttcaaggacgtccaccaacttctcagcacacaaataccattgacccaacccacagcctactacaacctgactcatcccgaacttttggatcatgataaaatcaccgaaatcgtcgaaaagttcgtcgatttgaatcgacacgaacccaaacaacgccaggctttggtttcgtttttttatttattttttgcaattgtgggaagtaccgattcaaatttgagtgatgggttcaagttggctgtgcggtccgatttgacagttggggccggaaccggaagttcggcctcgttcgcagtcgccatagcggcgtttttgctccattttgtcaaagtcaaaaaattcaaatccaaaaatttgtacaaaagtcttgatctaaatgtggataatttgcaaaattttgacacaacggagctggatttggtctcgaagtgggcgtttcagagcgagaggatcatccacgggacaccgtcaggtgttgacaacacaatttgcacttttggcggtttagtgtcattccgaaaaggcacaaggccccaaaaaatcaccctgtcgtcaaaaatcaccctgatccttatcgacaccaacacaccacgtgacactaaaaccctggtcggtaaagtagcgaccaaacgggcgaaataccggccgataatcgacgccattttggacgccatggaccacacaacaatcagcgcacttgattatttccaaaaaatggaaacaagtgacgtttcgggggagacttatgacgcattaggggaactcgccgacttgaatcaaaatctcttgcgatgtttgggtgtttcacacccaaaattggaccaagcttgcgagattttggccacttttggactacactgcaaattgacaggggcggggggtggggggtgcgccatctgtgtggtgccgccctctgtcaaaggggtggaaaaggctataaccgaactgaaattgaacggtttcggggcggttttaaccgatttaggcggttgtggagtaagggttgattaa

SEQ ID NO: 152515 - protein, 490 aa, Tribolium castaneum
MCKTFRGIDWCRAKCKILCKHCSLTLQEVIDESDGCGGKFSCVIVSDKFRGKPLLQRHRLVNSVLQEELKSIHAFSQKTYTPEHYITNFFYNFPLSEIRVSAPGKVILHGEHSVVYDKLAVAASLGLRTRLEYCEEGAGLRVEFGDLGLTQCYNFKDVHQLLSTQIPLTQPTAYYNLTHPELLDHDKITEIVEKFVDLNRHEPKQRQALVSFFYLFFAIVGSTDSNLSDGFKLAVRSDLTVGAGTGSSASFAVAIAAFLLHFVKVKKFKSKNLYKSLDLNVDNLQNFDTTELDLVSKWAFQSERIIHGTPSGVDNTICTFGGLVSFRKGTRPQKITLSSKITLILIDTNTPRDTKTLVGKVATKRAKYRPIIDAILDAMDHTTISALDYFQKMETSDVSGETYDALGELADLNQNLLRCLGVSHPKLDQACEILATFGLHCKLTGAGGGGCAICVVPPSVKGVEKAITELKLNGFGAVLTDLGGCGVRVD

SEQ ID NO: 152516 - DNA, 921 bp, Staphylococcus aureus subsp. aureus MRSA252
  CDS (1)..(921): transl_table=11
atgacaagaaaaggatatggggaatcgacaggtaagattattttaataggagaacatgctgttacatttggagagcctgctattgcagtaccgtttaacgcaggtaaaatcaaagttttaatagaagccttagagagcgggaactattcgtctattaaaagcgatgtttacgatggtatgttatatgatgcgcctgaccatcttaagtctttggtgaaccgttttgtagaattaaataatattacagagccgctagcagtaacgatccaaacgaatttaccaccatcacgtgggttaggatcgagtgcagctgtcgcggttgcttttgttcgtgcgagttatgattttttagggaaatcattaacgaaagaagaactcattgaaaaggctaattgggcagagcaaattgcacatggtaaaccaagtggtattgatacgcaaacgattgtatcaggcaaaccagtttggttccaaaaaggtcatgctgaaacgttgaaaacgttaagtttagacggctatatggttgttattgatactggtgtgaaaggttcaacaagacaagcagtagaagatgttcataaactttgtgaggaccctcagtacatgtcacatgtaaaacatatcggtaagttagttttacgtgcgagtgatgtgattgaacatcataaatttgaagccttagcggatatttttaatgaatgtcatgcggatttaaaggcgttgacagttagtcatgataaaatagaacaattaatgaaaattggtaaagaaaatggtgcgattgctggaaaacttactggtgctggtcgtggtggaagtatgttattgcttgccaaagatttaccaacagcgaaaaatattgtaaaagctgtagaaaaagctggtgcagcacatacatggattgagaatttaggaggttaa

SEQ ID NO: 152517 - protein, 306 aa, Staphylococcus aureus subsp. aureus MRSA252
MTRKGYGESTGKIILIGEHAVTFGEPAIAVPFNAGKIKVLIEALESGNYSSIKSDVYDGMLYDAPDHLKSLVNRFVELNNITEPLAVTIQTNLPPSRGLGSSAAVAVAFVRASYDFLGKSLTKEELIEKANWAEQIAHGKPSGIDTQTIVSGKPVWFQKGHAETLKTLSLDGYMVVIDTGVKGSTRQAVEDVHKLCEDPQYMSHVKHIGKLVLRASDVIEHHKFEALADIFNECHADLKALTVSHDKIEQLMKIGKENGAIAGKLTGAGRGGSMLLLAKDLPTAKNIVKAVEKAGAAHTWIENLGG

SEQ ID NO: 152518 - DNA, 912 bp, Methanococcoides burtonii DSM 6242
  CDS (1)..(912): transl_table=11
atgatcacctgttctgcacctggtaaagtatatctgttcggcgaacacgcagtggtctatggagagcctgctatttgttgtgcagtggatattcgtaccagggtcaccgtatctcctgcggacacgatcaccataagttcatcccttggaactacgggcatcgattttgaagtccatccctatgtttcagcggtcctcgaacgctttcaggatatctcatcctttgatggagtggacctgcgcataagttctgatattccggtaggttccgggctaggttcttctgcagcagttactgtggctacgatcaaggcaatggatactttgctggacctcggacttgaactggatgatatcgcaaagatggggcatgaggtcgagcagaatatacagggtacagcaagtcccacagatacgtatgtatgtaccatgggtggcgtggttctgataccacaacgtaaaaaacttgaacttattgattgtgggatccttataggtaacacaaatatattctcatccacaaaagagctcgtgggtaatgtggctgatcttaatgaaaggttccctgacgttgtgggacctgtattatcatccattggaaagctgtctgttattggtgaaggacttgtgaacgatagggactatgtttctgttggtgaacttatgaacatcgatcagggtctgcttgatgctattggtgtaagttgtgctgaactgtcttccctcatctatgctgcacgtgaaagtggtgcgtatggttcaaagataaccggtgcaggtggcggtggttgtatggtcgctatatctccgcgtgagaatgtggattcggtggcagaggcaattggtatggccggcgggaaagttgttgtggccaatgcgacagatataggtgtcagggtggaatgccagtga

SEQ ID NO: 152519 - protein, 303 aa, Methanococcoides burtonii DSM 6242
MITCSAPGKVYLFGEHAVVYGEPAICCAVDIRTRVTVSPADTITISSSLGTTGIDFEVHPYVSAVLERFQDISSFDGVDLRISSDIPVGSGLGSSAAVTVATIKAMDTLLDLGLELDDIAKMGHEVEQNIQGTASPTDTYVCTMGGVVLIPQRKKLELIDCGILIGNTNIFSSTKELVGNVADLNERFPDVVGPVLSSIGKLSVIGEGLVNDRDYVSVGELMNIDQGLLDAIGVSCAELSSLIYAARESGAYGSKITGAGGGGCMVAISPRENVDSVAEAIGMAGGKVVVANATDIGVRVECQ

SEQ ID NO: 152520 - DNA, 933 bp, Myxococcus xanthus DK 1622
  CDS (1)..(933): transl_table=11
gtggctcctcgtcctgaatccttgtcggcctttggcgccggcaaggtcatcctgttgggtgagcacagcgtcgtgtacgggcacccggccctggccgggccgttgtcgcagggcgtgacggcgcgcgccgtgcccgcgaaggcgtgtcagctcgcgttgccctccacgctcagccgcccgcagcgggcgcagctcacggcggcgttcgcccgtgcggcggaggtgacgggcgcgccgccggtgaaggtgtcgctggaggcggacctgccgctggcggtgggcctgggaagctcggcggcgctgtcggtggcgtgcgcgcggttgctgctccaggcggcggggaaggtgcccacaccgaaggacgcggcgcgtgtggcgtgggcgatggagcaggagttccacggcacgccgtccggcgtggaccacaccaccagcgccgcggagcaactggtcctctactggcgcaagccgggggccgccaaggggacggggcaggtcgtggagagccccaggcccttgcacgtggtggtgacgctcgcgggtgagcgcagccccacgaagaagacggtgggcgcgctgcgggagcggcaggctcgctggccgtcgcgctacgagcgcctgttcgcggagattggacgggtgtcctcggagggcgcgaaggcggtggcggcgggagatttggaggcactgggcgacgcgatgaacgtcaaccagggcctgctcgcggcgctgggcctgtcgtcgccgccgttggaagagatggtctaccggttgcgggagctgggggcgctgggcgccaagctgaccggagctggtggagatggtggggccgtcattggcctgttcctggagcccaagcccgtggtgacgaagctcacccggatgggcgtgcgctgcttcagcagccagctcgcgggaccgcgggcgtcgtga

SEQ ID NO: 152521 - protein, 310 aa, Myxococcus xanthus DK 1622
MAPRPESLSAFGAGKVILLGEHSVVYGHPALAGPLSQGVTARAVPAKACQLALPSTLSRPQRAQLTAAFARAAEVTGAPPVKVSLEADLPLAVGLGSSAALSVACARLLLQAAGKVPTPKDAARVAWAMEQEFHGTPSGVDHTTSAAEQLVLYWRKPGAAKGTGQVVESPRPLHVVVTLAGERSPTKKTVGALRERQARWPSRYERLFAEIGRVSSEGAKAVAAGDLEALGDAMNVNQGLLAALGLSSPPLEEMVYRLRELGALGAKLTGAGGDGGAVIGLFLEPKPVVTKLTRMGVRCFSSQLAGPRAS

SEQ ID NO: 152522 - DNA, 921 bp, Pediococcus pentosaceus ATCC 25745
  CDS (1)..(921): transl_table=11
gtggaagaaattataaagagtagtaattcaaaaataattttaattggcgaacatagcgtcgtctatggacagcctgcaattgcattaccaatccgtaatgttaaaactacggttaaaatccaaccaactaatggcgacattcaaatcaaaagtcgctattttaatgggtctctaaaggatatccatagtaatctacttggtattaaaaatctaattaaacaaactttaaacgagcttaatcgccccaatactaatttattaattaccattgatagtgatgttccagccgaacgcggaatgggctcttcagcatcgacagcagttgctctagtacgggccctatacgcgtattttgaacatcccttaacgcgaacgacccttctaaaaactgtcgatatttcagaaaagattattcacggaaagcctagcgggctagattctgctactgcaagtgctaataatccaatctggtttaaaaaagatggtaccattaagccattaccaatcaacgtcgacgcttacctcataattagtgattcgggaattaagggtaaaacgagtgaagcagtcgaaatcgttaaaaataagcttcgatttgactctgacagtagacttttaatcgaaaaattgggagaattgactagtcagactgcgactgtcctccgtcaaaatgatgtaagtacgttagggaaaattttaactgaagcacatactaacttacgtcaattgggagtcagtcaccctgctgttgaaaaattaattaaaattgctaatgattcaggtgcgcttggcagtaaattaactggcggtggtttaggaggatgtgtgatttcacttgctcctaaccttccagctgctgaaaaaattagtcagcaacttactgctggcggagccacggccacttggattgaaaaactttaa

SEQ ID NO: 152523 - protein, 306 aa, Pediococcus pentosaceus ATCC 25745
MEEIIKSSNSKIILIGEHSVVYGQPAIALPIRNVKTTVKIQPTNGDIQIKSRYFNGSLKDIHSNLLGIKNLIKQTLNELNRPNTNLLITIDSDVPAERGMGSSASTAVALVRALYAYFEHPLTRTTLLKTVDISEKIIHGKPSGLDSATASANNPIWFKKDGTIKPLPINVDAYLIISDSGIKGKTSEAVEIVKNKLRFDSDSRLLIEKLGELTSQTATVLRQNDVSTLGKILTEAHTNLRQLGVSHPAVEKLIKIANDSGALGSKLTGGGLGGCVISLAPNLPAAEKISQQLTAGGATATWIEKL

SEQ ID NO: 152524 - DNA, 921 bp, Oenococcus oeni PSU-1
  CDS (1)..(921): transl_table=11
atgaatttcggttttggacaagcacatgctaaagcacatcttcttggagaacattcggttgtatacggatatccggcaattatcgcgcctttattgagtctcacgaataaagccgagattatcgattccgatacaacagttatcgaaacagacaacttttccggatcgatgtaccaacttaattatcgtttcagcggaatttataatctcctggtcgaattgctcaatttctttgaaagccccgatctgactttcaaactgcacgttaaatcaaatataccctcgaaaaagggccttggatcatcggcagcatatgctgtctcaattgtaaaggctttttgcgattattttgactatcagtacaccgatgaagaagttttcaaattcgctcaaatagccgaaaataaaaatcacggtaaatcttccggtggagatacctatgccgttatggccgaaggtccgatttttttcgacagcaacaaagatgcgacgattctaaaactcaacacacaggcttatattataattgccgattccggaacagccggtttaacctctcaagctgttcaattggttgcggacaattatgaaaagaatccaactgtctatggcggttacttgaaaagaatgggagaaattgccgataaaggccgagaagaaattatcgcagacgacttaaaagactttggccagttaatgaacgaaaatcaacttttattgtcaaaattaggcgtttcaacaccctacttggaacgtttaataaaaattaccctaaaacacggcgcactgggtgctaaattgaccggtggcgggctcggcggaagtattgtcgctttaactgataaatcggaaaccgcaaaagaaataaaaagtgctctcagcaaatcaggagcatcggaaagctggatctcgaaaatctga

SEQ ID NO: 152525 - protein, 306 aa, Oenococcus oeni PSU-1
MNFGFGQAHAKAHLLGEHSVVYGYPAIIAPLLSLTNKAEIIDSDTTVIETDNFSGSMYQLNYRFSGIYNLLVELLNFFESPDLTFKLHVKSNIPSKKGLGSSAAYAVSIVKAFCDYFDYQYTDEEVFKFAQIAENKNHGKSSGGDTYAVMAEGPIFFDSNKDATILKLNTQAYIIIADSGTAGLTSQAVQLVADNYEKNPTVYGGYLKRMGEIADKGREEIIADDLKDFGQLMNENQLLLSKLGVSTPYLERLIKITLKHGALGAKLTGGGLGGSIVALTDKSETAKEIKSALSKSGASESWISKI

SEQ ID NO: 152526 - DNA, 936 bp, Streptococcus suis 89/1591
  CDS (1)..(936): transl_table=11
atgtcggtagtaggaaaagcaaatggaaaaatcattttgatgggagagcatgcggtggtctatgggcaaccagcaattgctatgcctttttctgctgttgaaattattgctcaggtaactgctcaaggggaagcgctgactgttgcttgtgacttctataaaggcttggtgcacaagatgccaaaaatctgggaaagcctcaagcatgccatccgtttctcgctctatcgtatcggagcaccgacagacccggctatccatatcgagattagttccaccattcctgccgagcgcggtatgggctccagtgcagccgtggcagttgcagtagcacgcgccctctttgcctactataaaaaagagctgacagacagcgaactctgggacatcgtccagtcttcggaaaaaattgctcacggcaatccatcaggcatagatgcggcaaccaccagcggcaagtcccccgtcttttttatcaagcaccagcccatcgaaccttttgagctgaaactccatgcctatttggtagtggctgatacaggtgtgacgggaaacaccttagaagccatttcggacgtggctgatttgttggagaaaaagccagaggctatcaagctagtagaagaactggggaacttgacccgacaggccaaggaagatttagccacaggccaggcagagattctaggtagcagaatgaaccaagctcatgccctcctgcaaaaattaggcgtgtctgatcctagcctagataagctagtcagccttgcccaagaaaatggagccctcggagccaaattaactggtggcggccgaggaggctgcatgcttgccttggcaagaacagctcaggatgcccaaaaacttgcacacatccttgaccaagcaggcgcccgccaaacctggatacagtacttaggagaaaccaatgactaa

SEQ ID NO: 152527 - protein, 311 aa, Streptococcus suis 89/1591
MSVVGKANGKIILMGEHAVVYGQPAIAMPFSAVEIIAQVTAQGEALTVACDFYKGLVHKMPKIWESLKHAIRFSLYRIGAPTDPAIHIEISSTIPAERGMGSSAAVAVAVARALFAYYKKELTDSELWDIVQSSEKIAHGNPSGIDAATTSGKSPVFFIKHQPIEPFELKLHAYLVVADTGVTGNTLEAISDVADLLEKKPEAIKLVEELGNLTRQAKEDLATGQAEILGSRMNQAHALLQKLGVSDPSLDKLVSLAQENGALGAKLTGGGRGGCMLALARTAQDAQKLAHILDQAGARQTWIQYLGETND

SEQ ID NO: 152528 - DNA, 1347 bp, Aspergillus niger
  CDS (1)..(1347)
atggcgccccctttcatggtgtccgcgccgggcaaggtcatcgtcttcggtgaacatgccgtcgtgcacggcaaggctgccatggccgccgcaatctccctccgctcctacttcctcgtaaccactctgtcgaaatcacagcgcaccattaccttgaacctccgggacatggatttcaaccacacctggaacattgacgatctgccctgggatttcttcaaacaaccctccaagaagaagtactattacgacctagtaactagcctcgacgaagaattgtacgactctctgaaaccatgtgttgaagatatatcgcccaaggcgcccgaggagatacggaagaaacacaaagggtcggcgctggcgttcctgtacctattttgctccttgggctcaccccagcacccaggagctatatatactttgcgctcgaccatccccatgggtgcaggtcttggaagcagcgccagtgtctgcacttgtttcagtgctgcattgttacttcagatccgtactctagcaggcccacatgatgatcagcccccggatgaagcggagttacagatcgagcgtatcaaccggtgggcttttgtcggagaattatgtatacacggaaacccaagtggtgtggacaacacggtctctactggcggcaaggccgtaattttcaggagagaggactactcgaagcccccgaaagttataccgctacctaatttccctgaattaccgctcttgcttgttgacacacgacagagccgctcgacggcggtcgaagttgccaaagttgggaagctcaagaaggaacacccactcgtcaccgaatcgatccttgatgccattgataaggtgactgtgtccgctcagagtgcgatccagggggtggagggtgatagtatcgataaggagactctcgaacatatcggaacgctggttcgtgtcaaccacggtttcctagtttccctgggggtatctcatccgcgactggagcgaatccgggaactggtcgactttgccaatattggttggacaaagttgactggtgcgggcggcggtggttgtgcgatcacactcctgcgcccagatgccagtgtggacgcgctccgtgagctggagcgcaaactcgctgcagagaatttctccaagtatgagacaaccttgggtggagacggtattggagtcctctggccagcggtgctgcacaacggcactgatgaagagggcggcgaagagatcgaccagcagaagtttgaaaatgccgacggacccgaaggcatcgagcgccttgttggcgtcggcgttcaagaacgtcgggaaggctggaaattctggaaacgagctgtctga

SEQ ID NO: 152529 - protein, 448 aa, Aspergillus niger
MAPPFMVSAPGKVIVFGEHAVVHGKAAMAAAISLRSYFLVTTLSKSQRTITLNLRDMDFNHTWNIDDLPWDFFKQPSKKKYYYDLVTSLDEELYDSLKPCVEDISPKAPEEIRKKHKGSALAFLYLFCSLGSPQHPGAIYTLRSTIPMGAGLGSSASVCTCFSAALLLQIRTLAGPHDDQPPDEAELQIERINRWAFVGELCIHGNPSGVDNTVSTGGKAVIFRREDYSKPPKVIPLPNFPELPLLLVDTRQSRSTAVEVAKVGKLKKEHPLVTESILDAIDKVTVSAQSAIQGVEGDSIDKETLEHIGTLVRVNHGFLVSLGVSHPRLERIRELVDFANIGWTKLTGAGGGGCAITLLRPDASVDALRELERKLAAENFSKYETTLGGDGIGVLWPAVLHNGTDEEGGEEIDQQKFENADGPEGIERLVGVGVQERREGWKFWKRAV

SEQ ID NO: 152530 - DNA, 1167 bp, Medicago truncatula
  CDS (1)..(1167)
atggaggttaaagccagagctcccggaaaaatcatcttagccggggaacacgccgttgttcacggatcaaccgccgttgcttcttctattgacttatacacctacgtttctctccgcttttccactccttcttctgagaatgaagaatcgttgagacttttgttaaaggatacggcattggaattcgaatggcctataagtagaataagagaagcttttcctgaatctgtttctttgttatcttcaactcctaattcatgttctgttgagtgtgctaaatcaattgcttctttagttgaagagcttaatatacctgaagctaaaattggacttgcttctggtgttgccgcttttctttggttatattcttctattcaaggatttaagcctgctactgtcgttattaattctgatcttcctttgggatcgggtttgggttcatccgcggcattctgtgtggcactggcggctgcatttcttgctgtcactgattctgtttctgtggatgtgatacggcaaggatggcattcttttggggagaaggaacttgatttggtaaataaatgggcttttgaaggcgagaagatcatccatggaaagccatcaggaattgacaacacagttagttcatatggtaacataatcagcttcaagtctggtaacttgacacggatgaagtcaaacgcttcccttaaaatgctcattaccaacacgagagtaggtagaaacacaaaagcattggtggctggtgtttctgagagaatgctgaggcacccagatgccatggcttttgtgtttactgctgttgattctatcagcaaagaattgactaccgttctccagtcacctacaccggatgagctctctgttactacgttagaagagaaggtagaagagctaatggaaatgaatcaaggactgctccagagtatgggggtcagtcatgccacaatagaaactgttcttcgaacaacattgaagtacaagttatcttctaagttgacaggagctggtggtgggggatgtgttctgacattgcttccaactttgctatcgcccacagttgttgataaagtgattgctgaactggagtcgaacgggttccaatgtttcactgccggaattggtgggaatggtgttgaaattagttttgaacattcatcttaa

SEQ ID NO: 152531 - protein, 388 aa, Medicago truncatula
MEVKARAPGKIILAGEHAVVHGSTAVASSIDLYTYVSLRFSTPSSENEESLRLLLKDTALEFEWPISRIREAFPESVSLLSSTPNSCSVECAKSIASLVEELNIPEAKIGLASGVAAFLWLYSSIQGFKPATVVINSDLPLGSGLGSSAAFCVALAAAFLAVTDSVSVDVIRQGWHSFGEKELDLVNKWAFEGEKIIHGKPSGIDNTVSSYGNIISFKSGNLTRMKSNASLKMLITNTRVGRNTKALVAGVSERMLRHPDAMAFVFTAVDSISKELTTVLQSPTPDELSVTTLEEKVEELMEMNQGLLQSMGVSHATIETVLRTTLKYKLSSKLTGAGGGGCVLTLLPTLLSPTVVDKVIAELESNGFQCFTAGIGGNGVEISFEHSS

SEQ ID NO: 152532 - DNA, 1008 bp, Streptomyces sp
  CDS (1)..(1008): transl_table=11
gtgacggtgtcgacctcggcggagggggtgtcagaggaccgtcggcctcgttccgtcggcatcggtcgcgcccacgcgaaagccattctgctcggggagcacgccgtcgtgtacggggccccggcgctcgctctgcccgttccgcagctggcggtcaccgcgagagcccaccggtccggccgcgagagcgacggaccgggcgatgtgtccttcacgatggccggctccccgccgcggccgatggcgacgcaggcgtccgacggccttcgccggctgatcgccgagttcaccgcggccctgggcacggacgccgccccgcatctcgacgtgaccgtcgacggcgcgataccgcccggccgcgggctcggctccagcgccgcctgtgcccgggcggtcgtccacgccctcgccgatctgcacggccgcgaggtcaccgagagcgagacgttcgacctggtccagacggccgagaacgtggcgcacggccgctccagcggcgtcgacgcgcgcaccgtcggcgcgtccgccccgctgctgttctgcaggggcgaggtccaggagctgagcatcggctgctacgacctgctcgtcatcgccgacagcggcgtcctgggccgtaccaaggacgcggtcgagctgctgcgcgaaggattccagcggcacgacggagcgcaggagagattcgtgcagcgcgcgacgcggctgaccgagggggcccggcgcgccctcgccgacggcaggccgcaggagctcggcgcgcggctgacggactaccacgatctgctgagggccgccgggctcagcacccggcgcatcgacgcgctcgtcgacgccgcgctcgccgcgggcagcctcggagcgaagatcaccggcggcggcctcggcggctgcgtcatcgccctgacccgagaggaacaggccggagaggtcatccagcagcttcatggcgcaggcgccgtgcagacctgggtcgtgccgctgagagggcttgccgagaatgcactctga

SEQ ID NO: 152533 - protein, 335 aa, Streptomyces sp
MTVSTSAEGVSEDRRPRSVGIGRAHAKAILLGEHAVVYGAPALALPVPQLAVTARAHRSGRESDGPGDVSFTMAGSPPRPMATQASDGLRRLIAEFTAALGTDAAPHLDVTVDGAIPPGRGLGSSAACARAVVHALADLHGREVTESETFDLVQTAENVAHGRSSGVDARTVGASAPLLFCRGEVQELSIGCYDLLVIADSGVLGRTKDAVELLREGFQRHDGAQERFVQRATRLTEGARRALADGRPQELGARLTDYHDLLRAAGLSTRRIDALVDAALAAGSLGAKITGGGLGGCVIALTREEQAGEVIQQLHGAGAVQTWVVPLRGLAENAL

SEQ ID NO: 152534 - DNA, 1605 bp, Aspergillus oryzae
  CDS (1)..(1605)
atgcacaacggccgtggacgccgaaagaacggcagtgttaaagctccaaagaatcgtcagcgccctactatgtcacacttaatctcggaacaatcccttcccacccgctcaaaatcctcggtcgctagcgacgatagcgtagacacctccgacgacacctcagccgctccctccttcagcagtagtccgccgagcacgaagtctatcaccaacggtgttcacagaccagctatggctcgaaaggcttcttctccaatggcacccgccttcatggtgtccgccccgggcaaggtcattgtctttggtgagcatgccgtcgtgcatggtaaagccgccatggcggcagccatctccctacgatcctacctccttgttacaaccttgaccaaatcgcaacgcaccatcaccttaaacttcagagatattggattgaatcacacctggagcatcgacgagctgccgtgggacttgtttcaccaaccgaccaagaagaagtactattacgacctggtcacctcgattgaccccgaacttctggacgcgatcttgcctctcgtggagcgcatctccccagacctacccgaagacaagcgaaaacatcagcgtggcgctgcgactgcgttcctctatcttttctgtgcgttgggttccccgcaacaccctggagcgatctatacccttcggtcgacgatcccaactggcgcggggttgggcagcagtgctagtatatgcgtttgtatcagtgctgcactccttcttcagattcgtactctagctggaccgcaccccgaccaaccgcccgacgaggcggaggtgcagatcgagcgcatcaaccgatgggcattcgttggtgagatgtgcattcacggaaatcccagcggagtggataacacggtcgccgcaggcggcaaggccgtgattttcagaagaggcgattattccaaaccaccggccgttagctcactccccaatttccccgagctacctctactgctcgtggacactcgacaatcccgttccacggcggttgaagtagcaaaggtcggtcagctgaaagaagaacaaccactagtgacggaggcgatccttgataccatcgagaaggtgaatgcttccgctcaggagattatacgggaaacggattcgtcaggtatttccaaggatacgctcgagcgcattggagcgcttatccgcatcaaccacggcttgttggtctcgctgggagtctctcaccctcgactcgagcgcattcgtgagcttgtagattttgcgaacattggttggacgaaactcaccggcgctggtggaggaggatgcgcgatcaccctcctacgtccggatgccgacccgagtgctatccgccaattggaggaaaagctggacgaagaaggattcgcgaagtacgagactactctgggaggagatggtgtcggtgtcctgtggcccgccgtggtccgcaatggaaccgacgaagaaggtggtgaggagattgaccagcagaagttcgaaaatgcagatggccccgaaggcatcgagcgtctcgtcggtgtgggcacacaggaaaagagagagggctggaagttttggaaacgagcaatgcattaa

SEQ ID NO: 152535 - protein, 534 aa, Aspergillus oryzae
MHNGRGRRKNGSVKAPKNRQRPTMSHLISEQSLPTRSKSSVASDDSVDTSDDTSAAPSFSSSPPSTKSITNGVHRPAMARKASSPMAPAFMVSAPGKVIVFGEHAVVHGKAAMAAAISLRSYLLVTTLTKSQRTITLNFRDIGLNHTWSIDELPWDLFHQPTKKKYYYDLVTSIDPELLDAILPLVERISPDLPEDKRKHQRGAATAFLYLFCALGSPQHPGAIYTLRSTIPTGAGLGSSASICVCISAALLLQIRTLAGPHPDQPPDEAEVQIERINRWAFVGEMCIHGNPSGVDNTVAAGGKAVIFRRGDYSKPPAVSSLPNFPELPLLLVDTRQSRSTAVEVAKVGQLKEEQPLVTEAILDTIEKVNASAQEIIRETDSSGISKDTLERIGALIRINHGLLVSLGVSHPRLERIRELVDFANIGWTKLTGAGGGGCAITLLRPDADPSAIRQLEEKLDEEGFAKYETTLGGDGVGVLWPAVVRNGTDEEGGEEIDQQKFENADGPEGIERLVGVGTQEKREGWKFWKRAMH

SEQ ID NO: 152536 - DNA, 1104 bp, Oryza sativa
  CDS (1)..(1104)
atggaggtttgcgccgcccgcgccccaggcaagattatccttgccggcgagcacgccgtcgtccatggctcagccgccgtcgccgccgccatcgacctctacacgcgctgctccctctgcctcatgcccctcgctgacgacgaggcggccgccacgttggagctggacctcaaggatcctggcctcaccttctcgtggccgtgcgggcgcctccgcgaggtgctgctgacagatgaggcggcgggggcacgggaggcgaggccatgctccccggaccggctggcctccattgccaggctcttggaggagcacgagatccctgaggccaagatctggctctccgccggtctctctgccttcctcttcctctacacctccatattggggtgtagacccgggaaggtgacggtgagctcggacctgcccatggggtcggggcttgggtcatcggccgccttctgcgtgtcgatgtcgggggtgttgctgacagctgccggcgtggttactgcagtcggcggcatcagcggcgagggcatggggtgggagttggtcgggaaggatgatcttgagctagttaaccggtgggctttccagggggagaagattatccatgggaagccttctggcatcgacaatgctgtcagcactttcggaagcatgatcaaattcaagaaaggggaattgacaaaccttaaatctagcaacccagtgaaaatgcttattacggatacaagagttggtaggaacacaaaggctctggttgctggtgtctctgaaagagcctccaggcattcagatgctatggcttctgtattcaacgcagtgaactccattagtgaagaggtgtcaagcattgttgagttagcagctaatgatgagatagctatcacctcaaaggaggaaaagctggcggaactcatggagatgaaccaaggtttgcttcagtgcatgggtgttagccattcttcaatagaaactgtactgcggacaacattgaaattcaacttggtctccaagttaacaggagctggaggtggtggttgtgttttgaccctgataccaactaggtcttcaagtttgccaaggaggctgctcctattttaa

SEQ ID NO: 152537 - protein, 367 aa, Oryza sativa
MEVCAARAPGKIILAGEHAVVHGSAAVAAAIDLYTRCSLCLMPLADDEAAATLELDLKDPGLTFSWPCGRLREVLLTDEAAGAREARPCSPDRLASIARLLEEHEIPEAKIWLSAGLSAFLFLYTSILGCRPGKVTVSSDLPMGSGLGSSAAFCVSMSGVLLTAAGVVTAVGGISGEGMGWELVGKDDLELVNRWAFQGEKIIHGKPSGIDNAVSTFGSMIKFKKGELTNLKSSNPVKMLITDTRVGRNTKALVAGVSERASRHSDAMASVFNAVNSISEEVSSIVELAANDEIAITSKEEKLAELMEMNQGLLQCMGVSHSSIETVLRTTLKFNLVSKLTGAGGGGCVLTLIPTRSSSLPRRLLLF

SEQ ID NO: 152538 - DNA, 945 bp, Enterococcus faecalis
  CDS (1)..(945): transl_table=11
atgaatataaaaaaacaaggcctcggtcaagcgacgggaaaaatcattttaatgggggaacacgccgttgtttacggcgaaccagcaatcgcctttccttttcaagcgacagaaatcacagccgtctttaccccggcaaaaactatgcagattgattgtgcatattttacaggattgcttgaagacgtgccccaagagctagcaaatatcaaggaagttgttcagcaaactttacattttttaaaggaagatacgtttaaaggcactttgaccttaacaagtacgattcccgctgaacgaggaatgggctcaagcgcagcaaccgctgtggccatcgttcgaagcctttttgattattttgattacgcttatacatatcaagaattgtttgagcttgtttccttaagtgagaaaattgctcatggcaatcctagtggtatcgatgccgcagcaacaagcggcgctgatcccttattttttactagaggatttccgcccacacatttctcgatgaatttatctaatgcctacttagtagtagctgatacgggaattaaaggtcaaacacgtgaagcagtgaaagacattgcgcagctagctcaaaataatcccacagcaatcgctgaaacaatgaaacaattaggttcttttactaaagaagcaaagcaggcgattttacaagatgataaacaaaaattaggtcagctaatgacgttagcgcaagagcaactccagcaattaaccgtcagcaacgatatgctggatcgactagtggctctctctctagaacatggcgctctaggagcaaaattaaccggcggcggtcgcggtggctgtatgattgccttaacagataataaaaagaccgcacaaaccattgcacagactttagaagaaaatggagctgttgctacatggattcaatcattagaggtgaaaaagtaa

SEQ ID NO: 152539 - protein, 314 aa, Enterococcus faecalis
MNIKKQGLGQATGKIILMGEHAVVYGEPAIAFPFQATEITAVFTPAKTMQIDCAYFTGLLEDVPQELANIKEVVQQTLHFLKEDTFKGTLTLTSTIPAERGMGSSAATAVAIVRSLFDYFDYAYTYQELFELVSLSEKIAHGNPSGIDAAATSGADPLFFTRGFPPTHFSMNLSNAYLVVADTGIKGQTREAVKDIAQLAQNNPTAIAETMKQLGSFTKEAKQAILQDDKQKLGQLMTLAQEQLQQLTVSNDMLDRLVALSLEHGALGAKLTGGGRGGCMIALTDNKKTAQTIAQTLEENGAVATWIQSLEVKK

SEQ ID NO: 152540 - DNA, 921 bp, Staphylococcus epidermidis
  CDS (1)..(921): transl_table=11
atgactagacaaggatacggagaatctactggaaagattattctaatgggtgaacacgcagttacatttggtcaaccggcaatcgcaattccatttaatgctggaaaaattaaagtcctcattgaaagtttagatgaaggtaattattcttctatcacaagtgacgtatatgacggaatgttatacgatgcccccgaacatctaaagtctatcattaatcgctttgttgaaaaaagtggagtgaaagaaccactatcagtaaaaattcaaactaatttgcctccatcaagaggtttaggttcaagtgctgcagtagcagtagcgtttgtacgcgccagttatgattttatggatcaacctttagatgacaaaacattgattaaagaagcaaattgggcggagcaaatcgcacatggtaagccaagcggtattgatacgcagacgattgtgtcaaataaacccgtctggtttaaacaagggcaggccgaaacattaaaatcactaaaattaaatggttatatggttgtcattgatactggagtaaagggttctaccaaacaagcagtagaagatgttcatgtattatgtgaatctgatgaatatatgaaatatatagagcacattggtacacttgttcacagtgctagcgaatcgattgaacagcatgatttccatcatttggctgacatatttaacgcatgtcaagaagacttgagacatttaacagtaagtcacgataaaatagaaaaattacttcaaattgggaaagaacatggtgccattgctggtaaactaactggtggaggaagaggtggcagcatgcttcttcttgcggaaaatttaaaaactgcaaagactattgttgctgctgttgaaaaagctggcgcagcacatacatggattgaacatttaggaggttaa

SEQ ID NO: 152541 - protein, 306 aa, Staphylococcus epidermidis
MTRQGYGESTGKIILMGEHAVTFGQPAIAIPFNAGKIKVLIESLDEGNYSSITSDVYDGMLYDAPEHLKSIINRFVEKSGVKEPLSVKIQTNLPPSRGLGSSAAVAVAFVRASYDFMDQPLDDKTLIKEANWAEQIAHGKPSGIDTQTIVSNKPVWFKQGQAETLKSLKLNGYMVVIDTGVKGSTKQAVEDVHVLCESDEYMKYIEHIGTLVHSASESIEQHDFHHLADIFNACQEDLRHLTVSHDKIEKLLQIGKEHGAIAGKLTGGGRGGSMLLLAENLKTAKTIVAAVEKAGAAHTWIEHLGG

SEQ ID NO: 152542 - DNA, 921 bp, Staphylococcus aureus
  CDS (1)..(921): transl_table=11
atgacaagaaaaggatatggggaatcgacaggtaagattattttaataggagaacatgctgttacatttggagagcctgctattgcagtaccgtttaacgcaggtaaaatcaaagttttaatagaagccttagagagcgggaactattcgtctattaaaagcgatgtttacgatggtatgttatatgatgcgcctgaccatcttaagtctttggtgaaccgttttgtagaattaaataatattacagagccgctagcagtaacgatccaaacgaatttaccaccatcacgtggattaggatcgagtgcagctgtcgcggttgcttttgttcgtgcaagttatgattttttagggaaatcattaacgaaagaagaactcattgaaaaggctaattgggcagagcaaattgcacatggtaaaccaagtggtattgatacgcaaacgattgtatcaggcaaaccagtttggttccaaaaaggtcaagctgaaacattgaaaacgctaagtttagacggctatatggttgttattgatactggtgtgaaaggttcaacaagacaagcggtagaagatgttcataaactttgtgaggatcctcagtacatgtcacatgtaaaacatatcggtaagttagttttacgtgcgagtgatgtgattgaacatcataactttgaagccctagcggatatttttaatgaatgtcatgcggatttaaaggcgttgacagttagtcatgataaaatagaacaattaatgaaaattggtaaagaaaatggtgcgattgctggaaaacttactggtgctggtcgtggtggaagtatgttattgcttgccaaagatttaccaacagcgaaaaatattgtgaaagctgtagaaaaagctggtgcagcacatacatggattgagaatttaggaggttaa

SEQ ID NO: 152543 - protein, 306 aa, Staphylococcus aureus
MTRKGYGESTGKIILIGEHAVTFGEPAIAVPFNAGKIKVLIEALESGNYSSIKSDVYDGMLYDAPDHLKSLVNRFVELNNITEPLAVTIQTNLPPSRGLGSSAAVAVAFVRASYDFLGKSLTKEELIEKANWAEQIAHGKPSGIDTQTIVSGKPVWFQKGQAETLKTLSLDGYMVVIDTGVKGSTRQAVEDVHKLCEDPQYMSHVKHIGKLVLRASDVIEHHNFEALADIFNECHADLKALTVSHDKIEQLMKIGKENGAIAGKLTGAGRGGSMLLLAKDLPTAKNIVKAVEKAGAAHTWIENLGG

SEQ ID NO: 152544 - DNA, 1038 bp, Streptomyces sp
  CDS (1)..(1038): transl_table=11
atgcagaaaagacaaagggagctgagtgcgttgacactaccgacctcggctgagggggtatcagaaagccaccgggcccgctcggtcggcatcggtcgcgcccacgccaaggccatcctgctgggagagcatgcggtcgtctacggagcgccggcactcgctctgccgattccgcagctcacggtcacggccagcgtcggctggtcgtccgaggcctccgacagtgcgggtggcctgtcctacacgatgaccggtacgccgtcgcgggcactggtgacgcaggcctccgacggcctgcaccggctcaccgcggaattcatggcgcggatgggcgtgacgaacgcgccgcacctcgacgtgatcctggacggcgcgatcccgcacggccggggtctcggctccagcgcggccggctcacgcgcgatcgccttggccctcgccgacctcttcggccacgaactggccgagcacacggcgtacgaactggtgcagacggccgagaacatggcgcacggccgggccagcggcgtggacgcgatgacggtcggcgcgtcccggccgctgctgttccagcagggccgcaccgagcgactggccatcggctgcgacagcctgttcatcgtcgccgacagcggcgtcccgggcagcaccaaggaagcggtcgagatgctgcgggagggattcacccgcagcgccggaacacaggagcggttcgtcggccgggcgacggaactgaccgaggccgcccggcaggccctcgccgacggccggcccgaggagctgggctcgcagctgacgtactaccacgagctgctccatgaggcccgcctgagcaccgacggcatcgatgcgctggtcgaggccgcgctgaaggcaggcagcctcggagccaagatcaccggcggtggtctgggcggctgcatgatcgcacaggcccggcccgaacaggcccgggaggtcacccggcagctccacgaggccggtgccgtacagacctgggtcgtaccgctgaaagggctcgacaaccatgcgcagtga

SEQ ID NO: 152545 - protein, 345 aa, Streptomyces sp
MQKRQRELSALTLPTSAEGVSESHRARSVGIGRAHAKAILLGEHAVVYGAPALALPIPQLTVTASVGWSSEASDSAGGLSYTMTGTPSRALVTQASDGLHRLTAEFMARMGVTNAPHLDVILDGAIPHGRGLGSSAAGSRAIALALADLFGHELAEHTAYELVQTAENMAHGRASGVDAMTVGASRPLLFQQGRTERLAIGCDSLFIVADSGVPGSTKEAVEMLREGFTRSAGTQERFVGRATELTEAARQALADGRPEELGSQLTYYHELLHEARLSTDGIDALVEAALKAGSLGAKITGGGLGGCMIAQARPEQAREVTRQLHEAGAVQTWVVPLKGLDNHAQ

SEQ ID NO: 152546 - DNA, 975 bp, Aeropyrum pernix
  CDS (1)..(975): transl_table=11
atgaggagggctgctagggcgtctgccccggggaaagttataatcgttggagaacacttcgtcgtcagaggctccctggcgatagtggcggccataggcagaaggctccgcgtcaccgtgagaagcgggggcaaggggattgtgcttgagagcagcatgctaggccgccacagcgccccgctaccaggccagggtgcagcggctaaggtaagccccgtcctcgagccgtacatagcagtgttgagaagtctggctgcaaggggctatagcgtagtgccccatacaatattggtggagagcggcataccccctagggcaggtctcggtagcagcgccgccagcatggtagcctatgctctatcatactcggccatgcatggtgaccccctctcggctgaggacctctacagtgttgctatggagggcgagaagatagcgcatggtaagccgagcggtgttgacgtaaccatagccgttagggggggagtcctggcttacaggaggggcgagaacccggtggatataaggccggggcttacaggtgtcactctgcttgttgccgacacgggtgtcgagaggcgtactagggatgttgtcgagcatgttctctccattgcggacgccttgggagaggcatcgacctacatatatagggcggcagacttgatagcgagagaagccctccatgcgatagaaaagggagacgccgagaggctaggtcttataatgaatgcagcccagggccttctctcatctcttggggcgtcgtcactagaaatagaaacactagtatatcggatgaggagtgccggggccctgggtgcaaagctaacgggagctggatgggggggctgtgtgatagggcttttcaaggagggtgaggtcgaacgggggctagagtctgtggtagagagttcaagccaggctttcaccgcgtcaatagcagaggagggtgctagactcgaggagttctag

SEQ ID NO: 152547 - protein, 324 aa, Aeropyrum pernix
MRRAARASAPGKVIIVGEHFVVRGSLAIVAAIGRRLRVTVRSGGKGIVLESSMLGRHSAPLPGQGAAAKVSPVLEPYIAVLRSLAARGYSVVPHTILVESGIPPRAGLGSSAASMVAYALSYSAMHGDPLSAEDLYSVAMEGEKIAHGKPSGVDVTIAVRGGVLAYRRGENPVDIRPGLTGVTLLVADTGVERRTRDVVEHVLSIADALGEASTYIYRAADLIAREALHAIEKGDAERLGLIMNAAQGLLSSLGASSLEIETLVYRMRSAGALGAKLTGAGWGGCVIGLFKEGEVERGLESVVESSSQAFTASIAEEGARLEEF

SEQ ID NO: 152548 - DNA, 1137 bp, Arabidopsis thaliana
  CDS (1)..(1137)
atggaagtgaaagctagagctcctgggaagatcatacttgcaggggaacacgctgttgttcatggatccaccgctgtagctgccgccattgatctctacacttacgttactctccgctttcctcttccatcagctgagaacaatgataggcttacacttcagctcaaggacatttccttggagttttcatggtccttagccagaatcaaagaagcgattccttatgattcaagcactctctgccgttctacgccggcttcatgttcagaggagacccttaaatcaattgcagttttggttgaagagcaaaatcttccaaaggaaaagatgtggctctcctctgggatctccacgtttctctggttatacaccagaattatagggttcaatccggctacagtagtcattaactctgagcttccatacgggtctggcctcggttcatcagcagctttatgtgtagctctcacagctgctctccttgcttcttctatttcagagaaaacccgtggtaacggttggtcatctctcgatgaaaccaatcttgagttgctaaataaatgggctttcgaaggcgaaaagatcatccatgggaaaccttctgggatagacaacaccgtcagtgcatacggcaacatgatcaagttctgctcaggcgagataactcggttacaatccaacatgcctctgagaatgctaattaccaacactagagttgggcgaaacacaaaagctctggtctctggtgtgtcacagagagcggtaagacatcctgatgcgatgaagtcagtgttcaacgccgtggattctataagcaaagagctcgctgcgatcattcagtctaaagacgagacctcagttacagaaaaagaagagagaataaaagaactcatggagatgaaccaaggtctgctcctgtcaatgggggttagccacagctcaatcgaggctgtgattctaaccacggtcaagcacaagcttgtctccaaacttacaggagctggtggcggcggctgcgtcctcactctattaccaaccgggacggtggtggacaaagtggtggaggagctcgagtccagcggttttcagtgtttcacggcattgattggtggtaacggagctcagatttgctattga

SEQ ID NO: 152549 - protein, 378 aa, Arabidopsis thaliana
MEVKARAPGKIILAGEHAVVHGSTAVAAAIDLYTYVTLRFPLPSAENNDRLTLQLKDISLEFSWSLARIKEAIPYDSSTLCRSTPASCSEETLKSIAVLVEEQNLPKEKMWLSSGISTFLWLYTRIIGFNPATVVINSELPYGSGLGSSAALCVALTAALLASSISEKTRGNGWSSLDETNLELLNKWAFEGEKIIHGKPSGIDNTVSAYGNMIKFCSGEITRLQSNMPLRMLITNTRVGRNTKALVSGVSQRAVRHPDAMKSVFNAVDSISKELAAIIQSKDETSVTEKEERIKELMEMNQGLLLSMGVSHSSIEAVILTTVKHKLVSKLTGAGGGGCVLTLLPTGTVVDKVVEELESSGFQCFTALIGGNGAQICY

SEQ ID NO: 152550 - DNA, 939 bp, Methanococcus jannaschii
  CDS (1)..(939): transl_table=11
atgataattgaaacaccatcaaaagttatactattcggagagcatgcagttgtttatggttatagagctatatctatggctattgatttaacatcaaccatagaaataaaagaaacacaagaagatgagataattttaaacctaaatgacttgaataaaagcttaggtttgaacttaaatgagataaaaaatatcaatccaaataactttggagattttaaatactgcctctgtgcaattaaaaacactttagattatttaaatatagagccaaaaactggttttaaaattaacattagctcaaaaattccaataagttgtggtttgggaagctctgcctcaataacaattggaactataaaagctgtaagtggattttataataaagagcttaaagatgatgagattgcaaaacttggatatatggttgagaaagaaatccaaggtaaggcaagcattacagacacttcgacaataacgtataaaggtatcttagaaataaaaaacaacaagtttagaaaaattaaaggagagtttgaagaatttttaaaaaattgcaagtttttaattgtttatgctgaaaaaaggaagaaaaaaactgctgagttagttaatgaagttgccaagattgaaaataaagatgagatatttaaagagatagacaaagttattgatgaagctttaaaaatcaaaaataaagaagattttgggaaattgatgactaaaaaccacgagttgttaaaaaagctaaatatctcaacaccaaaacttgatagaattgtagatattgggaatagatttggttttggggcaaaattaactggagctggagggggaggatgtgtaataatcttagttaatgaagaaaaagagaaagagcttttaaaagaactaaataaagaagatgtaaggatttttaactgcagaatgatgaattaa

SEQ ID NO: 152551 - protein, 312 aa, Methanococcus jannaschii
MIIETPSKVILFGEHAVVYGYRAISMAIDLTSTIEIKETQEDEIILNLNDLNKSLGLNLNEIKNINPNNFGDFKYCLCAIKNTLDYLNIEPKTGFKINISSKIPISCGLGSSASITIGTIKAVSGFYNKELKDDEIAKLGYMVEKEIQGKASITDTSTITYKGILEIKNNKFRKIKGEFEEFLKNCKFLIVYAEKRKKKTAELVNEVAKIENKDEIFKEIDKVIDEALKIKNKEDFGKLMTKNHELLKKLNISTPKLDRIVDIGNRFGFGAKLTGAGGGGCVIILVNEEKEKELLKELNKEDVRIFNCRMMN

SEQ ID NO: 152552 - DNA, 912 bp, Methanobacterium thermoautotrophicum
  CDS (1)..(912): transl_table=11
ttgaagtcgtcggcatccgcacctgccaaggccattctttttggtgaacacgcagtggtctacagcaagccggcaatagcagccgccatagaccgcagggtgactgtaaccgtaagtgaatccagcagcacccatgtaaccatcccctccctgggtatacgccacagttcagagagaccatccggtggcatcctggactacatcgggaggtgcctcgagctttaccatgacgcatcaccccttgacatcagggtggagatggagatacccgccggttcaggcctaggttcatcggctgcactcaccgttgcactgataggtgccctcgacaggtaccatggaagggatcatggacccggggagacagcagccagggcccacagggtggaggttgatgtacagggagccgccagcccccttgacacagccatcagcacctatgggggccttgtataccttgacagccagaggagggtgaggcagtttgaggccgacctgggggaccttgtaatagcacaccttgactattcaggggaaacagccaggatggttgccggcgtagctgaaaggttcaggagattcccggatatcatggggaggataatggacacagttgagtccataaccaatacagcatacagggaacttctaaggaacaacacagaacccctgggggagctcatgaacctcaaccaggggctgctggactccatgggcgtttccacacgtgaactttcaatgatggtctatgaggcaaggaacgccggggcagcaggttcaaagatcacaggagccggcggcggcgggagcataatagcccactgcccgggatgtgtggatgatgttgtcacggcccttaacaggaactggaaagccatgagggcagagttttcggttaagggactcatctaa

SEQ ID NO: 152553 - protein, 303 aa, Methanobacterium thermoautotrophicum
MKSSASAPAKAILFGEHAVVYSKPAIAAAIDRRVTVTVSESSSTHVTIPSLGIRHSSERPSGGILDYIGRCLELYHDASPLDIRVEMEIPAGSGLGSSAALTVALIGALDRYHGRDHGPGETAARAHRVEVDVQGAASPLDTAISTYGGLVYLDSQRRVRQFEADLGDLVIAHLDYSGETARMVAGVAERFRRFPDIMGRIMDTVESITNTAYRELLRNNTEPLGELMNLNQGLLDSMGVSTRELSMMVYEARNAGAAGSKITGAGGGGSIIAHCPGCVDDVVTALNRNWKAMRAEFSVKGLI

SEQ ID NO: 152554 - DNA, 1008 bp, Pyrococcus abyssi
  CDS (1)..(1008): transl_table=11
atgccaaggttagtgctggcgtcagctccagcaaagataatactcttcggggaacacagcgttgtgtatggaaagcctgccatagcatctgctattgacttgagaacttacgttagggcggagtttaatgattcgggaaatataaagatagaagcccatgacataaaaacccctgggctaatagtttctttttcagaagacaaaatttacttcgagactgactatggaaaggcagctgaagtgctgagttacgttagacacgccatagagctcgtccttgaagaggctgataagaggactggggtcagcgtttcaataacgtctcaaattccagtaggtgctggcctaggttcttcagctgccgtcgccgttgctaccatcggtgccgtctccaagttacttgacctcgagcttagtaaagaggagatagctaagatgggccataaggttgaactcctggttcagggagcttcgagtggcatagatccgacggtctcggcaataggagggttcttgtactataagcaaggtgaatttgagcacctaccattcgtggagcttccaatagtagttggatataccggctcaagtggctccacaaaggaattagttgcgatggttaggagaaggtacgaggagatgcccgagttaattgaacccattctagagtcaatgggtaagctcgtggataaagctaaggaggtaataatatctaagctcgatgaggaggaaaagttcctgaaattgggagagctcatgaacataaatcatggccttctcgatgccctaggtgtttcaaccaaaaagctaagcgaactcgtctatgccgctagaactgctggagcaattggagccaagctaacgggggctgggggaggtggatgcatgtacgctttagctcctgggaagcagagggaggttgctacggccataaagatagctggcggaactcccatgataacgaggataagcaaggaggggcttagaatagaggaggtaagggaatga

SEQ ID NO: 152555 - protein, 335 aa, Pyrococcus abyssi
MPRLVLASAPAKIILFGEHSVVYGKPAIASAIDLRTYVRAEFNDSGNIKIEAHDIKTPGLIVSFSEDKIYFETDYGKAAEVLSYVRHAIELVLEEADKRTGVSVSITSQIPVGAGLGSSAAVAVATIGAVSKLLDLELSKEEIAKMGHKVELLVQGASSGIDPTVSAIGGFLYYKQGEFEHLPFVELPIVVGYTGSSGSTKELVAMVRRRYEEMPELIEPILESMGKLVDKAKEVIISKLDEEEKFLKLGELMNINHGLLDALGVSTKKLSELVYAARTAGAIGAKLTGAGGGGCMYALAPGKQREVATAIKIAGGTPMITRISKEGLRIEEVRE

SEQ ID NO: 152556 - DNA, 1005 bp, Pyrococcus furiosus
  CDS (1)..(1005): transl_table=11
atgaaagttatagcctcagctcccgcaaaagttattctttttggagagcatagcgtagtttacggaaagccagcgatagctgctgccattgatttacgaacttttgtggaggctgagctaattcgggagaaaaaaataagaattgaagctcatgacattaaagttcctggacttacggtttcattttctgaaaatgagatatatttcgagacagattatggaaaagcagctgaagttttgagctatgttagagaggcaataaatttagttttagaggaggcagataagaaaaatgttggtattaaggttagcataacttctcaaattccagttggtgctggattgggctcttctgctgccgtggcagtagccacaattggggctgtatcaaagttactaggacttgagctaagtaaggaggaaatagctaagatgggtcacaagactgaattacttgttcaaggtgcgtcaagtggtatagacccaacggtctctgcaataggggggtttatattctatgaaaagggtaaatttgaacaccttcccttcatggagcttccaatagttgttggatacacgggctcctcaggtccaactaaggagttagttgcaatggttaggaaaagatatgaggagatgcccgagttgattgttcccatattagaggctatgggaaaagttgtcgagaaagccaaggatgtaatactttcaaatgttgataaggaggaaaaatttgaaaggcttggggttttgatgaacattaatcacggtcttttagatgctttgggtgtttcaactaaaaagttgagtgaactagtgtacgcggctagggttgcgggagccctaggagctaagataactggggctgggggaggaggttgtatgtatgccttggcaccgaacaagcagagagaagttgctacagctataagaattgcagggggaactcctatgataactgaaatcagcagagaagggttaaaaattgaggaggtaattaaatga

SEQ ID NO: 152557 - protein, 334 aa, Pyrococcus furiosus
MKVIASAPAKVILFGEHSVVYGKPAIAAAIDLRTFVEAELIREKKIRIEAHDIKVPGLTVSFSENEIYFETDYGKAAEVLSYVREAINLVLEEADKKNVGIKVSITSQIPVGAGLGSSAAVAVATIGAVSKLLGLELSKEEIAKMGHKTELLVQGASSGIDPTVSAIGGFIFYEKGKFEHLPFMELPIVVGYTGSSGPTKELVAMVRKRYEEMPELIVPILEAMGKVVEKAKDVILSNVDKEEKFERLGVLMNINHGLLDALGVSTKKLSELVYAARVAGALGAKITGAGGGGCMYALAPNKQREVATAIRIAGGTPMITEISREGLKIEEVIK

SEQ ID NO: 152558 - DNA, 1008 bp, Pyrococcus horikoshii
  CDS (1)..(1008): transl_table=11
atggttaagtacgttttagcttcagctcctgcaaaggtaatactcttcggggaacatagcgtagtctatggaaaaccggctatagcttctgctatagaacttagaacatatgttagagctcaattcaatgattcgggtaatataaaaatagaagctcatgatataaaaactcctggattgatagtctcgttttccgaggataagatatactttgaaacagactatggaaaggccgctgaagttttgagctatgtgaggtatgccatagaacttgccctggaggagtctgataagagggttggtattgacgtttcaataacctctcaaattccagttggggccggattgggttcctcagcagcggttgcagttgctacaattggtgcggtctctaggttacttggccttgaattgagtaaggaggaaatagcaaagcttgggcataaagttgaacttctagtgcagggagcttcaagtggcattgatcctacagtttctgcagtgggaggcttcctctattataagcaaggaaagtttgagcctctcccattcatggagcttcccatagtcgttggttacaccggctctactggttcaactaaagaattagtggcaatggtaaggaaaaggtacgaggaaatgcccgaacttgtggagcctatattggaggcaatgggaaaattagtggataaggccaaggagataatactttcaaagctcgatgaagaggagaagcttactaagcttggagagttaatgaacataaatcatgggcttttagatgctttgggggtgtctacgaagaagcttggtgagttagtttacgctgctagaacggctggtgcaattggggcaaaacttacgggtgctggtggtggagggtgtatgtatgccttggcccctgggagacagagggaagtcgccacggcaataaagatagctggtggaattccaatgataacgagggtaagtagggaaggattgagaatagaggaggtttcaagatga

SEQ ID NO: 152559 - protein, 335 aa, Pyrococcus horikoshii
MVKYVLASAPAKVILFGEHSVVYGKPAIASAIELRTYVRAQFNDSGNIKIEAHDIKTPGLIVSFSEDKIYFETDYGKAAEVLSYVRYAIELALEESDKRVGIDVSITSQIPVGAGLGSSAAVAVATIGAVSRLLGLELSKEEIAKLGHKVELLVQGASSGIDPTVSAVGGFLYYKQGKFEPLPFMELPIVVGYTGSTGSTKELVAMVRKRYEEMPELVEPILEAMGKLVDKAKEIILSKLDEEEKLTKLGELMNINHGLLDALGVSTKKLGELVYAARTAGAIGAKLTGAGGGGCMYALAPGRQREVATAIKIAGGIPMITRVSREGLRIEEVSR

SEQ ID NO: 152560 - DNA, 1014 bp, Pyrococcus kodakaraensis
  CDS (1)..(1014): transl_table=11
atgagcgttaaaagggttcttgcctcggcaccggctaaaattatcctctttggagagcacagcgttgtttacggaaaacccgccatagcggctgccatagacctgaggacgtacgtcagcgccgagttcaacgatacgggagcgataaagatagaggcccatgacataaggactccaggcctgatagtttccttcaccgaggacagcatctacttcgagagcgactacggaaaggccgctgaagttctcggctacgtcaggcaggcgatagagctcgtaagggaagaagcggacgtaaacgggaagggcataaccgtctcgataacctcccagattcccgtcggcgctggtcttggaagctctgctgccgttgccgttgcgaccatcggggcggtctcaaggctcctcggcctcgagctgagcaacgaggaggttggaaagctcggccacaaggttgagctcctcgtccaaggcgcatcgagcggcatcgatccaacagtttccgccataggcggcttcatacactaccagaaggggaagttcgagcaccttcccttcatggagcttccactagtcgttggatacacaggttcgagcgggtccacgaaagagctcgttgcaatggtcaggaaaaactacgaggagatgccagagatattcgagccgatattgaactcaatgggcaggctcgttgagaaggccagggaagtcatcacctccgacctcgacagggaactgaagttccagacactcgggaagctaatgaacataaaccacggcctcctcgatgctcttggcgtctcgaccaagaagctcagcgagctggtttacgctgccagaaccgccggcgctcttggagcaaaaattaccggtgctggtggcggtggctgtatgtacgccctcgcccctgggaagcagagcgaggtggcaacggccataaccatagccggcggaacgccgatgataacgaagataagcagggagggcatgaggattgaggaggtggaagagtga

SEQ ID NO: 152561 - protein, 337 aa, Pyrococcus kodakaraensis
MSVKRVLASAPAKIILFGEHSVVYGKPAIAAAIDLRTYVSAEFNDTGAIKIEAHDIRTPGLIVSFTEDSIYFESDYGKAAEVLGYVRQAIELVREEADVNGKGITVSITSQIPVGAGLGSSAAVAVATIGAVSRLLGLELSNEEVGKLGHKVELLVQGASSGIDPTVSAIGGFIHYQKGKFEHLPFMELPLVVGYTGSSGSTKELVAMVRKNYEEMPEIFEPILNSMGRLVEKAREVITSDLDRELKFQTLGKLMNINHGLLDALGVSTKKLSELVYAARTAGALGAKITGAGGGGCMYALAPGKQSEVATAITIAGGTPMITKISREGMRIEEVEE

SEQ ID NO: 152562 - DNA, 1215 bp, Schizosaccharomyces pombe
  CDS (1)..(1215)
atgtcaaaatcgcttattgtttcgtcgccaggaaaaacgattttgtttggggaacatgccgttgtatatggagctactgcgttagctgcagctgtatcgttacggagttactgtaaattacagacgactaataacaatgaaatagtaattgtgatgagtgatatagggaccgaacgccgatggaatcttcaatcgctaccttggcagcatgtaacagtggaaaacgttcagcacccggcatcatctcccaatctggaccttttacaaggattaggagagctattaaaaaatgaagaaaacggacttattcactcagcaatgctttgtaccctttacttgttcacgtctttgtcttctccttctcagggttgtactttaactattagctcccaagtacctttgggtgctggattaggtagtagtgctactatatcagttgttgtcgctacaagtttactactagcttttggtaatattgaacctcctagctcaaattctcttcaaaacaacaaagcacttgcgttgatagaggcttggtcttttctaggtgaatgctgtattcatggaacaccaagtggtattgataatgcagtagcaacaaatggaggacttatcgcttttcgtaaagctacagctcatcagagtgccatgaaagaattcttaaagcctaaagataccttatctgttatgatcactgataccaaacaaccaaaaagtactaaaaaacttgtacaaggagtttttgaactgaaggaaagactaccaactgtgattgactcaataatagatgcaatcgatggcatatcaaagtctgccgtcctcgcattgacttcggagagcgataaaaactcctccgctaaaaagttaggagagtttattgttcttaatcaaaaactcttagaatgcttgggtgtatcccattattccattgatcgcgttttacaagccactaagtcaattggatggacgaagcttacaggtgccggtggtggaggttgtacgattactttattaacacctgagtgcaaagaagaggaatttaagttatgtaaagaatcactattagcccataaaaattctatttacgatgttcaattaggtggacctggtgtttcagtggtaaccgactcagattcatttttccctcaatatgagtctgactttgattttaaaaaattgaatttactcagcaaatttaataaatattatatttaa

SEQ ID NO: 152563 - protein, 404 aa, Schizosaccharomyces pombe
MSKSLIVSSPGKTILFGEHAVVYGATALAAAVSLRSYCKLQTTNNNEIVIVMSDIGTERRWNLQSLPWQHVTVENVQHPASSPNLDLLQGLGELLKNEENGLIHSAMLCTLYLFTSLSSPSQGCTLTISSQVPLGAGLGSSATISVVVATSLLLAFGNIEPPSSNSLQNNKALALIEAWSFLGECCIHGTPSGIDNAVATNGGLIAFRKATAHQSAMKEFLKPKDTLSVMITDTKQPKSTKKLVQGVFELKERLPTVIDSIIDAIDGISKSAVLALTSESDKNSSAKKLGEFIVLNQKLLECLGVSHYSIDRVLQATKSIGWTKLTGAGGGGCTITLLTPECKEEEFKLCKESLLAHKNSIYDVQLGGPGVSVVTDSDSFFPQYESDFDFKKLNLLSKFNKYYI

SEQ ID NO: 152564 - DNA, 1164 bp, Glycine max
  CDS (1)..(1164)
atggaggttaaatccagagctcccgggaaaattatcctaaccggcgaacatgctgtggttcatggatccaccgctgttgcttcttctattgacttgtatacctacgtttctctccacttctccactccttccgacaacgaggattcgttgaaactgaagctgcaggagacggcgttggagttctcgtggccaatcacgagaataagagcagcgtttcctgaatccacggctcagctatcttccacgccgaactcatgctctgtggagaatgccaaggcaattgccgcactcgttgaagagcttaacattccagaggccaaactcggactcgcctctggagtttccgcctttctctggttatactcttccattcaaggatttaagcctgctactgttgttgtcacttctgaacttcctctgggctcaggattgggttcatccgcctcgttttgtgttgcgctggcggccgccttgttggcttatactgattctgtctctctggatttgaaacatcaaggatggctctcctttggggagaaggatcttgagttggtaaataaatgggcttttgaaggggagaagatcattcatggaaagccctctggaattgacaacacagtaagcgcatatggtaacattatcagcttcaagtcgggtaacttgacacatatgaagtcaagtgtgccgcttaaaatgctcattactaacaccaaagtagggaggaacacaaaagcattggtggctggtgttggagagaggatgctaaggcatccagatataatggcttttgtgtttagtgctgttgattctattagcaatgaattgacttccattctcaagtcacctacaccagatgagctctcggtaactgagaaagaagagaagatagaagaactaatggaaatgaatcaaggtatgctccagtctatgggggtcagtcatgccacaatagaaactgttcttcgaacaacattgaagtataagttagcctccaaattgacaggagctggtggtgggggctgtgttctgacactgcttccaacattgctatcaggcaccgttgttgacaaagtagttgctgaactggagtcatgcgggttccaatgtttcattgctggaattggcgggggaggtgttgaaattagctttggggtgtcatcttga

SEQ ID NO: 152565 - protein, 387 aa, Glycine max
MEVKSRAPGKIILTGEHAVVHGSTAVASSIDLYTYVSLHFSTPSDNEDSLKLKLQETALEFSWPITRIRAAFPESTAQLSSTPNSCSVENAKAIAALVEELNIPEAKLGLASGVSAFLWLYSSIQGFKPATVVVTSELPLGSGLGSSASFCVALAAALLAYTDSVSLDLKHQGWLSFGEKDLELVNKWAFEGEKIIHGKPSGIDNTVSAYGNIISFKSGNLTHMKSSVPLKMLITNTKVGRNTKALVAGVGERMLRHPDIMAFVFSAVDSISNELTSILKSPTPDELSVTEKEEKIEELMEMNQGMLQSMGVSHATIETVLRTTLKYKLASKLTGAGGGGCVLTLLPTLLSGTVVDKVVAELESCGFQCFIAGIGGGGVEISFGVSS

SEQ ID NO: 152566 - DNA, 1152 bp, Glycine max
  CDS (1)..(1152)
atggaggttaaatccagagctccggggaaaattatcttgagcggcgaacatgctgtggttcatggatccaccgctgttgcctcttccattgacttatacacctacgtttctctccgcttctccactccttcagacgaccaagattcgttgaaactgcagctgaaggagacggctttggagttctcgtggccaatcaccagaataagagcatcctttcctcagctatcttccacgccaacctcatgctctgtcgagaatgccaaggcaattgccgcactcgttcaagaccttaatattccagaggccaattttggactcgcctctggtgtttccgcctttctctggctgtactcttccattcaaggctttaagcctgctactgtgcttgtcacttctgaacttcctctgggttcaggattgggttcgtccgcgtcgttttgcgtggcgctggcggcagccttgttggcttatactgactctgtctctttccatgtcaaccatcaaggatggctctcatttggggagaaagatcttgagttggtaaatcaatgggcttttgaaggagagaagatcattcatggaaagccctctgggattgacaacacagtaagcgcatacggtaacattatcagcttcaagttgggtagcttgacgcatatgaagtcaagtgtgccgcttaaaatgctcattactaacaccaaagtagggaggaacacaaaagcattggtggctggtgttggagagaggatgctaaggcatccagatataatggcttttgtgtttagtgctgttgattctcttagcaatgaattgacttccattctcaagtcacctacaccagatgagctctcggtaactgagaaagaagagaagatagaagaactaatggaaatgaatcaaggtatgctccagtctatgggggtcagtcatgccacaatagaaactgttcttcgaacaacattgaagtataagttagcctccaaattgacaggagctggtggtgggggctgtgttctgacactgcttccaacattgctatcaggcaccgttgttgacaaagtagttgctgaactggagtcatgcgggttccaatgtttcattgctggaattggcgggggaggtgttgaaattagctttggggtgtcatcttga

SEQ ID NO: 152567 - protein, 383 aa, Glycine max
MEVKSRAPGKIILSGEHAVVHGSTAVASSIDLYTYVSLRFSTPSDDQDSLKLQLKETALEFSWPITRIRASFPQLSSTPTSCSVENAKAIAALVQDLNIPEANFGLASGVSAFLWLYSSIQGFKPATVLVTSELPLGSGLGSSASFCVALAAALLAYTDSVSFHVNHQGWLSFGEKDLELVNQWAFEGEKIIHGKPSGIDNTVSAYGNIISFKLGSLTHMKSSVPLKMLITNTKVGRNTKALVAGVGERMLRHPDIMAFVFSAVDSLSNELTSILKSPTPDELSVTEKEEKIEELMEMNQGMLQSMGVSHATIETVLRTTLKYKLASKLTGAGGGGCVLTLLPTLLSGTVVDKVVAELESCGFQCFIAGIGGGGVEISFGVSS

SEQ ID NO: 152568 - DNA, 1218 bp, Zea mays
  CDS (1)..(1218)
atggatccagtcgccggcacggcggagcatcggggcccgttggaagtgcgcgcccgcgcgcccggcaagatcatcctcgcgggcgagcacgccgtcgtccacggctccgccgccgtcgccgctgccatcgatctctacaccaactcctccctcctcctccgccccacaggcccaggagagggtggcggcgctggctccggcgcggtggagctggacctcagggactcgggcctcaccttctcgtggccgtgctcgcgcctccgcggggcgctgggggaggagatcagcgccaaccccggggctccggcgccgtgctcccctgaccagctggccgccattgccaggctcttgcaggaccaggagatccctgaggccaagatctggctctccgccggcctctccgccttcctttttctctacgcctccattttgggatgcaggcctggcaaggcagtggtgtcctcggacctgcccatgggcgcagggctcggctcatcagcggcattttgtgtttccatgtcgggggcgctattgactgctgctggtgcagtaagtgttggagcacgcaggggtgctgagggttgggaggtgttggagaagggtgctcttgagctggtcaaccaatgggcgttccaaggggaaaagattattcatggcaagccttctggcattgacaattccgtcagcacttttgggaaaatgatcaaattcaagaagggggaactgacaaaccttgagtcctggaacccagtcaaaatgcttattactgatacaagagttggtaggaacacaaaggcattggttgctggtgtgtctgaaagggcgtctaggcatccagatgctatggcttctgtcttccatgcagtgaactctattagtgaagagctttcaagcattgtcgagttagcagccgaggatgagatagccatcacctctaaggaggataagctagcagagcttatggagatgaaccaaggtttgcttcagtgtatgggagtcagccattcttctatagaaactgtgttgcggaccactctgaaatatagcttggtctcaaagctaactggagctggtggtggaggctgtgtgttgactctaataccgacgttatcggccaatactgttctggagaaagtcaccacagagctcgaatctcacggttatcgctgcttcaaagttgaggttggtgggcgaggtctccaagtattccgtggatag

SEQ ID NO: 152569 - protein, 405 aa, Zea mays
MDPVAGTAEHRGPLEVRARAPGKIILAGEHAVVHGSAAVAAAIDLYTNSSLLLRPTGPGEGGGAGSGAVELDLRDSGLTFSWPCSRLRGALGEEISANPGAPAPCSPDQLAAIARLLQDQEIPEAKIWLSAGLSAFLFLYASILGCRPGKAVVSSDLPMGAGLGSSAAFCVSMSGALLTAAGAVSVGARRGAEGWEVLEKGALELVNQWAFQGEKIIHGKPSGIDNSVSTFGKMIKFKKGELTNLESWNPVKMLITDTRVGRNTKALVAGVSERASRHPDAMASVFHAVNSISEELSSIVELAAEDEIAITSKEDKLAELMEMNQGLLQCMGVSHSSIETVLRTTLKYSLVSKLTGAGGGGCVLTLIPTLSANTVLEKVTTELESHGYRCFKVEVGGRGLQVFRG

SEQ ID NO: 152570 - DNA, 25 bp, Artificial sequence
  primer
atgtcattaccgttcttaacttctg

SEQ ID NO: 152571 - DNA, 25 bp, Artificial sequence
  primer
ttatgaagtccatggtaaattcgtg

SEQ ID NO: 152572 - protein, 403 aa, Artificial sequence
  consensus sequence
  Variant (2)..(2): Xaa in position 2 is any amino acid
  Variant (5)..(5): Xaa in position 5 is any amino acid
  Variant (9)..(9): Xaa in position 9 is any amino acid
  Variant (12)..(12): Xaa in position 12 is any amino acid
  Variant (14)..(15): Xaa in position 14 to 15 is any amino acid
  Variant (17)..(17): Xaa in position 17 is any amino acid
  Variant (19)..(72): Xaa in position 19 to 72 is any amino acid
  Variant (73)..(140): Xaa in position 73 to 140 is any or no amino acid
  Variant (142)..(143): Xaa in position 142 to 143 is any amino acid
  Variant (145)..(147): Xaa in position 145 to 147 is any amino acid
  Variant (154)..(156): Xaa in position 154 to 156 is any amino acid
  Variant (158)..(183): Xaa in position 158 to 183 is any amino acid
  Variant (184)..(206): Xaa in position 184 to 206 is any or no amino acid
  Variant (208)..(211): Xaa in position 208 to 211 is any amino acid
  Variant (212)..(212): Xaa in position 212 is any or no amino acid
  Variant (214)..(215): Xaa in position 214 to 215 is any amino acid
  Variant (218)..(218): Xaa in position 218 is any amino acid
  Variant (220)..(254): Xaa in position 220 to 254 is any amino acid
  Variant (255)..(266): Xaa in position 255 to 266 is any or no amino acid
  Variant (268)..(270): Xaa in position 268 to 270 is any amino acid
  Variant (272)..(273): Xaa in position 272 to 273 is any amino acid
  Variant (275)..(312): Xaa in position 275 to 312 is any amino acid
  Variant (313)..(359): Xaa in position 313 to 359 is any or no amino acid
  Variant (362)..(364): Xaa in position 362 to 364 is any amino acid
  Variant (368)..(384): Xaa in position 368 to 384 is any amino acid
  Variant (385)..(386): Xaa in position 385 to 386 is any or no amino acid
  Variant (388)..(388): Xaa in position 388 is any amino acid
  Variant (391)..(391): Xaa in position 391 is any amino acid
  Variant (393)..(393): Xaa in position 393 is any amino acid
  Variant (394)..(396): Xaa in position 394 to 396 is any or no amino acid
  Variant (399)..(401): Xaa in position 399 to 401 is any amino acid
  Variant (402)..(402): Xaa in position 402 is any or no amino acid
KXILXGEHXVVXGXXAXAXXXXXXXXXXXXXXXXXXXXXXXXXXXXXXXXXXXXXXXXXXXXXXXXXXXXXXXXXXXXXXXXXXXXXXXXXXXXXXXXXXXXXXXXXXXXXXXXXXXXXXXXXXXXXXXXXXXXXXXXXXSXXPXXXGLGSSAXXXVXXXXXXXXXXXXXXXXXXXXXXXXXXXXXXXXXXXXXXXXXXXXXXXXXEXXXXXGXXSGXDXXXXXXXXXXXXXXXXXXXXXXXXXXXXXXXXXXXXXXXXXXXXXXXTXXXVXXVXXXXXXXXXXXXXXXXXXXXXXXXXXXXXXXXXXXXXXXXXXXXXXXXXXXXXXXXXXXXXXXXXXXXXXXXXXXXXXXXXXXXXLLXXXGVSXXXXXXXXXXXXXXXXXXXKXTGXGXXXXGGXXXXL

SEQ ID NO: 152573 - protein, 24 aa, Artificial sequence
  protein pattern
  Variant (2)..(3): Xaa in position 2 to 3 is any or no amino acid
  Variant (5)..(5): Xaa in position 5 is Ala, Ile, Leu or Val
  Variant (6)..(6): Xaa in position 6 is any amino acid
  Variant (7)..(7): Xaa in position 7 is Ile, Leu or Val
  Variant (8)..(8): Xaa in position 8 is any amino acid
  Variant (12)..(12): Xaa in position 12 is Ala, Gly or Ser
  Variant (13)..(13): Xaa in position 13 is Ala or Val
  Variant (15)..(15): Xaa in position 15 is Phe, His or Tyr
  Variant (16)..(16): Xaa in position 16 is Asp, Gly, Asn or Ser
  Variant (17)..(18): Xaa in position 17 to 18 is any amino acid
  Variant (20)..(20): Xaa in position 20 is Ile, Leu, Met or Val
  Variant (21)..(22): Xaa in position 21 to 22 is any amino acid
  Variant (23)..(23): Xaa in position 23 is Ala, Gly, Pro or Ser
  Variant (24)..(24): Xaa in position 24 is Phe, Ile, Leu or Val
AXXKXXXXGEHXXVXXXXAXXXXX

SEQ ID NO: 152574 - protein, 14 aa, Artificial sequence
  protein pattern
  Variant (2)..(2): Xaa in position 2 is Ile or Leu
  Variant (5)..(5): Xaa in position 5 is Ala, Gly or Ser
  Variant (7)..(7): Xaa in position 7 is any or no amino acid
  Variant (10)..(12): Xaa in position 10 to 12 is any amino acid
  Variant (13)..(13): Xaa in position 13 is any or no amino acid
KXTGXGXGGXXXXL

SEQ ID NO: 152575 - protein, 14 aa, Artificial sequence
  protein pattern
  Variant (2)..(4): Xaa in position 2 to 4 is any amino acid
  Variant (6)..(6): Xaa in position 6 is Leu or Met
  Variant (8)..(8): Xaa in position 8 is any or no amino acid
  Variant (10)..(10): Xaa in position 10 is any or no amino acid
  Variant (12)..(12): Xaa in position 12 is any or no amino acid
  Variant (14)..(14): Xaa in position 14 is Ala, Cys, Ser, Thr or Val
PXXXGXGXSXSXAX

SEQ ID NO: 152576 - DNA, 753 bp, Escherichia coli
  CDS (1)..(753): transl_table=11
atggctgtaactaagctggttctggttcgtcatggcgaaagtcagtggaacaaagaaaaccgtttcaccggttggtacgacgtggatctgtctgagaaaggcgtaagcgaagcaaaagcagcaggtaagctgctgaaagaggaaggttacagctttgactttgcttacacttctgtgctgaaacgcgctatccataccctgtggaatgtgctggacgaactggatcaggcatggctgcccgttgagaaatcctggaaactgaacgaacgtcactacggtgcgttgcagggtctgaacaaagcggaaactgctgaaaagtatggcgacgagcaggtgaaacagtggcgtcgtggttttgcagtgactccgccggaactgactaaagatgatgagcgttatccgggtcacgatccgcgttacgcgaaactgagcgagaaagaactgccgctgacggaaagcctggcgctgaccattgaccgcgtgatcccttactggaatgaaactattctgccgcgtatgaagagcggtgagcgcgtgatcatcgctgcacacggtaactctttacgtgcgctggtgaaatatcttgataacatgagcgaagaagagattcttgagcttaatatcccgactggcgtgccgctggtgtatgagttcgacgagaatttcaaaccgctgaaacgctattatctgggtaatgctgacgagatcgcagcgaaagcagcggcggttgcaaaccagggtaaagcgaagtaa

SEQ ID NO: 152577 - protein, 250 aa, Escherichia coli
MAVTKLVLVRHGESQWNKENRFTGWYDVDLSEKGVSEAKAAGKLLKEEGYSFDFAYTSVLKRAIHTLWNVLDELDQAWLPVEKSWKLNERHYGALQGLNKAETAEKYGDEQVKQWRRGFAVTPPELTKDDERYPGHDPRYAKLSEKELPLTESLALTIDRVIPYWNETILPRMKSGERVIIAAHGNSLRALVKYLDNMSEEEILELNIPTGVPLVYEFDENFKPLKRYYLGNADEIAAKAAAVANQGKAK

SEQ ID NO: 152578 - DNA, 750 bp, Mycobacterium tuberculosis
  CDS (1)..(750): transl_table=11
atggcaaacactggcagcctggtgttgctgcgccacggcgagagcgactggaatgccctcaacctgttcaccggctgggtcgatgtcggcctgacggacaagggccaggcagaggcggttcgaagcggcgagctgatcgcggaacacgacctattgcccgacgtgctctacacctcgttgctgcggcgcgcgatcaccaccgcgcatctggcgttggacagcgccgatcggctctggattcccgtgcggcgtagctggcggctcaacgaacgccactacggcgcgctgcagggtttggacaaggccgagaccaaggcccgctatggcgaagagcagttcatggcctggcggcgcagctatgacacgccgccgccgccgatcgagcggggcagtcagttcagccaggacgccgaccctcgttacgccgacatcggcggtggcccgctcaccgaatgtctggctgacgtggtcgcccggtttttgccatatttcaccgacgtcatcgttggcgacttgcgggtcggcaagacggtgctgatcgttgcccacggcaactcgttgcgcgcgctggtcaagcacctggaccagatgtctgacgacgaaatcgtcggactgaacatcccgaccggaattccgctgcgctacgacctggattccgcgatgaggccgctggtgcgcggtggtacgtatctggacccggaggcggcagccgccggcgccgccgcggtggccggccagggccgcgggtaa

SEQ ID NO: 152579 - protein, 249 aa, Mycobacterium tuberculosis
MANTGSLVLLRHGESDWNALNLFTGWVDVGLTDKGQAEAVRSGELIAEHDLLPDVLYTSLLRRAITTAHLALDSADRLWIPVRRSWRLNERHYGALQGLDKAETKARYGEEQFMAWRRSYDTPPPPIERGSQFSQDADPRYADIGGGPLTECLADVVARFLPYFTDVIVGDLRVGKTVLIVAHGNSLRALVKHLDQMSDDEIVGLNIPTGIPLRYDLDSAMRPLVRGGTYLDPEAAAAGAAAVAGQGRG

SEQ ID NO: 152580 - DNA, 993 bp, Schistosoma mansoni
  CDS (22)..(774)
aacaagcaggtatatcgtggcatggctccttacagaattgtgtttattcgccatggagagagtgtttacaatgaagaaaatcgattttgtggttggcatgatgcagatctttcaggacaaggtatcactgaggctaaacaagctggccaacttctacgccaaaatcacttcacctttgatattgcctatacaagcgttctaaaaagagccatcaagactttaaactttgtccttgatgaacttgatcttaactggatacctgtgacaaaaacatggcgtctaaatgaaagaatgtacggtgctcttcaaggtctgaataagtctgaaactgctgccaaacatggagaggaacaagttaaaatatggagacgtgcttatgatatacctccccctcctgttgacatttcagatcctcgcttccccggtaatgaaccaaagtatgccttacttgactcttcctgcataccacgtactgagtgtttaaaggacactgttcaacgtgtactgccattttggtttgatactatttctgcaagtataaagagacgcgaacaggttctgattgtcgcccatggaaacagtttaagagcgcttatcaagtacttggataatacatctgattcagatattgtggaactcaatatacccactggtattccactagtctatgaactggatgcgaacttgaagccaaccaaacactattatcttgccgatgaagcgacagtagcagcagcaatagcacgtgtggcgaaccagggaaaaaagaaatgaagcgaataattatcattatcgataatttcttcattattcatccatccattaatatttaacacatgttttgaataattttagtcatctatagctttgagtaatgaacagatactctgatcgtccttactcataatcgtattgtatgaagtaaatattttcctttatagcgtttgttttataggttatagttatgataagatcaaaaaattattgaaaatg

SEQ ID NO: 152581 - protein, 250 aa, Schistosoma mansoni
MAPYRIVFIRHGESVYNEENRFCGWHDADLSGQGITEAKQAGQLLRQNHFTFDIAYTSVLKRAIKTLNFVLDELDLNWIPVTKTWRLNERMYGALQGLNKSETAAKHGEEQVKIWRRAYDIPPPPVDISDPRFPGNEPKYALLDSSCIPRTECLKDTVQRVLPFWFDTISASIKRREQVLIVAHGNSLRALIKYLDNTSDSDIVELNIPTGIPLVYELDANLKPTKHYYLADEATVAAAIARVANQGKKK

SEQ ID NO: 152582 - DNA, 741 bp, Dichelobacter nodosus VCS1703A
  CDS (1)..(741): transl_table=11
atgaaaaaattagtattagtgcgccacgggcaaagtcagtggaatttagaaaatttgtttaccggttggacggacgttgatttaacagaacaaggtcaaaaggaagccgcgacagccgcgcaattgttacaaaaagagggtattttttttcaaacggcttttacttcttatctaaaacgcgcgataaaaacgctcaatattattttagatgtgatggatttggattggattgatgtccacaaaacgtggcgcttaaatgaaaaacattatggcgcgttgcaaggactcaataaaaaagaaaccgcggcgcaatacggtcaagaacaagtattattgtggcggcggagttttgacacggcgccggcagcgctggaatattctgatgcgcgcgcgccgcataatgatcgccgttatcaacgcgttgcgcggcaggatttaccgctgacggaatcgttaaaagatacgattgcgcgcattatgccttattgggaagtggtgataaaaccggttttaattgcggaaaatacggttttaattgtggcgcacgggaacagtttgcgcgcgattattaagcatttaaaaggcatttccgaaacggaaattaccgatttgaatctgccaacgggtattccttatgtttttgaatttgacgatgatatgaatctttgcgcggattattttttaggcgataccgaagcgattaaaaaattacaagaatccgttgccaaacaatcgcaataa

SEQ ID NO: 152583 - protein, 246 aa, Dichelobacter nodosus VCS1703A
MKKLVLVRHGQSQWNLENLFTGWTDVDLTEQGQKEAATAAQLLQKEGIFFQTAFTSYLKRAIKTLNIILDVMDLDWIDVHKTWRLNEKHYGALQGLNKKETAAQYGQEQVLLWRRSFDTAPAALEYSDARAPHNDRRYQRVARQDLPLTESLKDTIARIMPYWEVVIKPVLIAENTVLIVAHGNSLRAIIKHLKGISETEITDLNLPTGIPYVFEFDDDMNLCADYFLGDTEAIKKLQESVAKQSQ

SEQ ID NO: 152584 - DNA, 768 bp, Bombyx mori
  CDS (1)..(768)
atgcctgcaaagtataagattgttatgattcgtcatggcgaatccgaatggaaccagaagaatctcttctgtggatggttcgacgctgacctcagcgacaaaggtcgtcaagaagctgttgctgccgggaaggccttaaaagctgaaggctatcagtttgacgttgctcacacgtctgttctaaaacgtgcccagattacactgaactctatcttaaaggagatcggtcagccagatatacctattgagaaaacttggagattgaacgagaggcattatggtggcctcactggactgaacaaggctgagacagctgccaaatacgggggggctcaggttcaaatctggcgccgtagcttcgacgttcctccaccggccatggaaaaagatcacccatactatgacaccattgttaatgaccccagatatgctgctgacccgaaacctgaagagttccctatgtacgagagcctgaaactcactattgaaagaaccctgccttactggaacaatgttattgtgcctcagatcaaagaaggcaagaagatcattattgctgcccatggcaacagtctaaggggtattgtgaaacacttagatgatctaagcgatgcagcaatcatggaattgaatctgccgacaggcatccccttcgtatatgaacttgatgagaatttaaaacctgtagattccatggtgttccttggtgatgaagaaactgtcaaaaaagctatggctgctgtcgctgcccagggcaaggccaagtga

SEQ ID NO: 152585 - protein, 255 aa, Bombyx mori
MPAKYKIVMIRHGESEWNQKNLFCGWFDADLSDKGRQEAVAAGKALKAEGYQFDVAHTSVLKRAQITLNSILKEIGQPDIPIEKTWRLNERHYGGLTGLNKAETAAKYGGAQVQIWRRSFDVPPPAMEKDHPYYDTIVNDPRYAADPKPEEFPMYESLKLTIERTLPYWNNVIVPQIKEGKKIIIAAHGNSLRGIVKHLDDLSDAAIMELNLPTGIPFVYELDENLKPVDSMVFLGDEETVKKAMAAVAAQGKAK

SEQ ID NO: 152586 - DNA, 999 bp, Arabidopsis thaliana
  CDS (1)..(999)
atggctacttctacgactatgtctcatcaagcgattgggtctgttgtctctcaaagaccattcaaagcttctcagtttctaaaggagcctttgaataatgtaccaatgaaattcagacaaaaaagattcaagattgaagcaactgcttctcagatatctgtcgttgacaacactttcttgtctccgtctccttccaagaacaaaccacatgaatctaagaagaaatcaaatgaagcagctttgatattgattaggcatggagaatcgttatggaatgagaagaatttgttcacgggttgtgttgatgtgccattgactcagaaaggtgttggagaagctattgaagctgggaagaagattagtaacattcctgtagatttgattttcacttcttctttaatccgtgctcagatgactgcaatgcttgccatgactcagcatcgtcgcaagaaggttccaatcatcttgcacaacgagagtgtaaaggcgaaaacttggagtcatgttttcagcgaagaaactagaaaacaatctatcccggttatagcggcttggcaactgaatgagagaatgtatggagagttgcagggtttgaacaagaaagaaacagcggaaagatacgggacacaacaagttcacgaatggcgcaggagttacgaaattcctcctccgaaaggcgagagcttggagatgtgtgctgagagagcagtggcttattttgaagacaatatcaaaccagagcttgcatctggaaacaatgtaatgattgctgctcacgggaactcattgagatctatcattatgtatcttgacgatttaacttctcaggaggttacaactctagacctgtccacaggtgtaccattgctctacatcttcaaagaaggcaagttcatgaaacgaggaagccccgtcggttctactgaagctggtgtctatgcttatacaaagagattggcacaatacagagagaagcttgatgcggcggcgaccatttaa

SEQ ID NO: 152587 - protein, 332 aa, Arabidopsis thaliana
MATSTTMSHQAIGSVVSQRPFKASQFLKEPLNNVPMKFRQKRFKIEATASQISVVDNTFLSPSPSKNKPHESKKKSNEAALILIRHGESLWNEKNLFTGCVDVPLTQKGVGEAIEAGKKISNIPVDLIFTSSLIRAQMTAMLAMTQHRRKKVPIILHNESVKAKTWSHVFSEETRKQSIPVIAAWQLNERMYGELQGLNKKETAERYGTQQVHEWRRSYEIPPPKGESLEMCAERAVAYFEDNIKPELASGNNVMIAAHGNSLRSIIMYLDDLTSQEVTTLDLSTGVPLLYIFKEGKFMKRGSPVGSTEAGVYAYTKRLAQYREKLDAAATI

SEQ ID NO: 152588 - DNA, 693 bp, Arabidopsis thaliana
  CDS (1)..(693)
atggaggaatcaagattcgattctgaagatgttgattatgctgagattgttgttgttcgtcatggtgaaacatcttggaatgccgagagaaaaatccagggtcatttggatgttgagttaaatgatgcaggaagacaacaagcacaaagagttgcagagcggttatcgaaggagcagaagatatctcatgtatactcttctgacttgaagagagcctttgagactgctcagatcattgctgctaaatgcggcaagcttgaggtgcttaccgatcgtgatttgcgggaaagacatttaggagatatgcaagggcttgtgtatcaagaagcttcgaaaattcgcccggaagcttacaaggctttttcatctaaccgcacagacgttgatattccaggtggaggagaaagtcttgacaaactttacgatagatgtacaactgcattacagagaatcggcgacaaacataaaggtgaaaggatagtagtagtgactcatggaggtgtgatccgatctctctacgaaagagctcgtccaagtgcaagaaaagttgaaaagatactcaatacatcggtcaatgtgttccgtttattcgacggagacaaatggaccatccaagtttggggtgatgtgagtcatctggaggaaaccggcttcttacaatcaggttttggtggtgatagaacctctggttag

SEQ ID NO: 152589 - protein, 230 aa, Arabidopsis thaliana
MEESRFDSEDVDYAEIVVVRHGETSWNAERKIQGHLDVELNDAGRQQAQRVAERLSKEQKISHVYSSDLKRAFETAQIIAAKCGKLEVLTDRDLRERHLGDMQGLVYQEASKIRPEAYKAFSSNRTDVDIPGGGESLDKLYDRCTTALQRIGDKHKGERIVVVTHGGVIRSLYERARPSARKVEKILNTSVNVFRLFDGDKWTIQVWGDVSHLEETGFLQSGFGGDRTSG

SEQ ID NO: 152590 - DNA, 717 bp, Arabidopsis thaliana
  CDS (1)..(717)
atgggtcatgaatggatcgatgcagagagggagttcaaatggagcgaggatgtcaaagttgaaagtgaagtgactgagatcgttcttgttcgccatggagaaaccacttggaatgctgccggaagaatccagggacaaattgaatcagaccttaacgaggttggactaaagcaggctgttgcaatcgctgagaggttgggaaaagaggaaagacctgtagctgtgtattcatcagacctcaaacgagccaaagacactgctcttatgatcgccaaaacttgtttctgtcccgaggtgatcgaagtacctgacttaaaggagaggcacgtgggtagtctccaaggcctgtattggaaagaaggagcagagaaagaacctgaagcttactctgcctttttctcttcccaaaacgacctcgagattccgggaggaggagagagctttgaccaacttgctgatagatccatggatgctcttgagcaaattgctaagaagcacaaaggagagagagtgatagtggtgactcatggaggagtgttgagggcaatttacttaaggatcacacaagcttcctctgccggaaaactcttgaatgcttcagtgaatgtggttcatctccgtgatcaaaaatggatcatcgattcgtggagcgatgtatcacatctatcatccgttggatttcttcaacgtggctttgatggagacgccaagccctag

SEQ ID NO: 152591 - protein, 238 aa, Arabidopsis thaliana
MGHEWIDAEREFKWSEDVKVESEVTEIVLVRHGETTWNAAGRIQGQIESDLNEVGLKQAVAIAERLGKEERPVAVYSSDLKRAKDTALMIAKTCFCPEVIEVPDLKERHVGSLQGLYWKEGAEKEPEAYSAFFSSQNDLEIPGGGESFDQLADRSMDALEQIAKKHKGERVIVVTHGGVLRAIYLRITQASSAGKLLNASVNVVHLRDQKWIIDSWSDVSHLSSVGFLQRGFDGDAKP

SEQ ID NO: 152592 - DNA, 762 bp, Borrelia burgdorferi B31
  CDS (1)..(762): transl_table=11
atgctaggagattttatgtataaattagttttagtaagacacggagagagtgagtggaataaagaaaatctttttactggttggacagatgttaaactttctgacaagggtatcgatgaggctgttgaggcgggtttgcttctcaaacaagaaggctattcttttgatattgcttttagttctttgttgtcaagagctaatgacactttaaatattattttgcgagaattagggcaatcttatattagtgtaaaaaaaacctggagattaaatgaaaggcactatggagctttgcaaggtttaaataagtcagaaacagctgcaaaatatggggaagataaggttttaatttggagacgtagttatgatgtgcccccaatgtctttggatgagtctgatgatcgtcatcccataaaagatccaagatataaacatatccccaaaagggaacttccttcaacagagtgccttaaagatactgttgcaagagttattccttattggactgatgagattgcaaaagaagttcttgaaggtaaaaaagttattgttgctgctcacggtaattctttaagagcgcttgttaaatattttgacaatttaagtgaagaagatgttttaaagcttaacattcccacaggcattcctttagtttacgaattagataaagatttaaatcccattaaacattactatctaggtgatgagagcaaaattaaaaaggcaatggaatctgttgctagtcaaggaaagttaaagtaa

SEQ ID NO: 152593 - protein, 253 aa, Borrelia burgdorferi B31
MLGDFMYKLVLVRHGESEWNKENLFTGWTDVKLSDKGIDEAVEAGLLLKQEGYSFDIAFSSLLSRANDTLNIILRELGQSYISVKKTWRLNERHYGALQGLNKSETAAKYGEDKVLIWRRSYDVPPMSLDESDDRHPIKDPRYKHIPKRELPSTECLKDTVARVIPYWTDEIAKEVLEGKKVIVAAHGNSLRALVKYFDNLSEEDVLKLNIPTGIPLVYELDKDLNPIKHYYLGDESKIKKAMESVASQGKLK

SEQ ID NO: 152594 - DNA, 687 bp, Chlamydophila pneumoniae J138
  CDS (1)..(687): transl_table=11
atggctcttcttattttattacgtcatggacaatctgtatggaatgaaaaaaatttattttctggatgggtagacattcctttaagccaacagggaattgaagaggctttttccgcaggaagagctattcaaaatttgcctatagactgcatctttacctctaccttagtacgtagtctgatgaccgccttactcgccatgacaaatcatcactctaagaagatcccctatattgttcatgaagatcccaaagcaaaagagatgtcgaggatctacagtgcggaagaagaaaacaatatgattcctctctatcaatctagtgccctcaacgaaagaatgtacggcgaacttcaaggaaaaaataaaaaacaaacagccgaacagttcggagaagagcgggtcaagctgtggaggcgcagctacaaaacagctcctcctcagggagaaagcctctatgatacgaaacaaaggaccttgccttactttgaaaaaaatattttgcctcaactgcaacatggaaaaaacgtttttgtttctgcgcacggaaattccttacgctctttgattatggatctagaaaaattaagtgaggaagaggtactatctttagaattaccgacgggaaaaccagttgtatatcaatggaaaaaccacaaaatcgaaaagcacccagaattttttggttaa

SEQ ID NO: 152595 - protein, 228 aa, Chlamydophila pneumoniae J138
MALLILLRHGQSVWNEKNLFSGWVDIPLSQQGIEEAFSAGRAIQNLPIDCIFTSTLVRSLMTALLAMTNHHSKKIPYIVHEDPKAKEMSRIYSAEEENNMIPLYQSSALNERMYGELQGKNKKQTAEQFGEERVKLWRRSYKTAPPQGESLYDTKQRTLPYFEKNILPQLQHGKNVFVSAHGNSLRSLIMDLEKLSEEEVLSLELPTGKPVVYQWKNHKIEKHPEFFG

SEQ ID NO: 152596 - DNA, 606 bp, Staphylococcus aureus subsp. aureus Mu50
  CDS (1)..(606): transl_table=11
atacataaggtaaggagtaatattatgacgatttatttagttagacatggcgaatcaaaatcgaattatgataataaacattttcgatcttatttttgtggacaattagatgtgccgttaacggatactggcacaaaaagtgcagacgatttatgtgattattttaaagagaaacagattaaacatgtatatgtttcagacttattaagaacacagcaaacgtttgaacatatttttccatatgacattgcatcaacgactacccctctattaagagaacgttcacttggcgtatttgagggtgaatataaagatgaaatcagtgcgaatccgaaatatgaaaaatatttcaatgatccaaactttaaagactttcgtcatagtttttcacaaaaagcgcctgaaggagaaagttatgaagatgtatatcaacgcgtagaacattttatgaatcatgttgtcaatgaagatacacaaaaagatgatattgtcattgttgcacatcaagttgtcattcgttgtttgatggtttattttaacaaagtttcaagggaagaagctgtggatttaaaggtagaaaattgcaaaccatatatcattgaatag

SEQ ID NO: 152597 - protein, 201 aa, Staphylococcus aureus subsp. aureus Mu50
MHKVRSNIMTIYLVRHGESKSNYDNKHFRSYFCGQLDVPLTDTGTKSADDLCDYFKEKQIKHVYVSDLLRTQQTFEHIFPYDIASTTTPLLRERSLGVFEGEYKDEISANPKYEKYFNDPNFKDFRHSFSQKAPEGESYEDVYQRVEHFMNHVVNEDTQKDDIVIVAHQVVIRCLMVYFNKVSREEAVDLKVENCKPYIIE

SEQ ID NO: 152598 - DNA, 804 bp, Ralstonia solanacearum GMI1000
  CDS (1)..(804): transl_table=11
atgacgcagcgcgtcccggccaccgcgcaggttttctcacttctcatcatggcagtcatgcacaagctcgtcctcatccgccacggcgaatcgacgtggaacctcgaaaaccgcttcaccggctgggtcgacgtcgacctgaccgacaccggcatcgcccaggcccgccagggcggccgcctgctgcgcgaagccggcttcaccttcgacctggcctacacctcggtgctcaagcgcgccatccgcacactgtggcacgtgcaggatgaaatggacctgatgtggatcccgacccgcaccgaatggcgcctgaacgagcgccactatggcggcctgtcgggtctgaacaaggccgagaccgccgcccagtacggcgaccagcaggtgctggtctggcgccgcagctacgacacgccgccgcccgcgctggaagccggcgacgagcgcgacgcgtatggcaacccgcgctatgcgggcctgccgcgcgaacaggtgccgctcaccgaatgcctgaaggacaccgtggcgcgcgtgctgccgctgtgggaaacgtcgatcgccccggacatcaagagcggcaagcgcgtcgtgatcgccgcgcacggcaacagcatccgcgccctggtgaagtacctcgacaacatctcggacgacgacatcgtcggcctgaacatccccaacggcacgccgctcgtctacgaactggacgccaacctgaagcccatccgccattactatctcggcgaccaggaagcgatcgccgcgtcgctcgccgccgtggctggccagggcaaggcgaaataa

SEQ ID NO: 152599 - protein, 267 aa, Ralstonia solanacearum GMI1000
MTQRVPATAQVFSLLIMAVMHKLVLIRHGESTWNLENRFTGWVDVDLTDTGIAQARQGGRLLREAGFTFDLAYTSVLKRAIRTLWHVQDEMDLMWIPTRTEWRLNERHYGGLSGLNKAETAAQYGDQQVLVWRRSYDTPPPALEAGDERDAYGNPRYAGLPREQVPLTECLKDTVARVLPLWETSIAPDIKSGKRVVIAAHGNSIRALVKYLDNISDDDIVGLNIPNGTPLVYELDANLKPIRHYYLGDQEAIAASLAAVAGQGKAK

SEQ ID NO: 152600 - DNA, 684 bp, Ralstonia solanacearum GMI1000
  CDS (1)..(684): transl_table=11
atggcacgcaccgccgccatgcccatgccgatgccgcagatcacccacatcgtgctggtgcggcacggcgagaccgactggaaccgcgagcgccggctccagggccagctcgacgtgccgctcaatgcgcaagggcgcgaacaggccgcgcagctgggccgggcgctggcgcgcgagccgttcgatgcgatctatgccagcgatctgtcgcgcgccagggagacggcgcaggcattggccggcgaggtcggcaaggctgtgcgcgatgacaccggcctgcgcgaacgctgctacggcgggttcgaagggctgacctatgcagaggtggccgagcgccatccggcggaattcgaggcgtggcagagccgcgtgccggaattcgccccgcccggcggcggcgagacgctggccgggttccacgcgcgcgcggtggatgcggcgctgcggctgattcgccgccatccgggcgagcgcatcgcgctggttagccatggcggtgtgctcgattgcctgtaccggcacgccaacgccatgacgctcaccgagccgcgccagcacgcgctgcgcaatgccagcatcaaccggctgtcgtccgacgggcaccagctgaccgtgctgcagtggggggatgtcgcgcacctggacctgctggtgctcgacgaagtggatcggcgcgtaccgtag

SEQ ID NO: 152601 - protein, 227 aa, Ralstonia solanacearum GMI1000
MARTAAMPMPMPQITHIVLVRHGETDWNRERRLQGQLDVPLNAQGREQAAQLGRALAREPFDAIYASDLSRARETAQALAGEVGKAVRDDTGLRERCYGGFEGLTYAEVAERHPAEFEAWQSRVPEFAPPGGGETLAGFHARAVDAALRLIRRHPGERIALVSHGGVLDCLYRHANAMTLTEPRQHALRNASINRLSSDGHQLTVLQWGDVAHLDLLVLDEVDRRVP

SEQ ID NO: 152602 - DNA, 768 bp, Drosophila melanogaster
  CDS (1)..(768)
atgggcggcaagtacaagatcgtgatggtgcgccacggcgagtccgagtggaaccagaagaatcagttctgcggctggtacgacgccaacctcagcgaaaagggtcaggaggaggccctagccgccggcaaggccgtcaaggatgccggcctggagttcgatgtggcccacacctcggtgctgacccgcgcccaggtgacgctggccagcatcctgaaggccagtggccacaaggagatccccatccagaagacttggcgcctgaacgagcgccactacggtggactcactggcctgaacaaggccgagaccgccgccaagtacggcgaggcccaggtgcagatctggcgtcgcagcttcgacaccccgccaccaccgatggagccgggccatccgtactacgagaacatcgtcaaggatccccgctacgccgagggtcccaagcccgaggagttcccccagttcgagtccctcaagctgaccatcgaacgcacactgccctactggaacgacgtcatcattccccagatgaaggagggcaagcgcatcctgatcgctgcccacggcaacagcctccgtggcatcgtcaagcatttagacaacctttctgaggacgccatcatggccctaaatctgcccacgggcattccgttcgtctacgagctggacgagaacttcaagccggtggtgtccatgcagttcctcggcgacgaggagaccgtgaagaaggccatcgaggctgtggccgcccagggcaaggccaagtaa

SEQ ID NO: 152603 - protein, 255 aa, Drosophila melanogaster
MGGKYKIVMVRHGESEWNQKNQFCGWYDANLSEKGQEEALAAGKAVKDAGLEFDVAHTSVLTRAQVTLASILKASGHKEIPIQKTWRLNERHYGGLTGLNKAETAAKYGEAQVQIWRRSFDTPPPPMEPGHPYYENIVKDPRYAEGPKPEEFPQFESLKLTIERTLPYWNDVIIPQMKEGKRILIAAHGNSLRGIVKHLDNLSEDAIMALNLPTGIPFVYELDENFKPVVSMQFLGDEETVKKAIEAVAAQGKAK

SEQ ID NO: 152604 - DNA, 654 bp, Brucella melitensis 16M
  CDS (1)..(654): transl_table=11
atgactgattcttcccaccaacggagtactgcgatgtctcgtaccctcgtcctggtccgccatggccaaagcgaatggaacctcaagaacctctttaccggctggcgtgatccgggcctcaccgagcagggccatgcggaagccaaggccgcaggccaacgcctcaaggcagccggcctgaagttcgacattgcctacacctccgccctttcccgcgcgcaagttacctgccagcacattctcgacgagcttggccagccgggccttgaaaccatccgcgaccaggccctgaacgagcgcgactatggcgatctctccggtctcaacaaggatgacgcccgcgcaaagtggggtgaggaacaggttcacatctggcgccgttcctatgacgtcccgcctccgggcggcgaaagcctgaaggacaccggcgcgcgcgtctggccctattaccttcacaccatccagccacatgtgctgcgcgaggagaccgttctggtcgccgcccatggcaattcgctgcgcgcactcatcatggcgctcgagggcctgacaccagaacagattctcaagcaggaactcaacaccggcgttccgatcatctaccggctcaatgccgattcgacggtcgcctcgaaggaaatcctcagcgcctga

SEQ ID NO: 152605 - protein, 217 aa, Brucella melitensis 16M
MTDSSHQRSTAMSRTLVLVRHGQSEWNLKNLFTGWRDPGLTEQGHAEAKAAGQRLKAAGLKFDIAYTSALSRAQVTCQHILDELGQPGLETIRDQALNERDYGDLSGLNKDDARAKWGEEQVHIWRRSYDVPPPGGESLKDTGARVWPYYLHTIQPHVLREETVLVAAHGNSLRALIMALEGLTPEQILKQELNTGVPIIYRLNADSTVASKEILSA

SEQ ID NO: 152606 - DNA, 1005 bp, Arabidopsis thaliana
  CDS (1)..(1005)
atggctactgctacgtctcaccaatcagtcgtttcatttgcttctctccggtcttctccttcttctacaatctctcaatgtggattcaagatcgattcttcactgagctttacatcgaaaaagacaaacttttgcaagattaaagcaatggcatcatcagtttcttatgacaacactctcttgtctccttccaagacaatccctgacaattctcaaaagaaatcaaatgaagcagctttgatattgattaggcatggagaatctttatggaacgagaagaatctttttactggttgtgttgatgtgccattgactgagaaaggtgttgaagaagctattgaagcagggaagaggattagtaacattcctgttgatgttatctttacatcttctttgattcgtgctcagatgactgcaatgcttgctatgattcaacaccgtcgtaagaaggtaccgatcatcttgcacgatgaaagcgaacaggcgaaaacttggagtcaagtttttagtgatgagactaaaaaccaatccattcctgtcatacctgcttggcagctcaatgaaagaatgtatggagaattacaaggtcttaacaagcaagaaacagccgagagatatgggaaagagcaagttcacgaatggcgtaggagttatgatattcctcctcccaaaggagagagtttggagatgtgtgctgagagagcagtagcttattttcaggacaatatcgaaccgaagcttgcagctggaaagaacgtaatgatagctgctcacgggaactcgctgcggtctatcattatgtatcttgacaaattgacttgccaggaggtgataagtctagagctatcgacaggtatacctcttctctacatattcaaagaaggcaaattcatgaagcggggaagcccggttggtccaacagaagctggtgtttatgcttataccaagagattggctcaatacagacagaagctagaggacgatagtgaagtactctgtgcctga

SEQ ID NO: 152607 - protein, 334 aa, Arabidopsis thaliana
MATATSHQSVVSFASLRSSPSSTISQCGFKIDSSLSFTSKKTNFCKIKAMASSVSYDNTLLSPSKTIPDNSQKKSNEAALILIRHGESLWNEKNLFTGCVDVPLTEKGVEEAIEAGKRISNIPVDVIFTSSLIRAQMTAMLAMIQHRRKKVPIILHDESEQAKTWSQVFSDETKNQSIPVIPAWQLNERMYGELQGLNKQETAERYGKEQVHEWRRSYDIPPPKGESLEMCAERAVAYFQDNIEPKLAAGKNVMIAAHGNSLRSIIMYLDKLTCQEVISLELSTGIPLLYIFKEGKFMKRGSPVGPTEAGVYAYTKRLAQYRQKLEDDSEVLCA

SEQ ID NO: 152608 - DNA, 621 bp, Fusobacterium nucleatum subsp. nucleatum ATCC 25586
  CDS (1)..(621): transl_table=11
atggaaatttattttgtaagacatgggcaaacaatttggaatgttgaaaaaagatttcaaggactttcagactcaccacttactgaattaggaattatacaagcgaaattattaggtgaaaaattaaaagatataaaatttgataaattttattcaacctctttaaaaagagcaaatgatactgctaactatataaaaggaaatagaaaacaagaagttgaaatatttgatgactttgttgaaatttcaatgggagatatggaaggaattaaacaagaagactttaaaaaactttatccagaacaagttaaaaatttcttttttaatcagcttgaatataatccaagctcttttaaaggagaaagttttattgaagttagagaaagagttacaaaaggtttagaaaaattcataaaattaaataaaaattatgaaagagttttagttgttagtcatggggcaactttaaaaactttgttacattatataagtggaaaagatatttcaactttaagtgatgaagcaatacctaaaaatacaagctatactattgtaaagtatgaaaatggaaaatttgaaatcactgatttttctaatacaacacacttggaggaaaaataa

SEQ ID NO: 152609 - protein, 206 aa, Fusobacterium nucleatum subsp. nucleatum ATCC 25586
MEIYFVRHGQTIWNVEKRFQGLSDSPLTELGIIQAKLLGEKLKDIKFDKFYSTSLKRANDTANYIKGNRKQEVEIFDDFVEISMGDMEGIKQEDFKKLYPEQVKNFFFNQLEYNPSSFKGESFIEVRERVTKGLEKFIKLNKNYERVLVVSHGATLKTLLHYISGKDISTLSDEAIPKNTSYTIVKYENGKFEITDFSNTTHLEEK

SEQ ID NO: 152610 - DNA, 804 bp, Drosophila melanogaster
  CDS (1)..(804)
atggttttcttcaagttcttgaagagcaaactctcccaatttatgacgaaaacaaatcgcttggtgattttgaggcatggcgaaagtgatttcaacattgagaacaaattctgcggttggcatgatgcgccattgagtgaattcggcgtccaggaggccctgactgtggcgattcccgcgctcgtccaatccgagttggaattcgacgtggtctattcatccgtattgagcagatctcgtcaaacggccgaattgatactctccaagttgaactgcgcctatgtgcccattaaggaggattggcggctgtgcgaaaggcactacggaaatctgactggttgccggaaacgagtggtagccgatcgctatggggaggagcaggttcaggcctggcgacgtggatacgactgcgtaccgccgcccatcgatgagaagaaccgctacttctacaccatttgcagcaatcccatattcgatgatgttcctcgcggtgagttccccctcgcggaatcccttcacatgtgcgtcgatcgagtgaaacccgtgtggaaggaggtcaggcgggaagtgttccaaggcacccgggtactaatgtgcgtccacggaactgtggcccgtgctctcgtccagcacattgagggaatctccaacgaggccatcgaaaaggttaacattccaaattgcgtgccacgcgtctatgagttcgatttgaaaacgggaggcttggttggagctgccatcaatctgggggatcaggagtatattaggcggaagacagcccaggtggcagccattggtgactga

SEQ ID NO: 152611 - protein, 267 aa, Drosophila melanogaster
MVFFKFLKSKLSQFMTKTNRLVILRHGESDFNIENKFCGWHDAPLSEFGVQEALTVAIPALVQSELEFDVVYSSVLSRSRQTAELILSKLNCAYVPIKEDWRLCERHYGNLTGCRKRVVADRYGEEQVQAWRRGYDCVPPPIDEKNRYFYTICSNPIFDDVPRGEFPLAESLHMCVDRVKPVWKEVRREVFQGTRVLMCVHGTVARALVQHIEGISNEAIEKVNIPNCVPRVYEFDLKTGGLVGAAINLGDQEYIRRKTAQVAAIGD

SEQ ID NO: 152612 - DNA, 879 bp, Drosophila melanogaster
  CDS (1)..(879)
atgttggctctggccaggaattcgtggtgtggccaattgctgtgtcgcgtggcgaacatcgaagcccgctgcccgttctcgaagtcatcatccggcggaaagcaggccgagaagaagggcaagtacaggattgtgatggttcgtcatggagagtccgaatggaatcagaagaacctattctgcggatggttcgatgccaagctatcggagaaggggcagcaggaggcctgtgccgctggcaaagcgctcaaagatgccaaaattgagttcgatgtggcccacacctcggtgctgaccagagcccaggagacactcagggccgccctaaagtccagcgagcacaagaagattccggtgtgcaccacgtggcgcctcaacgagcgccactacggcggactgacgggactgaataaggccgagaccgccaagaagttcggcgaggagaaggttaagatctggcgccgcagctttgacaccccaccgccgccaatggagaaggatcacgagtactacgcctgcattgttgaggatccgcgctacaaggaccaactgaagccggaggagttccccaaatccgagtccctcaagctcaccatcgagcgcaccttgccctactggaacgaggtcatagtgccccagatcaaggatggaatgcgtgtcctgatcgccgcccacggcaacagcctgcggggcgtggtcaagcacttggaatgcatctctgacaaggacattatgagcctcaacctgcccactggcattcctttcgtctacgaactagacgagagcctcaagcctttggccacgttgaagttcctcggcgatccggagacggtgaagaaggcaatggagtcggtggccaaccagggcaaagccaagtga

SEQ ID NO: 152613 - protein, 292 aa, Drosophila melanogaster
MLALARNSWCGQLLCRVANIEARCPFSKSSSGGKQAEKKGKYRIVMVRHGESEWNQKNLFCGWFDAKLSEKGQQEACAAGKALKDAKIEFDVAHTSVLTRAQETLRAALKSSEHKKIPVCTTWRLNERHYGGLTGLNKAETAKKFGEEKVKIWRRSFDTPPPPMEKDHEYYACIVEDPRYKDQLKPEEFPKSESLKLTIERTLPYWNEVIVPQIKDGMRVLIAAHGNSLRGVVKHLECISDKDIMSLNLPTGIPFVYELDESLKPLATLKFLGDPETVKKAMESVANQGKAK

SEQ ID NO: 152614 - DNA, 837 bp, Yersinia pestis KIM
  CDS (1)..(837): transl_table=11
gtgattcggctgattgagcgcagccaacgcacatgcagcttgaagtatgacgggcatataccaaacttaattggagtcaacgttatggcagtaactaagctagttttggtacgacacggcgaaagtcaatggaacaacgaaaaccgcttcaccggttggtatgatgttgatctgtctgaaaaaggccgttctgaagcaaaggcagcgggtaagctgttaaaagatgaaggcttcacttttgatttcgcctacacctcagtattaaaacgcgctatccacaccttgtggaacattttggatgaattagatcaggcatggctgccaacagaaaaaacctggaagcttaacgagcgtcactacggcgcactgcaaggcctgaataaatctgaaacggctgaaaaatacggcgatgagcaggttaagcaatggcgtcgtggctttgccatcacccctccagcactggagaaaagcgatgagcgtttcccaggccatgacccacgttatgcaaaattgactgatgctgagctgccaaccacagaaagcttggcgctgactattgaacgcgtgattccctactggaatgacgttatcaaaccacgtattgccagcggtgaacgcgtaattattgctgctcacggtaactctttacgtgcattggtaaaatatctggatgatctgggcgaagacgaaattcttgagctgaacatcccaactggcgtgccattagtgtatgagtttgatgagaacttcaagcctatcaaacactactatctgggtaacgctgatgaaatcgccgctaaagctgcagcggttgctaaccagggtaaagcgaagtaa

SEQ ID NO: 152615 - protein, 278 aa, Yersinia pestis KIM
MIRLIERSQRTCSLKYDGHIPNLIGVNVMAVTKLVLVRHGESQWNNENRFTGWYDVDLSEKGRSEAKAAGKLLKDEGFTFDFAYTSVLKRAIHTLWNILDELDQAWLPTEKTWKLNERHYGALQGLNKSETAEKYGDEQVKQWRRGFAITPPALEKSDERFPGHDPRYAKLTDAELPTTESLALTIERVIPYWNDVIKPRIASGERVIIAAHGNSLRALVKYLDDLGEDEILELNIPTGVPLVYEFDENFKPIKHYYLGNADEIAAKAAAVANQGKAK

SEQ ID NO: 152616 - DNA, 771 bp, Bifidobacterium longum NCC2705
  CDS (1)..(771): transl_table=11
ttgggcgcacgcggctgtagactgaaccgtatgacttataaactagtactgctccgtcatggacagagcgcatggaataaaactaaccagttcaccggctgggtcgacgtaccgctgaccgagcagggtgaagccgaagccaagcgtggcggcgagctgctcaaggagaagaacgtccttccggacatcgtgttcacctccctgctgcgtcgcgccatcaacaccgccaacatcgctctggatgccgcagatcgtctgtggattccggttcagcgtgactggcgtctcaacgagcgtcactacggcgctctgcagggcaagaacaagaccgagatccgcgaagagtacggcgacgagaagttcatgctgtggcgccgttcttacgccaccccgccgcccgagatcgacccgaacgaccagtacgcccagaacaacgacccgcgctacgccggcgatccggttccggaagccgagtgcctggccaacgttgttgagcgtgtgaagccgtacttcgagtccgctatcgagccggagctcaaggccggcaagaccgtgctgattgctgcccacggcaactccctccgcgccatcgtcaagatgctggacaacctgtctgaggaagagatcgccaaggtcaacatcccgaccgccatcccgctgctctacgagctggacgagaacttcaagccgatcaagccgcgtggcgagtacctggacccggaggctgctgctgccggtgccgccgctgtcgccgctcagggccagaagtga

SEQ ID NO: 152617 - protein, 256 aa, Bifidobacterium longum NCC2705
MGARGCRLNRMTYKLVLLRHGQSAWNKTNQFTGWVDVPLTEQGEAEAKRGGELLKEKNVLPDIVFTSLLRRAINTANIALDAADRLWIPVQRDWRLNERHYGALQGKNKTEIREEYGDEKFMLWRRSYATPPPEIDPNDQYAQNNDPRYAGDPVPEAECLANVVERVKPYFESAIEPELKAGKTVLIAAHGNSLRAIVKMLDNLSEEEIAKVNIPTAIPLLYELDENFKPIKPRGEYLDPEAAAAGAAAVAAQGQK

SEQ ID NO: 152618 - DNA, 762 bp, Drosophila melanogaster
  CDS (1)..(762)
atgacgaaaacaaatcgcttggtgattttgaggcatggcgaaagtgatttcaacattgagaacaaattctgcggttggcatgatgcgccattgagtgaattcggcgtccaggaggccctgactgtggcgattcccgcgctcgtccaatccgagttggaattcgacgtggtctattcatccgtattgagcagatctcgtcaaacggccgaattgatactctccaagttgaactgcgcctatgtgcccattaaggaggattggcggctgtgcgaaaggcactacggaaatctgactggttgccggaaacgagtggtagccgatcgctatggggaggagcaggttcaggcctggcgacgtggatacgactgcgtaccgccgcccatcgatgagaagaaccgctacttctacaccatttgcagcaatcccatattcgatgatgttcctcgcggtgagttccccctcgcggaatcccttcacatgtgcgtcgatcgagtgaaacccgtgtggaaggaggtcaggcgggaagtgttccaaggcacccgggtactaatgtgcgtccacggaactgtggcccgtgctctcgtccagcacattgagggaatctccaacgaggccatcgaaaaggttaacattccaaattgcgtgccacgcgtctatgagttcgatttgaaaacgggaggcttggttggagctgccatcaatctgggggatcaggagtatattaggcggaagacagcccaggtggcagccattggtgactga

SEQ ID NO: 152619 - protein, 253 aa, Drosophila melanogaster
MTKTNRLVILRHGESDFNIENKFCGWHDAPLSEFGVQEALTVAIPALVQSELEFDVVYSSVLSRSRQTAELILSKLNCAYVPIKEDWRLCERHYGNLTGCRKRVVADRYGEEQVQAWRRGYDCVPPPIDEKNRYFYTICSNPIFDDVPRGEFPLAESLHMCVDRVKPVWKEVRREVFQGTRVLMCVHGTVARALVQHIEGISNEAIEKVNIPNCVPRVYEFDLKTGGLVGAAINLGDQEYIRRKTAQVAAIGD

SEQ ID NO: 152620 - DNA, 768 bp, Escherichia coli CFT073
  CDS (1)..(768): transl_table=11
ttgaggagtaagtatatggctgtaactaagctggttctggttcgtcatggcgaaagtcagtggaacaaagaaaaccgtttcaccggttggtacgacgtggatctgtctgagaaaggcgtaagcgaagcaaaagcagcaggtaagctgctgaaagaggaaggttacagctttgactttgcttacacctctgtgctgaaacgcgctattcataccctgtggaatgtgttggacgaactggatcaggcatggctgcccgttgagaaatcctggaaactgaacgaacgtcactacggtgcgttgcagggtctgaacaaagcggaaaccgctgaaaagtatggcgacgagcaggtgaaacagtggcgtcgtggttttgcggtgactccgccggaactgactaaagatgatgagcgttatccggggcacgatccgcgttacgcgaaactgagcgagaaagagctgccgctgacggaaagcctggcgctgaccattgaccgcgtgatcccttactggaatgaaaccattctgccacgtatgaagagcggtgagcgcgtcatcatcgccgcacacggtaactcgttacgtgcgctggtgaaatatctcgataacatgagcgaagaagagattcttgagctgaatatcccgaccggcgtgccgctggtttatgagtttgacgagaacttcaaaccgctgaaacgctattatctgggtaatgctgacgagatcgcggcgaaagcagcggcggttgctaaccagggtaaagcgaagtaa

SEQ ID NO: 152621 - protein, 255 aa, Escherichia coli CFT073
MRSKYMAVTKLVLVRHGESQWNKENRFTGWYDVDLSEKGVSEAKAAGKLLKEEGYSFDFAYTSVLKRAIHTLWNVLDELDQAWLPVEKSWKLNERHYGALQGLNKAETAEKYGDEQVKQWRRGFAVTPPELTKDDERYPGHDPRYAKLSEKELPLTESLALTIDRVIPYWNETILPRMKSGERVIIAAHGNSLRALVKYLDNMSEEEILELNIPTGVPLVYEFDENFKPLKRYYLGNADEIAAKAAAVANQGKAK

SEQ ID NO: 152622 - DNA, 591 bp, Staphylococcus epidermidis ATCC 12228
  CDS (1)..(591): transl_table=11
atggaaatttatttagtgaggcatggtgagtcacagtccaattatgataataaacacgggtatctatatttttgtggacagttagacgtccctttgacggaaaggggtataaaaagcgctaaagaactatctgtttattttaaaaataaatacattgacaatatatatttatcagatttaaaaagaacaaggcaaacgtatgaggagctatttccttatgatattccaacaatatatacaaagacgttaagagagcgttcgttaggtgtttttgaaggggaaaataaagaagaagtttgtaaagacaaacggttcgaaaaatatttccgtgatcctaattataaatactttagacatagcttttcgcaaaaagcaccacaaggagaaagttatcaagatgtctatgatagagtggttactttcattgaaaatgagcttaatcaacagcagaaacgtgtagtgatagttgcgcaccaagttgtaattagatgttttttcgtctattttaaaatgataactaaggaagaagccttagcgacggaaattcataattgctatccatatttaattaaaaaagaaatgaagttttga

SEQ ID NO: 152623 - protein, 196 aa, Staphylococcus epidermidis ATCC 12228
MEIYLVRHGESQSNYDNKHGYLYFCGQLDVPLTERGIKSAKELSVYFKNKYIDNIYLSDLKRTRQTYEELFPYDIPTIYTKTLRERSLGVFEGENKEEVCKDKRFEKYFRDPNYKYFRHSFSQKAPQGESYQDVYDRVVTFIENELNQQQKRVVIVAHQVVIRCFFVYFKMITKEEALATEIHNCYPYLIKKEMKF

SEQ ID NO: 152624 - DNA, 642 bp, Clostridium tetani E88
  CDS (1)..(642): transl_table=11
atggaaatgggtataacattatatataactaggcatggacaaactgagtggaacacagaaagaagaatgcaaggatggaatgattcacctttaacaaaattagggatggagcaggcaaagagattaggaaagcgattagataataataatatagatataatttattctagtccattaggaagggctattaaaacagcaaaaatagttagaggagaaagggatatacctattgtatgtgataatagattaaaagagattaaattaggaaaatgggaaggtatgaatcatgaccttatagacaattattataaagaagagatagacaacttttggaataatcctaaactatacaaatctataggaggagagacatttttacagcttagaaacagagttaaagattttttggaggagattctaaaaaagcataaagatgaaactattcttatagtaactcatgctataacattaaaaggtatcatgaactatatagaagatttaactatagataatttttggggagaaccacatataaatcctacaagtctgacaaaggtagagatagaagattcaaatagaagaatattattgaatgcagatatatcccatttagatgaagtgaaagaaataaagatagtatag

SEQ ID NO: 152625 - protein, 213 aa, Clostridium tetani E88
MEMGITLYITRHGQTEWNTERRMQGWNDSPLTKLGMEQAKRLGKRLDNNNIDIIYSSPLGRAIKTAKIVRGERDIPIVCDNRLKEIKLGKWEGMNHDLIDNYYKEEIDNFWNNPKLYKSIGGETFLQLRNRVKDFLEEILKKHKDETILIVTHAITLKGIMNYIEDLTIDNFWGEPHINPTSLTKVEIEDSNRRILLNADISHLDEVKEIKIV

SEQ ID NO: 152626 - DNA, 789 bp, Drosophila melanogaster
  CDS (1)..(789)
atgcgcgaaattcaggcctcccaatttatgacgaaaacaaatcgcttggtgattttgaggcatggcgaaagtgatttcaacattgagaacaaattctgcggttggcatgatgcgccattgagtgaattcggcgtccaggaggccctgactgtggcgattcccgcgctcgtccaatccgagttggaattcgacgtggtctattcatccgtattgagcagatctcgtcaaacggccgaattgatactctccaagttgaactgcgcctatgtgcccattaaggaggattggcggctgtgcgaaaggcactacggaaatctgactggttgccggaaacgagtggtagccgatcgctatggggaggagcaggttcaggcctggcgacgtggatacgactgcgtaccgccgcccatcgatgagaagaaccgctacttctacaccatttgcagcaatcccatattcgatgatgttcctcgcggtgagttccccctcgcggaatcccttcacatgtgcgtcgatcgagtgaaacccgtgtggaaggaggtcaggcgggaagtgttccaaggcacccgggtactaatgtgcgtccacggaactgtggcccgtgctctcgtccagcacattgagggaatctccaacgaggccatcgaaaaggttaacattccaaattgcgtgccacgcgtctatgagttcgatttgaaaacgggaggcttggttggagctgccatcaatctgggggatcaggagtatattaggcggaagacagcccaggtggcagccattggtgactga

SEQ ID NO: 152627 - protein, 262 aa, Drosophila melanogaster
MREIQASQFMTKTNRLVILRHGESDFNIENKFCGWHDAPLSEFGVQEALTVAIPALVQSELEFDVVYSSVLSRSRQTAELILSKLNCAYVPIKEDWRLCERHYGNLTGCRKRVVADRYGEEQVQAWRRGYDCVPPPIDEKNRYFYTICSNPIFDDVPRGEFPLAESLHMCVDRVKPVWKEVRREVFQGTRVLMCVHGTVARALVQHIEGISNEAIEKVNIPNCVPRVYEFDLKTGGLVGAAINLGDQEYIRRKTAQVAAIGD

SEQ ID NO: 152628 - DNA, 642 bp, Chromobacterium violaceum ATCC 12472
  CDS (1)..(642): transl_table=11
atgactcagcccgttacccgcttctgcctggttcgccacggcgaaaccgactggaaccgcgaataccggctgcaaggccataccgacatccccctcaaccacgccggactggagcaggccagccagctggcccatgccttccggcccgaccacgccttccaggcgctctatgtcagcgacctgatccgcacccggcaaacctcggcgccgctgcaaacccggctgcagttgaacgcccactacacgccgcagctgcgcgagcgccacatgggcgcgctgcagggcctcacttatgcggaagccgccgagcaaattcccgacctctaccgccggcaccaggcgcgcgatcccgacttcgacctggaaggcggcgaaagcctgcgccgtttccgcgcccgcattctggacggtctcgccagcatcgcagccctgcatcccggcgagaacgtgctgatcgtcacccacggcggcgtgctggacatcgtctaccgcgccgccacctcaaaaccattggaagaaaaacgcgacttccccattcccaacgccgcgctgaactggctggactaccaaaacggcggctggacgctgcgccgctgggccgacgaatcccacctcagcagcgcgctggacgaaatccagtaa

SEQ ID NO: 152629 - protein, 213 aa, Chromobacterium violaceum ATCC 12472
MTQPVTRFCLVRHGETDWNREYRLQGHTDIPLNHAGLEQASQLAHAFRPDHAFQALYVSDLIRTRQTSAPLQTRLQLNAHYTPQLRERHMGALQGLTYAEAAEQIPDLYRRHQARDPDFDLEGGESLRRFRARILDGLASIAALHPGENVLIVTHGGVLDIVYRAATSKPLEEKRDFPIPNAALNWLDYQNGGWTLRRWADESHLSSALDEIQ

SEQ ID NO: 152630 - DNA, 786 bp, Corynebacterium diphtheriae NCTC 13129
  CDS (1)..(786): transl_table=11
ttgctcgcgttgctgcgattcgtggcaaacttgacaagtatgactactggaaaactgattcttcttcgtcacggacaaagcgaatggaacgcttccaaccaattcaccggctgggtggacgtcaacctcaccgaaaagggcgaggcagaggctaagcgcggcggcgagctgctcaaggctcagggggtcctgccaagcgtggtgtacacctctttgctgcgccgtgctatccgcaccgccaacattgctctgaacgctgctgatcgccattggatcccagttgttcgcgattggcgcctcaacgagcgccactacggtgcgctgcagggcctgaacaaggctgagactaaggaaaagtacggcgacgagcagttcatggcatggcgtcgttcttatggcaccccaccaccagagcttgaggattccagcgagttctcccaggcaaacgatcctcgttacgccaaccttgacgtggttcctcgcaccgagtgcttgaaggacgttgttgagcgtttcgttccttacttcaaggaagagatcctgccacgtgtgaagaacggtgagactgttttgatcgctgcacacggtaactccctgcgtgcattggtcaagcacctagacaacatctctgatgcagacatcgctgagctcaacatccctaccggtattccactggtttatgagctcgacgaggctggcacggtgctcaacccaggtggcacctaccttgacccagaagctgctgctgccggtgctgccgcagttgctgctcagggcgctaagtag

SEQ ID NO: 152631 - protein, 261 aa, Corynebacterium diphtheriae NCTC 13129
MLALLRFVANLTSMTTGKLILLRHGQSEWNASNQFTGWVDVNLTEKGEAEAKRGGELLKAQGVLPSVVYTSLLRRAIRTANIALNAADRHWIPVVRDWRLNERHYGALQGLNKAETKEKYGDEQFMAWRRSYGTPPPELEDSSEFSQANDPRYANLDVVPRTECLKDVVERFVPYFKEEILPRVKNGETVLIAAHGNSLRALVKHLDNISDADIAELNIPTGIPLVYELDEAGTVLNPGGTYLDPEAAAAGAAAVAAQGAK

SEQ ID NO: 152632 - DNA, 939 bp, Nasonia vitripennis
  CDS (1)..(939)
atgaatcaaaatataatttataaggatttacttttatgctggcttctgtggatggaggctgtatctttgcttctgcaaacttgcatgattctccacaaggttcagattgcagagctacacaagtatccaaagatactacgtcttcaagattgtccgaggaaaataggaaaaaacatgtccaagtaccggattgtgatggttcgccacggcgagagcgagtggaatcagcagaatctcttctgcggatggtacgacgctaatctgtccgagaaaggcaaaagcgaagctgctgcagcaggtaaagcactgaaagaagctggttacaccttcgatgtcgcccatacctctcagttgaccagagcccaggtgactcttgctacaattctgaaggaaattggacaagagaacatcccgatccacaagacctggcgtctgaacgagcgtcactatggtggactgactggaatgaacaaggctgagaccgctgccaagtatggagaggagcaagtacaaatctggagacgatccttcgacacccctccaccaccaatggagccagaccacaagtattacgaaactattgtcaaagatccaaggtacgccgctgagcccaagcctgaggagttccccaagtttgaatctctgaagctgaccattgagaggactctaccatactggaatggtaccatcattcctcaactcaaggaaggaaagaaaatcatcattgctgctcatggtaacagcttgagaggaattgtcaagcaccttgaccaaatgagcaatgatgctatcatgggtctgaaccttccaactggtattccatttgtatacgaactggatgagaacttcaagccagttgtttccatgaagttccttggtgacgaggagaccgtgaaggccgcgatcgcatctgttgctgctcagggcaaagcaaagtga

SEQ ID NO: 152633 - protein, 312 aa, Nasonia vitripennis
MNQNIIYKDLLLCWLLWMEAVSLLLQTCMILHKVQIAELHKYPKILRLQDCPRKIGKNMSKYRIVMVRHGESEWNQQNLFCGWYDANLSEKGKSEAAAAGKALKEAGYTFDVAHTSQLTRAQVTLATILKEIGQENIPIHKTWRLNERHYGGLTGMNKAETAAKYGEEQVQIWRRSFDTPPPPMEPDHKYYETIVKDPRYAAEPKPEEFPKFESLKLTIERTLPYWNGTIIPQLKEGKKIIIAAHGNSLRGIVKHLDQMSNDAIMGLNLPTGIPFVYELDENFKPVVSMKFLGDEETVKAAIASVAAQGKAK

SEQ ID NO: 152634 - DNA, 768 bp, Anopheles gambiae str. PEST
  CDS (1)..(768)
atggccgcaaagtaccgcattgtgatggttcgccacggcgaatcggagtggaaccagaagaatctgttctgcggctggttcgatgctaacctgagcgacaagggtaaggaggaagccctggccgccggaaaggccgtgaaggaggcgggcctgaagttcgacattgcccacacgtcgctactcacccgtgcccaggtcacgctggactcgatcctgaaggagtcgggccaaacgagcatcccgatccagaagacctggcgcctgaacgagcgccactacggtggcctgaccgggctgaacaagtccgaaacggcggccaagtacggcgaggagcaggtgctgatctggcgccgcagcttcgatgtccccccgcccaacatggaaccggaccatgcctactacgatgcgatcgtcaaggacgagcggtacaaggacgacccgaaaccgaacgagttcccgatggccgaatcgctgaagctgacgatcgcccgcaccctgccgtactggaacgacgttatcattccgcagctgaaggagggcaagaacattatcattgccgcgcacggcaacagcctgcgcggtatcgtgaagcatctggaccagatgacggatgaggcgatcatgggcctgaacctacccaccggcatcccgttcgtgtacgagctggacgagaacctgaagccggtcgtgtcgatgaagttcctcggcgatgaggagacggtccgcaaggcgatcgaatccgtcgctaaccagggcaaggccaagtaa

SEQ ID NO: 152635 - protein, 255 aa, Anopheles gambiae str. PEST
MAAKYRIVMVRHGESEWNQKNLFCGWFDANLSDKGKEEALAAGKAVKEAGLKFDIAHTSLLTRAQVTLDSILKESGQTSIPIQKTWRLNERHYGGLTGLNKSETAAKYGEEQVLIWRRSFDVPPPNMEPDHAYYDAIVKDERYKDDPKPNEFPMAESLKLTIARTLPYWNDVIIPQLKEGKNIIIAAHGNSLRGIVKHLDQMTDEAIMGLNLPTGIPFVYELDENLKPVVSMKFLGDEETVRKAIESVANQGKAK

SEQ ID NO: 152636 - DNA, 744 bp, Candida glabrata CBS 138
  CDS (1)..(744)
atgccaaagttagttctagttagacacggtcaatccgaatggaatgaaaagaacttgtttaccggttgggtcgacgttagattgtccgccaagggtgaacaagaagccgctagagccggtgaattgttgaaggagaagaacgtccacccagacatcttgtacacttccaagctatccagagctatccaaaccgctaacattgctttgtccaaggctgacagattgtggatcccagtcaagagatcctggagattgaacgaaagacactacggtgctttgcaaggtaaggacaaggctgaaaccttggaaacttacggtgaagagaagttcaacacctggagaagatccttcgatgtcccacctccagtcatcgaagctgactccccatactctcaaaagaacgatgaaagatacagagacgtcgacccaaatgtcttgccacaaactgaatctttggctttggtcattgacagattgttgccatactgggaagatgttatcgccaaggacttgttggctggtaagaccgttatgatcgccgctcacggtaactccttgagaggtttggtcaagcacttggaaggtatctccgatgctgacattgccaagttgaacatcccaactggtattccattggtcttcgaattggacgaaaacttgaagccatccaagccatcttactacttggacccagaagctgctgctgctggtgccgctgccgtcgctgctcaaggtaagaaataa

SEQ ID NO: 152637 - protein, 247 aa, Candida glabrata CBS 138
MPKLVLVRHGQSEWNEKNLFTGWVDVRLSAKGEQEAARAGELLKEKNVHPDILYTSKLSRAIQTANIALSKADRLWIPVKRSWRLNERHYGALQGKDKAETLETYGEEKFNTWRRSFDVPPPVIEADSPYSQKNDERYRDVDPNVLPQTESLALVIDRLLPYWEDVIAKDLLAGKTVMIAAHGNSLRGLVKHLEGISDADIAKLNIPTGIPLVFELDENLKPSKPSYYLDPEAAAAGAAAVAAQGKK

SEQ ID NO: 152638 - DNA, 960 bp, Candida glabrata CBS 138
  CDS (1)..(960)
atgtcgacgctaaagttgtttatattgaggcatgggcagagtgatttgaaccatgagaatatcttttgtgggtggattgatgctaaattgaccgataaagggcgttcccaggccaagaatgctggtcaattgattgctcagcattgtaagagcaatggtattacgttgcctcagatcggttttacttccagactgctcagaaccgagcaaactatggatgttatcctcaatgagctgcaattggggaagaaagacgaggtaagtggtcaattcaataatcccgtgtttgtggtatttgactatatctatacattggctgagataagaagctatctgttgagtgagaaggaagagaaccctataagtaatgaaatccctgtattgaggacatggaggctcaatgaaagacactacggtgcttggcaggggcaaagaaagccaaaagtcttgaaagaatatggtgaagaacagtacatgtacattcgaagagactataacggcaggccaccagaagttgatctcgagaaagagatgattcagaaacatgacttaggtgctgccactggttatgagttcaaagaacccaacaggtcattgaaatacgagttagaagaactaaaccagaatattaagctaccgtactcagagtccctttctgatgtggtggctagattagaacctttccttgacgagattatcttgaaagtggctaaagaatttgatcttgactcctgtctaattgttggtcacggtagctctgttagatccctgttgaaaattctcgaaggtgtttctgatgaagatatcaaaggagttgacattccaaatggtattccattggttatagaattggacaagacgaacaacttcaagtttttaagaaaatactacctggaccctgagcttgctaagatcaatgctgaaaaagtgcgtaaggaaggttttgaagaaaacccttag

SEQ ID NO: 152639 - protein, 319 aa, Candida glabrata CBS 138
MSTLKLFILRHGQSDLNHENIFCGWIDAKLTDKGRSQAKNAGQLIAQHCKSNGITLPQIGFTSRLLRTEQTMDVILNELQLGKKDEVSGQFNNPVFVVFDYIYTLAEIRSYLLSEKEENPISNEIPVLRTWRLNERHYGAWQGQRKPKVLKEYGEEQYMYIRRDYNGRPPEVDLEKEMIQKHDLGAATGYEFKEPNRSLKYELEELNQNIKLPYSESLSDVVARLEPFLDEIILKVAKEFDLDSCLIVGHGSSVRSLLKILEGVSDEDIKGVDIPNGIPLVIELDKTNNFKFLRKYYLDPELAKINAEKVRKEGFEENP

SEQ ID NO: 152640 - DNA, 861 bp, Kluyveromyces lactis NRRL Y-1140
  CDS (1)..(861)
atgagattgtatgttttaaggcacggccaaagtgaagtaaaccaaagaaacatatttgggggatgggtagatgttcatctgactgaaaagggtctagatcaggccaggaatagcgccattcttattaaagcatactgtcaatcgcaaggtttggagctacccaagcttggttatacttccagattgatcagaacagaagagaccatgaatgagattctcaaagagtttggcaaacagcctgaatttcgtatcgtcagcggtgagctaccaccgcaacagacatcagataatggtaaattcccagtttatcagagctggagattgaatgaaagacactacggttcatggcagggtcaaagtaaacataaaatgttggaagagtatggtgaagaacagtatatgtatatcagaagagattacctcggaaaacctccaaaagcagatttaaacagggagatggtacaagatttcgaccaaggtgatacaggatatgaatttaaagaaccaaacaggcatgttaaatatttggaggaagagattactcatgatgaattgcccaatggtgagtctttgtgcgatgtcgttcaaagattgaaaccattgcttgaaaatatgattcttccgaacttgaaggaacgtggtgacagccttatagtcggtcatggaagcacagtccgttcactcttaaagattttagaaggcattagcgatactgacattaaggaagtcaatattcctaatgccattccttcagtcattgaactagatgataatttcagatttattagaaaattctacttagacccagaaagtgccaaagtcaatgcagaattagttcgccaggaaggattcaaggaataa

SEQ ID NO: 152641 - protein, 286 aa, Kluyveromyces lactis NRRL Y-1140
MRLYVLRHGQSEVNQRNIFGGWVDVHLTEKGLDQARNSAILIKAYCQSQGLELPKLGYTSRLIRTEETMNEILKEFGKQPEFRIVSGELPPQQTSDNGKFPVYQSWRLNERHYGSWQGQSKHKMLEEYGEEQYMYIRRDYLGKPPKADLNREMVQDFDQGDTGYEFKEPNRHVKYLEEEITHDELPNGESLCDVVQRLKPLLENMILPNLKERGDSLIVGHGSTVRSLLKILEGISDTDIKEVNIPNAIPSVIELDDNFRFIRKFYLDPESAKVNAELVRQEGFKE

SEQ ID NO: 152642 - DNA, 744 bp, Kluyveromyces lactis NRRL Y-1140
  CDS (1)..(744)
atgccaaagttagttttagtcagacacggtcaatccgaatggaacgaaaagaacttattcaccggttgggtcgatgttaagttgtccgccaagggtgaacaagaagctgccagagctggtgaattgttgaaggaaaacaacgttaatccagatatccttttcacttccaaattgaccagagctatccaaaccgctaacattgctttggaaaaagctgacagattgtggattcctgtcgttagatcctggagattgaacgaaagacactacggtgctctacaaggtaaggacaaggctgccactttggaacaatacggtgaagaacaattcaccacctggagaagatccttcgatatcccacctccagttatcgaagacgactctccattctctcaaagcaacgacccacgttacggtgacgttgacccaagtgtcttgccaaagaccgaatccttggctctagtcattgacagattgttgccatactggcaagacagcatctcttccgagttgctacaaggtaagaccgtcatgatcaccgcccacggtaactctttgagagctttggtcaagcatttggaacacatctccgatgctgacattgctaagttgaacattccaaccggtatcccattggtgttcgatttggacgaaaacttgaagccaaccaagccttcttactacttggacccagaagctgctgctgcaggtgctgccgcagtcgctgctcaaggtaagaaatag

SEQ ID NO: 152643 - protein, 247 aa, Kluyveromyces lactis NRRL Y-1140
MPKLVLVRHGQSEWNEKNLFTGWVDVKLSAKGEQEAARAGELLKENNVNPDILFTSKLTRAIQTANIALEKADRLWIPVVRSWRLNERHYGALQGKDKAATLEQYGEEQFTTWRRSFDIPPPVIEDDSPFSQSNDPRYGDVDPSVLPKTESLALVIDRLLPYWQDSISSELLQGKTVMITAHGNSLRALVKHLEHISDADIAKLNIPTGIPLVFDLDENLKPTKPSYYLDPEAAAAGAAAVAAQGKK

SEQ ID NO: 152644 - DNA, 762 bp, Debaryomyces hansenii CBS767
  CDS (1)..(762)
atggctgtccataaattaataatattacgtcacggagaatcggaatggaatcatgaaaacaggttctgtgggtggatcgatataccattaagtgaaaagggccgggatgaggccaagtttgctggccacttgattcaaaagtacaatcttaaaccaacaattacttacacatcgaaattgacgagatcgatacagacaggcgacattattctcgaagaattgggccggttgtggtgcgatgttgtgaagacatggaggttgaatgaaagacactacggggcattccaagggagagataagaacgaggtgtaccgtgaattgggcgcggaaaagtaccagtatatcagaagaaactacaacgggacaccaccaccaatggaaactcaatataaggatgattgtatcgatgagaggtacgaagtggatgatgttgatattgcagatcttccacgaggcgaatcgttgaagttagtgatggagagagtgattccgtatttacggaaggaaattgttgaaggaagcttaattggcgacaataagacggtgcttgtggtaacacacggaagtatagtgaggagcgtgattaagtatttcaagggtgtgagtgatgctgatatctcgaagatcaacgttcctaccggggttccgatggtgtttgaattggatgacgattgtaacatggtgaaggactactactatcttgatccagagttggcaaagaaaggaattgagaaggtaagcaacgagggcaccaaaaaatag

SEQ ID NO: 152645 - protein, 253 aa, Debaryomyces hansenii CBS767
MAVHKLIILRHGESEWNHENRFCGWIDIPLSEKGRDEAKFAGHLIQKYNLKPTITYTSKLTRSIQTGDIILEELGRLWCDVVKTWRLNERHYGAFQGRDKNEVYRELGAEKYQYIRRNYNGTPPPMETQYKDDCIDERYEVDDVDIADLPRGESLKLVMERVIPYLRKEIVEGSLIGDNKTVLVVTHGSIVRSVIKYFKGVSDADISKINVPTGVPMVFELDDDCNMVKDYYYLDPELAKKGIEKVSNEGTKK

SEQ ID NO: 152646 - DNA, 747 bp, Debaryomyces hansenii CBS767
  CDS (1)..(747)
atggttaaattaatcttagttagacacggacaatccacatggaacgaaaagaacttattcaccggttgggttgattgtcgtttgtccgacattggtgaaaaggaagctgccagagctggtgaattattaaaggaagccaacttaaagggtgacgttttatacacctccaagttatctagagctattcaaactgccaacattgctttgaacactgctgatcaattgtacattccagtcaagagatcgtggagattaaacgaaagacactacggtgctttacaaggtaaggataaggctgccaccttagaagaatacggtcaagaaaagttccaaacttggagaagatcatttgacgttccaccaccagtcatcgccgatgactctgagttctcccaagctggtgacgaacgttacagagacgtcgacccatctgtattaccaaagaccgaatctttgaaattggttatcgacagattgttgccatactggcaagacgaaatctctaaggacttattggaaggtaagactgtcattgtcgctgcccacggtaactccttaagagcattggttaagcacttggacaacatctctgatgacgatattgccggcttaaacattccaaccggtattccattagtttatgaattagacgaaaaattacaaccaaccaagccagcttactacttagacccagaagctgctgctgctggtgccgctgctgttgctgcccaaggttcaaagaaataa

SEQ ID NO: 152647 - protein, 248 aa, Debaryomyces hansenii CBS767
MVKLILVRHGQSTWNEKNLFTGWVDCRLSDIGEKEAARAGELLKEANLKGDVLYTSKLSRAIQTANIALNTADQLYIPVKRSWRLNERHYGALQGKDKAATLEEYGQEKFQTWRRSFDVPPPVIADDSEFSQAGDERYRDVDPSVLPKTESLKLVIDRLLPYWQDEISKDLLEGKTVIVAAHGNSLRALVKHLDNISDDDIAGLNIPTGIPLVYELDEKLQPTKPAYYLDPEAAAAGAAAVAAQGSKK

SEQ ID NO: 152648 - DNA, 744 bp, Yarrowia lipolytica CLIB122
  CDS (1)..(744)
atgcctaaactgattctgctgcgacacggccagtccgactggaacgagaagaacctgttcaccggatgggtcgacgtcaagctctccgagctcggccacaccgaggccaagcgagccggtactctgctcaaggagtccggtctcaagccccagattctctacacctccgagctctctcgagccatccagaccgccaacattgctctggatgaggccgaccgactgtggatccccaccaagcgatcgtggcgactcaacgagcgacactacggcgctctgcagggcaaggacaaggccgccactctcgccgagtacggccccgagcagttccagctctggcgacgatcttttgacgtccctcctccccctatcgctgacgacgacaagtggtctcagtacaacgacgagcgataccaggacatccccaaggatattctgcccaagaccgagtctctgaagctcgtgattgaccgactccttccttactacaactccgacattgtccccgaccttaaggccggcaagaccgtcctcattgctgcccacggaaactccctccgagctctcgtcaagcacctcgacggtatctccgatgacgatatcgccgcccttaacatccccaccggtatccccctggtctacgaccttgatgacaacctcaagcctaccaaggccgccgagtacctcgaccccgaggccgccgctgccggtgccgctgcggttgccaaccagggtaagaagtaa

SEQ ID NO: 152649 - protein, 247 aa, Yarrowia lipolytica CLIB122
MPKLILLRHGQSDWNEKNLFTGWVDVKLSELGHTEAKRAGTLLKESGLKPQILYTSELSRAIQTANIALDEADRLWIPTKRSWRLNERHYGALQGKDKAATLAEYGPEQFQLWRRSFDVPPPPIADDDKWSQYNDERYQDIPKDILPKTESLKLVIDRLLPYYNSDIVPDLKAGKTVLIAAHGNSLRALVKHLDGISDDDIAALNIPTGIPLVYDLDDNLKPTKAAEYLDPEAAAAGAAAVANQGKK

SEQ ID NO: 152650 - DNA, 768 bp, Anopheles gambiae str. PEST
  CDS (1)..(768)
atgcataaagcagcgtacagtgttaccttcgttcgtcacggcgaaagcgaatggaataagatgaacctcttctgcggttggcacgacgtcggtctcagtgaggaaggtgaatgggacgcgttggaagtgtcggcagcagcactgaagcgggaaaacatgcgttacgacatcgcgttcacttcctgtctgcgccgagctaaccaaactctggacattattctaaaggagctcaatctcaccgacattcctgtgaggcagctgtggcgcctaaacgaacgtcactacggtgctctgaccgggtttaacaagcgccagatggccgacatctacggcgaagagcaggtacaggtgtggcggcgcagcttcaacgtcccaccaccagccatcgaaccaaccaacccgtattatcacgcgatcaagaacaatcctcgactgcggcacattagcgagcaggatttccccacgaccgaaacactcgaaacgaccatggagcgagtcgtgccggagtggacggactcgatcataccggagatccgtggcggcaagcgggtactggttgtggcccatggtaccagtctgcgcggtttggtgaagcacattcaaggtatttcagacgcggacatcatgaagttcaacctaccgaacagtattccgttcataatagatttcgacgagtcgatgaagatggtgggcggcatccggttcctggcgaacgacgacaccgtgctgaaggccatggagaaggtggcctcgatcggtggaaagtag

SEQ ID NO: 152651 - protein, 255 aa, Anopheles gambiae str. PEST
MHKAAYSVTFVRHGESEWNKMNLFCGWHDVGLSEEGEWDALEVSAAALKRENMRYDIAFTSCLRRANQTLDIILKELNLTDIPVRQLWRLNERHYGALTGFNKRQMADIYGEEQVQVWRRSFNVPPPAIEPTNPYYHAIKNNPRLRHISEQDFPTTETLETTMERVVPEWTDSIIPEIRGGKRVLVVAHGTSLRGLVKHIQGISDADIMKFNLPNSIPFIIDFDESMKMVGGIRFLANDDTVLKAMEKVASIGGK

SEQ ID NO: 152652 - DNA, 939 bp, Apis mellifera
  CDS (1)..(939)
atgtttttatctaacattttgaataaagcactcgtacaattaaaaaatacgataggtggtgggggctttcaattgaaccagttgggcagaaatattgaacagagatctgtgcttacgaatcgtgtgcttatttcgtttttacgtggaattagctctggtaaaaaaagtaaaaaaatgtccaaatatacgattgtaatggtacgtcatggagaaagtgaatggaataaattgaatttattttgtggatggtatgattcccatttatccgataaaggtaagattgaagcaatttcagcaggaaaagcaatcagagacgcaaaattcacttttgatattgctcatacatcattattatcaagggctcaagatactcttaaagcaattcttaaagaaataggacaagaaaacattactgttcaaaagacatggcgattaaatgaacgtcattatggaggtttgactggtttaaataaagctgaaactgctgctaaatatggtgaagaacaagttcaaatttggagaagatcttttgatacacctcctccacctatggaaccagatcataaatattatgaaataatagtaaatgatcctagatatgcaaatgatccaaaaccagaggaatttcctaaatttgagtctctcaaattaacaattgaaaggacattaccatattggaataatactattattcctcaattaaaagaagggaaaagaattatcatagctgctcatggaaatagtttgcgtggcatagttaaacatttagatgaaatgagtaacgatgaaatcatgaaattaaatttaccaactggtattccatttgtttatgaattagatgaaaatttcaagcctgttgtatctatgaaattcttaggcgatgaagaaactgtaaaagcagcaatggctgcagttgctgcacaagcaaaagttaaataa

SEQ ID NO: 152653 - protein, 312 aa, Apis mellifera
MFLSNILNKALVQLKNTIGGGGFQLNQLGRNIEQRSVLTNRVLISFLRGISSGKKSKKMSKYTIVMVRHGESEWNKLNLFCGWYDSHLSDKGKIEAISAGKAIRDAKFTFDIAHTSLLSRAQDTLKAILKEIGQENITVQKTWRLNERHYGGLTGLNKAETAAKYGEEQVQIWRRSFDTPPPPMEPDHKYYEIIVNDPRYANDPKPEEFPKFESLKLTIERTLPYWNNTIIPQLKEGKRIIIAAHGNSLRGIVKHLDEMSNDEIMKLNLPTGIPFVYELDENFKPVVSMKFLGDEETVKAAMAAVAAQAKVK

SEQ ID NO: 152654 - DNA, 786 bp, Candida albicans SC5314
  CDS (1)..(786): transl_table=12
atgggggttcataaattaataattctaagacatggagaatcacaatggaatcatgagaataaattctgtggatggattgatattccattatcacaaaagggcaaacaagaagcaatttatgctggagaattaatcaaaaagaaccatcttgatcctgatatcttatatacatcgaaattaatgcgatcaatagaaactggattgacaattttggaagtattacacaaaccatggattgatcatatcaaaacttggagattgaatgaacgacattatggtcaatatcaaggaagagataaacatgaagtgtttgttgaattgggtaaagataaagagaaattccaatatattagaagagattatcatggattgccacccttaatagaatatggtcaagataaatcaattgatgaaaaatacaaggatgtattgaataaagatatattacctcgaggagaatcattactgatggtgatggacagattgattccgtttttcaaatatgaaatattagataatcaaatgattcaattgaataaaactgttttgatagtgactcatggttcaattgttagaagtttgatcaaatatcttaatcatgtaagtgatgatgatatatccaagattaatgtccctacaggtataccattggtatttgaattgaatgatagaggtgaattgatcaaaccttattattatttggatcaagaaaaggcagaaaaggggatcgccaaagtgaaaatggaaggtcttgaaagaaaaggacaaacagatgaaaaactataa

SEQ ID NO: 152655 - protein, 261 aa, Candida albicans SC5314
MGVHKLIILRHGESQWNHENKFCGWIDIPLSQKGKQEAIYAGELIKKNHLDPDILYTSKLMRSIETGLTILEVLHKPWIDHIKTWRLNERHYGQYQGRDKHEVFVELGKDKEKFQYIRRDYHGLPPLIEYGQDKSIDEKYKDVLNKDILPRGESLSMVMDRLIPFFKYEILDNQMIQLNKTVLIVTHGSIVRSLIKYLNHVSDDDISKINVPTGIPLVFELNDRGELIKPYYYLDQEKAEKGIAKVKMEGLERKGQTDEKL

SEQ ID NO: 152656 - DNA, 747 bp, Candida albicans SC5314
  CDS (1)..(747): transl_table=12
atgccaaagttagttttagttagacacggtcaatccgaatggaatgaaaagaacttgttcaccggttgggttgacgtcagattatccgaaactggtcaaaaagaagctaaaagagctggtgaattattgaaagaagctggtatcaatgttgatgttttgcacacctccaaattatccagagccatccaaactgccaacattgccttggatgctgctgatcaattgtacgttccagtcaagagatcttggagattgaatgaaagacactatggtgctttacaaggtaaagacaaagctcaaactttggaagcttacggtcaagaaaaattccaaatctggagaagatcttttgatgttccaccaccaaagattgatccaaaagatgagtactcccaagtcggcgacagaagatacgctgacgttgatccagctgttgttccattgactgaatcattagctttggtcatcgacagattgttgccatactggcaagacgaaattgctggtgacttgttggctggtaaagttgtcttaattgctgctcacggtaactccttgagagctttagttaaacacttggacaacatctctgatgaagatattgccggattgaacattccaactggtattccattggtttacgagttagacgaaaacttgaaaccaactaaaccttcttactacttggacccagaagctgctgctgccggtgctgctgctgttgctgctcaaggtcaaaagaaataa

SEQ ID NO: 152657 - protein, 248 aa, Candida albicans SC5314
MPKLVLVRHGQSEWNEKNLFTGWVDVRLSETGQKEAKRAGELLKEAGINVDVLHTSKLSRAIQTANIALDAADQLYVPVKRSWRLNERHYGALQGKDKAQTLEAYGQEKFQIWRRSFDVPPPKIDPKDEYSQVGDRRYADVDPAVVPLTESLALVIDRLLPYWQDEIAGDLLAGKVVLIAAHGNSLRALVKHLDNISDEDIAGLNIPTGIPLVYELDENLKPTKPSYYLDPEAAAAGAAAVAAQGQKK

SEQ ID NO: 152658 - DNA, 621 bp, Ustilago maydis 521
  CDS (1)..(621)
atggttggaactctcgtccttacacgccacggtcaatccgagtggaacaagctgaacctgtttaccggatggaaggaccctgctctcaccgagcttggtcgcgaggaggcactcactggtgccaagcgagtcgctgctacgggcatcaagttcgacgtggcgttcacttcggctctgcagcgagcgcagaccacgctcggtatccagctcaaggagattggtcaggaggacatccctatccacaaggaccaggctctgaacgagcgcgactatggcgagcttagcggtctcaacaaggacgacgctaggaagaagtggggcgaggaccaggtgcacatctggcgcagaagctacgacatcccgcctcccggtggtgagagcttgaagctcaccgccgaacgtgtctggccatactaccacaaggaaatcttgccgcttgtcaaacagggcaaaaacgtcatcgtcgccgcccacggtaactcgttgagggccatgatcaaggatatcgagaacatctcggacgacgacatcgtcggcctcgaactcgctaccggtgttcccatcctgtacaaactcgactcggatggaaaggtcgtttccaaggagatcctccagggctaa

SEQ ID NO: 152659 - protein, 206 aa, Ustilago maydis 521
MVGTLVLTRHGQSEWNKLNLFTGWKDPALTELGREEALTGAKRVAATGIKFDVAFTSALQRAQTTLGIQLKEIGQEDIPIHKDQALNERDYGELSGLNKDDARKKWGEDQVHIWRRSYDIPPPGGESLKLTAERVWPYYHKEILPLVKQGKNVIVAAHGNSLRAMIKDIENISDDDIVGLELATGVPILYKLDSDGKVVSKEILQG

SEQ ID NO: 152660 - DNA, 771 bp, Tribolium castaneum
  CDS (1)..(771)
atggcaccgtataaaatcgtaatggtccgtcacggcgaatcagaatggaaccaaaaaaaccttttttgtggttggtacgacgcaaaattgagcgaaaaaggtaaacaagaagcggcaaacgccggcaaaaccctcaaagacgccggctataaattcgaccaagcttacacttcggtcctaagtcgagcacaagacactcttcagattatcttaaaaacgctaaatcaatgcgatattcccattcaaacgacatggcgtctcaatgaacgtcattacggcgcattaaccggccttaacaaaactgaaactgccgccaaatacggcgaacaacaagtggccatttggaggcggagttttgacgtaccgccgccccccatggaaaatgaccatccacactataaagacatcgtatgcgatccgagatacaaaaacggaccgcctcctgaacaattccccaaatttgaatcgctcaaattgacaattgaacgaactttgcccttttggaacgaaactattgtaccacaaattaaagccgggaaaagaattctgattgcagcgcacggaaatagtctaagaggaatcgtcaaacatttagatcaacttaatgatgaacaaataatgggacttaatctaccgactggaattccattcgtttatatgctgcaagagaacatgaaaccagcacaaggaggcagtttgcaatttttaggcgatccagaaacggtcaagaaggccatggaagccgtagccaaccaaggaaaagccaaataa

SEQ ID NO: 152661 - protein, 256 aa, Tribolium castaneum
MAPYKIVMVRHGESEWNQKNLFCGWYDAKLSEKGKQEAANAGKTLKDAGYKFDQAYTSVLSRAQDTLQIILKTLNQCDIPIQTTWRLNERHYGALTGLNKTETAAKYGEQQVAIWRRSFDVPPPPMENDHPHYKDIVCDPRYKNGPPPEQFPKFESLKLTIERTLPFWNETIVPQIKAGKRILIAAHGNSLRGIVKHLDQLNDEQIMGLNLPTGIPFVYMLQENMKPAQGGSLQFLGDPETVKKAMEAVANQGKAK

SEQ ID NO: 152662 - DNA, 771 bp, Tribolium castaneum
  CDS (1)..(771)
atggccccgtacaaaattgtgatggttcgtcatggcgagtccgaatggaacgaaaagaatctgttttgtgggtggtacgatgcaaatctcagcgaaaaaggcaaacaggaagctgtcagcgccggaaaagccctcaaagacgccggttacaaattcgacattgcctacacatcagtattaacacgcgcccaaaataccctccaatcaattttgaaggaaattgggcaaacagacctgccagtggtgaagacctggcggctgaacgagcgccattatgggggcctgaccgggctaaacaaggccgaaacggccgccaaatacggcgatgagcaggtggctatttggcggcgcagcttcgacgttccgcccccagccatggaaccggaccacccctactacgaaaacatcgtcaaggacccccgctacaaggacggaccggcccctgatcagttcccgaaatatgagtcactcaagctcacaattgagcgcactcttcccttctggaacgacacaatcgttcccgaaattaaagccggcaaacaaatcctcattgccgcccatgggaacagtctgcgtggcatcgtcaaacatttggatcaaatgagtgacgagcaaattatgaaactgaaccttcccactggcataccatttgtctacatcttggatgagaacctcaaacccacagctaatggcagtcttcagttcttgggggatccagaaacagttaaaaaggccatggaagcggtggccaaccaaggcaaagccaagtaa

SEQ ID NO: 152663 - protein, 256 aa, Tribolium castaneum
MAPYKIVMVRHGESEWNEKNLFCGWYDANLSEKGKQEAVSAGKALKDAGYKFDIAYTSVLTRAQNTLQSILKEIGQTDLPVVKTWRLNERHYGGLTGLNKAETAAKYGDEQVAIWRRSFDVPPPAMEPDHPYYENIVKDPRYKDGPAPDQFPKYESLKLTIERTLPFWNDTIVPEIKAGKQILIAAHGNSLRGIVKHLDQMSDEQIMKLNLPTGIPFVYILDENLKPTANGSLQFLGDPETVKKAMEAVANQGKAK

SEQ ID NO: 152664 - DNA, 630 bp, Clostridium thermocellum ATCC 27405
  CDS (1)..(630): transl_table=11
gtgacagtattgtatctggttcgccacggccaaaccgactggaacaaggaaaatcgatgtcagggacgtatagacacggaacttaacagtgaaggaattcttcaggctgaagccatagctcaaagacttgccggtgaaaacatagacgttatttattccagtgccttaaaaagagcctacaccaccgctgagattataaaccgcaagctgtccagagagcttgtcagaaatgaggcattaaacgaaattgattttggcgaatgggaaggcctgacgtttgaagaaatgcgaaagcgccctgattatagttatgagcagtggaggctgatgccccatcttgtcacatttcccggaggagagaaaagccttaaaaacgtccaggacagggccatgaaatttgttaatgaaataattgaaaagcataatggaaataatattttaatagtatcccatggcggtgttataaaattaattatattgggcatgctgggtataggccttgaggcttataacaaatttttcatcgcaaatgcatccttgagtattgttgttattgaaagtgacagagcattcttaagaacgcttaatgacacatgccatattaaaaatttgattaccgctaaatcttga

SEQ ID NO: 152665 - protein, 209 aa, Clostridium thermocellum ATCC 27405
MTVLYLVRHGQTDWNKENRCQGRIDTELNSEGILQAEAIAQRLAGENIDVIYSSALKRAYTTAEIINRKLSRELVRNEALNEIDFGEWEGLTFEEMRKRPDYSYEQWRLMPHLVTFPGGEKSLKNVQDRAMKFVNEIIEKHNGNNILIVSHGGVIKLIILGMLGIGLEAYNKFFIANASLSIVVIESDRAFLRTLNDTCHIKNLITAKS

SEQ ID NO: 152666 - DNA, 591 bp, Clostridium thermocellum ATCC 27405
  CDS (1)..(591): transl_table=11
atgttggaattgattttggtgaggcatggtgaaacagacagcaataaaagaggaacttatctcgggtggactgacgtggagctgaacagcaacggtatacgccaggcctgtgcaatccgggacaggctcaaacctgtcaaagttgatgcgatatattcaagcccgtttaaaaggactgtaaagacagctgaaataattaacgaaaactacggccttgagataataatctcggacaatttgaaggagagaaattttggaatatgggatgatttaacctttgaagaaatttcctcaaaatatcccgctgaatgcagaaagtggtttgaggactggataaactttcgaatgaagaacggggagagtgccaaagatacatatgacagagtcgttgcatttgttgaggaaattattaactcgaagaaggagggacgctgtctgatagtaacccaccttggaacaataaggttcatgctgtcatatttgatgggtatgaaaattgaagattcatggaagttcagagtggacaactgcagtattacaaaagtggaaatcagagacggatatccggttttgacacttcttaacggatga

SEQ ID NO: 152667 - protein, 196 aa, Clostridium thermocellum ATCC 27405
MLELILVRHGETDSNKRGTYLGWTDVELNSNGIRQACAIRDRLKPVKVDAIYSSPFKRTVKTAEIINENYGLEIIISDNLKERNFGIWDDLTFEEISSKYPAECRKWFEDWINFRMKNGESAKDTYDRVVAFVEEIINSKKEGRCLIVTHLGTIRFMLSYLMGMKIEDSWKFRVDNCSITKVEIRDGYPVLTLLNG

SEQ ID NO: 152668 - DNA, 747 bp, Mycobacterium sp. JLS
  CDS (1)..(747): transl_table=11
atgggagattccacgctgatcctgcttcgtcacggcgaaagtgaatggaacgcgaagaacctgttcaccggctgggtcgacgtcgacctgaccgacaagggccgggccgaggccacgcgggccggtgagctgatcgccgatctggaccggttgcccgacgagctgtacacctcgctgctgcggcgcgcgatcaccacggccaacatcgcgttggacaaggcggaccggcactggatcccggtgcaccgggactggcggctcaacgagcggcactacggggcgctgcaggggctgaacaaggccgagaccaaagagaagtacggcgaagagcagttcatggcctggcggcgcagctacgacaccccgccgccgccgatcgaggccggcagcgagtacagccaggaccgcgatccccgctacgccgacatcgacggcggaccgctcacagaatgcctggccgacgtggtggcccgcttcgtgccctacttcgagcagacgatcgtgccggatctgcgcgagggcaagaccgtgctgatcgcagcgcacggcaactcactgcgtgcgctggtcaagtacctcgacggcatgtccgacgaggacgtggtcgggctgaacatcccgaccggcataccgctgcgctacgacctggactccgatctgaagccgacggtggcaggcggcacgtacctcgatccggaggccgcggcggccggcgcggcggccgtggcatcccagggcgcgaagtaa

SEQ ID NO: 152669 - protein, 248 aa, Mycobacterium sp. JLS
MGDSTLILLRHGESEWNAKNLFTGWVDVDLTDKGRAEATRAGELIADLDRLPDELYTSLLRRAITTANIALDKADRHWIPVHRDWRLNERHYGALQGLNKAETKEKYGEEQFMAWRRSYDTPPPPIEAGSEYSQDRDPRYADIDGGPLTECLADVVARFVPYFEQTIVPDLREGKTVLIAAHGNSLRALVKYLDGMSDEDVVGLNIPTGIPLRYDLDSDLKPTVAGGTYLDPEAAAAGAAAVASQGAK

SEQ ID NO: 152670 - DNA, 747 bp, Herminiimonas arsenicoxydans
  CDS (1)..(747): transl_table=11
atgtacaaaatcgtattgatgcgccacggcgagtccacatggaacctcgataatcgctttaccggctgggccgatgtcgatttgactgaaaaaggttgtgctgaagcaaagcacgccggcaaattgctgcgcgatgcaggatttaccttcgacctggcttattcatccgtgctgaaacgcgccatccgcaccatgtggatcacgctggacgaaatggatctgatgtggatacccgtcgtctgcgactggcacctgaacgaacgccattacggcgcgctgcagggcatgaacaaggctgaaaccgccagcaaatacggcgccgaccaagtcttgcaatggcgtcgtagctacgacacccctcccaaactgctggctgaggacgatccgcgcaccatgtacaaggatccgcgctatgccaccctgaagcgtgaagaaattccgcttggcgaatgcctgaaagacacgctgctgcgtgtggaaccgtactggaacgacaccatcgtgccatccatacgggccggcaggcagatcatcatctcggcgcacggcaacagcctgcgcgccctgatcaagatactcgacgacatcagcgatcaggatattgtttcgctgagcatcccgaacggccgccctatcgtgtatgaactggatgacaatctgaaacccatccgtcattactacctgggtgatcaggaatcgctggcagcagccgtccaggcggccgccagccacggaccagtgccataa

SEQ ID NO: 152671 - protein, 248 aa, Herminiimonas arsenicoxydans
MYKIVLMRHGESTWNLDNRFTGWADVDLTEKGCAEAKHAGKLLRDAGFTFDLAYSSVLKRAIRTMWITLDEMDLMWIPVVCDWHLNERHYGALQGMNKAETASKYGADQVLQWRRSYDTPPKLLAEDDPRTMYKDPRYATLKREEIPLGECLKDTLLRVEPYWNDTIVPSIRAGRQIIISAHGNSLRALIKILDDISDQDIVSLSIPNGRPIVYELDDNLKPIRHYYLGDQESLAAAVQAAASHGPVP

SEQ ID NO: 152672 - DNA, 720 bp, Herminiimonas arsenicoxydans
  CDS (1)..(720): transl_table=11
atgggtaatctggtgattgttcgccatggcgaatcacagtggaacagggaaaaccgctttaccggctggaccgatatcgatttgaccgccaatggtattcaacaggcacgcaatgccggtcgcgcgctggccgaagccgggttccgcttcgaccttgccctcacctccatgctgaaaagaaccatccgttcacagtggttgatgctggacgagatggatgcgatgtatatccctatcatcagtcactggcgccttaatgagcggcattacggcgcactgaccggtcagaaccgcgcggaaaccatcgccagatttggcgaagaacaagtgtggaaatggcggcgcggcttcgacagccagccgccgctgatggatgcagacgatccgcgcgcaccgtggcgcgagccgcgttatcagggtattccgcgcgactctctgccgctcggcgaatcgctgaaggaaaccgtggagcgcgtgcgcgtattctgggatgaggtcatcgtaccggccttgaagcaggacaagaacgtgatcatttcctcgcatggcaatagtcagcgcgcgctggttaagctgctggaagatatgtcggaggaagaagtggcgcgcttcgatgtgccgaacagcgtgccgctggtatacaaactggataccggcttgcgggtgctgtcccgcagttcgatgagtattccgcacccggaagtgtcggcgatactttaa

SEQ ID NO: 152673 - protein, 239 aa, Herminiimonas arsenicoxydans
MGNLVIVRHGESQWNRENRFTGWTDIDLTANGIQQARNAGRALAEAGFRFDLALTSMLKRTIRSQWLMLDEMDAMYIPIISHWRLNERHYGALTGQNRAETIARFGEEQVWKWRRGFDSQPPLMDADDPRAPWREPRYQGIPRDSLPLGESLKETVERVRVFWDEVIVPALKQDKNVIISSHGNSQRALVKLLEDMSEEEVARFDVPNSVPLVYKLDTGLRVLSRSSMSIPHPEVSAIL

SEQ ID NO: 152674 - DNA, 624 bp, Bradyrhizobium sp. ORS278
  CDS (1)..(624): transl_table=11
atgagcgaacgtctcctggtgctggtgcgccacggccagagcgagtggaacctgaagaacctgttcaccggctggaaggatcctgacctcaccgcgcagggcgtcagcgaagccaaggacgccggccgcaagctgaaggcgcatggcctgtccttcgatgtcgccttcacctccgagctgacccgcgcccagcacaccctgaagctgatcctcgacgagctcggccagcccggcctgccgacgtcgaagaacctcgcgctcaacgagcgcgactatggcgatctctccggcctcaataaggacgacgcccgcgccaaatggggcgaggagcaggtccacgtctggcgccgctcctacgacgtccccccgcccggcggcgaaagcctcaaggacaccctcgcccgcgcgctgccctactacgtccaggaaatcctccccggcgtcctcaacggccagcgcactttggtcgccgcccacggcaactcgctccgcgccttgatcatggtgctggagaagctgaccccggaaggcattttgaagcgcgagctcgccaccggcgttccgatcatctaccgcctgaaggcggattcgacggtggagtcgaagctggatctggcgggctga

SEQ ID NO: 152675 - protein, 207 aa, Bradyrhizobium sp. ORS278
MSERLLVLVRHGQSEWNLKNLFTGWKDPDLTAQGVSEAKDAGRKLKAHGLSFDVAFTSELTRAQHTLKLILDELGQPGLPTSKNLALNERDYGDLSGLNKDDARAKWGEEQVHVWRRSYDVPPPGGESLKDTLARALPYYVQEILPGVLNGQRTLVAAHGNSLRALIMVLEKLTPEGILKRELATGVPIIYRLKADSTVESKLDLAG

SEQ ID NO: 152676 - DNA, 816 bp, Listeria monocytogenes str. 4b F2365
  CDS (1)..(816): transl_table=11
atgaagaaaaatatttttaaattgatgatggcgttatgcgcagtactattaattgcaggttgcggtaacagtacatctgcagacaagaaagagacaaaagaaactaaagaagatggcactgtgacattttatgtagtacgtcatggtaaaacaatgctaaacacaactgaccgtgtacaaggttggtctgatgcggttcttactcccgctggtgaagaagtagttaaaagcgctggtaaaggcttaaaagacgttgatttctctgcagcttacagcagcgacagtggtcgtgctatccaaactgcaaacttaattttgaaagaaagcgataaatccgctgataaagaagtacaaactgatccacgtttccgtgaattcaattttggttcttatgaaggcgatttaaatgaaaatatgtggactgatattgcgaaaagccaaggtaaaactttagaagagtggcaaaaagctggtatctcgccaaaagattttgctgatagtgtagcagctcttgataaaactcgtgtgaaagaaggcgaaaactggcctgctgaagactatgcaactatccaagctcgtctaaaagaaggtttaacagatgttgctaaaaaagaaagcaaaaatggcgatagcaatgtattactagtttcccacggactaagcatcggtgcgcttcttgatactatcgaaccaggatacaaactgcctgcagaaggtatcaaaaatgcaagtgtaacaaaaatcacttacaaagatggtaaattcactattggtgatgtaaatgacttaagctatgtggaaaaaggttctaaataa

SEQ ID NO: 152677 - protein, 271 aa, Listeria monocytogenes str. 4b F2365
MKKNIFKLMMALCAVLLIAGCGNSTSADKKETKETKEDGTVTFYVVRHGKTMLNTTDRVQGWSDAVLTPAGEEVVKSAGKGLKDVDFSAAYSSDSGRAIQTANLILKESDKSADKEVQTDPRFREFNFGSYEGDLNENMWTDIAKSQGKTLEEWQKAGISPKDFADSVAALDKTRVKEGENWPAEDYATIQARLKEGLTDVAKKESKNGDSNVLLVSHGLSIGALLDTIEPGYKLPAEGIKNASVTKITYKDGKFTIGDVNDLSYVEKGSK

SEQ ID NO: 152678 - DNA, 651 bp, Azoarcus sp. EbN1
  CDS (1)..(651): transl_table=11
atggaaatgacgactccgacgcggctatgcctggtccgacacggcgagaccgcgtggaacgcggaaagacgtctgcagggacacctggacgtgccgctcaatgaaatcggtcacatccaggccgaagcgactgccgcaagcctcgccggacaccgcttcaccgcgctctactgcagcgacctgcgtcgcgcgcagcaaaccgcggcggcggcgggccgcacgctcgggttcgaggcgacgctcgaacccgaactgcgcgaacggcactacggggtattccagggcctcacctacgacgaagcccgcgagcggttcccgcaggactacgcgcgcttccacgcccgcgaccccgacttcgccttttgcggcgacggcgagagcctccgcgctttcgcggcgcgcgtccaccgcgccctcgaacgtatcgtcgtccgtcatgcaggccggcaggcgctggtcgtcacgcacggcggcgtgctcgacatcgcccatcgccttgcggcgggcaaggcgctcgacgcgccgcgcgacttcacgattccgaacgccgcgctcaactggatcgagttcgacggccgccgctggcaccttctcgcgtgggccgatcaggctcacctggcagccgcccgcgacgaactgccgaacacctga

SEQ ID NO: 152679 - protein, 216 aa, Azoarcus sp. EbN1
MEMTTPTRLCLVRHGETAWNAERRLQGHLDVPLNEIGHIQAEATAASLAGHRFTALYCSDLRRAQQTAAAAGRTLGFEATLEPELRERHYGVFQGLTYDEARERFPQDYARFHARDPDFAFCGDGESLRAFAARVHRALERIVVRHAGRQALVVTHGGVLDIAHRLAAGKALDAPRDFTIPNAALNWIEFDGRRWHLLAWADQAHLAAARDELPNT

SEQ ID NO: 152680 - DNA, 591 bp, Staphylococcus epidermidis RP62A
  CDS (1)..(591): transl_table=11
atggaaatttatttagtgaggcatggtgagtcacagtccaattatgataataaacacgggtatctatatttttgtggacagttagacgtccctttgacggaaaggggtataaaaagcgctaaagaactatctgtttattttaaaaataaatacattgacaatgtatatgtatcagatttaaaaagaacaaggcaaacgtatgaggagctatttccttatgatattccaacaatatatacaaagacgttaagagagcgttcgttaggtgtttttgaaggtaaaaataaagaagaagtttgtaaagacaaacggttcgaaaaatatttccgtgatcctaattataaatactttagacatagcttttcgcaaaaagcaccacaaggagaaagttatcaagatgtctatgatagagtggttactttcattgaaaatgagcttaatcaacagcagagacgtgtagtgatagttgcgcaccaagttgtaattagatgttttttcgtctattttaaaatgataactaaggaagaagccttaacgacggaaattcataattgctatccatatttaattaaagaagaaatgaagttttga

SEQ ID NO: 152681 - protein, 196 aa, Staphylococcus epidermidis RP62A
MEIYLVRHGESQSNYDNKHGYLYFCGQLDVPLTERGIKSAKELSVYFKNKYIDNVYVSDLKRTRQTYEELFPYDIPTIYTKTLRERSLGVFEGKNKEEVCKDKRFEKYFRDPNYKYFRHSFSQKAPQGESYQDVYDRVVTFIENELNQQQRRVVIVAHQVVIRCFFVYFKMITKEEALTTEIHNCYPYLIKEEMKF

SEQ ID NO: 152682 - DNA, 690 bp, Ralstonia eutropha JMP134
  CDS (1)..(690): transl_table=11
atgcaaggaaagggcatgttgcaaagctccgggccgcattcgctggcctacacgcacctgatcgtgatccgtcatggcgagacggcctggaaccgcgagcgccggctgcaaggccagctcgacatcccgctcaacgaaaccggcgaggcccaggcccgcgcgctggcggcggcactggctggcgagccgatcgacgcggtctattcgagcgacctcggccgcgccatgcagaccgccgcgcccctggccgagacacttggcctcaaggtccgctccgagccgcgcctgcgcgagcgcagctatggcacgctgcagggcatgacctacgccgaggtcgccgagaagctgcccgaggacttcgcgcgctggcaggcgcgcgtgcccgactacacgccgccgcagggggaatcgctcgcacaattccatgagcgggccgtcgagatcgcgctgtcgctgtcgcgccggcatccgggcgagcgtatcgcgctggtcgcacacggcggcgtgctcgactgtctttaccgggaagccaccggcatgacgctggaggcgccgcgccagcacgaactgctcaacgccagcatcaaccggctacgcagcgacagccatcacctgacgctggcacagtggggcgatgtcacgcacctcgaaacgctggcgctggatgaagtggaccggcgcgtcccctga

SEQ ID NO: 152683 - protein, 229 aa, Ralstonia eutropha JMP134
MQGKGMLQSSGPHSLAYTHLIVIRHGETAWNRERRLQGQLDIPLNETGEAQARALAAALAGEPIDAVYSSDLGRAMQTAAPLAETLGLKVRSEPRLRERSYGTLQGMTYAEVAEKLPEDFARWQARVPDYTPPQGESLAQFHERAVEIALSLSRRHPGERIALVAHGGVLDCLYREATGMTLEAPRQHELLNASINRLRSDSHHLTLAQWGDVTHLETLALDEVDRRVP

SEQ ID NO: 152684 - DNA, 717 bp, Methanosarcina barkeri str. Fusaro
  CDS (1)..(717): transl_table=11
atgggtcatcttatacttgtcaggcatggagaacctggattaaagccagaagaaaggcttgccggctgggtggatatttctctcagcaggaaaggaatcgaagaggctcttcagtgtgcagcagagcttgaaaagttcgaactggaccttgcttttgcctcaaaccttgtgcggacgcaggaaacacttttcttaatattgtccgggcagaagaaaacaggggttgttgtccatgaaagtacagggaagaaaggaaatccagggaaaacggactggtactcgtatcctgaaaagctcggtaaaaaacttatcccgatttatttcacaccttatttaaacgagcgctactacggtaagcttcagggcaggaaaaaacagaaaatggaagaaaaatacggagccgaaaaacttgcctcctggaggtggaactttcagccaggcccacctgaaggagaaagtctcaaagtcgtgtatgaacgtgcagtaccttatttcaaagagaaaatcctgcctgccgtaaaggcaggaaaaaacgtgctgatctgtgcccaccagggcagtctgagagctctggtcaaatatatagaagagatttccgacgaggatatcaaggaagtcaaattttccacaggcgaacttgcgatatatcggtattcagaaggcaagctaatccgagaaaacgccgagatgagctctgagattaaaaggaacctctaa

SEQ ID NO: 152685 - protein, 238 aa, Methanosarcina barkeri str. Fusaro
MGHLILVRHGEPGLKPEERLAGWVDISLSRKGIEEALQCAAELEKFELDLAFASNLVRTQETLFLILSGQKKTGVVVHESTGKKGNPGKTDWYSYPEKLGKKLIPIYFTPYLNERYYGKLQGRKKQKMEEKYGAEKLASWRWNFQPGPPEGESLKVVYERAVPYFKEKILPAVKAGKNVLICAHQGSLRALVKYIEEISDEDIKEVKFSTGELAIYRYSEGKLIRENAEMSSEIKRNL

SEQ ID NO: 152686 - DNA, 813 bp, Burkholderia sp. 383
  CDS (1)..(813): transl_table=11
atggcgggcccgggtcgggtcctgctcgacgcgccacagcttccttcactaccgaccgcaagatccatgtacaaactcgttctcatccgccacggcgaatcgacgtggaacaaggaaaaccgcttcaccggctgggtcgacgtcgacctgaccgaacagggtcgcaacgaggcctaccaggccggcgaattgctcaaggaggccggctacacgttcgacatcgcgtacacgtcggtgctcaagcgcgcgatccgcacgctgtggcacgtgcaggacaagatggacctgatgtacctgccggtcgtccactcgtggcgcctgaacgagcgccactacggcgcgctgtcgggcctgaacaaggcggaaacggccgcgaagttcggcgacgaccaggtgctcgtgtggcgccgcagctacgacacgccgccgcccgcgctcgaggcgaccgacgaacgcgcgccgttcaacgacccgcgctacgcgaaggtgccgcgcgagcaactgccgctcaccgagtgcctgaaggacacggtcgcgcgcgtgctgccgctgtggaacgagtcgatcgccccggcggtccgcgccggcaagcaggtgctgatcgccgcgcacggcaactcgctgcgcgcgttgatcaagtacctcgacggcatctcggacagcgacatcgtcggcctgaacatcccgaacggcgtgccgctcgtgtatgagctcgacgaaaacctgaagccgatcaagcactattacctcggcgaccaggacgcgatcgcgcaggcgcaagccgccgtcgcgaagcagggcaaggcgggctga

SEQ ID NO: 152687 - protein, 270 aa, Burkholderia sp. 383
MAGPGRVLLDAPQLPSLPTARSMYKLVLIRHGESTWNKENRFTGWVDVDLTEQGRNEAYQAGELLKEAGYTFDIAYTSVLKRAIRTLWHVQDKMDLMYLPVVHSWRLNERHYGALSGLNKAETAAKFGDDQVLVWRRSYDTPPPALEATDERAPFNDPRYAKVPREQLPLTECLKDTVARVLPLWNESIAPAVRAGKQVLIAAHGNSLRALIKYLDGISDSDIVGLNIPNGVPLVYELDENLKPIKHYYLGDQDAIAQAQAAVAKQGKAG

SEQ ID NO: 152688 - DNA, 753 bp, Burkholderia thailandensis E264
  CDS (1)..(753): transl_table=11
atgtacaagctcgttctcatccgccacggcgaatcgacctggaacaaggaaaaccgcttcaccggctgggtcgacgtcgacctgaccgaacaaggcaacagcgaagcccggcaggccgggctgctcctgaaggaagccggctacacgttcgatatcgcatacacgtcggtgctcaagcgcgcgatccgcacgctctggcacgttcaggaccagatggatctgatgtacgtgcccgtcgtccattcgtggcggctgaacgagcgtcattacggcgcgctgtcgggcctgaacaaggctgagacggccgcgaagtacggcgacgagcaggtgctcgtctggcgccgcagctacgacacgccgccgcccgcgctcgagccgaccgacgagcgcgcgccatacggcgatccgcgctacgcgaaggtgccgcgcgagcaactcccgctcaccgagtgcctgaaggacacggtcgcgcgcgtgctgccgctgtggaacgaatcgatcgcgcccgcggtgaaggccggcaagcaggtgctgatcgccgcgcacggcaactcgatccgcgcgctggtcaagtatctcgacggcatttcggacgcggacatcgtcggcctgaacattccgaacggcgtgccgctcgtctacgagctcgacgcgaacctcacgcccatccggcactactacctcggcgacccggaagcgatcgcgaaggcgcaggccgccgtcgcgcagcagggcaaggcgtccgcggcgtaa

SEQ ID NO: 152689 - protein, 250 aa, Burkholderia thailandensis E264
MYKLVLIRHGESTWNKENRFTGWVDVDLTEQGNSEARQAGLLLKEAGYTFDIAYTSVLKRAIRTLWHVQDQMDLMYVPVVHSWRLNERHYGALSGLNKAETAAKYGDEQVLVWRRSYDTPPPALEPTDERAPYGDPRYAKVPREQLPLTECLKDTVARVLPLWNESIAPAVKAGKQVLIAAHGNSIRALVKYLDGISDADIVGLNIPNGVPLVYELDANLTPIRHYYLGDPEAIAKAQAAVAQQGKASAA

SEQ ID NO: 152690 - DNA, 690 bp, Burkholderia thailandensis E264
  CDS (1)..(690): transl_table=11
ttgacgctccgattcgagaccgcaccgatgcccacgacgcaagtcctcttcattcgccacggcgagacggcctggaaccgcatcaagcggattcaaggccacatcgacattccgctcgccgacacggggctcgcgcaggcgcggcaactggccgggcggctcgcgggcgaggcgcgcgccggcgcgcggatcgacgcgatttacacgagcgatttggcgcgcgcgcggcagaccgcgcagccgacggccgacgcgctcggcttgccgctcgtgctgcgggaggggcttcgcgagcgcgcgtacggcgtgttccaggggcacgacagcgccgagatcgaggcgcgctttcccgacgcgttcgcgcagtggcagacgcgcgaccccggcttcgagccggaaggcggcgagtcgcaccgcgcgttctatcatcgcgtgctgcacgaggtcgagcggatcgtcgccgcacatccgggcgggcgcatcgcgtgcgtcgcgcacggcggcgtgctcgactgcgtgtaccggttcgcgaacgatctgccgctcgacgcgccgcgccagcattcgctgctgaatacgagcgtcaatatcgtcgattacgacgacggccgcgcgcgcgtcgtgcgctgggccgatgtcgatcacctgagcgtcgcgagcgacgacgacggtgatcggaaggtgctgtga

SEQ ID NO: 152691 - protein, 229 aa, Burkholderia thailandensis E264
MTLRFETAPMPTTQVLFIRHGETAWNRIKRIQGHIDIPLADTGLAQARQLAGRLAGEARAGARIDAIYTSDLARARQTAQPTADALGLPLVLREGLRERAYGVFQGHDSAEIEARFPDAFAQWQTRDPGFEPEGGESHRAFYHRVLHEVERIVAAHPGGRIACVAHGGVLDCVYRFANDLPLDAPRQHSLLNTSVNIVDYDDGRARVVRWADVDHLSVASDDDGDRKVL

SEQ ID NO: 152692 - DNA, 1002 bp, Frankia sp. CcI3
  CDS (1)..(1002): transl_table=11
atgggcaccggcaccggcgagaaccaggcagacacccgacccccgggcgccgtcgcaagtcccgacggcccgcctccgcttcgcgcggcggcggagcgcccgggggtcgttcagttccggatgaattcctgtcgtgccgccggattcctgtcctgccgccgggtgacaaccggtcgccggcacgaccggccccgagccggggagtcacaggcaacaaccggcaatgctggccgagcgggccgccgagcgggcaggatctcgggtatgccgacgctcgtcctgctccgccacggtgagagcatttggaaccgcgaaaacctgttcaccggctgggtggacgttgatctttccgagaagggtgccaaggaggccactcgcgggggtgagctgctgcgggagtccggcgtcctgccggacgtggtgcacacgtccctgctgaccagggcgatccgcaccgcctggctggcgctggatgccgccgggcgcacctgggttccggttcgccgcacctggcggctcaacgagcggcactacggcggcctgcagggcctgaacaaggcggagacgctggagaagttcggcgcggagcagttccagctctggcgtcgctcctatgacacgccgccgccggagatcggtccggagcaggtcagcggggtggacgagcgctatgacgaccttgcccccgacgtcatcccgcggaccgagtgcctcgccgacgtcgttgcccggatgctgccctactggtacgacgcgatcgtgccggacctgcggaccggccgtaccgtcctggtggcggcgcatggcaactcgctgcgcgccctggtgaagcatctcgatcacatcagcgacaccgacatcgccgggctcaacatccccaccggcatcccgctgcgctacgagctggacgaccagctgggtgtggtgagctcggggtacctcgaccccgacgccgcggcgctcgccgcggccgccgtcgccgcgcagggcaccaagaagtag

SEQ ID NO: 152693 - protein, 333 aa, Frankia sp. CcI3
MGTGTGENQADTRPPGAVASPDGPPPLRAAAERPGVVQFRMNSCRAAGFLSCRRVTTGRRHDRPRAGESQATTGNAGRAGRRAGRISGMPTLVLLRHGESIWNRENLFTGWVDVDLSEKGAKEATRGGELLRESGVLPDVVHTSLLTRAIRTAWLALDAAGRTWVPVRRTWRLNERHYGGLQGLNKAETLEKFGAEQFQLWRRSYDTPPPEIGPEQVSGVDERYDDLAPDVIPRTECLADVVARMLPYWYDAIVPDLRTGRTVLVAAHGNSLRALVKHLDHISDTDIAGLNIPTGIPLRYELDDQLGVVSSGYLDPDAAALAAAAVAAQGTKK

SEQ ID NO: 152694 - DNA, 687 bp, Novosphingobium aromaticivorans DSM 12444
  CDS (1)..(687): transl_table=11
atgccccgcctgatcctgattcgtcacggccagtcgcagtggaacctcgaaaaccgcttcaccggctggtgggatgtggacgtgaccgagaagggcgccgccgaagcctttgccgccggcaagctgctcaaggacaagggcgtcctgccgacgctcgccttcacctcgttgcagacgcgtgcgatcaagacgctgcacctcgcactcgaggcagctggtcggctgtgggtgcaggaagacaaggactggcgcctgaacgagcgtcattacggcggccttaccggtctcgacaaggccgagaccgctgccaagcacggcgacgagcaggtcaaggtgtggcgccgcagcttcgacgtgccgccgccgccgctggaggccggcagcgagttcgatctggcgtcggacccgcgctatgacgggatcgcggtgcccgccaccgaaagcctcaaggacacgatcgcccgcgtcctgccctgctgggaagaaaagatcgcgcccgcgcttcgtgccggcgagacggtgatcgtatcggcgcacggcaattcgctgcgcgcgctggtcaagcacctgtcgggcatttccgatgaagacatcaccgggctcgaaatccccaccggtcagccgatcgtctacgaactcgacaacgatctcgcccaagtggaacgctattacctgtcggagcgctga

SEQ ID NO: 152695 - protein, 228 aa, Novosphingobium aromaticivorans DSM 12444
MPRLILIRHGQSQWNLENRFTGWWDVDVTEKGAAEAFAAGKLLKDKGVLPTLAFTSLQTRAIKTLHLALEAAGRLWVQEDKDWRLNERHYGGLTGLDKAETAAKHGDEQVKVWRRSFDVPPPPLEAGSEFDLASDPRYDGIAVPATESLKDTIARVLPCWEEKIAPALRAGETVIVSAHGNSLRALVKHLSGISDEDITGLEIPTGQPIVYELDNDLAQVERYYLSER

SEQ ID NO: 152696 - DNA, 690 bp, Saccharophagus degradans 2-40
  CDS (1)..(690): transl_table=11
atgactgaccaaaaggtaataatgattcgccatgcacaaagcgaatggaatgcgaaaggcctctttactggctgggcagaccctgtgcttaccccgctggggcgcaaggaagcagcagaagcggcaagtaatttggcaaagctaggcctaaagtttgaccgtatttatacctcggtattgcagcgggccacagaaaccgcgtccattatcgctaaaagccttaattgccaagtaccgctaacaaaaagttggcagcttaacgagcgccactacggtgtgctgcaaggcaaaagtaaagaggcattggctaagcaagtaggtgcagagcaggtatggcgctggcgcagagggtttgaagatatgccgccacctatgccgctagctagcccaatgcacgcgcgctttgataccaagtatgacggggtagagccgaccagcttacccagtgtagagtcgctaaagcatacccaaatacgcgcagtaaattactggcagaaagaggtattgccaagcatacgtaataatagttctgtgttggtggcggcacatggcaataccttaagggctttaatcatgtacttagctaatatgagtgtacaagaggtggaagggtttgaaattccaacgggtatacctattgagctaaatataaacaagcatggccggtgttctagttggcgttatatttag

SEQ ID NO: 152697 - protein, 229 aa, Saccharophagus degradans 2-40
MTDQKVIMIRHAQSEWNAKGLFTGWADPVLTPLGRKEAAEAASNLAKLGLKFDRIYTSVLQRATETASIIAKSLNCQVPLTKSWQLNERHYGVLQGKSKEALAKQVGAEQVWRWRRGFEDMPPPMPLASPMHARFDTKYDGVEPTSLPSVESLKHTQIRAVNYWQKEVLPSIRNNSSVLVAAHGNTLRALIMYLANMSVQEVEGFEIPTGIPIELNINKHGRCSSWRYI

SEQ ID NO: 152698 - DNA, 723 bp, Burkholderia xenovorans LB400
  CDS (1)..(723): transl_table=11
atgactcttcaaacgggcacgctggtcgtgctgcgtcatggccagtcgatatggaatcgcgccaaccgttttaccggctggagcgacgtcggcctgtccgtgcagggcgtggccgatgcgcagcgtgtcggcgaacggttgcgcgaggcgggctttcgcttcgacctggcggtgacctcggcgctgctgcgcgccaccgatacactcgcgcacgtgctgcgaacccttgagcagccgccgcccagaaccgtgcgctcgtggcggctgaatgaccgccactacggcatgctgaccggcatggaaaaagacgaggccgcgctcgcctatggcgcggagcgggtgcggcaatggcggcgcggtttcgacctggcgccgccggcgctcgatgcagacctgcacgcggcactcgtgcgtgcattgcacgacgacgcgatgccccacgccgacgcgctgccccgcaccgaaagcctgcgcgacacgttgcggcgcgtgctgccgctgtgggacgaatgcgtggcacccgcgctgacgcgtgggcagtcggtgctgatggtggggcatggcaactcgttgcgcgcgcttttcaagcaactcgacaacatcggcgacgacgcgatcgcttcggtcgaggtcgcgcatgcggaaccgttggtcatgaagttcgacgcaacgctctcggtgatttcgcgcacaccgctcgccgcgctggcagctagccgctga

SEQ ID NO: 152699 - protein, 240 aa, Burkholderia xenovorans LB400
MTLQTGTLVVLRHGQSIWNRANRFTGWSDVGLSVQGVADAQRVGERLREAGFRFDLAVTSALLRATDTLAHVLRTLEQPPPRTVRSWRLNDRHYGMLTGMEKDEAALAYGAERVRQWRRGFDLAPPALDADLHAALVRALHDDAMPHADALPRTESLRDTLRRVLPLWDECVAPALTRGQSVLMVGHGNSLRALFKQLDNIGDDAIASVEVAHAEPLVMKFDATLSVISRTPLAALAASR

SEQ ID NO: 152700 - DNA, 747 bp, Burkholderia xenovorans LB400
  CDS (1)..(747): transl_table=11
atgtacaaactcgttctcatccgccacggcgaatcgacgtggaacaaggaaaaccgcttcacgggctgggtcgacgtcgacctcaccgagcagggcaacaatgaggcgcagcaagcgggcgtgctgctgaaggattcgggctacacgttcgacatcgcctacacgtcggtgctcaagcgcgcgatccgcaccttgtggcacgtgcaggacaagatggatctgatgtacctgccggtggtccattcgtggcgtctgaacgaacggcactacggtgcgctgtcgggtctgaacaaggctgagacggccgccagattcggcgacgaacaggtgctggtctggcgccgcagctacgacacgccgccgcccgctctcgagccgacggacgagcgcgcgccctacaacgatccgcgctacgccaaagtgccgcgcgaacagttgccgctcaccgaatgcctgaaggacacggtcgcgcgcgttctgcccctgtggaacgagtcgattgcgccggccatcaagtcgggccgccaggtgctgatcgccgcccacggcaattcgatccgcgcgctcgtcaaatacctcgacgatatttcggacaacgacatcgtcggtctgaatattccgaacggcgtgccgctcgtttacgaactcgacgaaaacctgcggccaatcaagcactactatctgggcgaccaggaagcgatcgccaaggcgcaggccgcagtcgccaggcagggaaaggcaggctga

SEQ ID NO: 152701 - protein, 248 aa, Burkholderia xenovorans LB400
MYKLVLIRHGESTWNKENRFTGWVDVDLTEQGNNEAQQAGVLLKDSGYTFDIAYTSVLKRAIRTLWHVQDKMDLMYLPVVHSWRLNERHYGALSGLNKAETAARFGDEQVLVWRRSYDTPPPALEPTDERAPYNDPRYAKVPREQLPLTECLKDTVARVLPLWNESIAPAIKSGRQVLIAAHGNSIRALVKYLDDISDNDIVGLNIPNGVPLVYELDENLRPIKHYYLGDQEAIAKAQAAVARQGKAG

SEQ ID NO: 152702 - DNA, 1311 bp, Ralstonia metallidurans CH34
  CDS (1)..(1311): transl_table=11
atgggcttacttgatgaccggaagtccggcctgctgccaggcggccatgccgccttcgagcgcatagacctcactgtacccggcttccttcaaggctgcctgagccttgctcgagcgctggccgttctggcataccacgatgatggggatggccttatcctttgcaagaccgcccgcccggttgggcaggtcgtcgagtggcgcgctcttcgcttgcggcatgtggcccttggcgaactcggcagcgtcgcggatatccaccaccaccgcattgcgcttgttgatcagctgcgtggcggcggccgcattgacgcgttttccgcccgtgccgctcttgatcgtcggccaggccagcaggccgccagagaccacggcgatggcgatcagggccaggttattgtaatcggcgaagaaattcacgttggcattccgttgggttgggtcggcggcattataaaatacgcggtttcgtgcccacgccgatatttgtccgtcgcctcccggccgccgccggccttgcgacggatcgtgcgcactgcaggtcatttactccctggaagcagcatgtacaagctcgttctcatccgccacggcgaatccacgtggaacctcgaaaaccgcttcaccggctgggtcgacgtcgacctgaccgatacgggcgccgcgcaggccaaacaggccggcacgctgctcaaggaagccggcttcgcctttgacgtggcctacacctccgtgctcaagcgcgccatccgcacgctctggcacgtgcaagacgaaatggacctgatgtggattccggtgcgcaatgaatggcgcctgaacgaacgtcactacggcgcgctggccggcctgaacaaggcggaaacggccaagaagtacggcgacgagcaggtgctggtgtggcgccgcagctacgacacgccgccgcccgcgctggagccgaccgacgaacgtgcctctttcggcgacccgcgctacgccaatgtgccgcgcgcggagatcccgctgaccgagtgcctgaaggacacggtggcccgcgtgatgccgctgtggaacgaatccattgctcccgacatcaaatccggcaagcgcgtggtgatcgccgcccatggcaacagcattcgcgccctcgtaaagtatctggaccagatttcggatgacgatatcgtcggcctcaatatccccaatggcaccccgctcgtctacgagctggatgccgacctgcgccccctgcgccactactacctgggcgaccaggaagccatcgcggcgtccctggccgccgtggccagccagggcaaggcccgctga

SEQ ID NO: 152703 - protein, 436 aa, Ralstonia metallidurans CH34
MGLLDDRKSGLLPGGHAAFERIDLTVPGFLQGCLSLARALAVLAYHDDGDGLILCKTARPVGQVVEWRALRLRHVALGELGSVADIHHHRIALVDQLRGGGRIDAFSARAALDRRPGQQAARDHGDGDQGQVIVIGEEIHVGIPLGWVGGIIKYAVSCPRRYLSVASRPPPALRRIVRTAGHLLPGSSMYKLVLIRHGESTWNLENRFTGWVDVDLTDTGAAQAKQAGTLLKEAGFAFDVAYTSVLKRAIRTLWHVQDEMDLMWIPVRNEWRLNERHYGALAGLNKAETAKKYGDEQVLVWRRSYDTPPPALEPTDERASFGDPRYANVPRAEIPLTECLKDTVARVMPLWNESIAPDIKSGKRVVIAAHGNSIRALVKYLDQISDDDIVGLNIPNGTPLVYELDADLRPLRHYYLGDQEAIAASLAAVASQGKAR

SEQ ID NO: 152704 - DNA, 675 bp, Ralstonia metallidurans CH34
  CDS (1)..(675): transl_table=11
atgtcgcaaagcaccggcccgcaatcgctggcctacacccacctgatcgtgattcgccatggcgagacggcctggaaccgcgaacggcggctgcagggccagctcgacatcccactgaatgacacgggccgcgcccaggcgcgcgcgctggccgaggcgctggccggcgagccgatcgacgcggtctattcgagtgacctgggccgtgccatgcagacggcggcgccgttggccgagacgctgggtttgcaagtgcggcccgagcgtcgactgcgggagcgttgctatggcgatctggaggggatgacctacgctgaagtggcggagaagcgccctgaggatttcgcgcgctggcaggcgcgcgtgcccgactacgcgccgcccgagggcgaatcgctgcgcgagtttcacgatcgggcggtcgaggtggcgctgtatctgtcgcggcgccatcctggcgagcggatcgcgctggtggcacacggaggcgtcctcgactgcctctaccgcgaggctgccggcatgaccctcgaagcgccgcgcgagcacgaactgctcaatgccagcgtcaaccgcctgcggtgcgacaccgcccacctcacgctgctgcagtgggccgacgtcagccacctcgaggcgctggcgctggacgaagtcgatcgacgcgtcccctga

SEQ ID NO: 152705 - protein, 224 aa, Ralstonia metallidurans CH34
MSQSTGPQSLAYTHLIVIRHGETAWNRERRLQGQLDIPLNDTGRAQARALAEALAGEPIDAVYSSDLGRAMQTAAPLAETLGLQVRPERRLRERCYGDLEGMTYAEVAEKRPEDFARWQARVPDYAPPEGESLREFHDRAVEVALYLSRRHPGERIALVAHGGVLDCLYREAAGMTLEAPREHELLNASVNRLRCDTAHLTLLQWADVSHLEALALDEVDRRVP

SEQ ID NO: 152706 - DNA, 609 bp, Myxococcus xanthus DK 1622
  CDS (1)..(609): transl_table=11
atgcctaccctcgtcctggtccgacacggtcagtcgctgtggaatcaagagaaccgcttcaccggcctcgtcgacgtccccctcaccgaccaggggcgccaggaggcccggcgcgcggcggaggcgctgagcgggatgacgttcgacgtcgcctatacgtcagcgctcatccgggcgcaggagacgctgtccatcctcttggacgcgttgggacagcaggtccccaccatccgggacgccgccctcaacgagcgcaactacggcgacctgcaggggctcaacaaggcggacgccgcgaagcgttggggggccgcgcaaatcaaggagtggcgccgctccttcgacgtgccgccccccaacggcgagtccctggagatgacagcggagcgcgtgttgccgttctatgagcgcgccatcgccggagacctgcgcctggggaagaacgtgctggtggtggcccacggcaactccaaccgttccctggtgatgaagctggacaacctcacgggggagcaggtggtggggctggagctggccaccggggtgccgctcatctacgagatgtcgccggacggagaggtgctgtccaagcgcaccgcgtccccctga

SEQ ID NO: 152707 - protein, 202 aa, Myxococcus xanthus DK 1622
MPTLVLVRHGQSLWNQENRFTGLVDVPLTDQGRQEARRAAEALSGMTFDVAYTSALIRAQETLSILLDALGQQVPTIRDAALNERNYGDLQGLNKADAAKRWGAAQIKEWRRSFDVPPPNGESLEMTAERVLPFYERAIAGDLRLGKNVLVVAHGNSNRSLVMKLDNLTGEQVVGLELATGVPLIYEMSPDGEVLSKRTASP

SEQ ID NO: 152708 - DNA, 588 bp, Mesorhizobium sp. BNC1
  CDS (1)..(588): transl_table=11
gtgcttccgctgctatatatcgtgcgtcacggcgagaccgattggaacggcgaggcgcgcctgcagggtcaggcggatacggatatcaacgaacgcggccgcctccaggccgaccgcaacggcgagcgtcttgcggaaatcgtgccgaatccctcgtcattcgattttgttgcaagccccctccggcgtacctgcgagaccatggagcgcattcgcgccaggcttggcctttctccttccgatttccgcgtcgacccgcgcctgatggaagtgcatttcggcgactggcagggcttcacctatgccgagcttgaggcgcgttcgccgggctgcacggcggagcgcacgcgcagcaagtggcgattcgtgccgccgggcgtggatgcggaaagctatgagacgatggcgctgcgcatccgctcgtggctggacgagattgaaagacccacgatctgcgtgacgcatggcggggtcatgcgtgccatattccattggctggaaaacatgcccggtgatgaggccgcgaggctcgatataccgcaggaccgcatcctgcgggtggagaacaacaggctggagtggctttaa

SEQ ID NO: 152709 - protein, 195 aa, Mesorhizobium sp. BNC1
MLPLLYIVRHGETDWNGEARLQGQADTDINERGRLQADRNGERLAEIVPNPSSFDFVASPLRRTCETMERIRARLGLSPSDFRVDPRLMEVHFGDWQGFTYAELEARSPGCTAERTRSKWRFVPPGVDAESYETMALRIRSWLDEIERPTICVTHGGVMRAIFHWLENMPGDEAARLDIPQDRILRVENNRLEWL

SEQ ID NO: 152710 - DNA, 621 bp, Mesorhizobium sp. BNC1
  CDS (1)..(621): transl_table=11
atgtccggaacgctgatccttgttcgccacggccagagcgaatggaacctgaagaacctgttcaccggctggcgcgatcccggcctatccgagcttggccatgaagaagccacatcggcgggacgcaagatcaaggacagggggcttagaccggacatcgccttcacctcggtgctttcgcgcgccaaagtcaccaatacgcatattctggaggtcctcggattgcccgctctggagacgatcgaggacgtggcgctcaacgagcgggattacggcgatctctctggcctcaacaaggacgacgcgcgaaagaaatggggcgaggagcaggtgcatatctggcgccgctcttatgatattccgcctcccggcggcgagagcctgcgcgacacgggtgcccgcgtctggccctactatttgcgggaaatcctcccgcaggtgctgcggggcaagacagtgctggtgagcgctcacggcaattcgctacgctcgctggcgatggttctggacgggctttccggcgaggagatcgtcaagatggagatcgccacaggcgttccgatcgtctaccggctcaaccccgattctaccgtggcgtcgaaggagatcctggagggctga

SEQ ID NO: 152711 - protein, 206 aa, Mesorhizobium sp. BNC1
MSGTLILVRHGQSEWNLKNLFTGWRDPGLSELGHEEATSAGRKIKDRGLRPDIAFTSVLSRAKVTNTHILEVLGLPALETIEDVALNERDYGDLSGLNKDDARKKWGEEQVHIWRRSYDIPPPGGESLRDTGARVWPYYLREILPQVLRGKTVLVSAHGNSLRSLAMVLDGLSGEEIVKMEIATGVPIVYRLNPDSTVASKEILEG

SEQ ID NO: 152712 - DNA, 642 bp, Cytophaga hutchinsonii ATCC 33406
  CDS (1)..(642): transl_table=11
atgcctattttagtaatcgtccgtcatggccaatccgaatggaatctgaaaaatctttttacaggctggtctgatgtagaattgacaccaacaggagaacatgaagcagaatatgcgggcattgtattgcgcccgtatcattttgatattgcatttacatcggtacttaaacgtgccattcataccttatcgattattctgaaccagacaggtgctaccattcccatcatagaaaatgaagcactcaatgaacgcaattacggcgacttacaagggctgaacaaagcagaagtaggagagaagtatggtgcgcagcagctcattgcgtggcgcagaagttatacggaagttccgcccggtggggaaagtctggaaaatacctgtcagcgtgtaatcccttattatcaggagaagatagaacctgaattaaaagacgggcgtaacgtattgatcgttgcacatggaaacagcctgcgtgcattaatgatgcatcttgaaaaaataagtccggaagatattgcacacgtagacttagcaacaggtgcgccaagattgtatgaattttcgagcaaattagatttaaattctgtatcttatataaagctgcctgaaacaccactggatgtttcaacgcttctataa

SEQ ID NO: 152713 - protein, 213 aa, Cytophaga hutchinsonii ATCC 33406
MPILVIVRHGQSEWNLKNLFTGWSDVELTPTGEHEAEYAGIVLRPYHFDIAFTSVLKRAIHTLSIILNQTGATIPIIENEALNERNYGDLQGLNKAEVGEKYGAQQLIAWRRSYTEVPPGGESLENTCQRVIPYYQEKIEPELKDGRNVLIVAHGNSLRALMMHLEKISPEDIAHVDLATGAPRLYEFSSKLDLNSVSYIKLPETPLDVSTLL

SEQ ID NO: 152714 - DNA, 756 bp, Rhodococcus sp. RHA1
  CDS (1)..(756): transl_table=11
atgaacggcatgagtaccggaacccttgtgctgctccgccacggcgagagcgaatggaatgcgctcaacttgttcaccggctgggtggacgtccacctgaccgataagggcatcgccgagggcaagcgcgccggcgaattgctgctcgagcacaatctgctccccgacgtgctgtacacgtcgctgctgcgccgcgcgatcagcaccgccaacatcgcgctcgacaccgccgaccggcactggattcccgtcatccgcgactggcgtctcaacgagcgtcactacggcgccctgcaggggcgcaacaaggcgcaggtcaaggagaagtacggcgacgagcagttcatgctgtggcgccgcagctacgacaccccgccgccgccgatcgaggcaggcagcgaatacagccaggacaccgatccccgctacgcgaacctcgacaaggtcccgctgacggagtgcctgaaggacgtcgtcgtccgcctgatcccgtactgggaggacacgatctccgccgacctgaaggccggcaagaccgtgctgatcaccgcgcacggcaactcgttgcgcgccctcgtcaagcacctcgacggaatctccgacgaggacatcgcgggcctgaacatcccgacgggcatcccgctgcgctacgacctggacgagaacctgaagccgctcaaccccggtggcacgtacctcgaccccgaggccgccgccgcgggtgccgccgcggtcgcgaaccagggcgggaagtaa

SEQ ID NO: 152715 - protein, 251 aa, Rhodococcus sp. RHA1
MNGMSTGTLVLLRHGESEWNALNLFTGWVDVHLTDKGIAEGKRAGELLLEHNLLPDVLYTSLLRRAISTANIALDTADRHWIPVIRDWRLNERHYGALQGRNKAQVKEKYGDEQFMLWRRSYDTPPPPIEAGSEYSQDTDPRYANLDKVPLTECLKDVVVRLIPYWEDTISADLKAGKTVLITAHGNSLRALVKHLDGISDEDIAGLNIPTGIPLRYDLDENLKPLNPGGTYLDPEAAAAGAAAVANQGGK

SEQ ID NO: 152716 - DNA, 684 bp, Haemophilus somnus 129PT
  CDS (1)..(684): transl_table=11
atggagttagtatttattcgccatggttttagtgagtggaatgccaaaaacttgtttaccggctggcgtgatgtgaatttaacagaacgtggtattgaagaagctaaagcggcaggtaaaaaattacttgaagctggttatgaatttgatattgcatttacctcagttttaactcgggcaattaaaacctgcaatatcgtgttagaagaatctaaccaattatggattcctcaagtgaagcactggcgtttaaatgagcgtcattacggtgctttacaagggttggataaaaaagcaactgctgaacagtatggtgatgaacaagttcacatttggcgtcgttcttatgatgtttctccaccggatttagatccgcaagatccgaattctgcacataacgaccgccgttatgctcttttacctaaagacgttgtgccaaatgctgagaacttaaaaatcactcttgaacgtgttctgccattctgggaagatcaaattgcacccgcacttctttctggtaaacgtgtacttgtcactgcacacggtaactctttacgtgcattagcaaaacacattatcggtatttctgatgaagaaattatggcttttgaaattccaactggtcagccgttagtgttaaaactggatgaacagttaaattttgttgagaaattctatctataa

SEQ ID NO: 152717 - protein, 227 aa, Haemophilus somnus 129PT
MELVFIRHGFSEWNAKNLFTGWRDVNLTERGIEEAKAAGKKLLEAGYEFDIAFTSVLTRAIKTCNIVLEESNQLWIPQVKHWRLNERHYGALQGLDKKATAEQYGDEQVHIWRRSYDVSPPDLDPQDPNSAHNDRRYALLPKDVVPNAENLKITLERVLPFWEDQIAPALLSGKRVLVTAHGNSLRALAKHIIGISDEEIMAFEIPTGQPLVLKLDEQLNFVEKFYL

SEQ ID NO: 152718 - DNA, 699 bp, Alkalilimnicola ehrlichei MLHE-1
  CDS (1)..(699): transl_table=11
atgaaaaaacttgttttactccgccacgggcaaagcatctggaaccaggaaaaccggttcaccggctggcacgacgtcgacctgaccgaaaagggccgggaagaggcccaggccgccggtcagctgatgaaacggcacggcctgcgcttcgactacgcctacacctccgtgctcaagcgcgctatccgcacgctctggatcggactggatgagctggaccagatgtggatccccgtcaccaaggcgtggcaactcaacgagcgccactacggtgcccttactggcctgaacaaggcggagaccgccgaggaatacggcgccgaacaggtccatatctggcgccgcagctacgacactcctcctcctccgctggacgaaaccagcccctaccaccccaggcacgacccgcgctacgccagcctcaaaccggagcagctcccggcgaccgagtccctggccctgaccctggagcgggtcctgccctactggaacgaacgcatcgtgcccaccctgcgtgattgcgacaacgtgctgatcgcggcccacggcaacagcatccgggccctgatcaaacacctggacgggctggacgacgaggccatcatgaaggtggagatcgccaccggcgaccccttggtctacgaactcgatgacgccctcgcggtggtggacaagcactacctccgggagcgggattga

SEQ ID NO: 152719 - protein, 232 aa, Alkalilimnicola ehrlichei MLHE-1
MKKLVLLRHGQSIWNQENRFTGWHDVDLTEKGREEAQAAGQLMKRHGLRFDYAYTSVLKRAIRTLWIGLDELDQMWIPVTKAWQLNERHYGALTGLNKAETAEEYGAEQVHIWRRSYDTPPPPLDETSPYHPRHDPRYASLKPEQLPATESLALTLERVLPYWNERIVPTLRDCDNVLIAAHGNSIRALIKHLDGLDDEAIMKVEIATGDPLVYELDDALAVVDKHYLRERD

SEQ ID NO: 152720 - DNA, 714 bp, Hyphomonas neptunium ATCC 15444
  CDS (1)..(714): transl_table=11
atgaccaagctcgccctgatccggcacggccagtcggcctggaatctggaaaaccgtttcaccggctggtgggacgctgacctgacagcccagggcgaagccgaagcgcgccattcgggcaagctgctggcggaagtcgatgccgatttccgcgccggcttcaccagcgtgcaaacccgcgccatccgcacaatgtggctggcactgaccgagatgaagcgcgtgtggctgccgatcgagaaagactggcacctcaacgaacgtcactatggcggcctgacagggctcaacaaggcagagaccgctgccaagcatggcgaagatcaggtgcatgtctggcgccgcagctatgatattccgcccccgccgctggaagtcggcagcacgttcgatctctcaaccgatccccggtatcgcggcatcgacattccgaacacggaaagcctgaaaacgaccctcgaccgcgtattgccttactggcagcagaaaattgcgccggggctgatcgccgggaccgacacgatgatcgccgcgcacggaaactccctgcgcgcgctggtcaaacacctgttcaatgtgccggacgaaacaatcaccgggctggaaattcctaccggaaatcccttgctgatcgagcttgatcccaatctcaagccggtatcggttcgctatctcgacgcagagcgcgcccatagcctgcctgacctgccatga

SEQ ID NO: 152721 - protein, 237 aa, Hyphomonas neptunium ATCC 15444
MTKLALIRHGQSAWNLENRFTGWWDADLTAQGEAEARHSGKLLAEVDADFRAGFTSVQTRAIRTMWLALTEMKRVWLPIEKDWHLNERHYGGLTGLNKAETAAKHGEDQVHVWRRSYDIPPPPLEVGSTFDLSTDPRYRGIDIPNTESLKTTLDRVLPYWQQKIAPGLIAGTDTMIAAHGNSLRALVKHLFNVPDETITGLEIPTGNPLLIELDPNLKPVSVRYLDAERAHSLPDLP

SEQ ID NO: 152722 - DNA, 636 bp, Rhizobium leguminosarum bv. viciae 3841
  CDS (1)..(636): transl_table=11
atgagcggtaccctcgtcctcgttcgccacggccagagtgactggaacctgaagaatctcttcaccggctggaaggatcccgatctgacggaactcggcatccaggaagccaatacaggcggtgcggcgctcgccgaatacgggatcaaattcgatgtcgcctacacctcggtgctggtgcgtgcgcagcacacgctgaagctcatcctcgacaaggtcggccagcccgatctcctgacgatccgcgaccaggcgctgaacgagcgcgactacggcgatctctccggcctcaacaaggacgatgcacgcgccaaatggggcgaggaacaggtgcatatctggcgccgctcctatgacgtgccgcctcccggcggtgaaagcctgcgtgacaccggcgcccgcgtctggccctactacctcacagaaatcctgccgcgcgtgctcaggggcgagaaggtgctggttgccgcgcacggcaattcgctgcgttctctggtgatggtgctcgacaagctcagccgcgaaggcgtgcttgccctcaatctcgcgaccggcgtgccgatggtctataagctgaaggcggattccaccgtcgcttccaaggaagtgctcggcgacatgtcgggcgcgcattga

SEQ ID NO: 152723 - protein, 211 aa, Rhizobium leguminosarum bv. viciae 3841
MSGTLVLVRHGQSDWNLKNLFTGWKDPDLTELGIQEANTGGAALAEYGIKFDVAYTSVLVRAQHTLKLILDKVGQPDLLTIRDQALNERDYGDLSGLNKDDARAKWGEEQVHIWRRSYDVPPPGGESLRDTGARVWPYYLTEILPRVLRGEKVLVAAHGNSLRSLVMVLDKLSREGVLALNLATGVPMVYKLKADSTVASKEVLGDMSGAH

SEQ ID NO: 152724 - DNA, 681 bp, Pediococcus pentosaceus ATCC 25745
  CDS (1)..(681): transl_table=11
ttggctaaattagttttaattaggcatggggaaagtaccgccaatcgtgataatatttatacagggtggtcggatgttccgcttactccgcttggtattaagcaagcacaacgagcaggaaaattaattgctaaattaggaattaattttgatatggttcacacttcaatgctgaagcgcgcgattgtgactgctaatatcgttttagatgatcttaatcaaaattggttaccgattaataagacttggcgattaaatgaacgccattatggggctttaaggggacaaaataaggatgagacccgccaaatttatggtaaggagcaggttgctttatggcgtcggagttttgatgcagtaccacccctgctagagcatcccgatgatgatcgacgatatgcggttaatggaattttgaatgaaccactgggtgaaagtttacatatggcttataatcgcttgctaccatactggattgatcaaattgctcctagattaatggaaggacaaaatcaattggtagtcgcacatggaagttctttgcgagcattaattaaatatttggagaacatttctgaccagggtattgatggagtcgaagttgaaaatggagaacccatcatttacgaattaaaatcggatttatctatccaaaataaaattatcttgaaagaagcctaa

SEQ ID NO: 152725 - protein, 226 aa, Pediococcus pentosaceus ATCC 25745
MAKLVLIRHGESTANRDNIYTGWSDVPLTPLGIKQAQRAGKLIAKLGINFDMVHTSMLKRAIVTANIVLDDLNQNWLPINKTWRLNERHYGALRGQNKDETRQIYGKEQVALWRRSFDAVPPLLEHPDDDRRYAVNGILNEPLGESLHMAYNRLLPYWIDQIAPRLMEGQNQLVVAHGSSLRALIKYLENISDQGIDGVEVENGEPIIYELKSDLSIQNKIILKEA

SEQ ID NO: 152726 - DNA, 690 bp, Pediococcus pentosaceus ATCC 25745
  CDS (1)..(690): transl_table=11
atggcaaaattagttttgatccgtcatggacaaagtcaatggaacttatcaaaccaatttactggttgggttgatgtagatcttagtgacgaaggtgttaaacaagcacaaaacgctggtaagttaatcaaggaagctggtatcgaattcgatcaagcttacacatcagtattaactcgtgccatcaagactttgcactatgctttggaaggttcagaccaactatggattcctgaaacaaagacatggcgcttaaacgaacgtcattatggtgctcttcaaggccaaaacaaggctgaagcagctgaaaaatggggcgatgaccaagttcacacatggcgtcgttcatacgacgttctccctccactattggatgcagatgatgaaggttcagcagcaaacgatcgtcgttacgctaacttagacccacgtatcattcctggtggtgaaaaccttaaggttactcttgaacgtgttattcctttctgggaagacgaaattgctcctaagttaatcgatggcaagaacgttattattgctgcacatggtaactcactacgtgcattgagcaagtacatcgaaaatatctctgatgaagatattattaatcttgaaatggctactggtgaaccagttgtctatgacttcaacgaaaagcttgaagtacaaagcaaaacaaagcttaactaa

SEQ ID NO: 152727 - protein, 229 aa, Pediococcus pentosaceus ATCC 25745
MAKLVLIRHGQSQWNLSNQFTGWVDVDLSDEGVKQAQNAGKLIKEAGIEFDQAYTSVLTRAIKTLHYALEGSDQLWIPETKTWRLNERHYGALQGQNKAEAAEKWGDDQVHTWRRSYDVLPPLLDADDEGSAANDRRYANLDPRIIPGGENLKVTLERVIPFWEDEIAPKLIDGKNVIIAAHGNSLRALSKYIENISDEDIINLEMATGEPVVYDFNEKLEVQSKTKLN

SEQ ID NO: 152728 - DNA, 714 bp, Oenococcus oeni PSU-1
  CDS (1)..(714): transl_table=11
atggctaaattagtatttattcgccacggccaatctgaatggaacgctttgaatctattcaacggctgggttgacacaaaattatctgaagaaggaatccgccaggcaaaagaagccggtgaattgcttgctgagaaaggaattcaatttgatcaggcatacacctcggttttgacacgggcaattcagactttgcacatcgctcttgaagaaatcgatcagctttggatcccagaagagaaatcttggagattaaacgagcgccattatggagctttgcaaggattaaataaaaaagcttctgctgaaaagtggggtgacgaacaagtccatatctggcgtcgttcttatgatactttgccgcctttgcaagatgaaattcaaaaatcgatcactgttaatggcaaaacctatccggccttggatcgtcgttatgccgagcttgatccaaagacattgccgcttggcgagaatttgaaagttactttggaacgagttatgcctttttgggaagacaaaattgctccggatcttcgcgccggcaagaatgtaattattgccgcccacggaaattcgcttcgtgctctttccaagtatattgaaaatatttccgatgccgacattatgggtcttgaaatcgccaatggccaaccgattatttacgatttcgatgagaatttgaaattcacgaacaaagaattactttccaagtaa

SEQ ID NO: 152729 - protein, 237 aa, Oenococcus oeni PSU-1
MAKLVFIRHGQSEWNALNLFNGWVDTKLSEEGIRQAKEAGELLAEKGIQFDQAYTSVLTRAIQTLHIALEEIDQLWIPEEKSWRLNERHYGALQGLNKKASAEKWGDEQVHIWRRSYDTLPPLQDEIQKSITVNGKTYPALDRRYAELDPKTLPLGENLKVTLERVMPFWEDKIAPDLRAGKNVIIAAHGNSLRALSKYIENISDADIMGLEIANGQPIIYDFDENLKFTNKELLSK

SEQ ID NO: 152730 - DNA, 669 bp, Oenococcus oeni PSU-1
  CDS (1)..(669): transl_table=11
atgagtaaacttgtattaatccgtcatggggaatcgactgctaatcacgataatatttttaccggctggaccgatgttccgttaactgaaaaagggatctctcaagcacatgttgctggaaaacagttgtcacactctggaattgattttgatatcgtttatacttcaatgctccaaagagcgattgtaaccagctatattattttgaatgaaatcaatcaggcctggctcccgatagtcaagtcctggcgtctaaacgaacggcattatggagctttacgcggccttaataaagccgaaaccgcacaaaagtatggagatactcaggtcagagagtggcgccgcagttatacgaccgttccaccacttttgggtcacgaagaatcttccgagcgttatttaaaactgggaattaaagaacctcttggcgagtcggccgaaatgtcttggaaacgtgttcaacctttttgggaagatcaaattgccaaacagcttcgaagtgaaaagaatgttttgttggttgcccacggttcttctattagagttttattaaagtttttggatcgcatatctgacgataattttatgaaagttgaagttggcaacggggaaccgattatttataattttgatcagcagctaaaagttatttccaaaagtaatctttag

SEQ ID NO: 152731 - protein, 222 aa, Oenococcus oeni PSU-1
MSKLVLIRHGESTANHDNIFTGWTDVPLTEKGISQAHVAGKQLSHSGIDFDIVYTSMLQRAIVTSYIILNEINQAWLPIVKSWRLNERHYGALRGLNKAETAQKYGDTQVREWRRSYTTVPPLLGHEESSERYLKLGIKEPLGESAEMSWKRVQPFWEDQIAKQLRSEKNVLLVAHGSSIRVLLKFLDRISDDNFMKVEVGNGEPIIYNFDQQLKVISKSNL

SEQ ID NO: 152732 - DNA, 663 bp, Leuconostoc mesenteroides subsp. mesenteroides ATCC 8293
  CDS (1)..(663): transl_table=11
atggctgctaaacttgtgttagttcgccacggagagtcaacagcaaaccgtgacaatgaatttaccggatggactgacgttccactgaccttaaaaggggttagacaagcgaaccgtgttggtgaagttttgaagcgacatggtttgcaattcgatgtatcatttacttcttttttaaagcgcgcaatcataactgacaatattatattggaagaaattgagcagttgtggttaccactccataaggcttggcaactcaatgagcggcactatggtgcattacgtggcttgaataaagattacgctcgtcaacaatatggcgcaaataaagttgccttatggcgacgtagttatacggctacgccaccactactagaacacgttattccagatagacgttacccggaagacttagaaccacgtggtgagagcttgaaaatggccagtgatcggcttgttccttattggcattcagaaatcttacctcagatacagcaggataaaaatgtcttaatcgtcgcacatggtagctccttacgtgctttagtcaaatatatagaacatattagcgatgaagacatagacggtcttgagattgacaatggcgaacctattttgtacgagtatgaagaaggatttagtgagaggatttatttagaatga

SEQ ID NO: 152733 - protein, 220 aa, Leuconostoc mesenteroides subsp. mesenteroides ATCC 8293
MAAKLVLVRHGESTANRDNEFTGWTDVPLTLKGVRQANRVGEVLKRHGLQFDVSFTSFLKRAIITDNIILEEIEQLWLPLHKAWQLNERHYGALRGLNKDYARQQYGANKVALWRRSYTATPPLLEHVIPDRRYPEDLEPRGESLKMASDRLVPYWHSEILPQIQQDKNVLIVAHGSSLRALVKYIEHISDEDIDGLEIDNGEPILYEYEEGFSERIYLE

SEQ ID NO: 152734 - DNA, 714 bp, Leuconostoc mesenteroides subsp. mesenteroides ATCC 8293
  CDS (1)..(714): transl_table=11
atggctaagttagtattaatccgtcacggtcaaagtgaatggaatgcattaaacttgtttaatggttggattgacacaaagttgtctgaaaaaggtattgcccaagccaaagaagctggcgatcttttggctgctgaaggtattcaatttgaccaagcatatacgtcagttttgacgcgtgcaatccaaacattgcacttggctttagaagaagcaggacaattgtttattccagaagcaaagtcatggcgtttgaatgaacgtcattatggcgcattgcaaggtcaaaacaaagccgaagctgctgaaaagtggggtgacgagcaagttcacatctggcgtcgttcatacgacgttttgccaccattgttggactcatatgatgaaacaatgacagtacaaggtaatacttacccagcatttgatcgtcgctacgccgatgtacctgaaggtgaattgccattgggtgaaaacttgaaaattactttggaacgtgtattgcctttctgggaatcagacatttcaaaagatttaaaagctggtaaaaacgtggttattgccgctcacggtaactcattgcgtgccttggttaagcacttggaaaacatctcagatgacgacattttgaatgttgaaattgctaacggacaaccattggtatatgatttggctgatgatttgtcagtcgtatcaaaaaagacattaactaagtaa

SEQ ID NO: 152735 - protein, 237 aa, Leuconostoc mesenteroides subsp. mesenteroides ATCC 8293
MAKLVLIRHGQSEWNALNLFNGWIDTKLSEKGIAQAKEAGDLLAAEGIQFDQAYTSVLTRAIQTLHLALEEAGQLFIPEAKSWRLNERHYGALQGQNKAEAAEKWGDEQVHIWRRSYDVLPPLLDSYDETMTVQGNTYPAFDRRYADVPEGELPLGENLKITLERVLPFWESDISKDLKAGKNVVIAAHGNSLRALVKHLENISDDDILNVEIANGQPLVYDLADDLSVVSKKTLTK

SEQ ID NO: 152736 - DNA, 747 bp, Solibacter usitatus Ellin6076
  CDS (1)..(747): transl_table=11
gtgaagaaactcgttctcatccgccacggcgaaagcacgtggaacaaagaaaatcgcttcaccggctggaccgacgtcgatctctccgacgaaggccgccagcaggccaccgaagccgccgaggtgctcaaacgggaaggctacgtctttgacgtggcctacaccagcgtcctcaagcgcgcgatccgcactctgtggacggtgctcgacggcatggacctgatgtggatcccggtgcaccgctcctggcgcctgaatgaacgccactatggcgcgctgcagggccttaacaaggcggagacggccgcgaagttcggcgaggaccaggtcaaaatctggcgccgcagctacgacatcccaccgcccgtcctgaccgcggacgacccgcgcttccccggccacgacccgcgctaccagagcctcaccaaggaagagctcccgctcacggagtgcctgaaggacaccgtggcgcgcttccttcccttgtggcacgacaccatcgcgcccgcgatcaggagcggtcagcgcgtcatcatcgccgcccacggcaacagcctgcgcgctctcgtgaagtacctcgatggcgtcagcgaagccgatatcgtcgagctcaatatccccaccggcatgccgctagtttatgagctcgatgacgacctcaaacccctaaaccgctactacctcggcgacccagagaaggtgaaggccgccatggaagccgtcgccgcccagggcaagaagaagtag

SEQ ID NO: 152737 - protein, 248 aa, Solibacter usitatus Ellin6076
MKKLVLIRHGESTWNKENRFTGWTDVDLSDEGRQQATEAAEVLKREGYVFDVAYTSVLKRAIRTLWTVLDGMDLMWIPVHRSWRLNERHYGALQGLNKAETAAKFGEDQVKIWRRSYDIPPPVLTADDPRFPGHDPRYQSLTKEELPLTECLKDTVARFLPLWHDTIAPAIRSGQRVIIAAHGNSLRALVKYLDGVSEADIVELNIPTGMPLVYELDDDLKPLNRYYLGDPEKVKAAMEAVAAQGKKK

SEQ ID NO: 152738 - DNA, 750 bp, Mycobacterium avium 104
  CDS (1)..(750): transl_table=11
atgggtgagactgccacgctggtactgctgcgccacggcgaaagcgaatggaactcgctgaacctgttcaccggttgggtggacgtcgggctgaccgacaagggccgcgccgaggcggtgcgcagcggcgagctgctggccgagcagggcctgctgcccgacgtgctctacacgtcgctgctgcgccgcgcgatcaccaccgcgcatctggccctcgatgccgcggaccggctgtggatcccggtgcggcgcagctggcggctcaacgaacgccactacggggcgctgcagggcctggacaaggccgagacgaaggcgcgctacggcgaggagcagttcatggcctggcgacgcagctatgacacgccgccgccgccgatcgagcggggcagcacctacagccaggacgccgatccgcgctacgccgacatcggcggcgggccgctgaccgagtgcctggccgacgtggtcgtccggttcctgccgtacttcaccgacgtcatcgtcccggacctgcgcagcggcaagacggtgctgatcgtcgcgcacggcaactcgctgcgcgccctggtcaagcacctcgatcagatgtccgacgacgacgtcgtggggctgaacatcccgaccggcatcccgctgcgctacgacttggacgcccggctgcggccgctggttcccggcggcacctacctcgaccccgaggcggccgccgccggcgccgccgcggttgccagccaggggggcggctga

SEQ ID NO: 152739 - protein, 249 aa, Mycobacterium avium 104
MGETATLVLLRHGESEWNSLNLFTGWVDVGLTDKGRAEAVRSGELLAEQGLLPDVLYTSLLRRAITTAHLALDAADRLWIPVRRSWRLNERHYGALQGLDKAETKARYGEEQFMAWRRSYDTPPPPIERGSTYSQDADPRYADIGGGPLTECLADVVVRFLPYFTDVIVPDLRSGKTVLIVAHGNSLRALVKHLDQMSDDDVVGLNIPTGIPLRYDLDARLRPLVPGGTYLDPEAAAAGAAAVASQGGG

SEQ ID NO: 152740 - DNA, 744 bp, Mycobacterium smegmatis str. MC2 155
  CDS (1)..(744): transl_table=11
atggcgaccctgatcctgctccgccacggtgagagccagtggaacgagaagaacctgttcaccggttgggtggacgtcgacctcactgacaagggccgggccgaggccgtccgcggcggccaactgatggccgagcagggcgtcctgcccgacgtgctctacacgtcactgctgcgccgggccatcaccaccgcgcacctcgcgctcgacgccgctgaccggctgtggatcccggtgcaccgcgactggcggctcaacgagcgccactacggcgcgctgcagggcctggacaaggccgagaccaaggagaagtacggcgaagagcagttcatggcgtggcgccgcagctacgacaccccgccgccgcccatcgagaagggcagcaagtacagccaggacgccgatccgcgctacgccgacatcgacggcggcccgttgaccgaatgcctcaaagacgtcgtcgagcggttcgtgccgtactacgagagcgcgatcttgcccgatctgaaggcgggcaagaccgtgctgatcgccgcccacggcaactcgctgcgcgcgctggtgaagtacctcgacggcatgtccgacgaggaggtcgtcggcctcaacatcccgaccggcatcccgctgcgctacgacctcgacgagaacctcaagcccgtcaagatcggcggtgagtacctcgatcccgaggcggccgccgccggtgcggccgccgtcgccgcccagggcgcgaagaagtag

SEQ ID NO: 152741 - protein, 247 aa, Mycobacterium smegmatis str. MC2 155
MATLILLRHGESQWNEKNLFTGWVDVDLTDKGRAEAVRGGQLMAEQGVLPDVLYTSLLRRAITTAHLALDAADRLWIPVHRDWRLNERHYGALQGLDKAETKEKYGEEQFMAWRRSYDTPPPPIEKGSKYSQDADPRYADIDGGPLTECLKDVVERFVPYYESAILPDLKAGKTVLIAAHGNSLRALVKYLDGMSDEEVVGLNIPTGIPLRYDLDENLKPVKIGGEYLDPEAAAAGAAAVAAQGAKK

SEQ ID NO: 152742 - DNA, 681 bp, Mycobacterium smegmatis str. MC2 155
  CDS (1)..(681): transl_table=11
atgaggatccgtcggctggtgatgttgcgtcacggccagaccgagtacaacgcgggcagccggatgcagggccagctcgacaccgacctgtccgacctcggccgcgatcaggccgccgcggcggccgaggtgctggccaaacggcagccgctgctgatcgtctcgtcggatctgcggcgggcgctggacacggccgagaccctcggcacccgtgcgggcgtggcggtggcggtcgacaagcgcctgcgcgagacgcatctgggggactggcaggggctgacccatctcgaggtcgacgccgcggccccgggtgcccggctggcctggcgcgacgacgcccggtgggcgccgcacggcggtgagagccgcgtggacgtcgccgagcgcagcctgccgctggtcgtcgaactcgttgcgcaacagtccgaatggggcctggaccgcccgggggccggtgccgaacgccccgtggtgctggtggcccacggtgggctgatcgcggcactgaccgccgagctgctcggcctgccggtcgacaactggccggtgctgggcggcatgggtaacgccagctgggtgcagctgtccgggcattcggccgacgacgcggagttcgcggacatccgctggcgactcgacgtgtggaacgcctcggcgcaggtggccaacgatgtcctctga

SEQ ID NO: 152743 - protein, 226 aa, Mycobacterium smegmatis str. MC2 155
MRIRRLVMLRHGQTEYNAGSRMQGQLDTDLSDLGRDQAAAAAEVLAKRQPLLIVSSDLRRALDTAETLGTRAGVAVAVDKRLRETHLGDWQGLTHLEVDAAAPGARLAWRDDARWAPHGGESRVDVAERSLPLVVELVAQQSEWGLDRPGAGAERPVVLVAHGGLIAALTAELLGLPVDNWPVLGGMGNASWVQLSGHSADDAEFADIRWRLDVWNASAQVANDVL

SEQ ID NO: 152744 - DNA, 744 bp, Nocardioides sp. JS614
  CDS (1)..(744): transl_table=11
atgacccacacgctcatcctgctccgccacggtgagagcgagtggaacgcgaagaacctcttcaccgggtgggtcgacgtcaacctcaccgagaagggccgtgccgaggcggtccgcggtggcgagctgatgcgcgaggcgggcgtcctgcccgacgtggtccacacctcggtccagcgccgcgccatcaacaccgcctgcctggcgctcgacgccgccgaccggcactggatcccggtgcgccgctcctggcggctcaacgagcgccactacggcgccctgcagggcaagaacaagaaggagaccctcgaggcctacggcgaggagcagttcatgctctggcgccgctccttcgacgtcccgccgccgccgatcgaggaggacagcgagttctcccagttcggcctcccgcagtacgccgggctcggcgacgacatgccgcacaccgagtgcctcaaggacgtgatcgcccgcttcctgccgtactgggagtccgacatcgtccccgacctccgggccggtcacacggtgctgatcgccgcccacggcaacagcctgcgggcgctggtcaagcacctcgacggcatcagcgacgaggacatcgccggcctgaacatccccaccggcatgccgctggtctacgagctggacgacgacttccggccgacggtcccccacggccgctacctcgaccccgaggccgccgccgcggctgcggccgccgtcgccaaccagggtcgctga

SEQ ID NO: 152745 - protein, 247 aa, Nocardioides sp. JS614
MTHTLILLRHGESEWNAKNLFTGWVDVNLTEKGRAEAVRGGELMREAGVLPDVVHTSVQRRAINTACLALDAADRHWIPVRRSWRLNERHYGALQGKNKKETLEAYGEEQFMLWRRSFDVPPPPIEEDSEFSQFGLPQYAGLGDDMPHTECLKDVIARFLPYWESDIVPDLRAGHTVLIAAHGNSLRALVKHLDGISDEDIAGLNIPTGMPLVYELDDDFRPTVPHGRYLDPEAAAAAAAAVANQGR

SEQ ID NO: 152746 - DNA, 750 bp, Azoarcus sp. BH72
  CDS (1)..(750): transl_table=11
atgtacaagatcgtcctgcttcgccacggtgaatccacctggaacaaggaaaaccgcttcaccggctggaccgacgtcgacctcaccgaactcggggtgggcgaggcccgcgcggcgggccagttgctcaagcgcgaaggctacagcttcgatctcgccttcacgtcggtgctcaagcgcgccaacaagacgctgaacatcgtgctcgaggaactcgacgcgctgtggctgccggtcgagcattcgtggcgcctgaacgaacgccactacggcgcgctgcagggcctgaacaaggccgagactgcagccaagttcggcgacgaccaggtgctggtgtggcgccgttcctacgacatcccgccgccggcgctggaagaaggcgacgagcgtctgaactatgacgatccgcgctacggttcgctgccgcgcgcgcgcttcccgcgcaccgaatgcctggccgacaccgtggctcgcgtggtgccgtactgggaaaccgtgatcgtgccgcagatcctctccggccgccggatcctgatcgcggcgcacggcaacagcctgcgcgccctcatcaagtacctcgatggcatttccgacggtgacatcgtcgggctcaatattcccacggcgcagccgctggtctatgagcttgacgtgaacctcaagccggtcaagagctactacctcgccgacgaggacaccatccgcgcggctcaggccgccgtggccgggcagggcaaggcaaagggctga

SEQ ID NO: 152747 - protein, 249 aa, Azoarcus sp. BH72
MYKIVLLRHGESTWNKENRFTGWTDVDLTELGVGEARAAGQLLKREGYSFDLAFTSVLKRANKTLNIVLEELDALWLPVEHSWRLNERHYGALQGLNKAETAAKFGDDQVLVWRRSYDIPPPALEEGDERLNYDDPRYGSLPRARFPRTECLADTVARVVPYWETVIVPQILSGRRILIAAHGNSLRALIKYLDGISDGDIVGLNIPTAQPLVYELDVNLKPVKSYYLADEDTIRAAQAAVAGQGKAKG

SEQ ID NO: 152748 - DNA, 747 bp, Mycobacterium sp. KMS
  CDS (1)..(747): transl_table=11
atgggagattccacgctgatcctgcttcgtcacggcgaaagtgaatggaacgcgaagaacctgttcaccgggtgggtcgacgtcgacctgaccgacaagggccgggccgaggccacgcgggcgggtgagctgatcgccgatctggaccggttgcccgacgtgctgtacacctcgctgctgcggcgcgcgatcaccacggccaacatcgcgttggacaaggcggaccggcactggatcccggtgcaccgggactggcggctcaacgagcggcactacggggcgctgcaggggctgaacaaggccgagaccaaagagaagtacggcgaggagcagttcatggcctggcggcgcagctacgacaccccgccgccgccgatcgaggccggcagcgagtacagccaggaccgcgatccgcgctacgccgacatcgacggcggaccgctcaccgaatgcctggccgacgtggtggcccgcttcgtgccctacttcgagcagacgatcgtgccggatctgcgcgagggcaggaccgtgctgatcgccgcgcacggcaactcactgcgtgcgctggtcaagtacctcgacggcatgtccgacgaggacgtggtcgggctgaacatcccgaccggcataccgctgcgctacgacctggactccgatctgaagccgacggtggcaggcggcacgtacctcgatccggaggccgcggcggccggcgcggcggccgtggcatcccagggcgcgaagtaa

SEQ ID NO: 152749 - protein, 248 aa, Mycobacterium sp. KMS
MGDSTLILLRHGESEWNAKNLFTGWVDVDLTDKGRAEATRAGELIADLDRLPDVLYTSLLRRAITTANIALDKADRHWIPVHRDWRLNERHYGALQGLNKAETKEKYGEEQFMAWRRSYDTPPPPIEAGSEYSQDRDPRYADIDGGPLTECLADVVARFVPYFEQTIVPDLREGRTVLIAAHGNSLRALVKYLDGMSDEDVVGLNIPTGIPLRYDLDSDLKPTVAGGTYLDPEAAAAGAAAVASQGAK

SEQ ID NO: 152750 - DNA, 744 bp, Acidovorax sp. JS42
  CDS (1)..(744): transl_table=11
atgcacaaactcgttctgatccgccacggcgaatccacgtggaatctggaaaaccgcttcaccggctggaccgatgtggatctgacccccacgggcatcgagcaggccaagaatgccggccgcctgctcaaggccgagggctacgattttgacctggcctacaccagtgtgctcaagcgcgccacgcgcacgctgtggcactgcctggacgagatggaccgcacctggctgcccgtggagcacagctggcgcctgaacgagcgccactacggcgctctgcagggcctgaacaaggccgacatggccaagcagtatggcgacgcgcaagtgctggtctggcgccgcagctacgacacgccgccgccggccctggagcccaccgacccgcgctgcgagcgcggcgacatccgctacgcgggcctggcgcccgagcaggtgccgctgaccgagtgcctcaaggacacggtggcgcgcgtgctgccctactggaacgaagccatcgcgccaacgatccgctcgggcaagcgtgtgctgatcgcagcgcacggcaactccatccgcgcgctggtcaagtacctggacggcatctccgaccaagacatcgtgggcctgaacattcccaacggcattccgctggtgtacgagctggacgcggaactcaagcccctgcgcagctactacctgggcgacgccgaggccaccgccaaggccgccgccgccgtggccgcgcagggcaaggcctga

SEQ ID NO: 152751 - protein, 247 aa, Acidovorax sp. JS42
MHKLVLIRHGESTWNLENRFTGWTDVDLTPTGIEQAKNAGRLLKAEGYDFDLAYTSVLKRATRTLWHCLDEMDRTWLPVEHSWRLNERHYGALQGLNKADMAKQYGDAQVLVWRRSYDTPPPALEPTDPRCERGDIRYAGLAPEQVPLTECLKDTVARVLPYWNEAIAPTIRSGKRVLIAAHGNSIRALVKYLDGISDQDIVGLNIPNGIPLVYELDAELKPLRSYYLGDAEATAKAAAAVAAQGKA

SEQ ID NO: 152752 - DNA, 621 bp, Fusobacterium nucleatum subsp. vincentii ATCC 49256
  CDS (1)..(621): transl_table=11
atggaaatttattttgtaagacatgggcaaacgatttggaatgttgaaaaaagatttcaaggactttcagactcaccacttactgaattaggaattacacaagcgaaattattaggtgaaaaattaaaagatataaaatttgataaattttattccacttctttaaaaagagcaaatgatactgctaattatataaaaggaaatagaaaacaagaagttgaaatatttgatgattttgttgaaatttcaatgggagatatggaaggaatacaacaggaagaatttaaaaaactttatccagaacaagttaaaaatttctttttcaatcagcttgaatataatccaagttcttttaaaggagaaagttttttagaagttagagaaagagttgcaaaaggtttagataaattcataaaattaaataaaaattatgaaagagttttggttgttagtcatggagctacattaaaaactttgttacattatataagtggaaaagatatttcaactttgagtgatgaagcaatacctaaaaatacaagctatactattgtaaagtatcaaaatggaaaatttgaaattatagatttttctaatacatcacacttggaggaaaaataa

SEQ ID NO: 152753 - protein, 206 aa, Fusobacterium nucleatum subsp. vincentii ATCC 49256
MEIYFVRHGQTIWNVEKRFQGLSDSPLTELGITQAKLLGEKLKDIKFDKFYSTSLKRANDTANYIKGNRKQEVEIFDDFVEISMGDMEGIQQEEFKKLYPEQVKNFFFNQLEYNPSSFKGESFLEVRERVAKGLDKFIKLNKNYERVLVVSHGATLKTLLHYISGKDISTLSDEAIPKNTSYTIVKYQNGKFEIIDFSNTSHLEEK

SEQ ID NO: 152754 - DNA, 687 bp, Fusobacterium nucleatum subsp. vincentii ATCC 49256
  CDS (1)..(687): transl_table=11
atgaaattagttttaattcgtcatggagaaagtgcatggaacttagaaaatagatttacaggctggaaagatgtggatttaagtccaaagggagtagaagaagcaaaagcagcagggaagagtttaaaagaaatgggacttgtttttgatgttgcctatacatcatatctaaaaagagcaattaaaactttaaatatagttttagaagaaatggatgaattatatattccagtttacaaatcttggagattaaatgaaagacattatggagcattacaaggattaaataaagcagaaactgcaaaaaaatatggagatgaacaagtacatatctggcgtcgtagttttgatgtagctcctccatcaatagataaaaatagtgaatattatccgaaatcagatagaagatatgcaaatttagctgattctgatattccattaggagaaagtctaaaagatacaatagcaagagttttaccttattggcattcagatatttcaaagagtttacaagaaggtaaaaatgttatagttgctgctcatggaaatagtttaagggcattgataaaatacttattaaatatttcaaatgaagatatattaaatctaaatttaactactggtaaacctttaatatttgaaatggataaagatttaaaagtattaaaagcacctgaatcattttaa

SEQ ID NO: 152755 - protein, 228 aa, Fusobacterium nucleatum subsp. vincentii ATCC 49256
MKLVLIRHGESAWNLENRFTGWKDVDLSPKGVEEAKAAGKSLKEMGLVFDVAYTSYLKRAIKTLNIVLEEMDELYIPVYKSWRLNERHYGALQGLNKAETAKKYGDEQVHIWRRSFDVAPPSIDKNSEYYPKSDRRYANLADSDIPLGESLKDTIARVLPYWHSDISKSLQEGKNVIVAAHGNSLRALIKYLLNISNEDILNLNLTTGKPLIFEMDKDLKVLKAPESF

SEQ ID NO: 152756 - DNA, 684 bp, Haemophilus influenzae R2866
  CDS (1)..(684): transl_table=11
atggaattagtatttatccgtcacggttttagtgaatggaatgcgaaaaacttattcacaggctggcgtgatgtgaatttaactgaacgtggtgtggaagaagcaaaagctgcgggtaaaaaactgttagacaaaggttatgaatttgatatcgcatttacctctgttttaactcgagcaatcaaaacttgtaacatcgtgttagaagaatcccatcaattatggattccacaagtaaaaaactggcgtttaaatgaacgtcattatggtgctttacaaggtttagataaaaaagcgactgcggaacaatacggtgacgaacaagttcatatttggcgtcgttcttatgacatttctccaccagatctagatccacaagatccaaattctgcacacaatgaccgtcgctacgcaaatattccatctgatgttgtgccaaacgcagaaaatttaaaattaacattagaacgcgcattaccattctgggaagatcaaattgcaccagcaatgctttctggcaaacgtgttttagtggttgctcacggaaattcacttcgtgcgttggcaaaacatattatcggtatttctgattctgaaattatggattttgaaattccaacaggtcagcctttagttttaaaacttgatgataaattaaattacgtagaacattactatctttaa

SEQ ID NO: 152757 - protein, 227 aa, Haemophilus influenzae R2866
MELVFIRHGFSEWNAKNLFTGWRDVNLTERGVEEAKAAGKKLLDKGYEFDIAFTSVLTRAIKTCNIVLEESHQLWIPQVKNWRLNERHYGALQGLDKKATAEQYGDEQVHIWRRSYDISPPDLDPQDPNSAHNDRRYANIPSDVVPNAENLKLTLERALPFWEDQIAPAMLSGKRVLVVAHGNSLRALAKHIIGISDSEIMDFEIPTGQPLVLKLDDKLNYVEHYYL

SEQ ID NO: 152758 - DNA, 675 bp, Listeria monocytogenes str. 1/2a F6854
  CDS (1)..(675): transl_table=11
atgggaaaaaaattatcactttattttgtaagacatggtcaaacttacttaaacaaaaatttacgtatgcaaggttgggctgatacgccgctcacaccagaaggcattgaagtagtcaaagaaagtggtcgcggactggcggaaacggaattcgtagcagcctattcaagcgacttacaccgtacaatcgcaacagcggggcacttacttaaagaaaataaacacgcatttggtttaacgctagaaccactaagcgaatttcgggaaactttcttcggttcctacgaaggcgaaaaaggcgatgtagcatggaacgaaattgcacatcatatgggatatgcgaatcaagaagagctattccaaaatgccgatgtgcgcgaaacaatgaatggtacgaaagctgctgacccaaccggagatgcggaagatttcatgacattttggacgcgcgtagaacaaggcttcttacacgttatcaatcgtcatagagaaactggcggaaacgtccttatcgtcgctcacggaaataccattcgtaatattgtccacgaactagaaccatccatggacgaagcagtcatcctcgacaacgcgagtgttaccgtattagcttacgaaaacggcttattcaaattagaacgtttaaatgatacttctcattttaaaaaagcatag

SEQ ID NO: 152759 - protein, 224 aa, Listeria monocytogenes str. 1/2a F6854
MGKKLSLYFVRHGQTYLNKNLRMQGWADTPLTPEGIEVVKESGRGLAETEFVAAYSSDLHRTIATAGHLLKENKHAFGLTLEPLSEFRETFFGSYEGEKGDVAWNEIAHHMGYANQEELFQNADVRETMNGTKAADPTGDAEDFMTFWTRVEQGFLHVINRHRETGGNVLIVAHGNTIRNIVHELEPSMDEAVILDNASVTVLAYENGLFKLERLNDTSHFKKA

SEQ ID NO: 152760 - DNA, 690 bp, Listeria monocytogenes str. 1/2a F6854
  CDS (1)..(690): transl_table=11
atgaaattagtattaattcgtcatggtcaaagtgaatggaacaaattgaacctatttacaggttggcatgatgtggacttgtcgcaagaaggcgttgtggaagcaatgacagcaggaaaaagaattaaagaggcaggcttagaattcgatgttgccttcacttctgttttaacacgagctattaaaacacttaattatgtgttagaagaatctgaccaaatgtgggtaccagttcataaatcttggcgcttgaacgaacgtcattacggcgcacttcaaggacttaataaacaagaaactgctgaaaaatatggtgctgaccaagtacaaaaatggcgtagaagctatgacacacttccaccattactagaagaaaacgacgaaagacaagcaaaaaatgatcgtcgttatcaactccttgatacacacgctattccatcaggtgaaaacttgaaagtaacattagaacgcgttattccttattggatggacacaattgctccagaaattaaagaaggacgacgagtagtcatcgcggcgcatggtaacagtttacgagcattagtgaaattcctagaaggtattagtgatgatgaaataatggatttagaaattccaacaggcgtaccgctagtatatgaattaaacgatgatttaaaaccagtaaataaatattacttggataaataa

SEQ ID NO: 152761 - protein, 229 aa, Listeria monocytogenes str. 1/2a F6854
MKLVLIRHGQSEWNKLNLFTGWHDVDLSQEGVVEAMTAGKRIKEAGLEFDVAFTSVLTRAIKTLNYVLEESDQMWVPVHKSWRLNERHYGALQGLNKQETAEKYGADQVQKWRRSYDTLPPLLEENDERQAKNDRRYQLLDTHAIPSGENLKVTLERVIPYWMDTIAPEIKEGRRVVIAAHGNSLRALVKFLEGISDDEIMDLEIPTGVPLVYELNDDLKPVNKYYLDK

SEQ ID NO: 152762 - DNA, 738 bp, Bacillus cereus G9241
  CDS (1)..(738): transl_table=11
atgataaaacttgtacttattcgtcacggacagagtttatggaatcttgaaaatcgctttactggatggacagatgtagatttatcagagaatggattaagtgaagcgagagaagcaggagcgatattaaagaaaaacggatatacttttgatgtagcttatacatctgtattaaaacgagcgattcggacgttatggattgtacttcatgagatggatcttgcctgggtgccagtacataaatcttggaagctaaatgaaagacattatggtgcattgcaagggttgaataaagatgaaaccgcgcaaaaatatggtgaggagcaagttcatatttggagaagaagtattgatgtaagaccaccggctcttactgaggatgatcccaggtatgaaatgaatgatccaagatataaagcactgaaaaaaggtgagtttccattgacagaatgtttagtggatacggagaaaagagtacttgcttattggcattcagaaattgcgccgaaattaaagaatggtaacaaagtaatcatttcatcacatggtaacacaattcgctcgctagtaaaatatttagataacctttcaagcgatggtgtcgtttcattaaacattccaacgagcataccactcgtgtatgaattagacgatgatttacgtccaattcgtcattattacttaagtatggatggagaagtacctgaaggggaaattccgaaacatatttctttttaa

SEQ ID NO: 152763 - protein, 245 aa, Bacillus cereus G9241
MIKLVLIRHGQSLWNLENRFTGWTDVDLSENGLSEAREAGAILKKNGYTFDVAYTSVLKRAIRTLWIVLHEMDLAWVPVHKSWKLNERHYGALQGLNKDETAQKYGEEQVHIWRRSIDVRPPALTEDDPRYEMNDPRYKALKKGEFPLTECLVDTEKRVLAYWHSEIAPKLKNGNKVIISSHGNTIRSLVKYLDNLSSDGVVSLNIPTSIPLVYELDDDLRPIRHYYLSMDGEVPEGEIPKHISF

SEQ ID NO: 152764 - DNA, 744 bp, Prosthecochloris aestuarii DSM 271
  CDS (1)..(744): transl_table=11
atgataaaactggtactgttacgacacggagaaagccagtggaacagggaaaaccgttttaccggatggagagatattgatttaagcgaaaaagggctggctgaggccgctaatgccggcgtgctgatgaaagaagaggggctgacatttgatatcgcttatacttctgtactcaaacgagctattcggaccctgtggaacgcgcttgacacaatggaccttctgtgggttccggtagagaaaacctggcgccttaacgagcgacattacggttcgcttcaggggctcaataaaacagaaaccgctcagcttcatggcgaagagcaggtgctggtctggagaagaagctatgatacgccgccgccgccgctcgaaaaaactgatgaacgctatcccggcaacgatccccgctatgcgtccctctcttctgaagagattcctgttgcggaatgcctgaaggatacggttgcccgttttcttccctactggcatgagacgattgccccgcagatcaaggcgggaaagaaggtgctcatcgttgctcacggcaattcacttcgtgcgctggtaaagtatctcgacaatatttccgaggaggatatcgttggtatcaacatcccgacggggattcctctcgtgtatgaactcgatgatgatctgaagccgatccgccattattatcttggcgatcaggaggctgcggccaaagccgcggcagccgtcgccaatcaggccaaagggtaa

SEQ ID NO: 152765 - protein, 247 aa, Prosthecochloris aestuarii DSM 271
MIKLVLLRHGESQWNRENRFTGWRDIDLSEKGLAEAANAGVLMKEEGLTFDIAYTSVLKRAIRTLWNALDTMDLLWVPVEKTWRLNERHYGSLQGLNKTETAQLHGEEQVLVWRRSYDTPPPPLEKTDERYPGNDPRYASLSSEEIPVAECLKDTVARFLPYWHETIAPQIKAGKKVLIVAHGNSLRALVKYLDNISEEDIVGINIPTGIPLVYELDDDLKPIRHYYLGDQEAAAKAAAAVANQAKG

SEQ ID NO: 152766 - DNA, 753 bp, Kineococcus radiotolerans SRS30216
  CDS (1)..(753): transl_table=11
atgactgaagcggcgcacaccctcgtcctcctgcggcacggcgagagcgagtggaacgccctgaacctgttcaccgggtgggtcgacgtggccctctcggagaagggccgggccgaggccgcggccggggggcggatgctcgtcgagaacggcgtcctgcccgacgtcgtccacacctccgtgctgcggcgcgcgatcacgacggcgttcctcgccctcgacgccgccgaccggcactggatcgacgtgaagcggtcctggcggctcaacgagcgccactacggggcgctgcagggcaaggacaagaagcagacgctggcggagttcggcgaggagcagttcatgctctggcgccgctcctacgacaccccgccgccggccatcgaggcgggttcggagttctcccaggacggcgacccgcgctacgccgggctcggcgacgacatgccggccaccgagtgcctggccgacgtcgtggcccgcatgctgccctactggaccgagtcggtcgtccccgacctgcgggccgggcggacggtcctgctcgccgcccacggcaactcgctgcgcgcgctggtgaagcacctcgacggcgtctccgacgccgacatcgcggggctgaacatccccaccggcatcccgctggtgtaccgcctggacgcggacctgaagcccctcgtccccggcggggagtacctcgaccccgccgccgcggccgcggccgcggccgccgtcgccaaccagggccgctga

SEQ ID NO: 152767 - protein, 250 aa, Kineococcus radiotolerans SRS30216
MTEAAHTLVLLRHGESEWNALNLFTGWVDVALSEKGRAEAAAGGRMLVENGVLPDVVHTSVLRRAITTAFLALDAADRHWIDVKRSWRLNERHYGALQGKDKKQTLAEFGEEQFMLWRRSYDTPPPAIEAGSEFSQDGDPRYAGLGDDMPATECLADVVARMLPYWTESVVPDLRAGRTVLLAAHGNSLRALVKHLDGVSDADIAGLNIPTGIPLVYRLDADLKPLVPGGEYLDPAAAAAAAAAVANQGR

SEQ ID NO: 152768 - DNA, 750 bp, Xylella fastidiosa Dixon
  CDS (1)..(750): transl_table=11
atgactcgtaaacttgtattgctacgccatggacagagtcaatggaactcaatgaaccgttttactggctgggtggatatagggctgaccgaacaaggtcatcaagaagccactatggctggtcatctgatgaaagaagaaggactagagtttgatgtcgctcatacttctttacttaagcgggcgatccatacattacaagacgcacttaaagcattggaccaggactggttaccaatttataaaagctggcgtctcaatgagcgtcactacggtgctctacaaggccttgataaaatagataccgcagctaaacatggtgaagagcaagtcaatatttggcgccgctcctatgacatccagccgccgccgattgatctagatgacccaagccatccaatgcgagaccgccgttacgctgctctggaccgcaaagtattacctgtgacggaatcgctgaaaaacacactcgaacgagtattaccgtactggaatgatgctatcgcaccacaactaaatgacaacaagacggtacttattagcgcccacggcaactcattgcgtgcgttgtacaagtaccttaatcaagaaagtgatgagaaaatcctaaatgtcaatatccctactggcattccacttctatttgaactgagcgatacactacaagtagtgagttaccgttaccttggcgatccagatgcagcacaacgcgctgccgaaatggtagcaaaccaaggtaaggcgaaataa

SEQ ID NO: 152769 - protein, 249 aa, Xylella fastidiosa Dixon
MTRKLVLLRHGQSQWNSMNRFTGWVDIGLTEQGHQEATMAGHLMKEEGLEFDVAHTSLLKRAIHTLQDALKALDQDWLPIYKSWRLNERHYGALQGLDKIDTAAKHGEEQVNIWRRSYDIQPPPIDLDDPSHPMRDRRYAALDRKVLPVTESLKNTLERVLPYWNDAIAPQLNDNKTVLISAHGNSLRALYKYLNQESDEKILNVNIPTGIPLLFELSDTLQVVSYRYLGDPDAAQRAAEMVANQGKAK

SEQ ID NO: 152770 - DNA, 687 bp, Erythrobacter sp. NAP1
  CDS (1)..(687): transl_table=11
atgcctaagttgattttggtccgccacggccagagccagtggaacctcgaaaaccgcttcacggggtggtgggacgtcgatctcacagaaaagggtgtggccgaagccaaggccgcgggcacgctgatgaaggaaaaaggcgtcctgcccacgacctgcttcaccagcttccagacccgcgcgatcaagacactcaacctggcgttggaagagatgggccgcctgtggttgccggttaccaaggactggcgcctcaatgagcggcactatggcggcctcacggggctcaacaagcaggaaacccgggacaagcacggcgacgagcaagtccacatctggcgtcgcagtttcgatacgccgccccctccgatggagccgggcagcgagtacgaccccggggctgatccacgatacgaagggatcgacgttccctatactgaaagcctcaagctcacgatcgagcgcgtgctgccttattgggaaagcgacattcttcccgttctttccagcggagagacagtcatcatctcggcgcacggcaattccctgcgcgcactggtcaagcacctctcgaatatctctgatgaggacattaccgggctggagattccaaccggtcaaccgatcgtctacgaattcgatgatactatgacgcctggcgagcggtattatttgaaagacagctga

SEQ ID NO: 152771 - protein, 228 aa, Erythrobacter sp. NAP1
MPKLILVRHGQSQWNLENRFTGWWDVDLTEKGVAEAKAAGTLMKEKGVLPTTCFTSFQTRAIKTLNLALEEMGRLWLPVTKDWRLNERHYGGLTGLNKQETRDKHGDEQVHIWRRSFDTPPPPMEPGSEYDPGADPRYEGIDVPYTESLKLTIERVLPYWESDILPVLSSGETVIISAHGNSLRALVKHLSNISDEDITGLEIPTGQPIVYEFDDTMTPGERYYLKDS

SEQ ID NO: 152772 - DNA, 693 bp, Photobacterium sp. SKA34
  CDS (1)..(693): transl_table=11
atgaaaaatacacgtattgttctacttcgtcatggtcaaagtgtttggaacaaagaaaaccgttttactggctgggcgaatgtctctctttctgaattaggcgaaaccgaagcgcgtaatgcaggcattaaattgaaagagaatggtttcaactttaatttttgctatacctcaatgcttgatcgtgcgatcaaaacatctaacttagcattagaacagcttgattctttatggatccctgttgagcacgactggcaattgaatgaacgtcattatggtgatcttcaaggattgaataaaacagaaacagcagaagagtttggcgacgaacaagtgcacatttggcgtcgtagttatgatattgagccaccacaagtaagtgaagatagctttttttacccaggtaatgatagacgttaccaagaactacaacacagccaacttccacatggtgaatcgttgaaagatacctatgatagggtaataccattctggaatgagaatattgtccctaatgttaaacaaggctctgatattttaattgccgctcatggtaatagcttacgtgctttgattaaatatttagataatattcctgatgacaaaattacagaattagaaataccaacaggtgcaccattagtttatgaatttaacaagcagatgaaacctgtacagagctattatttgtaa

SEQ ID NO: 152773 - protein, 230 aa, Photobacterium sp. SKA34
MKNTRIVLLRHGQSVWNKENRFTGWANVSLSELGETEARNAGIKLKENGFNFNFCYTSMLDRAIKTSNLALEQLDSLWIPVEHDWQLNERHYGDLQGLNKTETAEEFGDEQVHIWRRSYDIEPPQVSEDSFFYPGNDRRYQELQHSQLPHGESLKDTYDRVIPFWNENIVPNVKQGSDILIAAHGNSLRALIKYLDNIPDDKITELEIPTGAPLVYEFNKQMKPVQSYYL

SEQ ID NO: 152774 - DNA, 747 bp, Herbaspirillum seropedicae
  CDS (1)..(747): transl_table=11
atgtacaaaatcgtattcatgcgccacggcgaatcgacctggaacctggccaaccgtttcaccggctgggtcgacgtcgatctgaccgagaagggcgtggctgaagcccgccaggccggcaagctgctcaaggaagccggcttcaccttcgacctggcctatacctcggtgttgaagcgcgccatccgcaccctctggaccacgctcgatgaaatggaccagatgtacatccccatcaagaacgactggcgcctgaacgaacgccactacggcgccctgcagggcctgaacaaggccgagaccgccgcccagtacggcgacgagcaggtgctggtctggcgccgcagctacgacaccccgcccaacccgctgaccccgggcgaggagcgcgacgccttcggcgacccgcgctacgccggcctgtcgcgtgagcaggtgccgctgaccgagtgcctcaaggataccgtggcgcgcgtgctgccggcctggaatgacgccatcgccccggccatccgcgccggcaagcagatcatcatctcggcccacggcaacagcctgcgcgccctgatcaagtacctggacggcatcagcgacaacgacatcgtcggcctgaacatccccaacggccagccgctggtctatgaactggacgccgacctcaagcccatcaagagctattacctgggcgaccagtcggccatcgaggcagcgctcaaggccgtggccaaccaagggaagtcgaaataa

SEQ ID NO: 152775 - protein, 248 aa, Herbaspirillum seropedicae
MYKIVFMRHGESTWNLANRFTGWVDVDLTEKGVAEARQAGKLLKEAGFTFDLAYTSVLKRAIRTLWTTLDEMDQMYIPIKNDWRLNERHYGALQGLNKAETAAQYGDEQVLVWRRSYDTPPNPLTPGEERDAFGDPRYAGLSREQVPLTECLKDTVARVLPAWNDAIAPAIRAGKQIIISAHGNSLRALIKYLDGISDNDIVGLNIPNGQPLVYELDADLKPIKSYYLGDQSAIEAALKAVANQGKSK

SEQ ID NO: 152776 - DNA, 657 bp, Lactobacillus reuteri
  CDS (1)..(657): transl_table=11
atggcaatcacagtttactttgtccggcacggtgagacctacttcaaccggtttgctcgcctgcaaggatggtcagataccccgcttacagaaaaaggagagatggatgctaaaaagatcggccaagttttagcggacttaaggatcgattaccttttctccagtgatttaaaacgagcagttgatactgcacggcttttaattgcggatcacctaactgcgacggtgaaggaaccaatccaaaaaaagttcttccgcgaggtattttatgggtcttttgaaggtcatagtaatgaagaaggcgctatctgggcaagctatcttgaaggcaagcgatttaggcgtatcggtgaattagttgatgagtttggcgttgaaaaagcgcatgacttactgaaagccgccgatccggctcaccttgcagaagatagtaatgaattaaatgcccgtgtagagcaggcaattgcctttttgcaaagcttaccggatgagagtaatgtggttgtagtagcccatggatcgattatccaatatattgcggggatgtatgggaaacctggatacaagtatgaaaacttacataacggcgcgctgatgaaggttcagctaacagttagagacgttgaaattactggatacaatcaatttaaactataa

SEQ ID NO: 152777 - protein, 218 aa, Lactobacillus reuteri
MAITVYFVRHGETYFNRFARLQGWSDTPLTEKGEMDAKKIGQVLADLRIDYLFSSDLKRAVDTARLLIADHLTATVKEPIQKKFFREVFYGSFEGHSNEEGAIWASYLEGKRFRRIGELVDEFGVEKAHDLLKAADPAHLAEDSNELNARVEQAIAFLQSLPDESNVVVVAHGSIIQYIAGMYGKPGYKYENLHNGALMKVQLTVRDVEITGYNQFKL

SEQ ID NO: 152778 - DNA, 741 bp, Aspergillus oryzae
  CDS (1)..(741)
atgcctgacaaggacgctggtacaccccgtgttttcctctaccgacacgggcagacggagtggtccaagaacggccggtacaccggtgtcactgagctggaactcactcaagatggcgagaagcaggtccttgcctctggcaagatgattgttggatcgggcaaactaattgacccggcccacctggctcatgtgtatattagtcctcgaaagagggctatgcagactttcgagattgctttctctgatgctgctaagcagcagctcagagacgcaaacaaggtcagcgaaaccgacagactggctgagtggggctacggtctttacgagggattggtgacgaaggagatccgggctttgcgaaaggagcatggtctggataccgagcaggaatgggatatctggcgcgatggctgtgaggagggagagtctcctcaagaggtcacggatcgcattgacgatcttattaaagagattcgtgagcttcacaaagacaacatgcacggcgagaagcattgtgacgtgctcttggtggcacatggccacttgcttcgggctttcaccaagcgctggcttggataccccatggagtttcccctttctatgatgcttgaacctggtgccgttggtgttttgagctaccaacaccatagcattgacgagcctgccctgatgctctatgtaaattcttcggcattgcttgaatctgccaatctcttgctgcagccccgcaacctgtag

SEQ ID NO: 152779 - protein, 246 aa, Aspergillus oryzae
MPDKDAGTPRVFLYRHGQTEWSKNGRYTGVTELELTQDGEKQVLASGKMIVGSGKLIDPAHLAHVYISPRKRAMQTFEIAFSDAAKQQLRDANKVSETDRLAEWGYGLYEGLVTKEIRALRKEHGLDTEQEWDIWRDGCEEGESPQEVTDRIDDLIKEIRELHKDNMHGEKHCDVLLVAHGHLLRAFTKRWLGYPMEFPLSMMLEPGAVGVLSYQHHSIDEPALMLYVNSSALLESANLLLQPRNL

SEQ ID NO: 152780 - DNA, 756 bp, Propionibacterium freudenreichii subsp
  CDS (1)..(756): transl_table=11
gtgcacatgacctcgaagttgatcctgctccgccatggcgagagcgaatggaacgcgaaaaacctgttcaccggctgggtcgacgtcgacctcaacgagaagggcgtgcgggaggcatcccatggtggcgagctgctggcccaggagggactgctgcccgacatcgtgcacacctcgctgttgcgccgcgccatccacacctcgtacctggcccttgacaaggccgatcgcctctggattccggtgaagcgcagctggcgcctcaacgagcgccactacggcgccctgcagggcctcaacaagtccgagatccgcgaccagtacggcgaggagcagttcatggcctggcgtcgcagctacgacgtgccgccgccggccatcgagcccgacagcaagttcagccagttcaacgacccgcgctacgccgacatcccggctgacgagcgtccgctgcatgagtgcctcaaggacgtcgtcgagcgcatgcttccctactgggagtcgtcgatcgtgcccgacctgaaggccggcaagacggtgctggtggccgcccacggcaattcgctgcgtgcgctggtcaagcacctcgacaacatcgatgaccagaccatctcgggcctcaacatcccgaccggcattccgctgttctacgagctcgacgatgacatgaagccgctggtgcccggtggccgctatcttgacccggaggcggcagccgccggacagaaggccgtcgccagccagggcaagaagtag

SEQ ID NO: 152781 - protein, 251 aa, Propionibacterium freudenreichii subsp
MHMTSKLILLRHGESEWNAKNLFTGWVDVDLNEKGVREASHGGELLAQEGLLPDIVHTSLLRRAIHTSYLALDKADRLWIPVKRSWRLNERHYGALQGLNKSEIRDQYGEEQFMAWRRSYDVPPPAIEPDSKFSQFNDPRYADIPADERPLHECLKDVVERMLPYWESSIVPDLKAGKTVLVAAHGNSLRALVKHLDNIDDQTISGLNIPTGIPLFYELDDDMKPLVPGGRYLDPEAAAAGQKAVASQGKK

SEQ ID NO: 152782 - DNA, 765 bp, Toxoptera citricida
  CDS (1)..(765)
atggccaagtacaaggtagtgatggttagacacggtgaaagcgaatggaaccaaaaaaacttgttctgtggatggtatgatgcttcgttaagccccaaaggtgaagaggaagcagcaaacgctggtaaagcattgaaacaaggcaattacaaatttgacctagcccacacatctgtattaaagagagcacaaaacactctgggtgcaatattgaaagaacttggccaagaagacattccgatatctaaaacttggcgtttgaatgaaagacattatggtggcctcactggattgaacaaatctgagactgcagccaaatatggcgaagaacaagttcaaatttggagacgtagtttcgacactcctccaccttccatggatacagaccatgcatactatgatcaaattgtaaatgaccctcgttacaaagatgaacctttaaaggaggaatttcctatgtttgaatcattgaaattgacaattcagaggacattgccttactggaatgatgttattattcctcagttaaaagaaggaaaacaaatattgatagctgctcatggaaacagtcttagaggaatagtcaaacatttagacaatttgacagaagaccaaatcatgtgtcttaacttacctactggtataccatttgaatatgaattagatgaaaactttaaacctgtagtttcaatgaagtttttgggtgacgaggagactgtaaaaaaggcaattgaagctgttgctgcacaaggcaaagcaaaataa

SEQ ID NO: 152783 - protein, 254 aa, Toxoptera citricida
MAKYKVVMVRHGESEWNQKNLFCGWYDASLSPKGEEEAANAGKALKQGNYKFDLAHTSVLKRAQNTLGAILKELGQEDIPISKTWRLNERHYGGLTGLNKSETAAKYGEEQVQIWRRSFDTPPPSMDTDHAYYDQIVNDPRYKDEPLKEEFPMFESLKLTIQRTLPYWNDVIIPQLKEGKQILIAAHGNSLRGIVKHLDNLTEDQIMCLNLPTGIPFEYELDENFKPVVSMKFLGDEETVKKAIEAVAAQGKAK

SEQ ID NO: 152784 - DNA, 816 bp, Oryza sativa subsp
  CDS (1)..(816)
atggctgcggcaacatctcacagcgccattgtgcacacccaatctcaccggtggagacccaatcaggcagcaatttggttttggttttgtttgtgcatcgaggtcttcggtggtggagccggtgaaagttccctcatattgataaggcatggagaatcattgtggaatgagaaaaacctgttcactggctgcgtcgatgtgcccctgacacccaagggcgtcgaggaggctatcgaggcaggaaaacggatttgcagtatcccgatcgatgtgatatttacctcttcgctaattcgtgctcagatgactgcaatgcttgcgatgatgcagcatcggaggaagaaggtgtacagtgaagagacaaggaaacagtctattcctgtcataacagcttggcaactgaatgaacgaatgtatggtgagctgcaaggccttaataagcaggaaactgcagacaggtttggcaatgaacaagttcataaatggcgtcgtagttatgatattccacccccaaatggtgaaagtctagagatgtgtgcagagagagctgttgcttatttcaaggaacatgttgttcctcaactcacagctggaaagcatgtgatgattgctgcacatgggaattcactccgttcaattataatgcagcttgacaaattgacatctcaagaggtaatcagccttgagttgtcaacaggcattcctatgctttacattttcaaggaagggaagttcattagacggggaagcccagtaggaccttctgaggcaagcgtttgtgcctataccagggtaagagtcttctccaatttataa

SEQ ID NO: 152785 - protein, 271 aa, Oryza sativa subsp
MAAATSHSAIVHTQSHRWRPNQAAIWFWFCLCIEVFGGGAGESSLILIRHGESLWNEKNLFTGCVDVPLTPKGVEEAIEAGKRICSIPIDVIFTSSLIRAQMTAMLAMMQHRRKKVYSEETRKQSIPVITAWQLNERMYGELQGLNKQETADRFGNEQVHKWRRSYDIPPPNGESLEMCAERAVAYFKEHVVPQLTAGKHVMIAAHGNSLRSIIMQLDKLTSQEVISLELSTGIPMLYIFKEGKFIRRGSPVGPSEASVCAYTRVRVFSNL

SEQ ID NO: 152786 - DNA, 765 bp, Apis cerana
  CDS (1)..(765)
atgtctaaatatacgattgtaatggtacgtcatggagaaagtgaatggaataaattgaatttattttgtggatggtatgattcccatttatctgataaaggtaagattgaagcagtttcagcaggaaaagcaatcaaagacgcaaaattcacttttgatattgctcatacatcattattatcaagagctcaagatactcttaaagcaattcttaaagaaataggacaagaaaacattactgttcaaaagacatggcgattaaatgaacgtcattatggaggtttgactggtttaaataaagctgaaactgctgctaaatatggtgaagaacaagttcaaatttggagaagatcttttgatacacctcctccacctatggaaccagatcataaatattatgaaataatagtaaaggatcctagatatgcaaatgatccaaaaccagaggaatttcctaaatttgagtctctcaaattaacaattgaaaggacattaccatattggaataatactattattcctcaattaaaagaaggaaaaagaattatcatagctgctcatggaaatagtttgcgtggcatagttaaacatttagatcaaatgagcaatgatgaaatcatgaaattaaatttaccaactggtattccatttgtttatgaattagatgaaaatttcaagcctgttgtatctatgaaattcttaggtgatgaagaaactgtaaaagctgcaatggctgcagttgctgcacaagcaaaagttaaataa

SEQ ID NO: 152787 - protein, 254 aa, Apis cerana
MSKYTIVMVRHGESEWNKLNLFCGWYDSHLSDKGKIEAVSAGKAIKDAKFTFDIAHTSLLSRAQDTLKAILKEIGQENITVQKTWRLNERHYGGLTGLNKAETAAKYGEEQVQIWRRSFDTPPPPMEPDHKYYEIIVKDPRYANDPKPEEFPKFESLKLTIERTLPYWNNTIIPQLKEGKRIIIAAHGNSLRGIVKHLDQMSNDEIMKLNLPTGIPFVYELDENFKPVVSMKFLGDEETVKAAMAAVAAQAKVK

SEQ ID NO: 152788 - DNA, 1005 bp, Arabidopsis thaliana
  CDS (1)..(1005)
atggctactgctacgtctcaccaatcagtcgtttcatttgcttctctccggtcttctccttcttctacaatctctcaatgtggattcaagatcgattcttcactgagctttacatcgaaaaagacaaacttttgcaagattaaagcaatggcatcatcagtttcttatgacaacactctcttgtctccttccaagacaatccctgacaattctcaaaagaaatcaaatgaagcagctttgatattgattaggcgtggagaatctttatggaacgagaagaatctttttactggttgtgttgatgtgccattgactgagaaaggtgttgaagaagctattgaagcagggaagaggattagtaacattcctgttgatgttatctttacatcttctttgattcgtgctcagatgactgcaatgcttgctatgattcaacaccgtcgtaagaaggtaccgatcatcttgcacgatgaaagcgaacaggcgaaaacttggagtcaagtttttagtgatgagactaaaaaccaatccattcctgtcatacctgcttggcagctcaatgaaagaatgtatggagaattacaaggtcttaacaagcaagaaacagccgagagatatgggaaagagcaagttcacgaatggcgtaggagttatgatattcctcctcccaaaggagagagtttggagatgtgtgctgagagagcagtagcttattttcaggacaatatcgaaccgaagcttgcagctggaaagaacgtaatgatagctgctcacgggaactcgctgcggtctatcattatgtatcttgacaaattgacttgccaggaggtgataagtctagagctatcgacaggtatacctcttctctacatattcaaagaaggcaaattcatgaagcggggaagcccggttggtccaacagaagctggtgtttatgcttataccaagagattggctcaatacagacagaagctagaggacgatagtgaagtactctgtgcctga

SEQ ID NO: 152789 - protein, 334 aa, Arabidopsis thaliana
MATATSHQSVVSFASLRSSPSSTISQCGFKIDSSLSFTSKKTNFCKIKAMASSVSYDNTLLSPSKTIPDNSQKKSNEAALILIRRGESLWNEKNLFTGCVDVPLTEKGVEEAIEAGKRISNIPVDVIFTSSLIRAQMTAMLAMIQHRRKKVPIILHDESEQAKTWSQVFSDETKNQSIPVIPAWQLNERMYGELQGLNKQETAERYGKEQVHEWRRSYDIPPPKGESLEMCAERAVAYFQDNIEPKLAAGKNVMIAAHGNSLRSIIMYLDKLTCQEVISLELSTGIPLLYIFKEGKFMKRGSPVGPTEAGVYAYTKRLAQYRQKLEDDSEVLCA

SEQ ID NO: 152790 - DNA, 1005 bp, Arabidopsis thaliana
  CDS (1)..(1005)
atggctactgctacgtctcaccaatcagtcgtttcatttgcttctctccggtcttctccttcttctacaatctctcaatgtggattcaagatcgattcttcactgagctttacatcgaaaaagacaaacttttgcaagattaaagcaatggcatcatcagtttcttttaacaacactctcttgtctccttccaagacaatccctgacaattctcaaaagaaatcaaatgaagcagctttgatattgattaggcatggagaatctttatggaacgagaagaatctttttactggttgtgttgatgtgccattgactgagaaaggtgttgaagaggctattgaagcagggaagaggattagtaacattcctgttgatgttatctttacatcttctttgattcgtgctcagatgactgcaatgcttgctatgattcaacaccgtcgtaagaaggtaccgatcatcttgcacgatgaaagcgaacaggcgaaaacttggagtcaagtttttagtgatgagactaaaaaccaatccattcctgtcatacctgcttggcagctcaatgaaagaatgtatggagaattacaaggtcttaacaagcaagaaacagccgagagatatgggaaagagcaagttcacgaatggcgtaggagttatgatattcctcctcccaaaggagagagtttggagatgtgtgctgagagagcagtagcttattttcaggacaatatcgaaccgaagcttgcagctggaaagaacgtaatgatagctgctcacgggaactcgctgcggtctatcattatgtatcttgacaaattgacttgccaggaggtgataagtctagagctatcgacaggtatacctcttctctacatattcaaagaaggcaaattcatgaagcggggaagcccggttggtccaacagaagctggtgtttatgcttataccaagagattggctcaatacagacagaagctagaggacgatagtgaagtactctgtgcctga

SEQ ID NO: 152791 - protein, 334 aa, Arabidopsis thaliana
MATATSHQSVVSFASLRSSPSSTISQCGFKIDSSLSFTSKKTNFCKIKAMASSVSFNNTLLSPSKTIPDNSQKKSNEAALILIRHGESLWNEKNLFTGCVDVPLTEKGVEEAIEAGKRISNIPVDVIFTSSLIRAQMTAMLAMIQHRRKKVPIILHDESEQAKTWSQVFSDETKNQSIPVIPAWQLNERMYGELQGLNKQETAERYGKEQVHEWRRSYDIPPPKGESLEMCAERAVAYFQDNIEPKLAAGKNVMIAAHGNSLRSIIMYLDKLTCQEVISLELSTGIPLLYIFKEGKFMKRGSPVGPTEAGVYAYTKRLAQYRQKLEDDSEVLCA

SEQ ID NO: 152792 - DNA, 702 bp, Arabidopsis thaliana
  CDS (1)..(702)
atgggtcatgaatgggagttcaaatggagcgaggatgtcaaagttgaaagtgaagtgactgagatcgttcttgttcgccatggagaaaccacttggaatgctgccggaagaatccagggacaaattgaatcagaccttaacgaggttggactaaagcaggctgttgcaatcgctgagaggttgggaaaagaggaaagacctgtagctgtgtattcatcagacctcaaacgagccaaagacactgctcttatgatcgccaaaacttgtttctgtcccgaggtgatcgaagtacctgacttaaaggagaggcacgtgggtagtctccaaggcctgtattggaaagaaggagcagagaaagaacctgaagcttactctgcctttttctcttcccaaaacgacctcgagattccgggaggaggagagagctttgaccaacttgctgatagatccatggatgctcttgagcaaattgctaagaagcacaaaggagagagagtgatagtggtgactcatggaggagtgttgagggcaatttacttaaggatcacacaagcttcctctgccggaaaactcttgaatgcttcagtgaatgtggttcatctccgtgatcaaaaatggatcatcgattcgtggagcgatgtatcacatctatcatccgttggatttcttcaacgtggctttgatggagacgccaagccctag

SEQ ID NO: 152793 - protein, 233 aa, Arabidopsis thaliana
MGHEWEFKWSEDVKVESEVTEIVLVRHGETTWNAAGRIQGQIESDLNEVGLKQAVAIAERLGKEERPVAVYSSDLKRAKDTALMIAKTCFCPEVIEVPDLKERHVGSLQGLYWKEGAEKEPEAYSAFFSSQNDLEIPGGGESFDQLADRSMDALEQIAKKHKGERVIVVTHGGVLRAIYLRITQASSAGKLLNASVNVVHLRDQKWIIDSWSDVSHLSSVGFLQRGFDGDAKP

SEQ ID NO: 152794 - DNA, 738 bp, Bacillus cereus
  CDS (1)..(738): transl_table=11
atgataaaacttgtacttattcgtcacggacagagtttatggaatcttgaaaatcgttttactggttggactgatgtagacttatcagagaatggattaagtgaagcgagagaagcaggagcaatattaaagaaaaatggatatacttttgatgttgcttatacatctgtattaaaacgagcaattcggacgttatggattgtacttcatgagatggaccttgcatggatcccagtacataaatgttggaaactaaatgaaagacattacggtgcattgcaaggattgaataaagatgaaacggcgaaaaaatatggtgaggagcaagttcatatttggagaagaagtattgatgtaagaccacctgctcttactgaagatgatcctaggtatgaaatgaatgatccaagatataaagcacttaaaaaaggtgagcttccattgactgaatgtttagtggatacggagaaaagagtacttgcttattggcattcagaaatcgcgccatcattaaaaagtggtgaaaaggtaattatttcatcacacggtaatacgattcgttcgctagtgaaatacttagataacctttcaagtgatggtgttgtttcattaaatattccaacgagtataccactcgtttatgaattagacgataatttacgaccaattcgtcattattacttaagtatggacggagaagtaccagaaggggaaattccgaaacatatttctttttaa

SEQ ID NO: 152795 - protein, 245 aa, Bacillus cereus
MIKLVLIRHGQSLWNLENRFTGWTDVDLSENGLSEAREAGAILKKNGYTFDVAYTSVLKRAIRTLWIVLHEMDLAWIPVHKCWKLNERHYGALQGLNKDETAKKYGEEQVHIWRRSIDVRPPALTEDDPRYEMNDPRYKALKKGELPLTECLVDTEKRVLAYWHSEIAPSLKSGEKVIISSHGNTIRSLVKYLDNLSSDGVVSLNIPTSIPLVYELDDNLRPIRHYYLSMDGEVPEGEIPKHISF

SEQ ID NO: 152796 - DNA, 750 bp, Bacteroides thetaiotaomicron
  CDS (1)..(750): transl_table=11
atgaaaagaatagtgttattacgtcatggcgaaagtctatggaacaaagaaaaccgttttactggatggacggacgtggatttaagcgagaaaggagttgaagaagcctgcaaggcaggcgatgcattacgggaggctggattttcttttgaggcagcttacacttcttacttgaaacgtgccgtaaaaacgttgaactgtgtcttggaccggctggataaagactggattccggttgaaaagacctggcggctgaacgagaagcattacggtatgcttcagggactgaataagagtgaaacagcggtccaatatggtgaagaacaagtacacatctggcgaagaagctatgacgtggctcccgctccggtaggcaaagatgatccccgtaatccgggcatggatatccgctatgccggtgtaccagatagcgaacttccccgtacggaatccctgaaagatactattgggcgtgtcatgccttactggaaatgcatcatctttcccgcattgatgtataaggacagcctgctggtagtcgcccatggtaacagcctgcgcggaatcatcaagcatctcaaaggaatttccgatacggatatttccaacctgaacctgcctacggcagttccttatgtctttgaatttgacgacaggctggttcttgtcaaggactactaccttggaaacccggaagagatacggaaacgggcagaagctgtggccaaacaagggatggctaaaaaataa

SEQ ID NO: 152797 - protein, 249 aa, Bacteroides thetaiotaomicron
MKRIVLLRHGESLWNKENRFTGWTDVDLSEKGVEEACKAGDALREAGFSFEAAYTSYLKRAVKTLNCVLDRLDKDWIPVEKTWRLNEKHYGMLQGLNKSETAVQYGEEQVHIWRRSYDVAPAPVGKDDPRNPGMDIRYAGVPDSELPRTESLKDTIGRVMPYWKCIIFPALMYKDSLLVVAHGNSLRGIIKHLKGISDTDISNLNLPTAVPYVFEFDDRLVLVKDYYLGNPEEIRKRAEAVAKQGMAKK

SEQ ID NO: 152798 - DNA, 699 bp, Gloeobacter violaceus
  CDS (1)..(699): transl_table=11
atggctcacctcatccttatccggcacggccagagtctttggaacgccgccaacaaatttaccggttgggtggacgttcccttgagtgagcgcggccgggcggaggcgacgatcgcttcttgcaaacttcgggattatcgggtgaacgtctgcttcaccagcatgctgatgcgcgccatcgaaacagcggtgattaccctgaccgagtgcgacgatatctgcggcggcaaaatcccaatcatcaaacacgaagccgacgacgagaactggcacggctgggacaactacgacggcgacccggcggcggagttgcccatctatcccaccgcgaccctggacgagcgctactacggcgatctgcaaggcctcgacaaagccgagacgaccgcgaagtacggcaaggagcaagtccagatctggcggcgctcctactcggtgcgcccccccggcggcgagagcctggaggacacgcgcaagcgcgtctacccctatttcaccaaccgtatcctgggccatatcaagcagggggacaacgtgctggtggctgcccacggcaactccctgcgctcgatcatcatgattcttgaaaccctcagcgaggaagaagtgcccaaggtggagctggccaccggggtgccgatcgtctacgaactcgacaaagcggcccacatgctcagcaaggccgtgctcaccaactga

SEQ ID NO: 152799 - protein, 232 aa, Gloeobacter violaceus
MAHLILIRHGQSLWNAANKFTGWVDVPLSERGRAEATIASCKLRDYRVNVCFTSMLMRAIETAVITLTECDDICGGKIPIIKHEADDENWHGWDNYDGDPAAELPIYPTATLDERYYGDLQGLDKAETTAKYGKEQVQIWRRSYSVRPPGGESLEDTRKRVYPYFTNRILGHIKQGDNVLVAAHGNSLRSIIMILETLSEEEVPKVELATGVPIVYELDKAAHMLSKAVLTN

SEQ ID NO: 152800 - DNA, 693 bp, Lactobacillus johnsonii
  CDS (1)..(693): transl_table=11
atgtcgaaattagttttaattcgtcacggtcaaagtgaatggaacctttctaaccaatttactggttgggttgatgtaaacctttcagaaaaaggtgttgaagaagctaagaaggctggtcgtttaattaaggaacacggtcttgaatttgatcaagcttacacttcattattaactcgtgctatcaagactttgcactacgcacttgaagaaagtgaccaactttggattcctgaaactaagacttggagattaaacgaacgtcattacggtgctcttcaaggtttaaacaagaaggatactgctgaaaagtacggtgacgaacaagttcacatttggcgtcgttcatacgatgttttgccaccagctattgatgacgataacgaatacagtcaagcacatgaccgtcgttacgcaaatcttgatccacatatcgttcctaaggcagaaaacttacacgttactttagatcgtgtaatgccattctgggaagatcacattgctccagatttacttgacggcaagaacgttattattgctgcacacggtaactcacttcgtgctttaactaagtacattgaaaacatctctgatgatgacatcatggacttagaaatgaagactggtgaaccagttgtttacacatttgacgacaagttagatgttgttaacaaagaaaagcttgacgactaa

SEQ ID NO: 152801 - protein, 230 aa, Lactobacillus johnsonii
MSKLVLIRHGQSEWNLSNQFTGWVDVNLSEKGVEEAKKAGRLIKEHGLEFDQAYTSLLTRAIKTLHYALEESDQLWIPETKTWRLNERHYGALQGLNKKDTAEKYGDEQVHIWRRSYDVLPPAIDDDNEYSQAHDRRYANLDPHIVPKAENLHVTLDRVMPFWEDHIAPDLLDGKNVIIAAHGNSLRALTKYIENISDDDIMDLEMKTGEPVVYTFDDKLDVVNKEKLDD

SEQ ID NO: 152802 - DNA, 678 bp, Lactobacillus plantarum
  CDS (1)..(678): transl_table=11
atgacagaactagtattggttcgccatggtgagagtacggccaatcgggataatacgtataccggttggagtgacgtcccgctaacagcagtgggtattgcacaggctcatcaagctggcaagcgattacgagctacgggactgcagtttggcgctgtacatacctcagtcctaaaacgggctatcgttaccgcgaatattatgttaagtgaaattgatcagttatggctgcctgagtataagacgtggcggttaaatgaacgacattacggtgccttacgtggtcaaaataaggatgtgactcgtcaagagtacggtaaggcgcaagttcaacagtggcggcggagcttttatacggtgccgccgttgttgacaccagctgaactagaccatgatcgacgttacaccaagtacggtgccgccgtcgaaccgcggggagaaagcttgaagatggcttacgaccgcatcatgccttattggatcgatgagattgcaccgcggttgttagacggccaaaaccaactcgtggtggcgcatggtagtacgttgcgtgcgatgatcaaatatttagagcatattagtgatactgggattgatggtgtcgaagttgctaacggagtgccaatttgttatcaccttgatcggcaactgcacgttatcggtaaagaagagtattaa

SEQ ID NO: 152803 - protein, 225 aa, Lactobacillus plantarum
MTELVLVRHGESTANRDNTYTGWSDVPLTAVGIAQAHQAGKRLRATGLQFGAVHTSVLKRAIVTANIMLSEIDQLWLPEYKTWRLNERHYGALRGQNKDVTRQEYGKAQVQQWRRSFYTVPPLLTPAELDHDRRYTKYGAAVEPRGESLKMAYDRIMPYWIDEIAPRLLDGQNQLVVAHGSTLRAMIKYLEHISDTGIDGVEVANGVPICYHLDRQLHVIGKEEY

SEQ ID NO: 152804 - DNA, 705 bp, Nitrosomonas europaea
  CDS (1)..(705): transl_table=11
gtgaacgaaatacaggaaccaatccggctggtattacttcgccatgggcaaagtatctggaatcaggacaggcattttacgggctggggtgatatcgtacttagcccgcagggtgaacaggaagccctgagagcgggccatctgctcaagcaggcaggttttacttttgatgcctgcttttgttcagaattgcagcgtgccagcgatacactcgctatagtgcagtcagtcatgggtttgaatcatctctcgacataccggacctggcgactgaatgaacgtcattatggtgcattggaggggatgcgcccctgggctgctatccggaaattcggtatctggtcgacaatgaaaagccagatccgttttgatgcagcgcctccactgctgatgccggatgacccgcgtgcaccggtaaatcagccacgttatgcggcagtcgatcgcactcaacttcccttggcagaaagtatgcagcagacattggagcgagtgcggccgctatggcaggaaaccattcttcctgaaataaggcaggggaaacgtttgctgatcgtctcgcaccagaatcttttaaaaacgctggttatgcagcttgaagggctgacaggcgcacagatcatgcgcctgtcgattactactggccatccgctttgttatgagctcgatcactcacttgtaccggtgaagcgctactacttgtga

SEQ ID NO: 152805 - protein, 234 aa, Nitrosomonas europaea
MNEIQEPIRLVLLRHGQSIWNQDRHFTGWGDIVLSPQGEQEALRAGHLLKQAGFTFDACFCSELQRASDTLAIVQSVMGLNHLSTYRTWRLNERHYGALEGMRPWAAIRKFGIWSTMKSQIRFDAAPPLLMPDDPRAPVNQPRYAAVDRTQLPLAESMQQTLERVRPLWQETILPEIRQGKRLLIVSHQNLLKTLVMQLEGLTGAQIMRLSITTGHPLCYELDHSLVPVKRYYL

SEQ ID NO: 152806 - DNA, 723 bp, Bacillus cereus
  CDS (1)..(723): transl_table=11
atggtaaagttagttttaatacgacatggacaaagtgaatggaatgttgaaaatcggtttacaggttggacggatgttgatttatctagtaaaggtttggaagaagcaagagaagccggagtaatgctgaaagctagtggtttctcatttgatatcgcatatacatctgttttgagaagagcgatgcgtactttatggattactctcgaagaaatggatttgatgtggatacctgtttataaaacatggaaattaaatgagcgacattacggtgcacttcaagggttaaataaggaagagacagcaagaaaatatggcgatgaacaagtaaccttatggagacgttcaacaaatgtacgcccaccagcactgacaaaagatgatgaaagatatgaagcagcacatccgaaatatagagatataaaagattatgagttccctcttacagaagacctagaagatacagagaaacgagttgtttcatattggaatgaagagatagctcctaacgtaaaagctggtaaacaagtaattattgcagcccatggaaatacaatacgtgctttagtaaaacatttagatcaaatttcagataaagatatagaaaatgtaaacattccaacaggaacaccattagtttatgaattggataacgatttaaaaccgataggccattattatttaaatagggaaatagaaactttagaagaaaaacaggtgtga

SEQ ID NO: 152807 - protein, 240 aa, Bacillus cereus
MVKLVLIRHGQSEWNVENRFTGWTDVDLSSKGLEEAREAGVMLKASGFSFDIAYTSVLRRAMRTLWITLEEMDLMWIPVYKTWKLNERHYGALQGLNKEETARKYGDEQVTLWRRSTNVRPPALTKDDERYEAAHPKYRDIKDYEFPLTEDLEDTEKRVVSYWNEEIAPNVKAGKQVIIAAHGNTIRALVKHLDQISDKDIENVNIPTGTPLVYELDNDLKPIGHYYLNREIETLEEKQV

SEQ ID NO: 152808 - DNA, 747 bp, Bacteroides thetaiotaomicron
  CDS (1)..(747): transl_table=11
atgaaaaagatagtattacttcgtcatggagagagtgcttggaacaaagaaaaccgtttcacaggttggacggatgtagacctgacggaaaagggagttgccgaagcggaaaaggcaggcgtcacgttgagggaatatggcttcaactttgataaagcctatacttcttatctgaaaagggcagtcaaaaccttgaactgcgtgcttgataaaatgaatctggactggattcccgtcgagaagagctggcgtctgaatgagaagcattacggcgatttgcaaggactcaataaggcggaaacagccgagaaatacggagaagaacaagtgctgatctggcgtcgcagttatgatatagctcccaatccgctttccgaaagcgatttgagaaatccgcgtttcgattatcgctatcacgaagtatccgatgcggaactgccgcgtaccgaatcattaaaagataccatcgaccgtattatgccgtactgggagtcggatatattcccggctttaaaagatgcgcataccttgctggttgtcgcgcatggcaatagtctgcgaggtatcattaagcatttgaaacatatttctgatgaagatatcatcaaactgaatcttcctactgccgttccttatgtattcgagttcgacgagaacctgaatgttgccaatgattacttcctgggcaatccggaagaaattcgtaagctgatggaagcggtagccaatcaggggaagaaaaaatag

SEQ ID NO: 152809 - protein, 248 aa, Bacteroides thetaiotaomicron
MKKIVLLRHGESAWNKENRFTGWTDVDLTEKGVAEAEKAGVTLREYGFNFDKAYTSYLKRAVKTLNCVLDKMNLDWIPVEKSWRLNEKHYGDLQGLNKAETAEKYGEEQVLIWRRSYDIAPNPLSESDLRNPRFDYRYHEVSDAELPRTESLKDTIDRIMPYWESDIFPALKDAHTLLVVAHGNSLRGIIKHLKHISDEDIIKLNLPTAVPYVFEFDENLNVANDYFLGNPEEIRKLMEAVANQGKKK

SEQ ID NO: 152810 - DNA, 660 bp, Gloeobacter violaceus
  CDS (1)..(660): transl_table=11
atggcactactggtcatggtccgccacggtcaatcgatctggaacctcgaaaaccgcttcaccggctggactgacgttcccctgaccgaaaaaggccgcgcggaagcccgcgcctgcggcgagttgatttattgcgtccccttcgccgtcgcctttacttccaaactgacgcgcgcccaagacaccttgcgcctcattctcgaagccgccgaccaaccggacgtgccggtgatcgaggatcaggccctcaatgagcgccactacggcgagctgcaggggctcaacaaagccgaaactgccgcgaagtacggtgaggaaacggtccggcagtggcggcgcagcctggaggggcgtccccccggcggcgagagcctcaaggacaccgccctgcgatcattgcgctatttctacgaaaaaattgttcccgagttggaggcgggtaagaacgtgctcgtcagtgcccacggcaacacgatccgggccattttgatggaactcgatcacctgagccccgagcaggtcgaaaaggtcgaaatcgaatactgcgtgccggtcgccttcgagcatcaggcggacggcaccttctcgcaggtgctcatgccccgatgcgacatcatccggccgccgcagccgccggcccgcagcatcgcccggctctag

SEQ ID NO: 152811 - protein, 219 aa, Gloeobacter violaceus
MALLVMVRHGQSIWNLENRFTGWTDVPLTEKGRAEARACGELIYCVPFAVAFTSKLTRAQDTLRLILEAADQPDVPVIEDQALNERHYGELQGLNKAETAAKYGEETVRQWRRSLEGRPPGGESLKDTALRSLRYFYEKIVPELEAGKNVLVSAHGNTIRAILMELDHLSPEQVEKVEIEYCVPVAFEHQADGTFSQVLMPRCDIIRPPQPPARSIARL

SEQ ID NO: 152812 - DNA, 690 bp, Lactobacillus johnsonii
  CDS (1)..(690): transl_table=11
gtgaaaagaaagttggccaaattagttttggttagacatggtgaaagtgtagctaatcgtgacaatgtttatacgggctggaatgatgtacctttaagtaaaaaagggattgcgcaggcaaaaaatgcaggccttaaggtagaaaaaatagctgaatttgcaccaacgcatatccatacttctgtcttatcgcgtgcaattatgacggctaatattattgcagatgtgtgcagctttttatatttaccgatcactaagacttggcgtttaaacgagcgtcactatggagcacttcgcggtattaataaggatgtttcaaagaaaatttttggtactaatcaagtcttagaatggagacgtggttttgatagtgtgcctcctttattaacgcagcccgtccaagatcgtagatatcaaaagtatgatatgcgtttaatgcctcagggagaaagtttacatcaaactcaagaaagactaatgccttatttttgggatcatattgcacctgaattaatggcaggtcatgatcaattggttgtagcccatggctcaagtttacgtgccttgattaaaaaaattgaagatatcagtaatgaggatattgtaaaagtagaagtgcccaatgcggagccaattgtttatacttttgatactgatttgcatattgtaaagaaagaaattctacattga

SEQ ID NO: 152813 - protein, 229 aa, Lactobacillus johnsonii
MKRKLAKLVLVRHGESVANRDNVYTGWNDVPLSKKGIAQAKNAGLKVEKIAEFAPTHIHTSVLSRAIMTANIIADVCSFLYLPITKTWRLNERHYGALRGINKDVSKKIFGTNQVLEWRRGFDSVPPLLTQPVQDRRYQKYDMRLMPQGESLHQTQERLMPYFWDHIAPELMAGHDQLVVAHGSSLRALIKKIEDISNEDIVKVEVPNAEPIVYTFDTDLHIVKKEILH

SEQ ID NO: 152814 - DNA, 693 bp, Lactobacillus plantarum
  CDS (1)..(693): transl_table=11
atggcaaaattagtattgattcgtcacggtcaaagtgaatggaacttatctaaccaatttactggttgggttgacgttgatttaagcgaaaagggtgttgaagaagctaaggctgctggtcaaaaagttaaagaagcaggcttagaattcgattacgcctttacttcagttttgactcgtgccatcaagactttgcactatgtgcttgaagaatccgaccaactctggattccagaaaccaagacttggcgtttaaacgaacgtcattatggtgcattacaaggattgaacaagaaggaaaccgctgaaaaatacggtgacgaccaagttcatatctggcgtcgttcttatgatgttttacctccattattgagtgccgatgatgaaggttcagccgttaacgatcgtcgttacgctgacttagaccctaacatcgtccctggtggcgaaaacttgaaggttaccttggaacgcgttatgcctttctgggaagaccaaatcgcacctaagttattagacggcaagaatgtaatcattgctgcccacggtaactcattacgtgccttaagcaagtacatcgaacaaatcagtgatgatgatatcatggaccttgaaatggctactggcgaaccagttgtctatgactttgatgaaaagttaaaggttcttggtaaggaaaagttaggcaaataa

SEQ ID NO: 152815 - protein, 230 aa, Lactobacillus plantarum
MAKLVLIRHGQSEWNLSNQFTGWVDVDLSEKGVEEAKAAGQKVKEAGLEFDYAFTSVLTRAIKTLHYVLEESDQLWIPETKTWRLNERHYGALQGLNKKETAEKYGDDQVHIWRRSYDVLPPLLSADDEGSAVNDRRYADLDPNIVPGGENLKVTLERVMPFWEDQIAPKLLDGKNVIIAAHGNSLRALSKYIEQISDDDIMDLEMATGEPVVYDFDEKLKVLGKEKLGK

SEQ ID NO: 152816 - DNA, 750 bp, Nitrosomonas europaea
  CDS (1)..(750): transl_table=11
atgaaaaaactcgttctcctgcgacacggagaaagtatctggaatcaggaaaatcgctttaccggctggactgacgtcgatttaacgcccaagggactaaaagaagccgaagaggcaggcagattgcttcgcgaaaacggtttctccttcgacattgcttatacatctctactcaaacgggcaattcgtacactctggatcgcactggacgaaatggatcagatgtggaccccgatcgagctcaactggcgactcaatgaacggcattacggggcacttcagggtttgaacaaagcagaaaccgccaaacaatatggcgatgaacaagtactcgtctggagacgcagttacgatatccgcccaccttccatcacaatcaacgacgaacgctatcccggctttgatcttcgctacagaaacatgtcatccggcgatattccgcttgctgaaagtctcaaggatacggttgcaagatttctgccctactggaatcagtcaatcgctccacaaatcaaggcagaaaaaaaggtaatcattgctgcacatggaaattcgctgcgcgctctgatcaaacacctcgataatatctcggaccaggatatcctgaattgcaatatacccacagggattccgctagtttatgaactggatgacgacttgaaaccactcaacagttactatctgggagatgctggccaaattggggaagccatttcggcggtcgccaatcagggtaaatccggagcttga

SEQ ID NO: 152817 - protein, 249 aa, Nitrosomonas europaea
MKKLVLLRHGESIWNQENRFTGWTDVDLTPKGLKEAEEAGRLLRENGFSFDIAYTSLLKRAIRTLWIALDEMDQMWTPIELNWRLNERHYGALQGLNKAETAKQYGDEQVLVWRRSYDIRPPSITINDERYPGFDLRYRNMSSGDIPLAESLKDTVARFLPYWNQSIAPQIKAEKKVIIAAHGNSLRALIKHLDNISDQDILNCNIPTGIPLVYELDDDLKPLNSYYLGDAGQIGEAISAVANQGKSGA

SEQ ID NO: 152818 - DNA, 750 bp, Azoarcus sp
  CDS (1)..(750): transl_table=11
atgtacaaaatcgttctgcttcgccatggcgagtctacctggaacaaggacaaccgcttcaccggctggaccgacgtcgatctcaccgagaaaggtgtcgaggaggcccggggagctggccacttgctgaagcgagagggctacactttcgacctggcctacacgtcggtactcaagcgtgccaacaagacgctgaacatcgtcctcgaggaactcgactcgctgtggctgccggtggagcattcgtggcgcctgaacgaacggcattacggcgacttgcaggggctcaacaaggccgagaccgcagcgaaattcggcgacgaccaggtgctcgtgtggcgccgttcatatgacacgccgccgccgccgctgccggagggcgacgaacggctcaccagcggcgacccgcgctatgcttcgctgccgcgcgcgcagttcccgcgcaccgaatgcctcaaggatacggtggcgcgcttcgtgccgtactgggagacggtgatcgtgccgaacatcctggccggtcgccgcatcctgatcgcggcccacggcaacagcctgcgcgcgctgatcaagtatctcgacaacatctcggacagcgaaatcgtcggcctgaacatcccgaccgcgcagccgctcgtctatgagctggacgcgaatctgcgcccgatcaggagctactacctcgcggatgccgacacgatccgcgcggccgaggctgcagtggcgggacagggcaaggcgaagggctga

SEQ ID NO: 152819 - protein, 249 aa, Azoarcus sp
MYKIVLLRHGESTWNKDNRFTGWTDVDLTEKGVEEARGAGHLLKREGYTFDLAYTSVLKRANKTLNIVLEELDSLWLPVEHSWRLNERHYGDLQGLNKAETAAKFGDDQVLVWRRSYDTPPPPLPEGDERLTSGDPRYASLPRAQFPRTECLKDTVARFVPYWETVIVPNILAGRRILIAAHGNSLRALIKYLDNISDSEIVGLNIPTAQPLVYELDANLRPIRSYYLADADTIRAAEAAVAGQGKAKG

SEQ ID NO: 152820 - DNA, 738 bp, Bacillus anthracis
  CDS (1)..(738): transl_table=11
atgataaaacttgtacttattcgtcacggacaaagtttatggaatcttgaaaatcgttttactggttggactgatgtagatttatcagagaatggattaagtgaagcgagagaagcaggagcgatattaaagaaaaatggatatacttttgatgtagcttatacatctgtattaaaacgagcaattcggacgttatggattgtacttcatgagatggaccttgcatgggtgccagtacataaatgttggaagttaaatgaaagacattacggtgcattgcaagggttgaataaagatgaaactgcgaaaaaatatggtgaggagcaagttcatatttggagaagaagtattgatgtaagaccacctgctcttactgaggatgatcccaggtatgaaatgaatgatctaagatataaagcactgaaaaaaggtgagtttccattgacagaatgtttagtggatacggagaaaagagtacttgattattggcattcagaaattgcgccgaaattaaagaatggtaacaaagtaatcatttcatcacatggtaacacaattcgctcgctagtaaaatatttagataatctttcaagcgatggtgttgtttcactaaatattccaacgagtattccgctcgtgtatgaattagacgaaaatttacgtccgattcgccattattacttaagtatggatggagaagtacctgaaggagaaattccgaaacatattactttttaa

SEQ ID NO: 152821 - protein, 245 aa, Bacillus anthracis
MIKLVLIRHGQSLWNLENRFTGWTDVDLSENGLSEAREAGAILKKNGYTFDVAYTSVLKRAIRTLWIVLHEMDLAWVPVHKCWKLNERHYGALQGLNKDETAKKYGEEQVHIWRRSIDVRPPALTEDDPRYEMNDLRYKALKKGEFPLTECLVDTEKRVLDYWHSEIAPKLKNGNKVIISSHGNTIRSLVKYLDNLSSDGVVSLNIPTSIPLVYELDENLRPIRHYYLSMDGEVPEGEIPKHITF

SEQ ID NO: 152822 - DNA, 738 bp, Bacillus cereus
  CDS (1)..(738): transl_table=11
atgataaaacttgtacttattcgtcacggacaaagcttatggaatcttgaaaatcgctttacgggatggacagatgttgatctatcagagaatggattaagtgaagcgagagaagcaggagcaatattaaagaaaaacggatatacttttgatgtggcttatacatcagtattaaaacgcgcaattcggacgttatggattgtacttcatgagatggatcttacttgggttccaatacataaatcttggaagctaaatgaaagacattatggtgcattgcaagggctgaataaagatgaaactgcacaaaaatatggtgaggagcaagttcatatttggagaagaagtgttgatgtaagaccaccggctcttactgaagacgatcctcgatatgaagcgaccgatccaagatataaaacactcaaaaaaggtgaatttccattaactgaatgtttagaggatacggagaagagagtacttgcttattggcattcagaaattgcgccgacattaaaaagtggtaataaagtaattatttcatcacacggtaacacaattcgctcgctagtaaaatatttagacaacctttcaagtgatggtgtagtttcattaaatattcccactagcattccgcttgtttatgaattagacgaaaacttacgtccgattcgtcattattatttaagtatggatggagaagtacctgaaggggaaattccgaaacatatttctttttaa

SEQ ID NO: 152823 - protein, 245 aa, Bacillus cereus
MIKLVLIRHGQSLWNLENRFTGWTDVDLSENGLSEAREAGAILKKNGYTFDVAYTSVLKRAIRTLWIVLHEMDLTWVPIHKSWKLNERHYGALQGLNKDETAQKYGEEQVHIWRRSVDVRPPALTEDDPRYEATDPRYKTLKKGEFPLTECLEDTEKRVLAYWHSEIAPTLKSGNKVIISSHGNTIRSLVKYLDNLSSDGVVSLNIPTSIPLVYELDENLRPIRHYYLSMDGEVPEGEIPKHISF

SEQ ID NO: 152824 - DNA, 738 bp, Bacillus cereus
  CDS (1)..(738): transl_table=11
atgataaaacttgtacttattcgtcacggacagagtttatggaatcttgaaaatcgttttactggatggacagatgtagatttatcagagaatggattaagtgaagcgagagaggcaggagcgatattaaagaaaaatggatatacttttgatgtagcttatacatctgtattaaaacgagcaattcggacgttatggattgtacttcatgaaatgaatcttgcctgggtaccagtacataaatcttggaagctaaatgaaagacattatggtgcattgcaaggtttgaataaagatgaaaccgcgcaaaaatatggtgaggagcaagttcatatttggagaagaagtattgatgtaagaccacctgctcttactgaggatgatcccaggtatgaaatgaatgatccaagatataaagcactgaaaaaaggtgagtttccattgacagaatgtttagtggatacggagaaaagagtacttgattattggcattcagaaattgcgccgaaattaaagaatggtaacaaagtaatcatttcatcacatggtaacacaattcgctcgctagtaaaatatttagataatctttcaagcgatggtgttgtttcactaaatattccaacgagtataccgctcgtttatgaattagacgaaaatttacgtccgattcgccattattacttaagtatggatggagaagtacctgaaggggaaattccgaaacatatttctttttaa

SEQ ID NO: 152825 - protein, 245 aa, Bacillus cereus
MIKLVLIRHGQSLWNLENRFTGWTDVDLSENGLSEAREAGAILKKNGYTFDVAYTSVLKRAIRTLWIVLHEMNLAWVPVHKSWKLNERHYGALQGLNKDETAQKYGEEQVHIWRRSIDVRPPALTEDDPRYEMNDPRYKALKKGEFPLTECLVDTEKRVLDYWHSEIAPKLKNGNKVIISSHGNTIRSLVKYLDNLSSDGVVSLNIPTSIPLVYELDENLRPIRHYYLSMDGEVPEGEIPKHISF

SEQ ID NO: 152826 - DNA, 747 bp, Bacteroides fragilis
  CDS (1)..(747): transl_table=11
atgaaaaagattgtattgctccgtcatggagaaagtgcatggaacaaagagaaccgttttaccggttggacagatgtcgatctgacagaaaaaggaattgccgaagcctgtaaagcaggcgaactactgaaagagaatggatttaacttcgataaagcttatacgtcataccttaaacgagcggtgaaaacgctgaattgcgtactcgaccggatggatcaggactggattccggtagagaaaagctggcgcctgaatgaaaaacattacggcgatctgcaaggactgaacaaaagcgaaacagccgctaaatacggggatgaacaggtgcttatctggcgcaggagttatgatatagctcccaatgccctgtcggaagacgatccgagaaatccccgctttgagaatcgttatcaggaagtacccgatgcggaacttcctcggacagaatctctgaaagatactatcgaacgtatcatgccttattggaagtgtatcatcttcccgaatctgaaaacggctgatgaaattctggttgttgcccacggaaatagtttgcgcggcatcatcaagcacttgaagcacatctccgatgaagagatcgtaaaactgaatctgccgactgccgtcccttacgtatttgagttcagtgacgaactgaatctggaaaaagactatttcctgggtgatcccgaagaaatccgtaagttgatggaagcggttgccaaccagggaaagaaaaaataa

SEQ ID NO: 152827 - protein, 248 aa, Bacteroides fragilis
MKKIVLLRHGESAWNKENRFTGWTDVDLTEKGIAEACKAGELLKENGFNFDKAYTSYLKRAVKTLNCVLDRMDQDWIPVEKSWRLNEKHYGDLQGLNKSETAAKYGDEQVLIWRRSYDIAPNALSEDDPRNPRFENRYQEVPDAELPRTESLKDTIERIMPYWKCIIFPNLKTADEILVVAHGNSLRGIIKHLKHISDEEIVKLNLPTAVPYVFEFSDELNLEKDYFLGDPEEIRKLMEAVANQGKKK

SEQ ID NO: 152828 - DNA, 621 bp, Bartonella henselae
  CDS (1)..(621): transl_table=11
atggaacgcacacttgtactcattcgtcatggacaaagtgaatggaatctcaaaaatctctttaccggttggaaggaccctggtttaacagaaaaaggccgtaccgaagcaatagcagcaggtaagaaacttaaagaaactggtttaaaatttgatatcgcttatacatctgctctacagcgtgcacaaaaaacagcccagaacatcttagaacaaatggaacaatcagatttagaactgataaaaacccccgcactgaatgaacgaaattatggtgatctctctggtttgaataaagatgaagtgcgtcaaaaatggggagaacagcaagtgcaaatatggcgccgctcctatactattgctccccctaatggagaaagccttcgcgatactggtgctcgtgtttggccttattatcttcaccatatccaacctcatattttgcgctctcaaactgttttgatcgcagcacacggtaactctcttcgtgctcttattatggcacttgaaggcttaaatagtgaggaaattatctctcaagaattagcaactggcattcctatagtttatacatttaattcggactcaacaatttcgtcaaagacaatcatcaccccttaa

SEQ ID NO: 152829 - protein, 206 aa, Bartonella henselae
MERTLVLIRHGQSEWNLKNLFTGWKDPGLTEKGRTEAIAAGKKLKETGLKFDIAYTSALQRAQKTAQNILEQMEQSDLELIKTPALNERNYGDLSGLNKDEVRQKWGEQQVQIWRRSYTIAPPNGESLRDTGARVWPYYLHHIQPHILRSQTVLIAAHGNSLRALIMALEGLNSEEIISQELATGIPIVYTFNSDSTISSKTIITP

SEQ ID NO: 152830 - DNA, 621 bp, Bartonella quintana
  CDS (1)..(621): transl_table=11
atgggacgcacacttgtattaatccgtcatggacaaagtgaatggaatatcaaaaatctttttaccggttggaaagaccccggtttgacagaaaaaggccatgcagaagcaataacagcaggaaaaaatctcaaagcagctggtttaaaatttgatattgcttatacatctgccttacagcgtgcacaaaaaacggctcagcacattttagaacaaatgggacaatcagatttgccattgataaaaaactcggcattgaatgaacgtgattatggtgatctctctgggctaaataaagatgaagtacgtcaacaatggggagaacaacaagtgcaaatatggcgtcgctcctatgctgttgcgccccctaatggagaaagcctacgcgatactggtgcacgtgtttggccctactatctttaccatattcaacctcatattttgcgttctcaaactgttttgattgcagcacatggtaattctcttcgtgctcttattatggcacttgaaggtctaaatagtgaagaaattatatctcaagaattaacaactggcattcctcttatttatacatttaattccgactcaacaatttcatcaaagaccattatcacaccctaa

SEQ ID NO: 152831 - protein, 206 aa, Bartonella quintana
MGRTLVLIRHGQSEWNIKNLFTGWKDPGLTEKGHAEAITAGKNLKAAGLKFDIAYTSALQRAQKTAQHILEQMGQSDLPLIKNSALNERDYGDLSGLNKDEVRQQWGEQQVQIWRRSYAVAPPNGESLRDTGARVWPYYLYHIQPHILRSQTVLIAAHGNSLRALIMALEGLNSEEIISQELTTGIPLIYTFNSDSTISSKTIITP

SEQ ID NO: 152832 - DNA, 741 bp, Bifidobacterium longum
  CDS (1)..(741): transl_table=11
atgacttataaactagtactgctccgtcatggacagagcgcatggaataaaactaaccagttcaccggctgggtcgacgtaccgctgaccgagcagggtgaagccgaagccaagcgtggcggcgagctgctcaaggagaagaacgtccttccggacatcgtgttcacctccctgctgcgtcgcgccatcaacaccgccaacatcgctctggatgccgcagatcgtctgtggattccggttcagcgtgactggcgtctcaacgagcgtcactacggcgctctgcagggcaagaacaagaccgagatccgcgaagagtacggcgacgagaagttcatgctgtggcgccgttcttacgccaccccgccgcccgagatcgacccgaacgaccagtacgcccagaacaacgacccgcgctacgccggcgatccggttccggaagccgagtgcctggccaacgttgttgagcgtgtgaagccgtacttcgagtccgctatcgagccggagctcaaggccggcaagaccgtgctgattgctgcccacggcaactccctccgcgccatcgtcaagatgctggacaacctgtctgaggaagagatcgccaaggtcaacatcccgaccgccatcccgctgctctacgagctggacgagaacttcaagccgatcaagccgcgtggcgagtacctggacccggaggctgctgctgccggtgccgccgctgtcgccgctcagggccagaagtga

SEQ ID NO: 152833 - protein, 246 aa, Bifidobacterium longum
MTYKLVLLRHGQSAWNKTNQFTGWVDVPLTEQGEAEAKRGGELLKEKNVLPDIVFTSLLRRAINTANIALDAADRLWIPVQRDWRLNERHYGALQGKNKTEIREEYGDEKFMLWRRSYATPPPEIDPNDQYAQNNDPRYAGDPVPEAECLANVVERVKPYFESAIEPELKAGKTVLIAAHGNSLRAIVKMLDNLSEEEIAKVNIPTAIPLLYELDENFKPIKPRGEYLDPEAAAAGAAAVAAQGQK

SEQ ID NO: 152834 - DNA, 699 bp, Blochmannia floridanus
  CDS (1)..(699): transl_table=11
atgcatataattaaaacagtattaattagacatggagaaagtcaatggaataaagataatcgatttaccggatggatagacgttgatttatcaaatcaaggttattctgaagctaaacgcgctggccaattattaaaaaaatataaatttattttcgattatggatatacttctgtattaaaacgaactatacatactttatgggttatattggatcaattaaatcaaacatggttacctatacaaaaagtatggcagttgaatgaacgccattatggagcattacaaggattaaataaaaatgaagcaattaaaacatatggatatgacacaattcaaaaatggcgtcgcagttttaaagatattcctccaaaaaataataaaaatgatttatttttaggaactaatgatatacggtataaaaatattgaaactaatacattacctaatggggaaagtttagaattaacagcaaatagagttatcccatattggcaaaagtatatagaaccaaaaatttacaataataattgtattattattgttgctcatggaaattctataagagctattttaaaatttttaaatcaattagatgattctgagatatttaacattgaaattcctacaggaattccattaatatatgaatttgataataatataaaacccattcgatattattatctatctgaataa

SEQ ID NO: 152835 - protein, 232 aa, Blochmannia floridanus
MHIIKTVLIRHGESQWNKDNRFTGWIDVDLSNQGYSEAKRAGQLLKKYKFIFDYGYTSVLKRTIHTLWVILDQLNQTWLPIQKVWQLNERHYGALQGLNKNEAIKTYGYDTIQKWRRSFKDIPPKNNKNDLFLGTNDIRYKNIETNTLPNGESLELTANRVIPYWQKYIEPKIYNNNCIIIVAHGNSIRAILKFLNQLDDSEIFNIEIPTGIPLIYEFDNNIKPIRYYYLSE

SEQ ID NO: 152836 - DNA, 753 bp, Bordetella bronchiseptica
  CDS (1)..(753): transl_table=11
atgtacaaacttgttctgatgcgccacggcgaaagccagtggaacctggaaaaccgtttcacgggctggaccgatgtggacctgaccgaaaccggccgcgagcaggcccgcaaggcgggcgaattgctcaagcgcgagggctacgccttcgacctggcctatacctcggtgctcaagcgcgctatccgtacgctctggatcgccctggacgccatggacgccatgtataccccggtgggcatcaactggcgcctgaacgagcgccactacggccagctgcaaggcctgaacaaggccgagaccgccgccaagtacggcgacgagcaggtgctgatctggcgccgcgcctacgcgatcgccccggagccgctggacctggaagatccgcgccacccgcgtttcgatggccgctacgccaagattccggccgaccagctgccggccaccgaatgcctgaaggatacggtggcgcgcgtgctgccgttctggaacgaatcgatcgccccggccatccgcgccggccgccgcgtcctggtggccgcgcatggcaacagcctgcgcgcgctgatcaagcacctcgacaatgtttccgatgatgacatcgtgggcgtgaatattccgaccggccagcctctggtgtatgaattggatgaggacctgaagccgattcgccactattatctgggcgatgccgccgagatcgaggcggcgatggctgccgtggcggcgcagggcaaggcgaaaaaggactga

SEQ ID NO: 152837 - protein, 250 aa, Bordetella bronchiseptica
MYKLVLMRHGESQWNLENRFTGWTDVDLTETGREQARKAGELLKREGYAFDLAYTSVLKRAIRTLWIALDAMDAMYTPVGINWRLNERHYGQLQGLNKAETAAKYGDEQVLIWRRAYAIAPEPLDLEDPRHPRFDGRYAKIPADQLPATECLKDTVARVLPFWNESIAPAIRAGRRVLVAAHGNSLRALIKHLDNVSDDDIVGVNIPTGQPLVYELDEDLKPIRHYYLGDAAEIEAAMAAVAAQGKAKKD

SEQ ID NO: 152838 - DNA, 762 bp, Borrelia burgdorferi; identical to SEQ ID NO: 152592
  CDS (16)..(762): transl_table=11

SEQ ID NO: 152839 - protein, 248 aa, Borrelia burgdorferi
MYKLVLVRHGESEWNKENLFTGWTDVKLSDKGIDEAVEAGLLLKQEGYSFDIAFSSLLSRANDTLNIILRELGQSYISVKKTWRLNERHYGALQGLNKSETAAKYGEDKVLIWRRSYDVPPMSLDESDDRHPIKDPRYKHIPKRELPSTECLKDTVARVIPYWTDEIAKEVLEGKKVIVAAHGNSLRALVKYFDNLSEEDVLKLNIPTGIPLVYELDKDLNPIKHYYLGDESKIKKAMESVASQGKLK

SEQ ID NO: 152840 - DNA, 747 bp, Borrelia garinii
  CDS (1)..(747): transl_table=11
atgtataaattagttttagtgaggcatggagagagtgaatggaacaaagaaaatctttttactggttggacagatgttaaactttctgacaagggtatcaatgaggctttagaagcaggtttgctcctaaagcaagaaggctattcttttgatattgcttttagttctttattgtcaagggctaatgatactttaaatattattttgcgagaattggggcaatcttatattagtgtaaaaaaaacctggagattaaatgagaggcactatggagctttacaaggtttaaataagtcagaaacagctgcaaaatatggggaaggtaaagttttaatttggagacgcagttatgatgtgcccccaatgtctttagatgagtctgaagatcgtcatccaataaaagatccaagatataaatatattcctaaaagggagcttccttcaacagaatgccttaaagatactgttacaagagttattccttattggactgatgagattgcaaaagaagttcttgggggtaaaaaagttattgttgctgctcatggcaattctttaagagctcttgttaaatatcttgataatttaagcgaagaagatgttttaaagcttaacattcctacgggtattcctttagtttatgaattagataaagatttaaatcctattaaacattactatttaggtgatgaaagtaagattaaaagtgcaatggaatctgttgctagtcaaggaaagttaaagtaa

SEQ ID NO: 152841 - protein, 248 aa, Borrelia garinii
MYKLVLVRHGESEWNKENLFTGWTDVKLSDKGINEALEAGLLLKQEGYSFDIAFSSLLSRANDTLNIILRELGQSYISVKKTWRLNERHYGALQGLNKSETAAKYGEGKVLIWRRSYDVPPMSLDESEDRHPIKDPRYKYIPKRELPSTECLKDTVTRVIPYWTDEIAKEVLGGKKVIVAAHGNSLRALVKYLDNLSEEDVLKLNIPTGIPLVYELDKDLNPIKHYYLGDESKIKSAMESVASQGKLK

SEQ ID NO: 152842 - DNA, 753 bp, Bordetella parapertussis
  CDS (1)..(753): transl_table=11
atgtacaaacttgttctgatacgccacggcgaaagccagtggaacctggaaaaccgtttcacgggctggaccgatgtggacctgaccgaaaccggccgcgagcaggcccgcaaggcgggcgaattgctcaagcgcgagggctacgccttcgacctggcctatacctcggtgctcaagcgcgctatccgtacgctctggatcgccctggacgccctggacgccatgtataccccggtgggcatcaactggcgcctgaacgagcgccactacggccagctgcaaggcctgaacaaggccgagaccgccgccaagtacggcgacgagcaggtgctgatctggcgccgcgcctacgcgatcgccccggagccgctggacctggaagatccgcgccacccgcgtttcgatggccgctacgctaagattccggccgaccagctgccggccaccgaatgcctgaaggatacggtggcgcgcgtgctgccgttctggaacgaatcgatcgccccggccatccgcgccggccgccgcgtcctggtggccgcgcatggcaacagcctgcgcgcgctgatcaagcacctcgacaatgtttccgatgatgacatcgtgggcgtgaatattccgaccggccagcctctggtgtatgaattggatgaggacctgaagccgattcgccactattatctgggcgatgccgccgagatcgaggcggcgatggctgccgtggcggcgcagggcaaggcgaaaaaggactga

SEQ ID NO: 152843 - protein, 250 aa, Bordetella parapertussis
MYKLVLIRHGESQWNLENRFTGWTDVDLTETGREQARKAGELLKREGYAFDLAYTSVLKRAIRTLWIALDALDAMYTPVGINWRLNERHYGQLQGLNKAETAAKYGDEQVLIWRRAYAIAPEPLDLEDPRHPRFDGRYAKIPADQLPATECLKDTVARVLPFWNESIAPAIRAGRRVLVAAHGNSLRALIKHLDNVSDDDIVGVNIPTGQPLVYELDEDLKPIRHYYLGDAAEIEAAMAAVAAQGKAKKD

SEQ ID NO: 152844 - DNA, 624 bp, Bradyrhizobium japonicum
  CDS (1)..(624): transl_table=11
atgagcgaacgtcttctcgtgctcgtccgccacggccagagcgaatggaatctgaagaacctgttcacggggtggaaggatcctgatctcaccgagcagggcgtcgccgaggccagggaagccggccgcaagctgaaggcgcaggggctcgtgttcgacgtcgcctacacgtcggtgctgacgcgtgcgcagcacacgctcgacctcatcctcggcgagctcggccagaagggtctgcccacggagaagaacctcgcgctgaacgagcgcgactatggcgacctctccggcctcaacaaggacgacgcccgcaagaaatggggcgaggaccaggtcctgatctggcgccgctcctacgacgtgccgccgcccggcggcgaaagcctgaaggatacgctggcgcgtgcgctgccctattacgtgcaggagattttgcccagcgtgctcaacggcaagcgcacgctggtcgccgcccacggcaactcgctgcgcgccctgatcatggtgctggaaaagctgtcgccggaaggcatcctgaagcgcgagctcgcgacgggtgtgccgatcatctaccgcctgaatgcggattcgaccgtggcctcgaagctggatctggcggggtaa

SEQ ID NO: 152845 - protein, 207 aa, Bradyrhizobium japonicum
MSERLLVLVRHGQSEWNLKNLFTGWKDPDLTEQGVAEAREAGRKLKAQGLVFDVAYTSVLTRAQHTLDLILGELGQKGLPTEKNLALNERDYGDLSGLNKDDARKKWGEDQVLIWRRSYDVPPPGGESLKDTLARALPYYVQEILPSVLNGKRTLVAAHGNSLRALIMVLEKLSPEGILKRELATGVPIIYRLNADSTVASKLDLAG

SEQ ID NO: 152846 - DNA, 654 bp, Brucella melitensis; identical to SEQ ID NO: 152604
  CDS (34)..(654): transl_table=11

SEQ ID NO: 152847 - protein, 206 aa, Brucella melitensis
MSRTLVLVRHGQSEWNLKNLFTGWRDPGLTEQGHAEAKAAGQRLKAAGLKFDIAYTSALSRAQVTCQHILDELGQPGLETIRDQALNERDYGDLSGLNKDDARAKWGEEQVHIWRRSYDVPPPGGESLKDTGARVWPYYLHTIQPHVLREETVLVAAHGNSLRALIMALEGLTPEQILKQELNTGVPIIYRLNADSTVASKEILSA

SEQ ID NO: 152848 - DNA, 696 bp, Buchnera aphidicola subsp
  CDS (1)..(696): transl_table=11
atgaaaattaatcaagtagttttaattagacatggtcaaagcgaatggaatacattaaataaatttactggttggcatgatgctgaattagataaaaaaggaaaagatgaagctaaatttgctgctatcttattaaaaaaagaaaaatttttttttgattgcgcacatacatcattattaaaaagagcaattcatactttgcaatatattttagatgaattaaaccaaacctggttgtcagttaaaaaatcctggcgtttaaacgaacgacattatggtgcattagaagggttaaataaagatgaagttattgagaaatatggacaaaaacaagttcttctatggagaagaagttttgatattagtccacctcagattaatataaaagataaacgctttccaggaaacgatccacgctactctcatttaaatattcatgacatccctctaggagagagcttagaaaaaactgcaaaacgagttattccttattggaacaaaattgtttatccagaattaaaaaataataaaaaaatacttattgtagcgcatggaaattctttacgtgccttgatacaacacttatataaaatagacaataaagctattttggatttaaatattcctactgcacaacccattatcttagatttcgataatgaaaaaaatccaattaaatggcactatttaacataa

SEQ ID NO: 152849 - protein, 231 aa, Buchnera aphidicola subsp
MKINQVVLIRHGQSEWNTLNKFTGWHDAELDKKGKDEAKFAAILLKKEKFFFDCAHTSLLKRAIHTLQYILDELNQTWLSVKKSWRLNERHYGALEGLNKDEVIEKYGQKQVLLWRRSFDISPPQINIKDKRFPGNDPRYSHLNIHDIPLGESLEKTAKRVIPYWNKIVYPELKNNKKILIVAHGNSLRALIQHLYKIDNKAILDLNIPTAQPIILDFDNEKNPIKWHYLT

SEQ ID NO: 152850 - DNA, 699 bp, Buchnera aphidicola subsp
  CDS (1)..(699): transl_table=11
ttgaaagtatataaactagttttaatgcgacatggtgaaagtatatggaacgaattaaataaatttactggttggcatgacgtagatttatcaaaccgcggcgttcaagaatcgttgaaagcagcaaaattgttaaaaaaacacggtttttatttcgattacgcatattcatcggtgcttaaacgttcaattcatacgttatggaatattattaaatttcttgatcaatcatggattccagttaaaaagtcttggagattaaatgaacgtcattatggagctttagaaggactaaataaagatgatgtcattcaaaaatatggtaatgataaagtacagcaatggagaagaagttttaatatcgctcctcctaaaatatcatatttagaaaaaaaaaagttagctcatgattctagatataataatataaattttgatatactaccttattgcgaaagtttaaaattaactacgcaaagagtattaccatactggcttaacgaaattttcccgcgttttcaaaaaaacacaaagattattatagttgcgcatggaaattccttgagagccttgattaaatatttgaataacattaatgatatagatattttaaatttaaatattgctactggttttcctataatatatgaatttaactctgaatttaaacccattcaatattattatttaaaacaatag

SEQ ID NO: 152851 - protein, 232 aa, Buchnera aphidicola subsp
MKVYKLVLMRHGESIWNELNKFTGWHDVDLSNRGVQESLKAAKLLKKHGFYFDYAYSSVLKRSIHTLWNIIKFLDQSWIPVKKSWRLNERHYGALEGLNKDDVIQKYGNDKVQQWRRSFNIAPPKISYLEKKKLAHDSRYNNINFDILPYCESLKLTTQRVLPYWLNEIFPRFQKNTKIIIVAHGNSLRALIKYLNNINDIDILNLNIATGFPIIYEFNSEFKPIQYYYLKQ

SEQ ID NO: 152852 - DNA, 750 bp, Burkholderia mallei
  CDS (1)..(750): transl_table=11
atgtacaagctcgttctcatccgccacggcgaatcgacgtggaacaaggaaaaccgcttcaccggctgggtcgatgtcgacctgaccgaacaaggcaaccgcgaagcccggcaggcgggccagctcctgaaggaagccggctacacgttcgatatcgcatacacgtcggtgctcaagcgcgcgatccgcacgctctggcacgtgcaggaccagatggatctgatgtacgtgcccgtcgtgcattcgtggcgcctgaacgagcgccattacggcgcgctgtcgggcctgaacaaggcggagacggccgcgaagtacggcgacgagcaggtgctcgtctggcgccgcagctacgacacgccgccgcccgcgctcgagccgggcgacgagcgcgcgccgtacgccgatccgcgctacgcgaaggtgccgcgcgagcagttgccgctcaccgagtgcctgaaggacacggtcgcgcgcgtgctgccgctctggaacgaatcgatcgcgcccgcggtgaaggccggcaagcaggtgctgatcgccgcgcacggcaactcgctgcgcgcgctgatcaagtatctcgacggcatctccgacgcggacatcgtcggcctgaacatcccgaacggcgtgccgctcgtctacgagctcgacgagagcctcacgcccatccggcactactacctcggcgatcaggaggcgatcgcgaaggcgcaggccgccgtcgcgcagcagggcaagtccgcggcgtaa

SEQ ID NO: 152853 - protein, 249 aa, Burkholderia mallei
MYKLVLIRHGESTWNKENRFTGWVDVDLTEQGNREARQAGQLLKEAGYTFDIAYTSVLKRAIRTLWHVQDQMDLMYVPVVHSWRLNERHYGALSGLNKAETAAKYGDEQVLVWRRSYDTPPPALEPGDERAPYADPRYAKVPREQLPLTECLKDTVARVLPLWNESIAPAVKAGKQVLIAAHGNSLRALIKYLDGISDADIVGLNIPNGVPLVYELDESLTPIRHYYLGDQEAIAKAQAAVAQQGKSAA

SEQ ID NO: 152854 - DNA, 714 bp, Caulobacter crescentus
  CDS (1)..(714): transl_table=11
atgccgacgctcgtcctgctgcgccatggccaaagccagtggaacctggaaaaccgcttcaccggttgggttgatgtggacctcaccgctgagggcgaagctcaggcccggaagggcggcgagctgatcgctgcggccggcatcgagatcgaccgcttgttcacctcggttcagacccgcgccatccgcacaggcaatctggcgctggacgccgccaagcagagcttcgtccccgtgaccaaggactggcgcctgaacgagcgccactatggcgggctgaccggcctgaacaaggctgagaccgccgaaaagcacggcgtcgagcaggtgaccatctggcgccgttcgtacgatatcccgccgccggagctggcgccgggcggcgagtacgacttcagcaaggatcgccgctacaagggcgcaagcctgcccagcacggaaagcctggcgacgacgctggttcgcgttctgccctactgggaaagcgacatcgctccgcatctcaaggcgggtgagactgtgctgatcgccgcccacggcaactcgctgcgcgccatcgtcaagcatctgttcaacgtgccggacgaccagatcgtcggtgtggagattccgaccggcaatccgctggtgatcgacctggatgctgcgttgaagccgaccggcgcgcgctacctggacgacagtcgggctgaggcgcttcccaaagttggttaa

SEQ ID NO: 152855 - protein, 237 aa, Caulobacter crescentus
MPTLVLLRHGQSQWNLENRFTGWVDVDLTAEGEAQARKGGELIAAAGIEIDRLFTSVQTRAIRTGNLALDAAKQSFVPVTKDWRLNERHYGGLTGLNKAETAEKHGVEQVTIWRRSYDIPPPELAPGGEYDFSKDRRYKGASLPSTESLATTLVRVLPYWESDIAPHLKAGETVLIAAHGNSLRAIVKHLFNVPDDQIVGVEIPTGNPLVIDLDAALKPTGARYLDDSRAEALPKVG

SEQ ID NO: 152856 - DNA, 684 bp, Chlamydophila abortus
  CDS (1)..(684): transl_table=11
atggcctttcttatcttattacgacacgggaaatccgtctggaatgaaaaaaacctttttacaggatgggtggatattcccctaagtcaaaaaggtattgacgaagcaatgcttgcaggcgaagccatcaaagaccttcccatagattgcatctttacctcctctcttgtgcgaagtttaatgacggcattgcttgctatgacgcatcacaactctaaaaaaatcccttacattgttcacgatgatcctgaacaaaagcacatgagtaagatctatagtgatgaagtcaaccacatgatcccactgtaccgttctagcgcactcaatgaaagaatgtacggggaactccaaggaaaaaataaaaaaaaaaccgctgagcaatttggggaggagcaagtaaaattgtggcgacgtagttataagaccgcccctcctaatggcgaaagtctttatgatactgggcaacgcaccatcccctattttcaggaaactattttccctttgttgcagaattcaaaaaatgtatttgtatctgcacatggaaattccttacgttcactcattatggatatagaaaaattaagtgaagaagaggtacactccttggagttacctacaggaaaacccatagtatatttatggaccggtcacacattcgaacgacatccagagttatttggttaa

SEQ ID NO: 152857 - protein, 227 aa, Chlamydophila abortus
MAFLILLRHGKSVWNEKNLFTGWVDIPLSQKGIDEAMLAGEAIKDLPIDCIFTSSLVRSLMTALLAMTHHNSKKIPYIVHDDPEQKHMSKIYSDEVNHMIPLYRSSALNERMYGELQGKNKKKTAEQFGEEQVKLWRRSYKTAPPNGESLYDTGQRTIPYFQETIFPLLQNSKNVFVSAHGNSLRSLIMDIEKLSEEEVHSLELPTGKPIVYLWTGHTFERHPELFG

SEQ ID NO: 152858 - DNA, 684 bp, Chlamydophila caviae
  CDS (1)..(684): transl_table=11
atggcttttcttatcttattacgacacggaaaatccgtctggaatgaaaaaaatctttttacaggatgggtagatatccctctaagtcaacaaggaattgatgaagctattcatgcgggtcaggtgataaaagatctcccgatagactgcatctttacctcgtctcttgttagaagtttgatgacagcgctgcttgctatgacacatcacagctctaaaaaaattccttatattattcatgatgatgagcagcagaaactgatgagtaggatctatagtgatgaagaaaagagtatgatccctctttatcgttctagcgcactaaacgaaagaatgtatggggagctgcaagggaaaaacaaaaaagagactgctgaggagtttggtgaagaacaggtaaaattatggagacgaagttataaaatctcgcctcctggaggagaaagtctctatgatacgggattgcgtacggttccctattttcaagaaacgatcttccctttattgaaaaattcaaaaaatgtgttcatttctgcacacgggaattctctacgctcactgattatggatatagaaaaattaagtgaggaagaggtactctctttagagttacctacaggaaaacccatagtatatttatggaccggccacacattcgaacgacatccagaaccacttggttaa

SEQ ID NO: 152859 - protein, 227 aa, Chlamydophila caviae
MAFLILLRHGKSVWNEKNLFTGWVDIPLSQQGIDEAIHAGQVIKDLPIDCIFTSSLVRSLMTALLAMTHHSSKKIPYIIHDDEQQKLMSRIYSDEEKSMIPLYRSSALNERMYGELQGKNKKETAEEFGEEQVKLWRRSYKISPPGGESLYDTGLRTVPYFQETIFPLLKNSKNVFISAHGNSLRSLIMDIEKLSEEEVLSLELPTGKPIVYLWTGHTFERHPEPLG

SEQ ID NO: 152860 - DNA, 681 bp, Chlamydia muridarum
  CDS (1)..(681): transl_table=11
atgactcttcttattctgctacgccacggtcaatccgtatggaatcaaaaaaatctatttactggatgggtagatatccctcttagtcaacaaggaattcaagaagcacttactgctggggaagcgattaaaaatcttcctattgattgtatttttacctctactctagtcagaagcttgatgacagctcttctagcaatgactaaccacagctctaaaaaaattccttatattattcatgaagaacgccccgatatgagtaggattcatagtgaaaaagagttggaacaaatgatccccctttttcaatcgagcgcgcttaatgagcgtatgtatggagaacttcaggggaaaaataaacaagaagttgcagagcaatttggagaagagcaggttagactctggcgtagaagctacaaaattgctccgccacaaggagaaagtctctttgatacggcgcaaagaactctcccttactttcaaaagcgcatttttcctcttatccaacagggaaaaaatatttttatttctgctcatgggaactctttacgctctttgatcatggacctagaaaaattaactgaagaagaagtactctctttagagttgccaacagggaaacctattgtatacgaatggacggaacaaaaattcacgaagagcgcactttcgtttggttaa

SEQ ID NO: 152861 - protein, 226 aa, Chlamydia muridarum
MTLLILLRHGQSVWNQKNLFTGWVDIPLSQQGIQEALTAGEAIKNLPIDCIFTSTLVRSLMTALLAMTNHSSKKIPYIIHEERPDMSRIHSEKELEQMIPLFQSSALNERMYGELQGKNKQEVAEQFGEEQVRLWRRSYKIAPPQGESLFDTAQRTLPYFQKRIFPLIQQGKNIFISAHGNSLRSLIMDLEKLTEEEVLSLELPTGKPIVYEWTEQKFTKSALSFG

SEQ ID NO: 152862 - DNA, 687 bp, Chlamydia pneumoniae
  CDS (1)..(687): transl_table=11
atggctcttcttattttattacgtcatggacaatctgtatggaatgaaaaaaatttattttctggatgggtagacattcctttaagccaacagggaattgaagaggctttttccgcaggaagagctattcaaaatttgcctatagactgcatctttacctctaccttagtacgtagtctgatgaccgccttactcgccatgacaaatcatcactctaagaagatcccctatattgttcatgaagatcccaaagcaaaagagatgtcgaggatctacagtgcggaagaagaaaacaatatgattcctctctatcaatctagtgccctcaacgaaagaatgtacggcgaacttcaaggaaaaaataaaaaacaaacagccgaacagttcggagaagagcgggtcaagctgtggaggcgcagctacaaaacagctcctcctcagggagaaagcctctatgatacgaaacaaaggaccttgccttactttgaaaaaaatattttgcctcaactgcaaaatggaaaaaacgtttttgtttctgcgcacggaaattccttacgctctttgattatggatctagaaaaattaagtgaggaagaggtactatctttagaattaccgacgggaaaaccagttgtatatcaatggaaaaaccacaaaatcgaaaagcacccagaattttttggttaa

SEQ ID NO: 152863 - protein, 228 aa, Chlamydia pneumoniae
MALLILLRHGQSVWNEKNLFSGWVDIPLSQQGIEEAFSAGRAIQNLPIDCIFTSTLVRSLMTALLAMTNHHSKKIPYIVHEDPKAKEMSRIYSAEEENNMIPLYQSSALNERMYGELQGKNKKQTAEQFGEERVKLWRRSYKTAPPQGESLYDTKQRTLPYFEKNILPQLQNGKNVFVSAHGNSLRSLIMDLEKLSEEEVLSLELPTGKPVVYQWKNHKIEKHPEFFG

SEQ ID NO: 152864 - DNA, 744 bp, Chlorobium tepidum
  CDS (1)..(744): transl_table=11
atgaagaaacttgtcctgctgaggcacggcgaaagccagtggaaccgggagaaccgtttcaccggatgggtggatgttgatctttccgagaaaggaagagaagaggcgagaaccgctggccagctgctcaaggatgagggtttcgtgtttgacctcgcctacacttcggtgctcaagcgcgccatcaggacgctctggacggtgctcgacgagatgaatctcatgtggattcccgtcacaaaaaactggcgtctcaacgaacgccattacggagcattgcaggggctcaacaaggcagagactgcccagcgccacggcgacgagcaggtgctgatctggcgccgcagctacgacacgccgccaccggctctcaccgagagcgatgagttctggccgggcaaggacccgcgctatgcttcgctgtcctctcaggaactgcctgccacggagtgcctgaaggatacggttgcgcgcttccttccctactggcacgagactattgcaccgcagattcgcgatggcaagaatgtcattattacagctcacggtaattcgctcagggcgctggtcaaatatctcgacaacatttcggatgaggatatcgtcggtctgaacattcctaccggtattccgctggtgtacgagcttgacgacgatctcaagccgctgaagagttactatctgggcgaccaggaggagctgaagaaaaaggtggaggtcgtcgtcaaacagggcaaagcctga

SEQ ID NO: 152865 - protein, 247 aa, Chlorobium tepidum
MKKLVLLRHGESQWNRENRFTGWVDVDLSEKGREEARTAGQLLKDEGFVFDLAYTSVLKRAIRTLWTVLDEMNLMWIPVTKNWRLNERHYGALQGLNKAETAQRHGDEQVLIWRRSYDTPPPALTESDEFWPGKDPRYASLSSQELPATECLKDTVARFLPYWHETIAPQIRDGKNVIITAHGNSLRALVKYLDNISDEDIVGLNIPTGIPLVYELDDDLKPLKSYYLGDQEELKKKVEVVVKQGKA

SEQ ID NO: 152866 - DNA, 747 bp, Corynebacterium diphtheriae
  CDS (1)..(747): transl_table=11
atgactactggaaaactgattcttcttcgtcacggacaaagcgaatggaacgcttccaaccaattcaccggctgggtggacgtcaacctcaccgaaaagggcgaggcagaggctaagcgcggcggcgagctgctcaaggctcagggggtcctgccaagcgtggtgtacacctctttgctgcgccgtgctatccgcaccgccaacattgctctgaacgctgctgatcgccattggatcccagttgttcgcgattggcgcctcaacgagcgccactacggtgcgctgcagggcctgaacaaggctgagactaaggaaaagtacggcgacgagcagttcatggcatggcgtcgttcttatggcaccccaccaccagagcttgaggattccagcgagttctcccaggcaaacgatcctcgttacgccaaccttgacgtggttcctcgcaccgagtgcttgaaggacgttgttgagcgtttcgttccttacttcaaggaagagatcctgccacgtgtgaagaacggtgagactgttttgatcgctgcacacggtaactccctgcgtgcattggtcaagcacctagacaacatctctgatgcagacatcgctgagctcaacatccctaccggtattccactggtttatgagctcgacgaggctggcacggtgctcaacccaggtggcacctaccttgacccagaagctgctgctgccggtgctgccgcagttgctgctcagggcgctaagtag

SEQ ID NO: 152867 - protein, 248 aa, Corynebacterium diphtheriae
MTTGKLILLRHGQSEWNASNQFTGWVDVNLTEKGEAEAKRGGELLKAQGVLPSVVYTSLLRRAIRTANIALNAADRHWIPVVRDWRLNERHYGALQGLNKAETKEKYGDEQFMAWRRSYGTPPPELEDSSEFSQANDPRYANLDVVPRTECLKDVVERFVPYFKEEILPRVKNGETVLIAAHGNSLRALVKHLDNISDADIAELNIPTGIPLVYELDEAGTVLNPGGTYLDPEAAAAGAAAVAAQGAK

SEQ ID NO: 152868 - DNA, 753 bp, Corynebacterium efficiens
  CDS (1)..(753): transl_table=11
ttggttatgactaacggaaaactgattcttcttcgtcacggacagagtgcgtggaacgcctccaaccagttcaccggatgggtggatgtcgacctgaccaccatcggtgaggccgaggccaagcgcggcggcgaactgctcgtggagaacaacgttctgcccgacgtggtctacacctccctgctgcgccgtgcgatccgcaccgccaacctggcgctggatgccgccgaccgccactggatccccgtggtgcgcgactggcgcctcaacgagcgtcactacggtgcgctgcagggcctgaacaaggccgagaccaaggacaagtacggcgatgagcagtacatggcgtggcgtcgttcctacggcaccccgccaccggagctcgccgatgacgccgagtactcccaggccggcgacgtgcgctacaaggacctggagtccgtcccacgcaccgagtgcctgaaggatgtcgtggagcgtttcatcccctacttcgaggaggagatcctcccgcgcgtgaagaagggcgagaacgtcctgatcgccgcgcacggcaactccctgcgcgccctggtcaagcacctggacaacatctccgatgatgacatcgccgagctgaacatccccaccggcatcccgctggtctacgagatcacccctgagggtaccgtggtcaaccccggtggtacctacctcgatcccgaggctgccgccgcaggtgcagccgccgtggccaaccagggcggtaagtag

SEQ ID NO: 152869 - protein, 250 aa, Corynebacterium efficiens
MVMTNGKLILLRHGQSAWNASNQFTGWVDVDLTTIGEAEAKRGGELLVENNVLPDVVYTSLLRRAIRTANLALDAADRHWIPVVRDWRLNERHYGALQGLNKAETKDKYGDEQYMAWRRSYGTPPPELADDAEYSQAGDVRYKDLESVPRTECLKDVVERFIPYFEEEILPRVKKGENVLIAAHGNSLRALVKHLDNISDDDIAELNIPTGIPLVYEITPEGTVVNPGGTYLDPEAAAAGAAAVANQGGK

SEQ ID NO: 152870 - DNA, 762 bp, Desulfovibrio desulfuricans
  CDS (1)..(762): transl_table=11
atgtacaagctggtacttgtccgccacggacaaagcacatggaatctggaaaaccggttcaccggctggaccgatgtggatctgaccccgctgggcgaaaccgaagcccgcgaaggcgcacgtctgatagccgcagcgggccttacctttgacgaatgccatacctcggtgctcaagcgggccatacgcaccctgaacatcatacaggaagagctggacctgctgtggctgcctgtgcaccgccactggcggctcaacgagcgccactacggcgcgctgcagggactgaataaaaaagaaatgtcggaaaaatacggcgaggaacaggtattcatctggcggcgcagctttgacacaccgccccctgcccttaccgccgacgacccgcgccaccccgcgcatgaccggcggtacgcctcgctgacagcccgtcagatgccgctgtgcgaaagccttaaagacaccgtggccagagtgctgccatactggcacgaaacccttgctccggccatacaggccggccgccgcctgctggtggccgcacacggcaacagtctgcgggcgctcgtcatgcaccttgacggcatgtcgccagacgaagtcacggggctgaacattcccaccgggctgccgctggtgtacgaactggacagtaatcttacaccgctgcggcgcgcgtatctgggtgatgccgaagccgccgaggcaaaagccagagccgttgccgaacaggcaaaggctggaacaacggaacgcccgtga

SEQ ID NO: 152871 - protein, 253 aa, Desulfovibrio desulfuricans
MYKLVLVRHGQSTWNLENRFTGWTDVDLTPLGETEAREGARLIAAAGLTFDECHTSVLKRAIRTLNIIQEELDLLWLPVHRHWRLNERHYGALQGLNKKEMSEKYGEEQVFIWRRSFDTPPPALTADDPRHPAHDRRYASLTARQMPLCESLKDTVARVLPYWHETLAPAIQAGRRLLVAAHGNSLRALVMHLDGMSPDEVTGLNIPTGLPLVYELDSNLTPLRRAYLGDAEAAEAKARAVAEQAKAGTTERP

SEQ ID NO: 152872 - DNA, 753 bp, Desulfovibrio vulgaris
  CDS (1)..(753): transl_table=11
atggcgcggctcatccttctcagacacgggcagagtgcatggaaccttgaaaaccgcttcaccgggtggacggacgtagacctctccccggcaggcgaagccgaggcactggccgcggcacggctcatccgggatgaagggctcgacttctccgtgtgccacacctccatgctgacccgtgccatacgcacgctgcatcttgtacagcaagaactggacaggctctggacgcccgtacgcaagcactggcgtctcaatgaacggcactacggggccctgcaggggctggacaaacgcgagaccgcggcacgacacggcgaagaccaggtcttcgtctggcggcgcagctacgatgtgccgccgcccgtcatcgcccccgacgacccgaagcaccccgtccacgacccccgctacgccgatgtgccccctgatgtccttccctgtggcgaaagccttgaagcgaccgtggcgcgggtactcccctactggtacgacgccatcgcccccgacctcatggcggggcgcgatgtgctggtggcggcccacggcaacagcctgcgcgcccttgtcatgcatcttgacgggcttgaccgcgaggatgtttcacgcctcgacatccccaccgggctgccccgcctgtacgaactggatgccgcactgcgccccgtgtcgtaccgctatctgggagacccggcagaggctgaggaacgggcacgcgccgtagccgcgcaggggcggctcgaaaagaactga

SEQ ID NO: 152873 - protein, 250 aa, Desulfovibrio vulgaris
MARLILLRHGQSAWNLENRFTGWTDVDLSPAGEAEALAAARLIRDEGLDFSVCHTSMLTRAIRTLHLVQQELDRLWTPVRKHWRLNERHYGALQGLDKRETAARHGEDQVFVWRRSYDVPPPVIAPDDPKHPVHDPRYADVPPDVLPCGESLEATVARVLPYWYDAIAPDLMAGRDVLVAAHGNSLRALVMHLDGLDREDVSRLDIPTGLPRLYELDAALRPVSYRYLGDPAEAEERARAVAAQGRLEKN

SEQ ID NO: 152874 - DNA, 687 bp, Enterococcus faecalis
  CDS (1)..(687): transl_table=11
atgccaaaattagttttttctcgtcatggacttagcgaatggaatgccttaaaccaatttactggatgggctgacgtagatttagcacctgaaggtgttgaagaagcaaaagaaggcggccgtaaaattaaagaagcaggcatcgaattcgacgttgcttatacttctgttttaactcgtgccatcaaaacttgtaactatttactagaatactcagatcaattatgggtacctcaaatcaaatcttggcgcttaaacgaacgtcactatggtaaattacaaggactaaacaaaaaagaaactgctgaaaaatacggagacgaacaagtccacatctggcgtcgttcttacgatactcttcctccattaatggaagcaacagatgaaggttctgcagcaaacgaccgtcgttatgcaatgttagaccaacgcgatattcctggtggcgaaaacttgaaagttactttggaacgtgcattaccattctggcaagatgaaattgcgccagctttaaaagacaacaaaactgttttagtagcggctcatggtaattcattacgtgctttagctaaacacatcgaaggcatttctgatgaagatattatggatcttgaaatcccaacaggtaaaccattagtttatgaattaaacgatgatttaactgtgaaagaaaaatactacttataa

SEQ ID NO: 152875 - protein, 228 aa, Enterococcus faecalis
MPKLVFSRHGLSEWNALNQFTGWADVDLAPEGVEEAKEGGRKIKEAGIEFDVAYTSVLTRAIKTCNYLLEYSDQLWVPQIKSWRLNERHYGKLQGLNKKETAEKYGDEQVHIWRRSYDTLPPLMEATDEGSAANDRRYAMLDQRDIPGGENLKVTLERALPFWQDEIAPALKDNKTVLVAAHGNSLRALAKHIEGISDEDIMDLEIPTGKPLVYELNDDLTVKEKYYL

SEQ ID NO: 152876 - DNA, 687 bp, Fusobacterium nucleatum subsp
  CDS (1)..(687): transl_table=11
atgaaattagttttaattcgtcatggagaaagtgcatggaacttagaaaatagatttacagggtggaaagatgttgatttaagtccaaaaggaatggaagaagcaaaatcagcaggaaaaattttaaaagaaatgaatttagtttttgatgttgcctatacttcatatttaaaaagagcaatcaaaactttaaatattgttttagaagaaatggatgaattatatattccagtatataaatcttggagattaaatgaaagacactatggagcattacaaggattaaataaagcagaaactgcaaaaaaatatggagatgaacaagtacatatttggcgtcgtagttttgatgtagctccaccaagtattgataaaaatagtgaatattatccaaagtcagatagaagatatgcagatttagcagattctgatattccattaggagagagtttaaaggatacaatagcaagagtattaccttactggcattctgatatttcaaaaagtttgcaagaagaaaaaaatgttatagttgctgctcatggaaatagtttaagagcattaataaaatatttattaaatatttctaatgaagatattttaaatctaaacttagttacaggaaaacctatggtatttgaaatagataaagatttaaaagtgttatcttcacctgaattattttaa

SEQ ID NO: 152877 - protein, 228 aa, Fusobacterium nucleatum subsp
MKLVLIRHGESAWNLENRFTGWKDVDLSPKGMEEAKSAGKILKEMNLVFDVAYTSYLKRAIKTLNIVLEEMDELYIPVYKSWRLNERHYGALQGLNKAETAKKYGDEQVHIWRRSFDVAPPSIDKNSEYYPKSDRRYADLADSDIPLGESLKDTIARVLPYWHSDISKSLQEEKNVIVAAHGNSLRALIKYLLNISNEDILNLNLVTGKPMVFEIDKDLKVLSSPELF

SEQ ID NO: 152878 - DNA, 744 bp, Geobacter metallireducens
  CDS (1)..(744): transl_table=11
atgaaaaagctcgttttgcttcgtcacggcgaaagcgtctggaacagggagaaccgtttcaccggctggaccgatgtggggctcagcgagaaggggatcgaggaggcaatcagtgccgggcgcaccctgaaagaagaagggtttgttttcgacgtggcctacacgtcggtcctcaagcgggccatcaagaccctctggctcgtcctggaagagatggatctcatgtggatcccggaataccgccactggaggctcaacgagcgtcactacggagcgctccaggggctcaacaaggcggagaccgccgaacggcacggcatggagcaggtcatgatctggcgccgcagttacgatatcccgccgcctcccctgacccccgacgatcagcggtttccgggaagcgatcctcgctatgcatcacttttacccgaggagttaccactcaccgaatccctcaaggacacggtcgcccgttttcttccctactggcatgaaaccatcgcccccgccgtaaaagaagggaaacgggttctcgtcaccgcccacggcaacagcctgcgggcccttgtaaaatacctggatctggtctctgactccgaaatcgtcaacctcaatattcccaccggcattccccttgtctacgaactaacggataacatgacacccatcaggagctactatctcggtgatccggatgacgtggccagggcaagcaggatggtggcggatcagataaagaagtaa

SEQ ID NO: 152879 - protein, 247 aa, Geobacter metallireducens
MKKLVLLRHGESVWNRENRFTGWTDVGLSEKGIEEAISAGRTLKEEGFVFDVAYTSVLKRAIKTLWLVLEEMDLMWIPEYRHWRLNERHYGALQGLNKAETAERHGMEQVMIWRRSYDIPPPPLTPDDQRFPGSDPRYASLLPEELPLTESLKDTVARFLPYWHETIAPAVKEGKRVLVTAHGNSLRALVKYLDLVSDSEIVNLNIPTGIPLVYELTDNMTPIRSYYLGDPDDVARASRMVADQIKK

SEQ ID NO: 152880 - DNA, 744 bp, Geobacter sulfurreducens
  CDS (1)..(744): transl_table=11
atgagaacgctcgttctgattcgtcatggggagagtgtctggaacagggaaaaccgttttaccggctggactgacgtggggctgaccgataagggcgcggcagaggccctgcgtgccggtcgtaccctgaaaaacgaggggtttgcctttgacgaggcgttcacctcagtgctcaagcgggccatcaaaaccctctggatcgttttggaggagatggatcagatgtggattccggagcaccgtcactggcggcttaatgaacgccactacggcgcgctccagggactcaataaggccgaaactgccgaaaggcacggcatggaacaagttcatgtctggcgccgcagctatgatattccgccaccgcccctggccgccggcgatccgcgcaaccctgcacgggacccgcgctatgcggagcttgatcccgcagatatccccctgaccgagtcgctcaaggataccgtagcccgtttccttccctactggcacgagacgattgcgccccgcattctcgcgggccgccgcctgctcatcgccgcccatggcaacagtctgcgggccctggtgaagtacctggacggcatcggggacgacgccattgccggtctgaatattcccaccggcattccccttgtctatgagctggaagatgacctgcaccccatacgaagctattacctgggtgatcctgacgaggttgcccgggccacccagtcggtggcggatcaggtaaagaggtag

SEQ ID NO: 152881 - protein, 247 aa, Geobacter sulfurreducens
MRTLVLIRHGESVWNRENRFTGWTDVGLTDKGAAEALRAGRTLKNEGFAFDEAFTSVLKRAIKTLWIVLEEMDQMWIPEHRHWRLNERHYGALQGLNKAETAERHGMEQVHVWRRSYDIPPPPLAAGDPRNPARDPRYAELDPADIPLTESLKDTVARFLPYWHETIAPRILAGRRLLIAAHGNSLRALVKYLDGIGDDAIAGLNIPTGIPLVYELEDDLHPIRSYYLGDPDEVARATQSVADQVKR

SEQ ID NO: 152882 - DNA, 684 bp, Haemophilus ducreyi
  CDS (1)..(684): transl_table=11
atggaattagtatttattcgtcacggatttagtgaatggaatgcgaaaaacttatttactggttggcgcgatgtgaatctaaccgaacgaggcgttgaagaagcaaaagccgcaggccaaaaactcttagctgcgggatatgaatttgatatcgcattcacttccgtactgactcgtgcaatcaaaacgtgtaatattgtattagaagaatctaatcaattatggattccacaggtgaaacattggcgtttaaatgagcgtcattatggtgaattacaaggcttagataaaaaagccacggcagaaaaatatggcgatgaacaagtacatatttggcgccgttcttatgataccctaccaccactattagcaccatcagatccaaattcagcccataatgatcgccgttatgcgcacctacccaaagaagttgtgccaaatggcgagaatttaaaagtcactttagaacgtgttctgccattttgggaagatcaaattgccccggcattattatctggcaaacgcgttttagtaacggcccacggtaattcattacgcgcacttgccaaacatattatcgggatttctgatgctgaaattatggactttgagattccaacaggtcaaccattagttttaaaattagacagcaaattaaatttcattgaaaaattttatttataa

SEQ ID NO: 152883 - protein, 227 aa, Haemophilus ducreyi
MELVFIRHGFSEWNAKNLFTGWRDVNLTERGVEEAKAAGQKLLAAGYEFDIAFTSVLTRAIKTCNIVLEESNQLWIPQVKHWRLNERHYGELQGLDKKATAEKYGDEQVHIWRRSYDTLPPLLAPSDPNSAHNDRRYAHLPKEVVPNGENLKVTLERVLPFWEDQIAPALLSGKRVLVTAHGNSLRALAKHIIGISDAEIMDFEIPTGQPLVLKLDSKLNFIEKFYL

SEQ ID NO: 152884 - DNA, 684 bp, Haemophilus influenzae
  CDS (1)..(684): transl_table=11
atggaattagtatttatccgtcacggttttagtgaatggaatgcgaaaaacttattcacaggctggcgtgatgtgaatttaactgaacgtggtgtggaagaagcaaaagctgcgggtaaaaaactgttagacaaaggttatgaatttgatatcgcatttacctctgttttaactcgagcaatcaaaacttgtaatatcgtgttagaagaatcccatcaattatggattccgcaagtaaaaaactggcgtttaaatgaacgtcattatggtgctttacaaggtttagataaaaaagcgactgcggagcaatacggtgacgaacaagttcatatttggcgtcgttcttatgacatttctccaccagatttagatccacaagatccaaattctgcacacaatgaccgtcgctacgcaaatattccatctgatgttgtgccaaacgcagaaaatttaaaattaacattagaacgcgcattaccattctgggaagatcaaattgcaccagcaatgctttctggcaaacgtgttttagtagttgctcacggtaattcacttcgtgcgttggcaaaacatattatcggtatttctgatgctgaaattatggattttgaaattccaacaggtcagcctttagttttaaaacttgatgataaattaaattacgtagaacattactatctttaa

SEQ ID NO: 152885 - protein, 227 aa, Haemophilus influenzae
MELVFIRHGFSEWNAKNLFTGWRDVNLTERGVEEAKAAGKKLLDKGYEFDIAFTSVLTRAIKTCNIVLEESHQLWIPQVKNWRLNERHYGALQGLDKKATAEQYGDEQVHIWRRSYDISPPDLDPQDPNSAHNDRRYANIPSDVVPNAENLKLTLERALPFWEDQIAPAMLSGKRVLVVAHGNSLRALAKHIIGISDAEIMDFEIPTGQPLVLKLDDKLNYVEHYYL

SEQ ID NO: 152886 - DNA, 684 bp, Haemophilus influenzae
  CDS (1)..(684): transl_table=11
atggaattagtatttatccgtcacggttttagtgaatggaatgcgaaaaacttattcacaggctggcgtgatgtgaatttaactgaacgtggtgtggaagaagcaaaaactgcgggtaaaaaactgttagacaaaggttatgaatttgatatcgcatttacctctgttttaactcgagcaatcaaaacttgtaacatcgtgttagaagaatcccatcaattatggattccgcaagtaaaaaactggcgtttaaatgaacgtcattatggtgctttacaaggtttagataaaaaagcgactgcggagcaatacggtgacgaacaagttcatatttggcgtcgttcttacgacatttctccaccagatttagatccacaagatccaaattctgcacacaatgaccgtcgctacgcaaatattccatctgatgttgtgccaaacgcagaaaatttaaaattaacattagaacgtgcattaccattctgggaagatcaaattgcaccagcaatgctttctggcaaacgtgttttagtggttgctcacggaaattcacttcgtgcgttggcaaaacatattatcggtatttctgatgctgaaattatggattttgaaattccaacaggccaacctttagtattaaaactagatgataaattaaattacgtagaacattactatctttaa

SEQ ID NO: 152887 - protein, 227 aa, Haemophilus influenzae
MELVFIRHGFSEWNAKNLFTGWRDVNLTERGVEEAKTAGKKLLDKGYEFDIAFTSVLTRAIKTCNIVLEESHQLWIPQVKNWRLNERHYGALQGLDKKATAEQYGDEQVHIWRRSYDISPPDLDPQDPNSAHNDRRYANIPSDVVPNAENLKLTLERALPFWEDQIAPAMLSGKRVLVVAHGNSLRALAKHIIGISDAEIMDFEIPTGQPLVLKLDDKLNYVEHYYL

SEQ ID NO: 152888 - DNA, 693 bp, Lactobacillus acidophilus
  CDS (1)..(693): transl_table=11
atgtcaaaattagttttaatccgtcacggtcaaagtgaatggaacctttcaaaccaatttactggttgggttgacgttaacctttcagaaaaaggtgttgaagaagctaagaaggctggtcgtttaatcaaggaacacggtcttgaatttgatcaagcttacacttcattattaactcgtgctatcaagactttgcactacgcattggaagaaagtgaccaactttggattccagaaactaagacttggagacttaacgaacgtcactacggtgctcttcaaggcttgaacaagaaggctactgctgaaaagtacggtgatgaacaagttcacatttggcgtcgttcatacgatgttttgccaccagctattgacgatgacaacgaatttagtcaagcacatgaccgtcgttacgcaaacttggatccacacatcgttcctaaggcagaaaacttacacgtaactttggatcgtgtaatgccattctgggaagataacattgctccagacttacttgacggtaagaacgtaattattgctgcacacggtaactcacttcgtgctttgactaagtacattgaaaacatttctgacgatgacatcatggacctcgaaatgaagactggtgaaccagttgtttacactttcgacgaaaacttggatgttgttaacaaggaaaagttggacgactaa

SEQ ID NO: 152889 - protein, 230 aa, Lactobacillus acidophilus
MSKLVLIRHGQSEWNLSNQFTGWVDVNLSEKGVEEAKKAGRLIKEHGLEFDQAYTSLLTRAIKTLHYALEESDQLWIPETKTWRLNERHYGALQGLNKKATAEKYGDEQVHIWRRSYDVLPPAIDDDNEFSQAHDRRYANLDPHIVPKAENLHVTLDRVMPFWEDNIAPDLLDGKNVIIAAHGNSLRALTKYIENISDDDIMDLEMKTGEPVVYTFDENLDVVNKEKLDD

SEQ ID NO: 152890 - DNA, 690 bp, Listeria innocua
  CDS (1)..(690): transl_table=11
atgaaattagtattaattcgtcatggtcaaagtgaatggaacaaattgaatttatttactggttggcatgatgttgacttatcagaagaaggcgttgtagaagcaatgacagcaggaaaacggattaaagaagctggcttggaatttgatgtagcttttacttccgttttaactagagctattaaaacgcttaattatgttttagaagaatctgatcaaatgtgggttccagtccataaatcatggcgtttaaacgaacgacattacggagcgcttcaaggacttaataaacaagaaactgctgaaaaatacggcgcagaccaagtacaaaaatggcgcagaagctacgatactcttccaccattattagaagaaaacgacgaaagacaagcgaaaaatgatcgccgttatcaacttcttgatacccatgcaattccatcgggtgaaaacttgaaagtaaccttagaacgagttattccttactggatggatacaattgcaccagaaattaaagcaggacgtcgtgtagttattgcagctcacggtaatagtttacgcgccttggtaaaattcttagaaggtattagtgatgacgaaattatggaacttgaaatcccaacaggtgtaccgcttgtatatgaattaaacgatgatttaaaaccagttaataaatattacttggataaataa

SEQ ID NO: 152891 - protein, 229 aa, Listeria innocua
MKLVLIRHGQSEWNKLNLFTGWHDVDLSEEGVVEAMTAGKRIKEAGLEFDVAFTSVLTRAIKTLNYVLEESDQMWVPVHKSWRLNERHYGALQGLNKQETAEKYGADQVQKWRRSYDTLPPLLEENDERQAKNDRRYQLLDTHAIPSGENLKVTLERVIPYWMDTIAPEIKAGRRVVIAAHGNSLRALVKFLEGISDDEIMELEIPTGVPLVYELNDDLKPVNKYYLDK

SEQ ID NO: 152892 - DNA, 690 bp, Listeria monocytogenes serotype 4b
  CDS (1)..(690): transl_table=11
atgaaattagtattaattcgtcatggtcaaagtgaatggaacaaattgaatttatttacaggttggcatgatgttgacttgtcacaagaaggcgttgtagaagcaatgactgcaggaaaaagaattaaagaagcgggcttagaattcgatgttgccttcacttctgttttaacgcgagctattaaaacacttaattatgtgttagaagaatctgaccaaatgtgggtaccagttcataaatcttggcgcttgaacgaacggcattatggcgcacttcaaggtcttaacaaacaagaaactgctgaaaaatatggtgctgaccaagtacaaaaatggcgcagaagctatgacactcttccaccgttattagaagaaaacgacgaaagacaagccaaaaatgatcgccgttatcaactccttgatacacacgctattccggcaggtgaaaacttgaaagtaacattagaacgcgttattccttattggatggacacgattgctccagaaattaaagaaggacggcgagtagtcatcgcggcgcatggtaacagtttacgagcattagtgaaatttctagaaggtattggcgatgatgaaataatggatttagaaattccgacaggcgtgccactagtatatgaattaaacgatgatttaaaaccagtaaataaatattacttggataaataa

SEQ ID NO: 152893 - protein, 229 aa, Listeria monocytogenes serotype 4b
MKLVLIRHGQSEWNKLNLFTGWHDVDLSQEGVVEAMTAGKRIKEAGLEFDVAFTSVLTRAIKTLNYVLEESDQMWVPVHKSWRLNERHYGALQGLNKQETAEKYGADQVQKWRRSYDTLPPLLEENDERQAKNDRRYQLLDTHAIPAGENLKVTLERVIPYWMDTIAPEIKEGRRVVIAAHGNSLRALVKFLEGIGDDEIMDLEIPTGVPLVYELNDDLKPVNKYYLDK

SEQ ID NO: 152894 - DNA, 690 bp, Listeria monocytogenes
  CDS (1)..(690): transl_table=11
atgaaattagtattaattcgtcatggtcaaagtgaatggaacaaattgaacctatttacaggttggcatgatgtggacttgtcgcaagaaggcgttgtggaagcaatgacagcaggaaaaagaattaaagaggcaggcttagaattcgatgttgccttcacttctgttttaacacgagctattaaaacacttaattatgtgttagaagaatctgaccaaatgtgggtaccagttcataaatcttggcgcttgaacgaacgtcattacggcgcacttcaaggacttaataaacaagaaactgctgaaaaatatggtgctgaccaagtacaaaaatggcgtagaagctatgacacacttccaccattactagaagaaaacgacgaaagacaagcaaaaaatgatcgtcgttatcaactccttgatacacacgctattccatcaggtgaaaacttgaaagtaacattagaacgcgttattccttattggatggacacaattgctccagaaattaaagaaggacgacgagtagtcatcgcggcgcatggtaacagtttacgagcattagtgaaattcctagaaggtattagtgatgatgaaataatggatttagaaattccaacaggcgtaccgctagtatatgaattaaacgctgatttaaaaccagtaaataaatattacttggataaataa

SEQ ID NO: 152895 - protein, 229 aa, Listeria monocytogenes
MKLVLIRHGQSEWNKLNLFTGWHDVDLSQEGVVEAMTAGKRIKEAGLEFDVAFTSVLTRAIKTLNYVLEESDQMWVPVHKSWRLNERHYGALQGLNKQETAEKYGADQVQKWRRSYDTLPPLLEENDERQAKNDRRYQLLDTHAIPSGENLKVTLERVIPYWMDTIAPEIKEGRRVVIAAHGNSLRALVKFLEGISDDEIMDLEIPTGVPLVYELNADLKPVNKYYLDK

SEQ ID NO: 152896 - DNA, 684 bp, Mannheimia succiniciproducens
  CDS (1)..(684): transl_table=11
atggaattagtatttattcgtcacggtttaagtgaatggaatgcattaaaccttttcaccggctggagagacgtaaacttaagtgaaaaaggcgtggaagaagcaaaagaagcgggtcgtaaattaaaagccgcaggcttcgaatttgatatcgcgttcacttcagtattaacccgtgcgatcaaaacctgtaacttagtgttagaagaatctaaccaattatgggttccgcaaatcaaaacatggcgtttgaacgaacgccactacggcggtttacaaggtttaaacaaagcggaggcagcggctgaacacggtgacgaacaagttcgtatttggcgccgttcatacgatgtgttaccgccggttttagatccaaaagaccctaactccgcacacaacgaccgtcgttacgcacatttaccggcggatgttgtgcctgattgtgaaaacttaaaagtaactttagaacgcgttttaccattctgggaagatcaaatcgcaccggcaattaaagcgggcaaacgtgttttagttgcggcacacggtaactcattacgcgcacttgcaaaacacattgaaggtatttccgatgcggatatcatggacttggaaatccctaccggtcaacctttagtttatactttagacgacaacttaaaagtagtaagcaaacgctacttataa

SEQ ID NO: 152897 - protein, 227 aa, Mannheimia succiniciproducens
MELVFIRHGLSEWNALNLFTGWRDVNLSEKGVEEAKEAGRKLKAAGFEFDIAFTSVLTRAIKTCNLVLEESNQLWVPQIKTWRLNERHYGGLQGLNKAEAAAEHGDEQVRIWRRSYDVLPPVLDPKDPNSAHNDRRYAHLPADVVPDCENLKVTLERVLPFWEDQIAPAIKAGKRVLVAAHGNSLRALAKHIEGISDADIMDLEIPTGQPLVYTLDDNLKVVSKRYL

SEQ ID NO: 152898 - DNA, 747 bp, Methanosarcina acetivorans
  CDS (1)..(747): transl_table=11
atgagttacctgataattgtacgacacggggaatccggctggaacgttgatggcaggttcggaggctgggttgacgttcctttgaccggaaaggggataaaagaagcccttctctgtgctgccgaacttgaggggattgatctggacgttactttcacttcaaaactgattcgggcacaggaaactctctttttaatcctttcaaagcagaaaaaaattggggtctttgtccacgaagaagccgggacaggagaggataggaccgaaagagaagacggatccaggaaggacagaaaagaaaaacggtatgcttacccccctaataccgaaaaaaacctgatccctatccattcaaatgaagccttaaacgaacgctattacgggatacttcagggcaagaaaaaggacaaaatgaaagcgaaatacggggaagagcagattctccactggtgccggagttttgacgaagggcctccggaaggggaaagcctcaaggatatctatagacgtgcggtgccatatttcgaaaaagagatctttcccatccttcaggacggaaaaaatgtaattgtctgtgctcaccagaacagtttacgagcgctgataaagcatattgaagggatttctaacgaagacatccgcaaaatcaggctggcaaatgcaaggccagtaatctatacattctctggaggcaggctggtcagggaaaatgctgaaacggacccatcagtgaaaaggaatctctga

SEQ ID NO: 152899 - protein, 248 aa, Methanosarcina acetivorans
MSYLIIVRHGESGWNVDGRFGGWVDVPLTGKGIKEALLCAAELEGIDLDVTFTSKLIRAQETLFLILSKQKKIGVFVHEEAGTGEDRTEREDGSRKDRKEKRYAYPPNTEKNLIPIHSNEALNERYYGILQGKKKDKMKAKYGEEQILHWCRSFDEGPPEGESLKDIYRRAVPYFEKEIFPILQDGKNVIVCAHQNSLRALIKHIEGISNEDIRKIRLANARPVIYTFSGGRLVRENAETDPSVKRNL

SEQ ID NO: 152900 - DNA, 726 bp, Methanosarcina mazei
  CDS (1)..(726): transl_table=11
gtgataatcacgggtcatcttatacttgtcaggcatggagaacctggcctgaagccaggggaaaggctttcgggctggattgacatcccgttaagcaggaaaggcatagaagaagcacttgaatgtgcgaaagcgcttgaaaacatagaaatagacattgcttttgcatcagaccttgtccgaacacaggaaacccttttcatcatactttcgggccagaaaaaaacaggggttgttgtacacgagaaaacagaagataaagtgcccccggaaaagcttgactggtattcctaccccgaaaagctcggagaagaccttatcccggtttatacgactcctgctctgaacgagcgttactacggcaaacttcagggcagaaaaaagcagaaaatggaagaaaaatacggtgcagaacaggtagcaaactggcgctggaactttgaaccgggccctccggaaggggaaagcttgaaagctgtctatgagcgcacagttccctatttccgaaaaaaagtcatgcctgcccttgaaggaggaaaaaatgtgctgatctgcgcccaccagagcagcctgagggctcttgtcaaatacatagaggatatttccgacaaagatatcagggaagtaaggttgtccactggagagcttgcaatttaccatttttccgaaggaaaacttgtcagggaaaatgaagagctcggacctgagctgaaaaggaatatttaa

SEQ ID NO: 152901 - protein, 241 aa, Methanosarcina mazei
MIITGHLILVRHGEPGLKPGERLSGWIDIPLSRKGIEEALECAKALENIEIDIAFASDLVRTQETLFIILSGQKKTGVVVHEKTEDKVPPEKLDWYSYPEKLGEDLIPVYTTPALNERYYGKLQGRKKQKMEEKYGAEQVANWRWNFEPGPPEGESLKAVYERTVPYFRKKVMPALEGGKNVLICAHQSSLRALVKYIEDISDKDIREVRLSTGELAIYHFSEGKLVRENEELGPELKRNI

SEQ ID NO: 152902 - DNA, 744 bp, Mycobacterium leprae
  CDS (1)..(744): transl_table=11
atgcaacagggtaacactgctacgctgattctactccgtcatggcgagagtgactggaatgcccggaatctgttcaccggttgggtggacgtcgggctaaccgacaagggtcgagcggaggcggtccgcagcggtgagttgcttgccgagcacaatctgttgcccgacgtgttgtacacgtcgctgttgcgccgcgctatcaccactgcgcatctggcgttagacaccgccgactggctatggattccggtccgtcgcagctggcggctcaatgaacgtcactacggcgcgcttcagggtctggacaaggccgtgaccaaggcccgctacggcgaagaacgattcatggcttggcgccgcagctacgacactccgccaccaccgatcgagaagggtagcgagttcagccaggatgctgaccctcgctacaccgacattggcggcgggccgctgaccgaatgcctggctgatgtggtgacccgcttcctgccgtatttcaccgacgtgatagtccccgatctgcggaccggcagaacggtgctcattgtggcgcacggcaactcgctgcgcgcgctggtcaaacacctagacgagatgtccgacgacgaggtcgtcgggcttaacgttccgactggcattccgctgcgctatgatctagatgccgatctgcgtccggtggtacccggtggtacctacctcgaccccgaggcggccgctgcggtaatcagtcaagcgcgcccgtaa

SEQ ID NO: 152903 - protein, 247 aa, Mycobacterium leprae
MQQGNTATLILLRHGESDWNARNLFTGWVDVGLTDKGRAEAVRSGELLAEHNLLPDVLYTSLLRRAITTAHLALDTADWLWIPVRRSWRLNERHYGALQGLDKAVTKARYGEERFMAWRRSYDTPPPPIEKGSEFSQDADPRYTDIGGGPLTECLADVVTRFLPYFTDVIVPDLRTGRTVLIVAHGNSLRALVKHLDEMSDDEVVGLNVPTGIPLRYDLDADLRPVVPGGTYLDPEAAAAVISQARP

SEQ ID NO: 152904 - DNA, 750 bp, Mycobacterium paratuberculosis
  CDS (1)..(750): transl_table=11
atgggtgagactgccacgctggtactgctgcgccacggcgaaagcgaatggaactcgctgaacctgttcaccggttgggtggacgtcgggctgaccgacaagggccgcgccgaggcggtgcgcagcggcgagctgctggccgagcagggcctgctgcccgacgcgctctacacgtcgctgctgcgccgcgcgatcaccaccgcgcatctggccctggacgccgcggaccggctgtggatcccggtgcggcgcagctggcggctcaacgaacgccactacggggcgctgcagggcctggacaaggccgagacgaaggcgcgctacggcgaggagcagttcatggcctggcgacgcagctatgacacgccgccgccgccgatcgagcggggcagcacctacagccaggacgccgatccgcgctacgccgacatcggcggcgggccgctgaccgagtgcctggccgacgtggtcgtccggttcctgccgtacttcaccgacgtcatcgtcccggacctgcgcagcggcaagacggtgctgatcgtcgcgcacggcaactcgctgcgcgccctggtcaagcacctcgatcagatgtccgacgacgacgtcgtggggctgaacatcccgaccggcatcccgctgcgctacgacttggacgcccggctgcggccgctggttcccggcggcacctacctcgaccccgaggcggccgccgccggcgccgccgcggttgccagccaggggcgcggctga

SEQ ID NO: 152905 - protein, 249 aa, Mycobacterium paratuberculosis
MGETATLVLLRHGESEWNSLNLFTGWVDVGLTDKGRAEAVRSGELLAEQGLLPDALYTSLLRRAITTAHLALDAADRLWIPVRRSWRLNERHYGALQGLDKAETKARYGEEQFMAWRRSYDTPPPPIERGSTYSQDADPRYADIGGGPLTECLADVVVRFLPYFTDVIVPDLRSGKTVLIVAHGNSLRALVKHLDQMSDDDVVGLNIPTGIPLRYDLDARLRPLVPGGTYLDPEAAAAGAAAVASQGRG

SEQ ID NO: 152906 - DNA, 684 bp, Neisseria meningitidis serogroup A
  CDS (1)..(684): transl_table=11
atggaattggtatttatccgccacggacaaagcgaatggaacgcgaaaaacctgtttacaggctggcgcgacgtgaagctgagcgagcaggggcttgccgaggctgctgccgccggtaaaaaactgaaagaaaacggctatgagttcgacatcgccttcacatccgtcctgacccgcgcgattaagacctgcaacatcgttttggaagaatccgaccaactgttcgtaccgcaaatcaaaacatggcggctgaacgaacgccactacggccgactgcaaggcctggacaaaaaacaaaccgccgaacaatacggcgacgagcaagtccgcatctggcggcgcagctacgacaccctgccgccgcttttggacaaagacgatgagttttccgcacacaaagaccgccgctatgcccatctgcctgccgatgttatccccgacggcgaaaacctgcaagtaacgctggagcgcgtattgccgttttgggaagaccaaatcgcccccgcgattttgagcggcaaacgcgtcttggtggcggcgcacggcaactccctgcgcgcgctggcaaaacacatcgagggcatttccgacgaagacatcatgggcttggaaatcccgaccggtcagccgttggtgtacaaattggacgacaatttgaaagtcatcgaaaaattctacctgtaa

SEQ ID NO: 152907 - protein, 227 aa, Neisseria meningitidis serogroup A
MELVFIRHGQSEWNAKNLFTGWRDVKLSEQGLAEAAAAGKKLKENGYEFDIAFTSVLTRAIKTCNIVLEESDQLFVPQIKTWRLNERHYGRLQGLDKKQTAEQYGDEQVRIWRRSYDTLPPLLDKDDEFSAHKDRRYAHLPADVIPDGENLQVTLERVLPFWEDQIAPAILSGKRVLVAAHGNSLRALAKHIEGISDEDIMGLEIPTGQPLVYKLDDNLKVIEKFYL

SEQ ID NO: 152908 - DNA, 738 bp, Nocardia farcinica
  CDS (1)..(738): transl_table=11
atgacgtacaccctcgtgctgctgcgccacggcgagagcgaatggaacgccctgaacctgttcaccggctgggtggacgtgcacctcaccgacaagggcgtggccgagggcaagcgggccggtgagctgctcgccgagcacgggatcctgcccgacatcgtctacacctcgctgctgcgccgggccatctccaccgccaacatcgccctcgacgccgccgaccggcactggatcccggtcgtgcgggactggcggctcaacgagcggcactacggcgagctgcagggcaagaacaaggcccagatccgcgacaagtacggcgaggagcagttcatgctgtggcggcgcagctacgacaccccgccgccgcccatcgaggcgggcaacgagtacagccaggagggcgacgcccgttacgcgggcatcgacatccccaagaccgagtgcctgctcgacgtggtgaaccggatggtcccctactgggagtcgaccatctccaaggatctgctggcgggcaagaccgtgctgatcgccgcgcacggcaactcgctgcgcgcgctggtcaagcacctcgaccagatctccgacgaggagatcgccggtctgaacatcccgaccggcattccgctgcgctacgaactggacgagaacctgcgtccggtgcgcccccgcgagtacctggacccggaggcggccgccgccggcgcggccgcggtcgcgagccagggcggtaagtaa

SEQ ID NO: 152909 - protein, 245 aa, Nocardia farcinica
MTYTLVLLRHGESEWNALNLFTGWVDVHLTDKGVAEGKRAGELLAEHGILPDIVYTSLLRRAISTANIALDAADRHWIPVVRDWRLNERHYGELQGKNKAQIRDKYGEEQFMLWRRSYDTPPPPIEAGNEYSQEGDARYAGIDIPKTECLLDVVNRMVPYWESTISKDLLAGKTVLIAAHGNSLRALVKHLDQISDEEIAGLNIPTGIPLRYELDENLRPVRPREYLDPEAAAAGAAAVASQGGK

SEQ ID NO: 152910 - DNA, 681 bp, Protochlamydia amoebophila
  CDS (1)..(681): transl_table=11
atggttaaattaattttgatgcgtcacggccaatctcagtggaatttagcaaatttgtttactggttgggtagacattcccctgtcttttaaaggaattgaagaggctatagaggcaggaaaacaaatcaaaaattaccctattgatttaatttttacttcttccttaattcgtgctcaaatgacagcaatgttggcaatgtctgttcatacatctggtaaagtccctgtgattcttcacacaggtgaggggcgactagaagaatgggcaagtatttatagttccgaatctcaatctcagacaatacctgtcattcgtgcttgggaattgaatgagcggatgtatggagaattacaaggaataaataaagaagaaatggctaaaaaatatggagctgagcaggtgcatatttggcgacgaagttttgatgttccccctccaaatggagaaagtttacaaatgacagcagctcggaccataccttattttgaaaacaccattgtccctcatttgaaagagaagaaaaatatttttattgctgcacacggaaattccctgcgttcgattatcatgaaattagatgggctgacaacagatcaagtcgttaagttggaactggcaacaggggtgcctgtgatctatgatttcaatcacgatgaatatattaaacaacaaaagtag

SEQ ID NO: 152911 - protein, 226 aa, Protochlamydia amoebophila
MVKLILMRHGQSQWNLANLFTGWVDIPLSFKGIEEAIEAGKQIKNYPIDLIFTSSLIRAQMTAMLAMSVHTSGKVPVILHTGEGRLEEWASIYSSESQSQTIPVIRAWELNERMYGELQGINKEEMAKKYGAEQVHIWRRSFDVPPPNGESLQMTAARTIPYFENTIVPHLKEKKNIFIAAHGNSLRSIIMKLDGLTTDQVVKLELATGVPVIYDFNHDEYIKQQK

SEQ ID NO: 152912 - DNA, 684 bp, Pasteurella multocida
  CDS (1)..(684): transl_table=11
atggaattggtctttattcgccacggtttcagtgagtggaatgccaaaaacctattcacaggttggcgtgatgtcaacttaacagaacgcggtatcgaagaagcaaaatcagcaggcaaaaaattactcgaagccggttttgaatttgatattgctttcacgtctgttttaacgcgtgcaattaaaacctgtaacattgtgttagaagaatctaaccaactttggatcccacaagtgaaaaactggcgtttaaatgagcgtcattacggtgcattacaaggcttagataaaaaagccactgcagaacaatatggtgatgagcaagtccatatttggcgtcgttcttacgatatttctcctccagatttagatccacaagatcctcattctgcccataacgaccgtcgttatgctcacttaccaagcgatgtggtacctgatgcagaaaacttaaaaatcacccttgagcgtgttttacctttctgggaagaccaaattgccccagctttactggcgggtaaacgtgtccttgtgacagcacacggcaactcattacgtgcattggcaaaacacattgaaggcatttctgatgcagacatcatggatttagaaatcccaaccggtcagccattagtgtacaaattagatgacaatttaaaagtcgtggaaaaatactacctttaa

SEQ ID NO: 152913 - protein, 227 aa, Pasteurella multocida
MELVFIRHGFSEWNAKNLFTGWRDVNLTERGIEEAKSAGKKLLEAGFEFDIAFTSVLTRAIKTCNIVLEESNQLWIPQVKNWRLNERHYGALQGLDKKATAEQYGDEQVHIWRRSYDISPPDLDPQDPHSAHNDRRYAHLPSDVVPDAENLKITLERVLPFWEDQIAPALLAGKRVLVTAHGNSLRALAKHIEGISDADIMDLEIPTGQPLVYKLDDNLKVVEKYYL

SEQ ID NO: 152914 - DNA, 747 bp, Porphyromonas gingivalis
  CDS (1)..(747): transl_table=11
atgaaaagaatagtattgattcgccacggcgaaagcttgtggaacaaggaaaatcgctttacgggatggacagatgtggatttgtccgaaaaaggtattgaagaagccaagaaagccggcgagctcatgaagaaagaaggctttcagtttaccaaagcctatacttcctatctcaaacgtgccgtcaagaccctgaacggtgtcctcgatgtaatggacttggattggataccggtggagaagacctggcgtctgaacgagaagcactacggcatgctgcaaggcctcaacaaggccgagactgccgagaagtacggagacgaacaggtactcatctggcgtcgcagctacgacgtcccccccacgcctatggagaaagaggatccgcgctctccgttcatggatccgcgctacaaaggtgtgtgcgagaaagacctgccactgacagaagctctctgcgacacggtaaatcgtatcctcccctattggaacgagaccatattccccacgctcaaggagcatgacgaggtattggtagcagctcacggcaacagtctgcgtggtatcatcaaggtgctgaaaaacatttcggacgaagacatcatcagcctgaacctcccgacagccgtgccttacgtttttgaatttgacgacaatctccgtctggtgaaggactatttcctcggcgatccagaagagatcaaaaagctgatggaggcagtagccaatcagggcaagaagaaataa

SEQ ID NO: 152915 - protein, 248 aa, Porphyromonas gingivalis
MKRIVLIRHGESLWNKENRFTGWTDVDLSEKGIEEAKKAGELMKKEGFQFTKAYTSYLKRAVKTLNGVLDVMDLDWIPVEKTWRLNEKHYGMLQGLNKAETAEKYGDEQVLIWRRSYDVPPTPMEKEDPRSPFMDPRYKGVCEKDLPLTEALCDTVNRILPYWNETIFPTLKEHDEVLVAAHGNSLRGIIKVLKNISDEDIISLNLPTAVPYVFEFDDNLRLVKDYFLGDPEEIKKLMEAVANQGKKK

SEQ ID NO: 152916 - DNA, 750 bp, Propionibacterium acnes
  CDS (1)..(750): transl_table=11
atgactgcaaagctcatcctgctccgccatggcgagagcgaatggaactccaagaacctcttcaccggctgggtggacgtcgatctcaacgagaagggcgagggcgaggctcgtcacgccgccgacctgctcaagcaggaaaacctcctgcccgatatcgtccacacctcgctgctacgtcgtgctatccataccgcctacctagcccttgacggctgcgaccgccattggatcccggtgcatcgctcctggcgcctcaacgagcgtcactacggtgcgctgcagggtctcaacaaggctgagaccaaggagaagtacggcaacgaccagttcatggcttggcgtcgctcctacgatgttcgtccaccggaccttgaccgcgacagcgaattcagccagttccatgacccgcggtacgccgacatcccggcgtccgagcgtccggtcgccgagtgtctcaaagacgtcgtggcccgcatggtgccgtacttcacctctgatattgctgccgaccttaaggacggcaagacggtgctcgtggctgctcacggtaactccctgcgcgccctcgtcaagcacctcgacgagatcagtgacgaggacatcgccggcctcaacatcccgaccggtatcccgctgttctacgagcttgacgacaacctcaagcccgtgactagggggggccgctacctcgaccctgaggccgctgccgccggcgccaaggcagtcgctaaccagggaaacaagtaa

SEQ ID NO: 152917 - protein, 249 aa, Propionibacterium acnes
MTAKLILLRHGESEWNSKNLFTGWVDVDLNEKGEGEARHAADLLKQENLLPDIVHTSLLRRAIHTAYLALDGCDRHWIPVHRSWRLNERHYGALQGLNKAETKEKYGNDQFMAWRRSYDVRPPDLDRDSEFSQFHDPRYADIPASERPVAECLKDVVARMVPYFTSDIAADLKDGKTVLVAAHGNSLRALVKHLDEISDEDIAGLNIPTGIPLFYELDDNLKPVTRGGRYLDPEAAAAGAKAVANQGNK

SEQ ID NO: 152918 - DNA, 747 bp, Ralstonia eutropha
  CDS (1)..(747): transl_table=11
atgtacaagctagtcctcatccgccacggcgaatcgacgtggaacctcgaaaaccgcttcaccggctgggtcgacgtcgacctgactgacaccggcgccgcgcaagcccgcctggccggcaagctgctcaaggaagccggcttcgccttcgacgtggcctacacgtccgtgctcaagcgcgcgatccgtacgctgtggcacgtgcaggacgaaatggacgagatgtggatcccggtacgcaacgaatggcgcctgaacgagcgccactacggtgcgctggccggcctgaacaaggcagaaaccgccgccaagttcggcgacgagcaggtgctcgtgtggcgccgcagctacgacacgccgccgcccgcgctggagccgaccgatccgcgtgcctcttacgacgatccgcgctacgccaatgtgccgcgcgagcagattccgctgaccgaatgcctgaaggacaccgtggcccgcgtgctgccgctgtggaacgaatccatcgctccggacatccaatcgggcaagcgcgtggtcattgccgctcacggcaacagcatccgcgccctggttaagtacctggatcagatttcggatgacgatatcgtcggcctcaacatccccaatggcaccccgctcgtctacgagctggacgccagcctgcgcccgctgcgccactattacctgggcgaccaggaagccatcgccgcctcgctggcggccgtggccagccagggcaaggcccgctga

SEQ ID NO: 152919 - protein, 248 aa, Ralstonia eutropha
MYKLVLIRHGESTWNLENRFTGWVDVDLTDTGAAQARLAGKLLKEAGFAFDVAYTSVLKRAIRTLWHVQDEMDEMWIPVRNEWRLNERHYGALAGLNKAETAAKFGDEQVLVWRRSYDTPPPALEPTDPRASYDDPRYANVPREQIPLTECLKDTVARVLPLWNESIAPDIQSGKRVVIAAHGNSIRALVKYLDQISDDDIVGLNIPNGTPLVYELDASLRPLRHYYLGDQEAIAASLAAVASQGKAR

SEQ ID NO: 152920 - DNA, 804 bp, Ralstonia solanacearum; identical to SEQ ID NO: 152598
  CDS (58)..(804): transl_table=11

SEQ ID NO: 152921 - protein, 248 aa, Ralstonia solanacearum
MHKLVLIRHGESTWNLENRFTGWVDVDLTDTGIAQARQGGRLLREAGFTFDLAYTSVLKRAIRTLWHVQDEMDLMWIPTRTEWRLNERHYGGLSGLNKAETAAQYGDQQVLVWRRSYDTPPPALEAGDERDAYGNPRYAGLPREQVPLTECLKDTVARVLPLWETSIAPDIKSGKRVVIAAHGNSIRALVKYLDNISDDDIVGLNIPNGTPLVYELDANLKPIRHYYLGDQEAIAASLAAVAGQGKAK

SEQ ID NO: 152922 - DNA, 621 bp, Rhizobium loti
  CDS (1)..(621): transl_table=11
atgtcgagaacccttgtgctcgtgcgccatggccagagcgaatggaatttgaaaaacctgttcaccggttggcgtgacgttgacctgaccgagcagggtcatgccgaggccaaggccgccgggcagaaactcaaggcgcgcggcctgaagttcgacatcgccttcacctcggcgctgagccgcgcgcaaaagacctgccagcatattctcgacgccgtcggccagagcgatctcaagaccatccgcgaccaggcactcaacgagcgcgactatggcgacctttccggcctcaacaaggacgacgcccgcaagaaatggggcgaggagcaggtgcatgtctggcgccgctcctacgacgtgtcgccgcccggcggcgaaagcctgaaggacaccggcgcccgcgtctggccttactacctgcacgacctgcagccgcacgtgctgcgcggcggcaccgtgctggtcgccgcccacggcaattcgctgcgcgcgctgatcatggcgctggacggcaagtcgggcgaggagatcgtcaagctggagctcggcaccggcgtgccggtcatctaccagctcaacgccgattcgaccgtggcgtcgaaggaagtgctggagggctga

SEQ ID NO: 152923 - protein, 206 aa, Rhizobium loti
MSRTLVLVRHGQSEWNLKNLFTGWRDVDLTEQGHAEAKAAGQKLKARGLKFDIAFTSALSRAQKTCQHILDAVGQSDLKTIRDQALNERDYGDLSGLNKDDARKKWGEEQVHVWRRSYDVSPPGGESLKDTGARVWPYYLHDLQPHVLRGGTVLVAAHGNSLRALIMALDGKSGEEIVKLELGTGVPVIYQLNADSTVASKEVLEG

SEQ ID NO: 152924 - DNA, 636 bp, Rhizobium meliloti
  CDS (1)..(636): transl_table=11
atgagcggcaccctcgtccttgtccggcacggccagagcgactggaacctgaagaacctcttcaccggctggcgcgatcccgacctcaccgaactcggcatcgaggaggcaaaggccggcggcaaggcgcttgccgattacggcatcaaattcgacatcgccttcacctccgtcctcatccgggcccagcgtacctgccagctcgtcctcgacgccgtcggccagtcgtcgctcgaaacgatccgcgatcaggccctgaacgagcgcgactacggcgacctctccggtctcaacaaggacgatgcgcgggcgaaatggggcgaagagcaggtccatatctggcgccgctcctacgacgtgccgccgcccggcggcgagagcctgcgcgacaccggcgcgcgcgtctggccctattacctgaccgacatcctgccgcgcgtgctttcgggcgagaaggtgctcgtcgccgcccatggcaactcgctgcgctccctcgtcatggtgctggacaagctgaccaaggagcagatcctcaagctcaacctcgcgaccggagtgccgatggtctacaagctgaacgcggattcgaccgtcgcttcgaaggaagtgctaggggatatgtccggggcgcattga

SEQ ID NO: 152925 - protein, 211 aa, Rhizobium meliloti
MSGTLVLVRHGQSDWNLKNLFTGWRDPDLTELGIEEAKAGGKALADYGIKFDIAFTSVLIRAQRTCQLVLDAVGQSSLETIRDQALNERDYGDLSGLNKDDARAKWGEEQVHIWRRSYDVPPPGGESLRDTGARVWPYYLTDILPRVLSGEKVLVAAHGNSLRSLVMVLDKLTKEQILKLNLATGVPMVYKLNADSTVASKEVLGDMSGAH

SEQ ID NO: 152926 - DNA, 753 bp, Salmonella paratyphi
  CDS (1)..(753): transl_table=11
atggctgtaactaagctggttctggtacgtcacggtgaaagtcaatggaacaaagagaaccgtttcaccggctggtatgatgttgacctgtctgaaaaaggcgtaagcgaagcaaaagcagcgggtaaactgctaaaagaagaaggtttcagctttgattttgcctacacttccgtactgaaacgcgctatccatacgctgtggaacgtactggatgaactggatcaggcgtggctgccggtggaaaaatcctggaaactcaacgaacgtcactatggcgcgttgcaggggctgaataaagcggaaacggccgaaaaatatggtgacgagcaggttaagcagtggcgccgcggttttgccgtgacgccgccggaactgaccaaagatgatgagcgttatccgggtcacgatccacgttatgccaaactgagcgagaaagagctgccgttgaccgaaagtctggcgctgaccatcgaccgcgttattccttactggaccgacaccatcctgccgcgtatgaagagcggtgagcgcgtgatcatcgccgctcacggtaactcattgcgtgcgctggtgaaataccttgataacatgagtgaagatgagatccttgagttaaacatcccgaccggcgtgccgctggtgtatgagttcgacgaaaacttcaagccgctcaaacattactatctgggcaacgctgacgaaatcgctgcgaaagcggctgccgtggcgaatcagggtaaagcgaagtaa

SEQ ID NO: 152927 - protein, 250 aa, Salmonella paratyphi
MAVTKLVLVRHGESQWNKENRFTGWYDVDLSEKGVSEAKAAGKLLKEEGFSFDFAYTSVLKRAIHTLWNVLDELDQAWLPVEKSWKLNERHYGALQGLNKAETAEKYGDEQVKQWRRGFAVTPPELTKDDERYPGHDPRYAKLSEKELPLTESLALTIDRVIPYWTDTILPRMKSGERVIIAAHGNSLRALVKYLDNMSEDEILELNIPTGVPLVYEFDENFKPLKHYYLGNADEIAAKAAAVANQGKAK

SEQ ID NO: 152928 - DNA, 753 bp, Salmonella typhimurium
  CDS (1)..(753): transl_table=11
atggctgtaactaagctggttctggtacgtcacggtgaaagtcaatggaacaaagagaaccgtttcaccggctggtatgatgttgacctgtctgaaaaaggcgtaagcgaagcaaaagcagcgggtaaactgctaaaagaagaaggtttcagctttgattttgcctacacttccgtactgaaacgcgctatccatacgctgtggaacgtactggatgaactggatcaggcgtggctgccggtggaaaaatcctggaaactcaatgaacgtcactatggcgcgttgcaggggctgaataaagcggaaacggcagaaaaatatggtgacgagcaggttaaacagtggcgccgcggttttgccgtgacgccgccggaactgaccaaagatgatgagcgttatccgggtcacgatccacgttatgccaaactgagcgagaaagagctgccgttgaccgaaagtctggcgctgaccatcgaccgcgttattccttactggaacgacaccatcctgccgcgtatgaagagcggtgagcgcgtgatcatcgccgctcacggtaactcattgcgtgcgctggtgaaatacctggataacatgagtgaagatgagatccttgagttaaacatcccgaccggcgtgccgctggtgtatgagttcgacgaaaacttcaagccgctcaaacattactatctgggcaacgctgacgaaatcgccgcgaaagcggctgccgtggcgaatcagggtaaagcgaagtaa

SEQ ID NO: 152929 - protein, 250 aa, Salmonella typhimurium
MAVTKLVLVRHGESQWNKENRFTGWYDVDLSEKGVSEAKAAGKLLKEEGFSFDFAYTSVLKRAIHTLWNVLDELDQAWLPVEKSWKLNERHYGALQGLNKAETAEKYGDEQVKQWRRGFAVTPPELTKDDERYPGHDPRYAKLSEKELPLTESLALTIDRVIPYWNDTILPRMKSGERVIIAAHGNSLRALVKYLDNMSEDEILELNIPTGVPLVYEFDENFKPLKHYYLGNADEIAAKAAAVANQGKAK

SEQ ID NO: 152930 - DNA, 687 bp, Staphylococcus aureus
  CDS (1)..(687): transl_table=11
atgccaaaattaattttatgtcgtcatggacaaagcgagtggaatgctaaaaacttatttactggatgggaagatgttaatttatctgaacaaggtattaatgaagcgactagagcaggtgaaaaagtaagagaaaataacattgacatcgatgtagcttttacatcgttattaacacgtgctttagatacaacgcattatattttaactgaatctaaacaacaatggattcctgtatataaaagctggcgtttaaatgagcgtcactatggtggattgcaaggcttaaataaagatgatgctagaaaagaatttggagaggaacaagtacatatttggcgtcgttcttatgatgtgaaaccacctgctgaaaccgaagaacaacgtgaagcttacttagctgatcgtcgatataatcatttagataaacgtatgatgccttattccgaaagtctgaaagatactttagttcgagtgataccattttggacagatcatatttcacaatatttgctagatggtcaaacggtattagtttctgcacacggaaattcaattcgcgcattgattaaatatcttgaagatgtgtcagatgaagatatcattaattatgaaattaaaacaggtgcaccgcttgtttatgaattaacggatgatttagaagttatagataaatactacttataa

SEQ ID NO: 152931 - protein, 228 aa, Staphylococcus aureus
MPKLILCRHGQSEWNAKNLFTGWEDVNLSEQGINEATRAGEKVRENNIDIDVAFTSLLTRALDTTHYILTESKQQWIPVYKSWRLNERHYGGLQGLNKDDARKEFGEEQVHIWRRSYDVKPPAETEEQREAYLADRRYNHLDKRMMPYSESLKDTLVRVIPFWTDHISQYLLDGQTVLVSAHGNSIRALIKYLEDVSDEDIINYEIKTGAPLVYELTDDLEVIDKYYL

SEQ ID NO: 152932 - DNA, 687 bp, Staphylococcus epidermidis
  CDS (1)..(687): transl_table=11
atgccaaaattaatactatgtcggcacggacaaagtgaatggaatgcgaaaaatttatttacaggttgggccgatgtcaaactatcaaaacaaggaattgaagaggcgcaatcagcaggtaaaaaaatttacggcaatcaaattgaaattgatattgcgtttacctctttactcactagagctttagaaacaacacaatatattttagcaggttctgaccaacagtggattcctgtttataaaagttggcgtttaaatgaacgacattatggtggtttacaaggtttaaataaagatgatgcgagaaaaaaatggggggaagatcaggtgcatcaatggagacgctcatatgatgtacgtccgcctagagaaagtgaagaacaacgagaagcatatttaaaaaatcgtcgttatcaacatattgatcaccgtatgatgccttattgtgaaagtttgaaagatacattagaacgagttgttccgttctggactgatcatatttcacaacacctattagatgataaaactgtacttgtttcggcccacggaaattccattcgcgcattaattaagtatttggaaggtttatcagaagaagatatcgtcggatatgaaattaaaacgggtgcaccgctagtatatgaactcacagatgatttagttgttaaggataaatattatttataa

SEQ ID NO: 152933 - protein, 228 aa, Staphylococcus epidermidis
MPKLILCRHGQSEWNAKNLFTGWADVKLSKQGIEEAQSAGKKIYGNQIEIDIAFTSLLTRALETTQYILAGSDQQWIPVYKSWRLNERHYGGLQGLNKDDARKKWGEDQVHQWRRSYDVRPPRESEEQREAYLKNRRYQHIDHRMMPYCESLKDTLERVVPFWTDHISQHLLDDKTVLVSAHGNSIRALIKYLEGLSEEDIVGYEIKTGAPLVYELTDDLVVKDKYYL

SEQ ID NO: 152934 - DNA, 687 bp, Staphylococcus epidermidis
  CDS (1)..(687): transl_table=11
atgccaaaattaatactatgtcggcacggacaaagtgaatggaatgcgaaaaatttatttacaggttgggccgatgtcaaactatcaaaacaaggaattgaagaggcgcaatcagcaggtaaaaaaatttacgacaatcaaattgaaattgatattgcgtttacctctttactcactagagctttagaaacaacacaatatattttagcaggttctgaccaacagtggattcctgtttataaaagttggcgtttaaatgaacgacattatggtggtttacaaggtttaaataaagatgatgcgagaaaaaaatggggggaagatcaggtgcatcaatggagacgctcatatgatgtacgtccgcctagagaaagtgaagaacaacgagaagcatatttaaaaaatcgtcgttatcaacatattgatcaccgtatgatgccttattgtgaaagtttgaaagatacattagaacgagttgttccgttctggactgatcatatttcacaacacctattagatgataaaactgtacttgtttcggcccacggaaattccattcgcgcattaattaagtatttggaaggtttatcagaagaagatatcgtcggatatgaaattaaaacgggtgcaccgctagtatatgaactcacagatgatttagttgttaaggataaatattatttataa

SEQ ID NO: 152935 - protein, 228 aa, Staphylococcus epidermidis
MPKLILCRHGQSEWNAKNLFTGWADVKLSKQGIEEAQSAGKKIYDNQIEIDIAFTSLLTRALETTQYILAGSDQQWIPVYKSWRLNERHYGGLQGLNKDDARKKWGEDQVHQWRRSYDVRPPRESEEQREAYLKNRRYQHIDHRMMPYCESLKDTLERVVPFWTDHISQHLLDDKTVLVSAHGNSIRALIKYLEGLSEEDIVGYEIKTGAPLVYELTDDLVVKDKYYL

SEQ ID NO: 152936 - DNA, 762 bp, Streptomyces avermitilis
  CDS (1)..(762): transl_table=11
atggccgacgcaccgtacaagctgatcctcctccgccacggcgagagcgaatggaacgcgaagaacctgttcaccggctgggtggacgtcaacctcaacgagaagggcgagaaggaggctgtccgcggcggtgagctgctgaaggacgccggcctgctgcccgacgtggtccacacgtcgctccagaagcgcgcgatccgcaccgcccagctcgcgctggagtccgcggaccgccactggatcccggtccaccgctcgtggcgcctgaacgagcgtcactacggcgccctccagggcaaggacaaggcgcagacgctcgccgagttcggcgaggagcagttcatgctctggcgccgctcgtacgacaccccgcccccgcccctcgcggacggctccgagttctcccagtcggacgacccgcgctacgcctccatccccccggagctgcgccccaagacggagtgcctcaaggacgtcgtcaaccggatgctcccgtactggtacgacggcatcgtcccggacctgctgaccggccgcacggtcctggtcgcggcccacggcaacagcctccgcgccctggtcaagcacctcgacggcatctccgacgaggacatcgcgggcctgaacatcccgacgggcatcccgctgtcctacgaactcgacacggacttcaagccgctcaacccgggcggcacctacctcgacccggacgcggcggcggcggcgatcgaggcggtcaagaaccagggcaagaagaagtaa

SEQ ID NO: 152937 - protein, 253 aa, Streptomyces avermitilis
MADAPYKLILLRHGESEWNAKNLFTGWVDVNLNEKGEKEAVRGGELLKDAGLLPDVVHTSLQKRAIRTAQLALESADRHWIPVHRSWRLNERHYGALQGKDKAQTLAEFGEEQFMLWRRSYDTPPPPLADGSEFSQSDDPRYASIPPELRPKTECLKDVVNRMLPYWYDGIVPDLLTGRTVLVAAHGNSLRALVKHLDGISDEDIAGLNIPTGIPLSYELDTDFKPLNPGGTYLDPDAAAAAIEAVKNQGKKK

SEQ ID NO: 152938 - DNA, 921 bp, Streptomyces coelicolor
  CDS (67)..(828): transl_table=11
ccgtccaaccgtccgcccaccggggcgcacgcgcgggggatcaggccttggattacgctcggaagcatggccgacgcaccgtacaagctgatcctcctccgccacggcgagagcgagtggaacgagaagaacctgttcaccggctgggtggacgtcaacctcaccccgaagggcgagaaggaggcgacgcgcggcggcgagctgctcaaggacgccggcctgctgcccgacgtggtccacacgtccgtccagaagcgcgcgatccgcacggcccagctcgcgctggaggccgccgaccgccactggatcccggtccaccgccactggcgcctgaacgagcgccactacggcgccctccagggcaaggacaaggcccagaccctcgccgagttcggcgaggagcagttcatgctgtggcgccgctcctacgacaccccgccgcccgcgctggaccgcgacgccgagtactcccagttctccgacccgcgttacgcgatgctcccgccggagctgcgcccgcagacggagtgcctgaaggacgtcgtcggccggatgctcccgtactggttcgacgcgatcgtccccgacctcctcaccggccgcacggtcctggtggcggcgcacggcaactccctccgcgccctcgtcaagcacctcgacggcatctccgacgccgacatcgcgggcctgaacatcccgacgggcatcccgctctcgtacgaactcaacgccgagttcaagcccctgaacccgggcggcacgtacctcgacccggacgcggccgcggcggcgatcgaggccgtgaagaaccagggcaagaagaagtaagcgcgcacgaacaggccccctacctgcggtttctccgcgagtagggggctttgtgttgtcgtgggccgtctctgggccgtttcttgctcggcg

SEQ ID NO: 152939 - protein, 253 aa, Streptomyces coelicolor
MADAPYKLILLRHGESEWNEKNLFTGWVDVNLTPKGEKEATRGGELLKDAGLLPDVVHTSVQKRAIRTAQLALEAADRHWIPVHRHWRLNERHYGALQGKDKAQTLAEFGEEQFMLWRRSYDTPPPALDRDAEYSQFSDPRYAMLPPELRPQTECLKDVVGRMLPYWFDAIVPDLLTGRTVLVAAHGNSLRALVKHLDGISDADIAGLNIPTGIPLSYELNAEFKPLNPGGTYLDPDAAAAAIEAVKNQGKKK

SEQ ID NO: 152940 - DNA, 693 bp, Streptococcus mutans
  CDS (1)..(693): transl_table=11
atggtaaaattagtatttgctcgtcatggtgaatcagaatggaacaaggctaacctttttactggctgggctgatgttgacctttcagaagaaggaacgcaacaagcaattgatgccggcaaactcattaaagaagcagacatcaaatttgaccttgctttcacatcagttttgacacgtgcaatcaagacaactaatttggcgcttgaatattctgatcaactttgggtaccagttgaaaagtcatggcgtttgaatgaacgtcactatggtggcttgactggtaaaaataaagctgaagctgcggaaaaatttggagacgaacaagttcacatttggcgtcgctcatatgatgtattgccgccagctatggccaaagacgatccatactcagcacacactgaccgtcgttatgcaaatcttgatgatactgttattccagatgcagaaaacttaaaagtcaccttagaacgtgctcttccatactgggaagataaaattgctccagctcttaaagatggaaaaaatgtatttgttggagcacatggtaactctatccgtgctcttgtaaaacatatcaaacaattgtcagatgatgacattatgggtgttgaaattccaaacttcccaccattagtttttgaatttgacgaaaatttaaatgtcactgctgaatactatcttggtaaataa

SEQ ID NO: 152941 - protein, 230 aa, Streptococcus mutans
MVKLVFARHGESEWNKANLFTGWADVDLSEEGTQQAIDAGKLIKEADIKFDLAFTSVLTRAIKTTNLALEYSDQLWVPVEKSWRLNERHYGGLTGKNKAEAAEKFGDEQVHIWRRSYDVLPPAMAKDDPYSAHTDRRYANLDDTVIPDAENLKVTLERALPYWEDKIAPALKDGKNVFVGAHGNSIRALVKHIKQLSDDDIMGVEIPNFPPLVFEFDENLNVTAEYYLGK

SEQ ID NO: 152942 - DNA, 744 bp, Thermobifida fusca
  CDS (1)..(744): transl_table=11
atgtcgactctggttctgctgcgccacggcgaaagcgtgtggaacgctgaagggctgttcaccggctgggtggacgtggacctgtccccgaaaggcgaagaggaagcccgccgcgggggcaggctgctggccgaggcgggaatccgccccgatgtggtccacacctccctgctgaagcgggccatccgcaccgccaacatcgcgcttgaggaggccggactgcactggattccggtcaagcgctcctggcggctcaacgaacgccactacggcgccctccaaggaaagaacaaggcgcagacccgcgccgaattcggtgacgagcagttcatgatctggcggcgttcctacgacacgcctccgccgccgctcgccgaagacagcgagttctcgcagcacaacgacccgcgttacgccaccctgccccccgagctgatgccgcgcaccgaatgcctggcagacgtcgtgcggcggatgctgccctactggtacgacgcgatcatccccgacctggctgcgggacgcaccgtgctggtcgcggcgcacggcaactcgctgcgcgccctggtcaagcacctggacaacatcgacgacaagagcatcgccgggctcaacatccccaccggtatcccgctggtgtacgagctcaacgacgacttcactccgcggaagacgggcggcgagtacctggaccccgaggcggccaaagaggccatcgaagcggtcaagaaccagggcaagtag

SEQ ID NO: 152943 - protein, 247 aa, Thermobifida fusca
MSTLVLLRHGESVWNAEGLFTGWVDVDLSPKGEEEARRGGRLLAEAGIRPDVVHTSLLKRAIRTANIALEEAGLHWIPVKRSWRLNERHYGALQGKNKAQTRAEFGDEQFMIWRRSYDTPPPPLAEDSEFSQHNDPRYATLPPELMPRTECLADVVRRMLPYWYDAIIPDLAAGRTVLVAAHGNSLRALVKHLDNIDDKSIAGLNIPTGIPLVYELNDDFTPRKTGGEYLDPEAAKEAIEAVKNQGK

SEQ ID NO: 152944 - DNA, 750 bp, Thermoanaerobacter tengcongensis
  CDS (1)..(750): transl_table=11
atgtacaaagtagttttacttcgccatggagaaagcatatggaacatggaaaacaggttcacaggttggacagatgtagacctttcgccgaaaggaattgaagaggcaaagcaggcaggaaagattttgaaagagaagggatttacttttgatgcggcgtttacttcagttttgaagagggcaataaggactttgtggatagttttagatgagctggacctcatgtggataccagtttacaagtcctggcggttgaatgagaggcattatggagctcttcaggggcttaataaggcagaaaccgcaaaaaaatatggagaagagcaggtaaagctttggagaaggtctgcagaggttagacctcctgctttgactaaggatgacccgagatatcctggcaatgacccaaggtacgccgacctttctgaggatgaaattcctctcacagagaatttgatagacactataaatagagttattccctactgggagtccacaattgcaccgactataaagtctggcaagagagtgataatagcagctcatggaaacagtttaagaggccttgtgaagtatctggacaatctttctaatgaggaaataatggagctaaatattcctacaggtattcctctggtttatgagttagatgagaacttaaagcctataaggcactattatttagctgatgaagaggagctcaagaaaaaacagcaggaagttgcggagcagggcaaagcgagggcttaa

SEQ ID NO: 152945 - protein, 249 aa, Thermoanaerobacter tengcongensis
MYKVVLLRHGESIWNMENRFTGWTDVDLSPKGIEEAKQAGKILKEKGFTFDAAFTSVLKRAIRTLWIVLDELDLMWIPVYKSWRLNERHYGALQGLNKAETAKKYGEEQVKLWRRSAEVRPPALTKDDPRYPGNDPRYADLSEDEIPLTENLIDTINRVIPYWESTIAPTIKSGKRVIIAAHGNSLRGLVKYLDNLSNEEIMELNIPTGIPLVYELDENLKPIRHYYLADEEELKKKQQEVAEQGKARA

SEQ ID NO: 152946 - DNA, 744 bp, Treponema denticola
  CDS (1)..(744): transl_table=11
atgagattggttttggtaaggcatggtgaaagtgaatggaataagcttaatttatttaccggctggacggatgtcgatttaagcgaaaagggtgtagaagaagcaaaagaaggcggaacctatttaaaaaaagaaggttttgacttcgatatttgctatacatcctatctaaaacgagcaattcataccctcaattatattttaagccagatggatagagaatggcttcctgtcataaaaacttggaaacttaatgaaaggcattacgggggcttgcagggcctaaacaaggcggaaacagccgaaaaatacggagaagatcaggtaaaaatttggcgccgttcctttgatattgctcctcccgttttggaagaaggagataagcgctgcccctatttgcaggaacagtacaggggtattgaaaaatcagagctccccttaaccgaaagcttaaaagataccatagccagagccgttcctttttttgaaaagactataaaacctcaaatgctagaaggaaaaaggattcttatcacagcccacggtaattccctcagggccttggttaaatattttgaaaatttaagcgatgaagaaataatctcggtaaatattccgacaggcgttcctttggtttacgaattcgataagaattttaaggttcttagtaaacgctaccttggagatcaagagaaaatcaatgctaaaataaatgcagttgcaaatcaaggaaaaaagaaataa

SEQ ID NO: 152947 - protein, 247 aa, Treponema denticola
MRLVLVRHGESEWNKLNLFTGWTDVDLSEKGVEEAKEGGTYLKKEGFDFDICYTSYLKRAIHTLNYILSQMDREWLPVIKTWKLNERHYGGLQGLNKAETAEKYGEDQVKIWRRSFDIAPPVLEEGDKRCPYLQEQYRGIEKSELPLTESLKDTIARAVPFFEKTIKPQMLEGKRILITAHGNSLRALVKYFENLSDEEIISVNIPTGVPLVYEFDKNFKVLSKRYLGDQEKINAKINAVANQGKKK

SEQ ID NO: 152948 - DNA, 756 bp, Treponema pallidum
  CDS (1)..(756): transl_table=11
atgaagcttgtgttgatccgtcatggagaaagtgaatggaacaggctgaacctgttcactggttggacagatgttccgcttaccccacgtggggagtcggaagcccaggaaggaggccgcgtactgcaagaagcggggtttgattttgacctatgctacacttctttcttgaaacgtgccattcgtacgctcaattttgtactccaggcactggaccgtgagtggttgccggttcacaaaagctggaaattgaacgagcggcattatggggatctacaaggtttaaataagacagagacggcgcagaagtatggtgagcagcaggttagggtgtggcgtcgctcctttgatgtggctcctcctccgcttactgtaggggacgcacgttgtccgcatactcaagcctcctaccggggggtatgcgcgtctggtcggacgccagtacttccgtttacggaaagtttgaaagataccgttgcgcgtgtggtgccgtattttgaagaggaaatcaaaccgcagatgatttccggacagcgtgtgcttattgtggcgcatggtaactcgttgcgcgcactgatgaagcacatagagtctttggatgagactcagataatggaagtaaatttgcctaccggtgtaccgcttgtctatgagttcgaggcggattttaccctgtgtgggaagcgttttttaggtaatgaggcggatgttgcagcgagggcgcaggctgtggctgatcagggtaagagtaactaa

SEQ ID NO: 152949 - protein, 251 aa, Treponema pallidum
MKLVLIRHGESEWNRLNLFTGWTDVPLTPRGESEAQEGGRVLQEAGFDFDLCYTSFLKRAIRTLNFVLQALDREWLPVHKSWKLNERHYGDLQGLNKTETAQKYGEQQVRVWRRSFDVAPPPLTVGDARCPHTQASYRGVCASGRTPVLPFTESLKDTVARVVPYFEEEIKPQMISGQRVLIVAHGNSLRALMKHIESLDETQIMEVNLPTGVPLVYEFEADFTLCGKRFLGNEADVAARAQAVADQGKSN

SEQ ID NO: 152950 - DNA, 666 bp, Tropheryma whipplei
  CDS (1)..(666): transl_table=11
atggataatctagttttgctacgtcacgggaatagcctatggaatcaagagaatctttttactggctgggttgatgttcgcctgagtgaacttggcgagaaagaggcgaaaactgccgggcaactcttgcgtgaagccaacagataccctgatgtcttgttcacctctctgctaacccgttctattcaaacggctcatatagcactcatggagatcgatcgtgtttggctgccaacttttcgtagttggcgattgaacgagagacattacggaagcttacagggtaaaaataaagcccaggtactggaggagtttggtgaagagcagttcaattcctggcgccgtggttacgatacacccccgccaccgctgcacagccaagctgatgacccccgctatgaggagccaccacccctttcagagtcactgaaggacgtacagaatagacttctgccttattggcagggtgtgattcttccgcatcttgttgccggaaaggttgttcttgtggttgctcacggaaattctttgcgtgcccttgtgaaacacctcgagtgcatatcggatacagacgtgtgtcagctcaatattccgactggcataccccttgtgtattctattgacccttcgggttgtgcaacacatcccggtagatatttgccctag

SEQ ID NO: 152951 - protein, 221 aa, Tropheryma whipplei
MDNLVLLRHGNSLWNQENLFTGWVDVRLSELGEKEAKTAGQLLREANRYPDVLFTSLLTRSIQTAHIALMEIDRVWLPTFRSWRLNERHYGSLQGKNKAQVLEEFGEEQFNSWRRGYDTPPPPLHSQADDPRYEEPPPLSESLKDVQNRLLPYWQGVILPHLVAGKVVLVVAHGNSLRALVKHLECISDTDVCQLNIPTGIPLVYSIDPSGCATHPGRYLP

SEQ ID NO: 152952 - DNA, 705 bp, Wigglesworthia glossinidia brevipalpis
  CDS (1)..(705): transl_table=11
atgtctataattaaattagttctaatgcgacatggttctagtatttggaacgatcaagatcgttttactggatggacagatattgatttatctgaaaaaggaaagaatgaagtcaaatatgcagggaaaatgttgaaatcttttggttattcatttaattttgcatatacttctttgttaaaaagagcaatacatagtttatgggttattttaaaagaaataaatcaatcttggattccagtagaaaaatcttggagattaaatgaaagacattacggtgcattgcaaggatttagtaaatatgaaattgaaaagaaatatggaaagaatcaattaaatgaatggagaagaggattttctatttcacctccaaagataaatgaaaaggataattattttattttaaatgataaaagatatttaaatttaaaaacaaaaaaattacttcctttttcagaaagtctaaaatctacaattgatagaataatgccatattgggatggaaatatatttccaagattgcaaaataaagaaaaaataataatcgtagctcatggaaattcaattagagctataataaaaattttatgtaatcttaatgaaaaagaaattataaaaattaatatacctactggtatacctttaatatatgaatttgattataatatggtttttaaaaaaaaatattttctttttgatagataa

SEQ ID NO: 152953 - protein, 234 aa, Wigglesworthia glossinidia brevipalpis
MSIIKLVLMRHGSSIWNDQDRFTGWTDIDLSEKGKNEVKYAGKMLKSFGYSFNFAYTSLLKRAIHSLWVILKEINQSWIPVEKSWRLNERHYGALQGFSKYEIEKKYGKNQLNEWRRGFSISPPKINEKDNYFILNDKRYLNLKTKKLLPFSESLKSTIDRIMPYWDGNIFPRLQNKEKIIIVAHGNSIRAIIKILCNLNEKEIIKINIPTGIPLIYEFDYNMVFKKKYFLFDR

SEQ ID NO: 152954 - DNA, 750 bp, Xanthomonas axonopodis pv
  CDS (1)..(750): transl_table=11
gtgacccgcaaactcgtactgctgcgccatggccagagccaatggaatctggacaaccgtttcaccggctgggtggatgtggaactcaccgaccagggccgccaggaagctgtggcggccggcaggctgatgaaggacgaagggctgcagttcgatgtcgcccacacctcggtgctcaagcgcgccatccacacgctgcagggcgcgttgaaggaactcgaccaggactggttgccggtgtccaagagctggcgcctcaacgagcgccactacggtggcctgcaaggcctggacaaggccgaaaccgcggcaaagcacggcgaggagcaggtcaagatctggcgccgttcctacgacatcccgccgccggcgatggacgtcaacgacccgggccacccgtgccacgaccgtcgctacgccacgctggaccgcaatgcattgccaggcaccgagtcgctggcgaccacgctggtgcgcgtgttgccgtattggcacgacgcgattgcgccgcagttgaaggccgggcagaccgtgctggtgaccgcgcacggcaattcgctgcgcgcgctctacaagtacctcaacgatgtctccaatgagcagatcctggagctcaacatccccaccggcatcccgttgctgttcgagctggacgacagcctgcaggtgcgcagcttccgttacctgggcgacccggaggcggccaagcgcgcggccgaagcggtggccaatcagggcaaggcgaagtaa

SEQ ID NO: 152955 - protein, 249 aa, Xanthomonas axonopodis pv
MTRKLVLLRHGQSQWNLDNRFTGWVDVELTDQGRQEAVAAGRLMKDEGLQFDVAHTSVLKRAIHTLQGALKELDQDWLPVSKSWRLNERHYGGLQGLDKAETAAKHGEEQVKIWRRSYDIPPPAMDVNDPGHPCHDRRYATLDRNALPGTESLATTLVRVLPYWHDAIAPQLKAGQTVLVTAHGNSLRALYKYLNDVSNEQILELNIPTGIPLLFELDDSLQVRSFRYLGDPEAAKRAAEAVANQGKAK

SEQ ID NO: 152956 - DNA, 750 bp, Xylella fastidiosa
  CDS (1)..(750): transl_table=11
atgactcgtaaacttgtattgctacgccatggacagagtcaatggaactcaatgaaccgttttactggctgggtggatatagggctgaccgaacaaggtcatcaagaagccactatggctggtcatctgatgaaagaagaaggactagagtttgatgtcgctcatacttctttacttaagcgggcgatccatacattacaagacgcacttaaagcattggaccaggactggttaccaatttataaaagctggcgtctcaatgagcgtcactacggtgctctacaaggccttgataaaatagataccgcagctaaacatggtgaagagcaagtcaatatttggcgccgctcctatgacatccaaccgccgccgattgatctagatgacccaagccatccaatgcgagaccgccgttacgctgctctggaccgcaaagtattacctgtgacggaatcgctgaaaaacacactcgaacgagtattaccgtactggaatgatgccatcgcaccacaactaaatgacaacaagacggtacttattagcgcccacggcaactcattgcgtgcgttgtacaagtaccttaatcaagaaagtgatgagaaaatcctaaatgtcaatatccctactggcattccacttctatttgaactgagcgatacactacaagtagtgagttaccgttaccttggtgatccagatgcagcacaacgcgcttccgaaatggtagcaaaccaaggtaaggcgaagtaa

SEQ ID NO: 152957 - protein, 249 aa, Xylella fastidiosa
MTRKLVLLRHGQSQWNSMNRFTGWVDIGLTEQGHQEATMAGHLMKEEGLEFDVAHTSLLKRAIHTLQDALKALDQDWLPIYKSWRLNERHYGALQGLDKIDTAAKHGEEQVNIWRRSYDIQPPPIDLDDPSHPMRDRRYAALDRKVLPVTESLKNTLERVLPYWNDAIAPQLNDNKTVLISAHGNSLRALYKYLNQESDEKILNVNIPTGIPLLFELSDTLQVVSYRYLGDPDAAQRASEMVANQGKAK

SEQ ID NO: 152958 - DNA, 750 bp, Xylella fastidiosa
  CDS (1)..(750): transl_table=11
atgactcgtaaacttgtattgctacgccatggacagagtcaatggaactcaatgaaccgttttactggctgggtggatatagggctgaccgaacaaggtcatcaagaagccactatggctggtcatctgatgaaaaaagaaggactagagtttgatgtcgctcatacttctttacttaagcgggcgatccatacattacaagacgcacttaaagcattggaccaggactggttaccaatttataaaagctggcgtctcaatgagcgtcactacggtgctctacaaggccttgataaaatagataccgcagctaaacatggtgaagagcaagtcaatatttggcgccgctcctatgacatccagccgccaccgattgatctagatgacccaagccatccaatgcgagaccgccgttacgccgctttggaccgcaaagtattacctgtgagggaatcgctgaaaaatacactcgaacgagtattaccgtactggaatgatgccatcgcaccacaactaaatgacaacaagacggtacttattagcgcccacggcaactcattgcgtgcgttgtacaagtaccttaataaagaaagtgatgagaaaatcctaaatgtcaatatccctactggcattccacttctatttgaactgagcgatacactacaagtagtgagttaccgttaccttggcgatccagatgcagcacaacgcgctgccgaaatggtagcaaaccaaggtaaggcgaagtaa

SEQ ID NO: 152959 - protein, 249 aa, Xylella fastidiosa
MTRKLVLLRHGQSQWNSMNRFTGWVDIGLTEQGHQEATMAGHLMKKEGLEFDVAHTSLLKRAIHTLQDALKALDQDWLPIYKSWRLNERHYGALQGLDKIDTAAKHGEEQVNIWRRSYDIQPPPIDLDDPSHPMRDRRYAALDRKVLPVRESLKNTLERVLPYWNDAIAPQLNDNKTVLISAHGNSLRALYKYLNKESDEKILNVNIPTGIPLLFELSDTLQVVSYRYLGDPDAAQRAAEMVANQGKAK

SEQ ID NO: 152960 - DNA, 753 bp, Yersinia pestis
  CDS (1)..(753): transl_table=11
atggcagtaactaagctagttttggtacgacacggcgaaagtcaatggaacaacgaaaaccgcttcaccggttggtatgatgttgatctgtctgaaaaaggccgttctgaagcaaaggcagcgggtaagctgttaaaagatgaaggcttcacttttgatttcgcctacacctcagtattaaaacgcgctatccacaccttgtggaacattttggatgaattagatcaggcatggctgccaacagaaaaaacctggaagcttaacgagcgtcactacggcgcactgcaaggcctgaataaatctgaaacggctgaaaaatacggcgatgagcaggttaagcaatggcgtcgtggctttgccatcacccctccagcactggagaaaagcgatgagcgtttcccaggccatgacccacgttatgcaaaattgactgatgctgagctgccaaccacagaaagcttggcgctgactattgaacgcgtgattccctactggaatgacgttatcaaaccacgtattgccagcggtgaacgcgtaattattgctgctcacggtaactctttacgtgcattggtaaaatatctggatgatctgggcgaagacgaaattcttgagctgaacatcccaactggcgtgccattagtgtatgagtttgatgagaacttcaagcctatcaaacactactatctgggtaacgctgatgaaatcgccgctaaagctgcagcggttgctaaccagggtaaagcgaagtaa

SEQ ID NO: 152961 - protein, 250 aa, Yersinia pestis
MAVTKLVLVRHGESQWNNENRFTGWYDVDLSEKGRSEAKAAGKLLKDEGFTFDFAYTSVLKRAIHTLWNILDELDQAWLPTEKTWKLNERHYGALQGLNKSETAEKYGDEQVKQWRRGFAITPPALEKSDERFPGHDPRYAKLTDAELPTTESLALTIERVIPYWNDVIKPRIASGERVIIAAHGNSLRALVKYLDDLGEDEILELNIPTGVPLVYEFDENFKPIKHYYLGNADEIAAKAAAVANQGKAK

SEQ ID NO: 152962 - DNA, 687 bp, Zymomonas mobilis
  CDS (1)..(687): transl_table=11
atgcccacgctcgttttgtcccgtcacggacagtccgaatggaaccttgaaaaccgtttcaccggttggtgggacgttaacctgactgaacagggtgttcaggaagcaacggccggtggtaaagctctggctgaaaagggttttgaattcgatatcgctttcaccagcgttctgacccgcgccatcaaaaccaccaatcttattctcgaagccggtaaaaccctttgggttccgaccgaaaaagattggcgtttgaatgaacgtcactatggtggtctgaccggtctgaacaaggctgaaaccgccgctaaacatggtgaagaacaggttcatatttggcgccgttcttatgacgttccgccgcccccgatggaaaaaggcagcaagttcgatctgtctggcgatcgtcgttatgatggtgtcaagattcctgaaacggaaagcctgaaagacaccgttgctcgcgtgctgccttattgggaagaacgcattgcccctgaactgaaggctggcaagcgcgtcctgatcggtgcgcatggtaactcattgcgcgctctcgttaagcatctgtcgaaattgtcggacgaagaaatcgtcaaattcgaattgcccaccggtcagccgttggtctacgaattgaatgatgatctgaccccgaaagatcgttacttccttaacgaacgttaa

SEQ ID NO: 152963 - protein, 228 aa, Zymomonas mobilis
MPTLVLSRHGQSEWNLENRFTGWWDVNLTEQGVQEATAGGKALAEKGFEFDIAFTSVLTRAIKTTNLILEAGKTLWVPTEKDWRLNERHYGGLTGLNKAETAAKHGEEQVHIWRRSYDVPPPPMEKGSKFDLSGDRRYDGVKIPETESLKDTVARVLPYWEERIAPELKAGKRVLIGAHGNSLRALVKHLSKLSDEEIVKFELPTGQPLVYELNDDLTPKDRYFLNER

SEQ ID NO: 152964 - DNA, 744 bp, Saccharomyces cerevisiae
  CDS (1)..(744)
atgccaaagttagttttagttagacacggtcaatccgaatggaacgaaaagaacttattcaccggttgggttgatgttaaattgtctgccaagggtcaacaagaagccgctagagccggtgaattgttgaaggaaaagaaggtctacccagacgtcttgtacacttccaagttgtccagagctatccaaactgctaacattgctttggaaaaggctgacagattatggattccagtcaacagatcctggagattgaacgaaagacattacggtgacttacaaggtaaggacaaggctgaaactttgaagaagttcggtgaagaaaaattcaacacctacagaagatccttcgatgttccacctcccccaatcgacgcttcttctccattctctcaaaagggtgatgaaagatacaagtacgttgacccaaatgtcttgccagaaactgaatctttggctttggtcattgacagattgttgccatactggcaagatgtcattgccaaggacttgttgagtggtaagaccgtcatgatcgccgctcacggtaactccttgagaggtttggttaagcacttggaaggtatctctgatgctgacattgctaagttgaacatcccaactggtattccattggtcttcgaattggacgaaaacttgaagccatctaagccatcttactacttggacccagaagctgccgctgctggtgccgctgctgttgccaaccaaggtaagaaataa

SEQ ID NO: 152965 - protein, 247 aa, Saccharomyces cerevisiae
MPKLVLVRHGQSEWNEKNLFTGWVDVKLSAKGQQEAARAGELLKEKKVYPDVLYTSKLSRAIQTANIALEKADRLWIPVNRSWRLNERHYGDLQGKDKAETLKKFGEEKFNTYRRSFDVPPPPIDASSPFSQKGDERYKYVDPNVLPETESLALVIDRLLPYWQDVIAKDLLSGKTVMIAAHGNSLRGLVKHLEGISDADIAKLNIPTGIPLVFELDENLKPSKPSYYLDPEAAAAGAAAVANQGKK

SEQ ID NO: 152966 - DNA, 936 bp, Saccharomyces cerevisiae
  CDS (1)..(936)
atgactgcaagcacaccatccaatgtcatgacattgttcttgttaaggcatggacaaagtgaattgaatcacgagaatatattctgtggttggattgacgctaagctaaccgaaaaaggtaaagaacaagctcgtcattctgccgagctaatcgaacaatattgtaaagctaataatttgagattaccccagattggttacacctcacgtttaattaggacccaacagaccatagaaacgatgtgtgaagaatttaagttaaagccacaactgcaggttgtttacgactttaataaaatcaaacttggagacgaatttggcagtgatgacaaggataatatgaaaatcccgattcttcaaacttggaggctaaatgaacgtcattacggttcctggcagggccagaggaaaccgaatgttttaaaagaatatggtaaggataaatatatgttcattaggagagattacgagggtaagccaccacctgtagatcttgaccgtgagatgattcaacaagaaaatgagaagggctcttctactgggtacgaattcaaggagccaaacagacaaataaaatatgaattggaatgcagcaatcatgacattgtattaccggattccgaatctcttcgtgaagtggtttatagattgaatccttttctacaaaatgtcatattaaaattagccaatcaatatgatgaatcttcatgcctgattgtgggccatggaagttcagtgagatcgctactgaaaattctggagggtatatcagatgatgacatcaagaatgttgatattccaaatggtatccccttagtcgttgaattagataagaataatggtcttaagtttatcagaaaattctacctagatcctgaatctgctaagatcaatgctgagaaagtccgtaatgagggtttcataaaaaatccttaa

SEQ ID NO: 152967 - protein, 311 aa, Saccharomyces cerevisiae
MTASTPSNVMTLFLLRHGQSELNHENIFCGWIDAKLTEKGKEQARHSAELIEQYCKANNLRLPQIGYTSRLIRTQQTIETMCEEFKLKPQLQVVYDFNKIKLGDEFGSDDKDNMKIPILQTWRLNERHYGSWQGQRKPNVLKEYGKDKYMFIRRDYEGKPPPVDLDREMIQQENEKGSSTGYEFKEPNRQIKYELECSNHDIVLPDSESLREVVYRLNPFLQNVILKLANQYDESSCLIVGHGSSVRSLLKILEGISDDDIKNVDIPNGIPLVVELDKNNGLKFIRKFYLDPESAKINAEKVRNEGFIKNP

SEQ ID NO: 152968 - DNA, 912 bp, Saccharomyces cerevisiae
  CDS (1)..(912)
atgactgttactgacacttttaaactgtttattttaaggcatggtcaaagtgaattaaactcagaaaacatattctgcggatggattgatgctcaattaacggaaaaagggaagtctcaggcccgccactctgcaaaattgatcaagcagttttgcgattctaacaatatctctttgcctcagattggctatacttcaaggttgattcgaactcagcagaccatggacgttattctcgaagagttgggactaaaacacaccaattatgtaattactacgaatacaaacattaaggaggagctgcaggacacaagatttgaaggaagtatgcctgtgttgcaaacctggaggttaaatgagcgtcattacggcgcatggcaaggacaaagaaagccagatatcttgaaagaatacggtaaggaaaaatacatgtatatcagaagagattacaacggaaaaccccctaaagtcaacctaaacctggaaatggtccaagaggaaaatgatcaggggtcctccacaggctatgattttaaggagcccaatagacacttaaaatacggccccgaagagaaggctaatgagcgtctgccagaaagtgagtctctttgtgaagtggtcgtcagattgaaaccatttttaaataatgttgttctgtctaccgccaacaaaatcagtcaagaatcgtgtgttatagttgggcatggcagctctgtaagatctctgctgaaagtattggaaggtatctcagatgaagacatcaaagatgtcgatattcccaacggcattccgctagttatagagttggatagagacaattactcttttgtgaggaaattttacttggatccagaatcagctaaagttaatgctcaaatggttcgtgatgagggtttcgaaaagaatccatga

SEQ ID NO: 152969 - protein, 303 aa, Saccharomyces cerevisiae
MTVTDTFKLFILRHGQSELNSENIFCGWIDAQLTEKGKSQARHSAKLIKQFCDSNNISLPQIGYTSRLIRTQQTMDVILEELGLKHTNYVITTNTNIKEELQDTRFEGSMPVLQTWRLNERHYGAWQGQRKPDILKEYGKEKYMYIRRDYNGKPPKVNLNLEMVQEENDQGSSTGYDFKEPNRHLKYGPEEKANERLPESESLCEVVVRLKPFLNNVVLSTANKISQESCVIVGHGSSVRSLLKVLEGISDEDIKDVDIPNGIPLVIELDRDNYSFVRKFYLDPESAKVNAQMVRDEGFEKNP

SEQ ID NO: 152970 - DNA, 636 bp, Schizosaccharomyces pombe
  CDS (1)..(636)
atgactaccgaagctgcacctaacttgctcgtccttacccgtcacggtgaatccgaatggaacaagttgaacttgttcactggttggaaggaccctgccttgtccgagactggtattaaggaggccaagctcggtggtgagcgcttgaagtctcgtggctacaagtttgacattgccttcacctctgctcttcaacgtgcccaaaagacctgccaaatcatcttggaggaggttggtgagcccaacttggagaccatcaagagcgagaagctcaacgagcgttactacggtgacttgcaaggtttgaacaaggatgatgctcgtaagaaatggggtgctgagcaagtccaaatctggcgccgttcttatgacattgctcctcccaacggtgagtccttgaaggacaccgccgagcgtgtcttgccctactacaagtccaccattgtccctcacatccttaagggtgagaaggttctcattgccgctcacggtaactctctccgtgccttgatcatggacttggagggtcttactggtgaccaaattgtcaagcgtgagcttgccactggtgtccccattgtctaccacttggacaaggacggcaagtacgtctccaaggagctcattgacaactag

SEQ ID NO: 152971 - protein, 211 aa, Schizosaccharomyces pombe
MTTEAAPNLLVLTRHGESEWNKLNLFTGWKDPALSETGIKEAKLGGERLKSRGYKFDIAFTSALQRAQKTCQIILEEVGEPNLETIKSEKLNERYYGDLQGLNKDDARKKWGAEQVQIWRRSYDIAPPNGESLKDTAERVLPYYKSTIVPHILKGEKVLIAAHGNSLRALIMDLEGLTGDQIVKRELATGVPIVYHLDKDGKYVSKELIDN

SEQ ID NO: 152972 - DNA, 999 bp, Oryza sativa
  CDS (1)..(999)
atggctgcttccacgtcccagcatgcgctcgtatccgtcaagtcgttgtgcaccggtgccaactttggtttcgaaaagagaaccagcaaagtgcgttttgttttggttgggaggtgctgctcgggcacccggaaattgggtttggtatgcgcttcaaactcacattcttcggtgatggagccggctcagctaccattgagccccgagagcggaaacaccccaaagaaatcaagtgaaagtgcgctcatattgatccggcatggtgaatcgctatggaatgagaaaaatctatttactggctgcgtcgatgtgcccctgaccccaaagggtgttgacgaggcaattgaggcgggtaaaaggatatgcaatatcccagttgatgtaatatacacctcgtcactaattcgtgctcagatgaccgctatgcttgccatgatgcagcatcgtcgtaagaaggttccaattgttgtgcacagtgagagcgaacaagctcacaggtggagcaagatatacagtgaagagacaaagaagcaatcaattcctgtcataacagcttggcagctgaatgaacgaatgtatggggaactacaaggccttaacaagcaagaaactgctgatcgttttggcaaagaacaagttcatgaatggcgtcgcagttacgacattcctcccccaaatggcgagagcctagagatgtgtgcagagagagcagttgcttattttaaagatcaaattgtacctcagcttgtggcaggaaagcatgtgatgattgctgcccatggcaattcacttcgttcaattataatgcacttagacaagttgacttctcaagaggttatcagccttgaactgtctactggcattcctatgctgtatatatttaaggaaggaaaatttattagacgggggagtccggcaggcccttctgaggcaggtgtctatgcctacaccaggagcttggctcagtacagacagaagcttgacaacatgtttcagtaa

SEQ ID NO: 152973 - protein, 332 aa, Oryza sativa
MAASTSQHALVSVKSLCTGANFGFEKRTSKVRFVLVGRCCSGTRKLGLVCASNSHSSVMEPAQLPLSPESGNTPKKSSESALILIRHGESLWNEKNLFTGCVDVPLTPKGVDEAIEAGKRICNIPVDVIYTSSLIRAQMTAMLAMMQHRRKKVPIVVHSESEQAHRWSKIYSEETKKQSIPVITAWQLNERMYGELQGLNKQETADRFGKEQVHEWRRSYDIPPPNGESLEMCAERAVAYFKDQIVPQLVAGKHVMIAAHGNSLRSIIMHLDKLTSQEVISLELSTGIPMLYIFKEGKFIRRGSPAGPSEAGVYAYTRSLAQYRQKLDNMFQ

SEQ ID NO: 152974 - DNA, 711 bp, Brassica napus
  CDS (1)..(711)
atgggtcatgaatgtatcgatgcatccaagaagttcaaatttagtgacgatgtcaaaagtggagtgactgagattgttcttgttcgccatggagaaaccacttggaatgctgctggaagaatccagggacaaatagagtcagatcttaacgaaattggacaaaagcaggctgttgcaatcgctgagagattggggaaagaggagagacccgtagctgtgtattcatcagacctcaagcgagccaaagacactgctctgatgatcgcagaaacttgtttttgttccgaggtgactgaagtacctgacttaaaggagaggcatgtgggtagtcttcaagggctgtactggaaagaaggagcagagaaagaacctgaagcttactctgctttcttttcttctcaaaatgacctcgagattcctggaggaggagagagctttgaccaactctgtgagaggtccatgaatgcccttgagcaaattgcaaagaagcacaaaggggagagagtgatagtagtgactcatggaggagtgttaagggcaatctacatgaggatcacgcaagcttcctctgctgggaaactccttaatgcttcagtgaatgttgttcgcttcagtgacgagaaatggatcattgattcatggagcgatgtttcacatctctcatcagttggattcctccaacggggctttgatggtgacgccaagccctag

SEQ ID NO: 152975 - protein, 236 aa, Brassica napus
MGHECIDASKKFKFSDDVKSGVTEIVLVRHGETTWNAAGRIQGQIESDLNEIGQKQAVAIAERLGKEERPVAVYSSDLKRAKDTALMIAETCFCSEVTEVPDLKERHVGSLQGLYWKEGAEKEPEAYSAFFSSQNDLEIPGGGESFDQLCERSMNALEQIAKKHKGERVIVVTHGGVLRAIYMRITQASSAGKLLNASVNVVRFSDEKWIIDSWSDVSHLSSVGFLQRGFDGDAKP

SEQ ID NO: 152976 - DNA, 987 bp, Brassica napus
  CDS (1)..(987)
atggctacggttgtatctcaccatttgatcagcactattgcttctcctcattcaacttccaattccaaagcttctctcttcccaaaggagcctttcaatctccctatcaagttcagacaaaaccgttgtttcaagatcgaagcaacaaccgcatctcaaactcctgttctcgaccctctcttgtctccttccaagacaacccctcacaagaaaaaatcaaatgaagcatctctgatactaatcaggcatggagagtcgctatggaacgagaagaacctcttcacaggctgtgttgatgttccattaaccgagaaaggcgttgctgaagctatccaagccgggaagaggattagcaccatccccgttgatctgatcttcacttcctccctcatccgtgctcagatgactgctatgctcgccatgacgcagcaccgatgcaagaaggttccaatcatcttgcatgatgagagcgagaaggcgcagacttggagtcatgtcttcagcgaagagaccaggaagcagtctatccctgttgtagctgcttggcagctgaatgagagaatgtatggagagttacagggtttaaacaaggaggaaacagctgaaagatatggaacgcagcaagttcatgagtggcgtaggagttatcacatccctcctcctaaaggagagagcttggagatgtgtgctgagagagctgtggcttactttgaagacaatattcaaccagagcttgcgttagggaacaatgtgttgattgctgctcatgggaactcgttgaggtctatcattatgtatcttgacaaattaacttctcaggaggttacgagtttagagctgtctactggtttaccgttgctttacatcttcaaagataggaagttcatgagacgaggaagccctgttggtcctacagaagctggtgtctatgcttatactaagagattggcacaatacagacagaagcttgatgagagccttaactaa

SEQ ID NO: 152977 - protein, 328 aa, Brassica napus
MATVVSHHLISTIASPHSTSNSKASLFPKEPFNLPIKFRQNRCFKIEATTASQTPVLDPLLSPSKTTPHKKKSNEASLILIRHGESLWNEKNLFTGCVDVPLTEKGVAEAIQAGKRISTIPVDLIFTSSLIRAQMTAMLAMTQHRCKKVPIILHDESEKAQTWSHVFSEETRKQSIPVVAAWQLNERMYGELQGLNKEETAERYGTQQVHEWRRSYHIPPPKGESLEMCAERAVAYFEDNIQPELALGNNVLIAAHGNSLRSIIMYLDKLTSQEVTSLELSTGLPLLYIFKDRKFMRRGSPVGPTEAGVYAYTKRLAQYRQKLDESLN

SEQ ID NO: 152978 - DNA, 987 bp, Brassica napus
  CDS (1)..(987)
atggctacggttgtatctcaccatttgatcagctctattgcttctcctcattcaccttccaattccaaagcttctctcttcccaaaggagcctttcaatctccctatcaagttcagacaaaaccgttgtttcaagatcgaagcaacaactgcatctcaaactcctgttcttgaccctctcttgtctccttccaagacaacccctcacaagaaaaaatcaaatgaagcatcactgatattaatcaggcatggagagtcgctatggaacgagaagaacctcttcacaggctgtgttgatgttccattaaccgagaaaggcgttgctgaagctatccaagccgggaagaggattagcaccatccccgttgatctgatcttcacttcctccctcatccgtgctcagatgaccgccatgctcgccatgactcagcaccgctgcaagaaggttccaatcatcttgcacgatgagagcgagaaggcgcagacttggagccatgtcttcagcgaagagaccaggaagcaatctatccctgttgtagctgcttggcaactgaatgagagaatgtatggagagttacaaggtttaaacaaggaagagacagctgaaagatatggaacgcagcaagttcatgaatggcgtaggagttaccacatccctccacctaaaggagagagcttggagatgtgtgctgagagagctgtggcttactttgaagacaatattcaaccagagcttgcgttagggaacaacgtgttgattgctgctcatgggaactcgttgcggtctatcattatgtatcttgacaagctaacttctcaggaggttacgagtttagagctgtctactggtttaccgttgctctacatcttcaaagataggaagttcatgagacgaggaagccctgttggtcctacagaagctggtgtctatgcttatactaagagattggcacaatacagacagaagcttgatgagagccttaactaa

SEQ ID NO: 152979 - protein, 328 aa, Brassica napus
MATVVSHHLISSIASPHSPSNSKASLFPKEPFNLPIKFRQNRCFKIEATTASQTPVLDPLLSPSKTTPHKKKSNEASLILIRHGESLWNEKNLFTGCVDVPLTEKGVAEAIQAGKRISTIPVDLIFTSSLIRAQMTAMLAMTQHRCKKVPIILHDESEKAQTWSHVFSEETRKQSIPVVAAWQLNERMYGELQGLNKEETAERYGTQQVHEWRRSYHIPPPKGESLEMCAERAVAYFEDNIQPELALGNNVLIAAHGNSLRSIIMYLDKLTSQEVTSLELSTGLPLLYIFKDRKFMRRGSPVGPTEAGVYAYTKRLAQYRQKLDESLN

SEQ ID NO: 152980 - DNA, 996 bp, Zea mays
  CDS (1)..(996)
atggccacttccacatctcagcatgcgctttcatccatcaaattgctgtccacaggctgcttgcatcccgataagagaaattgccgcgtgctttctgtttcagtagggcgtcgctgccccagtgcccgcaatttgggtctactttgtgcttcaaactctcaatcttcagtgattgagccggtccagctaccgaggagccctaaaagtggcgtagctccaaagaaatcaggtgaaagtgcactcattctgatacggcatggagaatcgttgtggaacgagaagaacctgttcactggatgtgtcgatgttcccctgacccctaagggcgttgacgaggcaattgaggcggggaaaaggatatgcaatatcccagtcgatgtaatatacacttcgtcgctgattcgggctcagatgaccgctatgcttgccatgatgcagcatcgccgaaagaaggttccaatcattttgcacaacgagagtgaacaagctcacatgtggagtcagatatacagtgaagagacaaagaagcagtccattcctgtcataacagcttggcaattgaatgaacggatgtatggtgagcttcaaggccttaacaaacaagaaaccgccgatcgatttggtaaagaacaagttcatgaatggcgtcgcagttatgatattcctcccccaaatggcgagagccttgagatgtgtgcagagagagcagttgcttatttcaaagaccaaattatacctaaacttgtggatggaaagcatgtaatgatcgcggcccatgggaattcacttcgttcgatcataatgcatttggacaagctgacttctcaagaggttatcagccttgagttgtctactggcattcctatgctgtatatatttaaggaaggtaaattcatcaggcgaggaagccccgctggaccttctgaagcaggtgtctatgcttataccaagaatttggctcagtacagacagaagcttgatggcatagttcagtag

SEQ ID NO: 152981 - protein, 331 aa, Zea mays
MATSTSQHALSSIKLLSTGCLHPDKRNCRVLSVSVGRRCPSARNLGLLCASNSQSSVIEPVQLPRSPKSGVAPKKSGESALILIRHGESLWNEKNLFTGCVDVPLTPKGVDEAIEAGKRICNIPVDVIYTSSLIRAQMTAMLAMMQHRRKKVPIILHNESEQAHMWSQIYSEETKKQSIPVITAWQLNERMYGELQGLNKQETADRFGKEQVHEWRRSYDIPPPNGESLEMCAERAVAYFKDQIIPKLVDGKHVMIAAHGNSLRSIIMHLDKLTSQEVISLELSTGIPMLYIFKEGKFIRRGSPAGPSEAGVYAYTKNLAQYRQKLDGIVQ

SEQ ID NO: 152982 - DNA, 996 bp, Zea mays
  CDS (1)..(996)
atggccacttccacatctcagcatgcgctttcatccatcaaattgctgtccacaggctgcttgcatcccgataagagaaattgccgcgtgctttctgtttcagtagggcgtcgctgtcccagtgcccgcaatttgggtctactttgtgcttcaaactctcaatcttcagtgattgagccggtccagctaccgaggagccctaaaagtggcgtaactccaaagaaatcaggtgaaagcgcactcattctgatacggcatggagaatcgttgtggaacgagaagaacctgtttactggatgtgtcgatgttcccctgacccctaagggcgttgacgaggcaattgaggcggggaaaaggatatgcaatatcccagtcgatgtaatatacacttcgtcgctgattcgggctcagatgaccgctatgcttgccatgatgcagcatcgccgaaagaaggttccaatcattttgcacaacgagagtgaacaagctcacatgtggagtcagatatacagtgaagagacaaagaagcagtccattcctgtcataacagcttggcaattgaatgaacggatgtatggtgagcttcaaggccttaacaaacaagaaaccgccgatcgatttggtaaagaacaagttcatgaatggcgtcgcagttatgatattcctcccccaaatggcgagagccttgagatgtgtgcagagagagcagttgcttatttcaaagaccaaattatacctaaacttgtggatggaaagcatgtaatgatcgcggcccatgggaattcacttcgttcaatcataatgcatttggacaagctgacttctcaagaggttatcagccttgagttgtctactggcattcctatgctgtatatatttaaggaagggaaattcatcaggcgaggaagccccgctggaccttctgaagcaggtgtctatgcttataccaagaatttggctcagtacagacagaagcttgatggcatagttcagtag

SEQ ID NO: 152983 - protein, 331 aa, Zea mays
MATSTSQHALSSIKLLSTGCLHPDKRNCRVLSVSVGRRCPSARNLGLLCASNSQSSVIEPVQLPRSPKSGVTPKKSGESALILIRHGESLWNEKNLFTGCVDVPLTPKGVDEAIEAGKRICNIPVDVIYTSSLIRAQMTAMLAMMQHRRKKVPIILHNESEQAHMWSQIYSEETKKQSIPVITAWQLNERMYGELQGLNKQETADRFGKEQVHEWRRSYDIPPPNGESLEMCAERAVAYFKDQIIPKLVDGKHVMIAAHGNSLRSIIMHLDKLTSQEVISLELSTGIPMLYIFKEGKFIRRGSPAGPSEAGVYAYTKNLAQYRQKLDGIVQ

SEQ ID NO: 152984 - DNA, 24 bp, Artificial sequence
  primer
atggctgtaactaagctggttctg

SEQ ID NO: 152985 - DNA, 24 bp, Artificial sequence
  primer
ttacttcgctttaccctggtttgc

SEQ ID NO: 152986 - protein, 287 aa, Artificial sequence
  consensus sequence
  Variant (2)..(4): Xaa in position 2 to 4 is any amino acid
  Variant (8)..(8): Xaa in position 8 is any amino acid
  Variant (10)..(10): Xaa in position 10 is any amino acid
  Variant (13)..(14): Xaa in position 13 to 14 is any amino acid
  Variant (16)..(16): Xaa in position 16 is any amino acid
  Variant (17)..(21): Xaa in position 17 to 21 is any or no amino acid
  Variant (23)..(23): Xaa in position 23 is any amino acid
  Variant (26)..(26): Xaa in position 26 is any amino acid
  Variant (28)..(29): Xaa in position 28 to 29 is any amino acid
  Variant (31)..(33): Xaa in position 31 to 33 is any amino acid
  Variant (35)..(37): Xaa in position 35 to 37 is any amino acid
  Variant (39)..(41): Xaa in position 39 to 41 is any amino acid
  Variant (43)..(54): Xaa in position 43 to 54 is any amino acid
  Variant (55)..(61): Xaa in position 55 to 61 is any or no amino acid
  Variant (64)..(64): Xaa in position 64 is any amino acid
  Variant (66)..(66): Xaa in position 66 is any amino acid
  Variant (69)..(70): Xaa in position 69 to 70 is any amino acid
  Variant (72)..(87): Xaa in position 72 to 87 is any amino acid
  Variant (88)..(132): Xaa in position 88 to 132 is any or no amino acid
  Variant (137)..(137): Xaa in position 137 is any amino acid
  Variant (140)..(140): Xaa in position 140 is any amino acid
  Variant (142)..(142): Xaa in position 142 is any amino acid
  Variant (144)..(145): Xaa in position 144 to 145 is any amino acid
  Variant (147)..(152): Xaa in position 147 to 152 is any amino acid
  Variant (153)..(153): Xaa in position 153 is any or no amino acid
  Variant (155)..(159): Xaa in position 155 to 159 is any amino acid
  Variant (160)..(166): Xaa in position 160 to 166 is any or no amino acid
  Variant (170)..(174): Xaa in position 170 to 174 is any amino acid
  Variant (176)..(176): Xaa in position 176 is any amino acid
  Variant (177)..(219): Xaa in position 177 to 219 is any or no amino acid
  Variant (221)..(221): Xaa in position 221 is any amino acid
  Variant (222)..(222): Xaa in position 222 is any or no amino acid
  Variant (224)..(224): Xaa in position 224 is any amino acid
  Variant (226)..(226): Xaa in position 226 is any amino acid
  Variant (227)..(230): Xaa in position 227 to 230 is any or no amino acid
  Variant (232)..(238): Xaa in position 232 to 238 is any amino acid
  Variant (239)..(239): Xaa in position 239 is any or no amino acid
  Variant (241)..(250): Xaa in position 241 to 250 is any amino acid
  Variant (251)..(255): Xaa in position 251 to 255 is any or no amino acid
  Variant (261)..(261): Xaa in position 261 is any amino acid
  Variant (263)..(276): Xaa in position 263 to 276 is any amino acid
  Variant (277)..(286): Xaa in position 277 to 286 is any or no amino acid
LXXXRHGXSXWNXXNXXXXXXFXGWXDXXLXXXGXXXAXXXGXXXXXXXXXXXXXXXXXXXTSXLXRAXXTXXXXXXXXXXXXXXXXXXXXXXXXXXXXXXXXXXXXXXXXXXXXXXXXXXXXXXXXXXXXXLNERXYGXLXGXXKXXXXXXXGXXXXXXXXXXXXWRRXXXXXPXXXXXXXXXXXXXXXXXXXXXXXXXXXXXXXXXXXXXXXXXXXXPXXEXLXXXXXRXXXXXXXXIXXXXXXXXXXXXXXXAHGNSXRXXXXXXXXXXXXXXXXXXXXXXXXP

SEQ ID NO: 152987 - protein, 14 aa, Artificial sequence
  protein pattern
  Variant (2)..(2): Xaa in position 2 is Ala or Gly
  Variant (3)..(3): Xaa in position 3 is any amino acid
  Variant (5)..(5): Xaa in position 5 is any amino acid
  Variant (8)..(11): Xaa in position 8 to 11 is any amino acid
  Variant (13)..(13): Xaa in position 13 is Cys, Gly, Asn, Ser or Thr
HXXSXWNXXXXFXG

SEQ ID NO: 152988 - protein, 11 aa, Artificial sequence
  protein pattern
  Variant (5)..(5): Xaa in position 5 is any amino acid
  Variant (8)..(8): Xaa in position 8 is any amino acid
  Variant (10)..(10): Xaa in position 10 is any amino acid
LNERXYGXLXG

SEQ ID NO: 152989 - protein, 21 aa, Artificial sequence
  protein pattern
  Variant (3)..(3): Xaa in position 3 is any or no amino acid
  Variant (5)..(5): Xaa in position 5 is any amino acid
  Variant (6)..(6): Xaa in position 6 is any or no amino acid
  Variant (8)..(8): Xaa in position 8 is Ala, Gly or Ser
  Variant (9)..(9): Xaa in position 9 is Ile, Leu, Met or Val
  Variant (10)..(12): Xaa in position 10 to 12 is any amino acid
  Variant (13)..(13): Xaa in position 13 is Phe, Ile or Leu
  Variant (14)..(16): Xaa in position 14 to 16 is any amino acid
  Variant (17)..(17): Xaa in position 17 is Asp, Gly, Asn, Pro, Ser or Thr
  Variant (18)..(20): Xaa in position 18 to 20 is any amino acid
  Variant (21)..(21): Xaa in position 21 is Ile or Val
HGXSXXRXXXXXXXXXXXXXX

SEQ ID NO: 152990 - protein, 16 aa, Artificial sequence
  protein pattern
  Variant (2)..(2): Xaa in position 2 is any amino acid
  Variant (3)..(3): Xaa in position 3 is Ala, Asp, Glu, Asn or Gln
  Variant (4)..(4): Xaa in position 4 is any amino acid
  Variant (5)..(5): Xaa in position 5 is Phe, Ile, Leu or Val
  Variant (6)..(7): Xaa in position 6 to 7 is any amino acid
  Variant (11)..(11): Xaa in position 11 is Ala, Gly or Ser
  Variant (12)..(15): Xaa in position 12 to 15 is any amino acid
GXXXXXXWRRXXXXXP

SEQ ID NO: 152991 - DNA, 534 bp, Escherichia coli
  CDS (1)..(534): transl_table=11
atgaacacaaaaatcagatacggcctgtcggctgccgttctggcgctgattggtgctggcgcatctgctcctcagatacttgaccagtttctggacgaaaaagaaggtaaccacacaatggcataccgcgatggttctggcatatggaccatctgtcggggtgccacagtggtggatggaaaaaccgtttttcccaatatgaaactgtcgaaggaaaaatgcgaccaggtcaacgccattgagcgtgataaggcgctggcatgggtggagcgcaatattaaagtaccactgaccgaaccacaaaaagcgggtatcgcgtcattttgtccctataacattggccccggtaagtgtttcccgtcgacgttttataagcggctgaatgctggtgatcgtaaaggtgcatgcgaagcgattcgctggtggattaaggatggcggacgcgattgccgcattcgttcaaataactgttacggtcaggttattcgtcgtgaccaggagagcgcattaacctgctgggggatagaacagtaa

SEQ ID NO: 152992 - protein, 177 aa, Escherichia coli
MNTKIRYGLSAAVLALIGAGASAPQILDQFLDEKEGNHTMAYRDGSGIWTICRGATVVDGKTVFPNMKLSKEKCDQVNAIERDKALAWVERNIKVPLTEPQKAGIASFCPYNIGPGKCFPSTFYKRLNAGDRKGACEAIRWWIKDGGRDCRIRSNNCYGQVIRRDQESALTCWGIEQ

SEQ ID NO: 152993 - DNA, 534 bp, Escherichia coli; 0157:H7
  CDS (1)..(534)
atgaacgcaaaaatcagatacggcctgtcggctgccgttctggcgctgattggtgcaggggcgtctgcgcctgaaatcctcgaccagtttctggatgaaaaggaaggtaaccacaccacagcataccgtgatggtgcgggtatctggaccatctgccgtggagccacccgggtggatggtaagcctgttattcctggcatgaagctgtcgaaggaaaaatgcgaccgggttaacgccattgagcgtgataaggcgctggcatgggtggagaaaaacatcagagtgccactgaccgaaccccagaaagcggggattgcgtcattctgtccgtacaacattggccccggtaagtgtttcccgtcgacgttttacagacggattaatgcaggagatcgaaaaggtgcctgcgaagctattcgctggtggattaaggacggtggcagggactgccgtattcgctcaaataactgttacggtcaggtatcccgtcgtgaccaggagagcgcgctggcgtgctggggaatcgacagataa

SEQ ID NO: 152994 - protein, 177 aa, Escherichia coli; 0157:H7
MNAKIRYGLSAAVLALIGAGASAPEILDQFLDEKEGNHTTAYRDGAGIWTICRGATRVDGKPVIPGMKLSKEKCDRVNAIERDKALAWVEKNIRVPLTEPQKAGIASFCPYNIGPGKCFPSTFYRRINAGDRKGACEAIRWWIKDGGRDCRIRSNNCYGQVSRRDQESALACWGIDR

SEQ ID NO: 152995 - DNA, 498 bp, Escherichia coli O157:H7 EDL933
  CDS (1)..(498): transl_table=11
atgtcgccatcattacgcaaggctgttgctgctgctattggtggtggggctgctgccatagcgtctgtgctcatcactggtccgagtggtgacgatggcctggaaggtgtcagctacataccatacgaagatatcgttggcgtatggactgtatgtcacggacacaccggaaaagacatcattcccggtaaaacgtataccgaagcagaatgcaaagccctcctgaataaagaccttgccacggtcgccagacaaattaacccgtacatcaaagtcgatataccggaaacaacgcgcggcgctctttactcgttcgtttacaacgtgggcgctggtaatttcagaacatcgacgcttcttcgcaaaataaaccagggtgatatcaaaggcgcatgtgatcagctacggcgctggacatacgctggcggtaagcaatggaaagggctgatgactcgccgcgagattgagcgtgaagtctgtttgtgggggcaacaatga

SEQ ID NO: 152996 - protein, 165 aa, Escherichia coli O157:H7 EDL933
MSPSLRKAVAAAIGGGAAAIASVLITGPSGDDGLEGVSYIPYEDIVGVWTVCHGHTGKDIIPGKTYTEAECKALLNKDLATVARQINPYIKVDIPETTRGALYSFVYNVGAGNFRTSTLLRKINQGDIKGACDQLRRWTYAGGKQWKGLMTRREIEREVCLWGQQ

SEQ ID NO: 152997 - DNA, 534 bp, Escherichia coli O157:H7 EDL933
  CDS (1)..(534): transl_table=11
atgaacgcaaaaatcagatacggcctgtcggctgccgttctggcgctgattgccgcaggtgcgcctgcgcctgaaatcctcgaccagtttctggatgaaaaggaaggtaaccacaccacagcataccgtgatggtgcgggtatctggaccatctgccgtggagccacccgggtggatggtaagcctgttattcctggcatgaagctgtcgaaggaaaaatgcgaccgggttaacgccattgagcgtgataaggcgctggcatgggtggagaaaaacatcagagtgccactgaccgaaccccagaaagcggggattgcgtcattctgtccgtacaacattggccccggtaagtgtttcccgtcgacgttttataaacgaattaatgcaggagatcgaaaaggtgcctgcgaagcgattcgctggtggattaaggacggtggcagagactgccgtattcgctcaaataactgttatggtcaggtatcccgtcgtgaccaggagagcgcgctggcgtgctggggaatcgacagataa

SEQ ID NO: 152998 - protein, 177 aa, Escherichia coli O157:H7 EDL933
MNAKIRYGLSAAVLALIAAGAPAPEILDQFLDEKEGNHTTAYRDGAGIWTICRGATRVDGKPVIPGMKLSKEKCDRVNAIERDKALAWVEKNIRVPLTEPQKAGIASFCPYNIGPGKCFPSTFYKRINAGDRKGACEAIRWWIKDGGRDCRIRSNNCYGQVSRRDQESALACWGIDR

SEQ ID NO: 152999 - DNA, 534 bp, Escherichia coli O157:H7 EDL933
  CDS (1)..(534): transl_table=11
atgaacgaaaaaataaaatacggcctgtcggctgccgttctggcgctgattggtgcaggtgcttctgcgcctgaaatcctcgaccagtttctggatgaaaaggaaggtaaccacaccacggcataccgtgatggtgcggggatctggaccatctgccgtggtgccattctggtggatggtaagcctgttattcctggcatgaagctgtcaaaggaaaaatgcgaccgggttaatgccatcgaacgtgacaaggcgctggcatgggtggagaaaaacatccgggtgccgctgaccgaaccccagaaagcggggatcgcgtcattctgtccgtacaacattggccccggtaagtgcttcccgtcgacgttttataaacgaattaatgcaggcgatcgaaaaggtgcctgtgaggcgattcgctggtggattaaggacggtggcagagactgccgtatccgttcaaataattgctacggtcaggtctcacggcgtgaccaggagagcgcgctggcgtgctgggacatcgacagatag

SEQ ID NO: 153000 - protein, 177 aa, Escherichia coli O157:H7 EDL933
MNEKIKYGLSAAVLALIGAGASAPEILDQFLDEKEGNHTTAYRDGAGIWTICRGAILVDGKPVIPGMKLSKEKCDRVNAIERDKALAWVEKNIRVPLTEPQKAGIASFCPYNIGPGKCFPSTFYKRINAGDRKGACEAIRWWIKDGGRDCRIRSNNCYGQVSRRDQESALACWDIDR

SEQ ID NO: 153001 - DNA, 534 bp, Escherichia coli O157:H7 EDL933
  CDS (1)..(534): transl_table=11
atgaacgcaaaaatcagatacggcctgtcggctgccgttctggcgctgattggtgcaggggcgtctgcgcctgaaatcctcgaccagtttcttgacgaaaaagaaggtaaccacaccacggcataccgtgatggtgcgggtatctggaccatctgccgcggtgccatcctggtggatggtaaacctgtcgttccgggcatgaagttgtcgaaggaaaaatgcgaccaggttaacgccattgaacgtgataaggcgctggagtgggtggagcgcaatattaaagtaccgctgaccgaaccccagaaagcggggatcgcgtcattctgtccgtacaacattggtcccggtaagtgtttcccgtcgacgttttacagacgaattaatgcaggtgatcgcaggggagcgtgtgaggcgattcgctggtggattaaggacggtggcagagactgccgtattcgctcaaacaactgctacggtcaggtttcacggcgtgaccaggagagcgcgctggcgtgctggggaattgacagataa

SEQ ID NO: 153002 - protein, 177 aa, Escherichia coli O157:H7 EDL933
MNAKIRYGLSAAVLALIGAGASAPEILDQFLDEKEGNHTTAYRDGAGIWTICRGAILVDGKPVVPGMKLSKEKCDQVNAIERDKALEWVERNIKVPLTEPQKAGIASFCPYNIGPGKCFPSTFYRRINAGDRRGACEAIRWWIKDGGRDCRIRSNNCYGQVSRRDQESALACWGIDR

SEQ ID NO: 153003 - DNA, 534 bp, Escherichia coli O157:H7 EDL933
  CDS (1)..(534): transl_table=11
atgaacgcaaaaatcagatacggcctgtcggctgccgttctggcgctgattggtgcaggggcgtctgcgcctgaaatcctcgaccagtttctggatgaaaaggaaggtaaccacaccacagcataccgtgatggtgcgggtatctggaccatctgccgtggagccacccggggggatggtaagcctgttattcctggcatgaagctgtcgaaggaaaaatgcgaccgggttaacgccattgagcgtgataaggcgctggcatgggtggagaaaaacatcagagtgccgctgaccgaaccccagaaagcggggatcgcgtcattctgtccgtacaacattggccccggtaagtgtttcccgtcgacgttttacagacggattaatgcaggagatcgaaaaggtgcctgcgaagcgattcgctggtggattaaggacggtggcagggactgccgtattcgctcaaataactgttacggtcaggtatcccgtcgtgaccaggagagcgcgctggcgtgctggggaatcgacagataa

SEQ ID NO: 153004 - protein, 177 aa, Escherichia coli O157:H7 EDL933
MNAKIRYGLSAAVLALIGAGASAPEILDQFLDEKEGNHTTAYRDGAGIWTICRGATRGDGKPVIPGMKLSKEKCDRVNAIERDKALAWVEKNIRVPLTEPQKAGIASFCPYNIGPGKCFPSTFYRRINAGDRKGACEAIRWWIKDGGRDCRIRSNNCYGQVSRRDQESALACWGIDR

SEQ ID NO: 153005 - DNA, 534 bp, Escherichia coli O157:H7 EDL933
  CDS (1)..(534): transl_table=11
  misc_feature (173)..(173): k is g or t
  misc_feature (189)..(189): k is g or t
atgaacgcaaaaatcagatacggcctgtcggctgccgttctggcgctgattggtgcaggggcgtctgcgcctgaaatcctcgaccagtttctggatgaaaaggaaggtaaccacaccacagcataccgtgatggtgcgggtatctggaccatctgccgtggagccacccgggkggatggtaagcctgtkattcctggcatgaagctgtcgaaggaaaaatgcgaccgggttaacgccattgagcgtgataaggcgctggcatgggtggagaaaaacatcagagtgccgctgaccgaaccccagaaagcggggatcgcgtcattctgtccgtacaacattggccccggtaagtgtttcccgtcgacgttttacagacggattaatgcaggagatcgaaaaggtgcctgcgaagcgattcgctggtggattaaggacggtggcagggactgccgtattcgctcaaataactgttacggtcaggtatcccgtcgtgaccaggagagcgcgctggcgtgctggggaatcgacagataa

SEQ ID NO: 153006 - protein, 177 aa, Escherichia coli O157:H7 EDL933
  misc_feature (58)..(58): The Xaa at location 58 stands for Gly, or Val.
MNAKIRYGLSAAVLALIGAGASAPEILDQFLDEKEGNHTTAYRDGAGIWTICRGATRXDGKPVIPGMKLSKEKCDRVNAIERDKALAWVEKNIRVPLTEPQKAGIASFCPYNIGPGKCFPSTFYRRINAGDRKGACEAIRWWIKDGGRDCRIRSNNCYGQVSRRDQESALACWGIDR

SEQ ID NO: 153007 - DNA, 465 bp, Xylella fastidiosa 9a5c
  CDS (1)..(465): transl_table=11
ttggttgaaaagggtctcaaaggcgcaacgctcgtcttagcgattgccacgcccttcgtcgcgtactgggagggcttaaaacatcgtccctacaaagacatcgtcggcgtgtggaccgtgtgctacggccatacgggcgctaatgtcgtcatcggcaaaacctacaccgaggccgagtgcgatgccctgctccaagccgacctgcgtgaagccaatggctatgtgcggcgctgcatcagcgtccccatgctgccccacatcgaagcctccctcgtctccgccaccttcaacctcggccccaaagttgtctgtggcagcaccctacaacgcaaagccttagccaatgactggcccggtgcctgcgccgaactggaccgctggaaacatgccggaggccgcgaagtgcgtggcctggtattgcgccgtgccgatgaacgcgccttgtgcgaaggcagggcctcgtga

SEQ ID NO: 153008 - protein, 154 aa, Xylella fastidiosa 9a5c
MVEKGLKGATLVLAIATPFVAYWEGLKHRPYKDIVGVWTVCYGHTGANVVIGKTYTEAECDALLQADLREANGYVRRCISVPMLPHIEASLVSATFNLGPKVVCGSTLQRKALANDWPGACAELDRWKHAGGREVRGLVLRRADERALCEGRAS

SEQ ID NO: 153009 - DNA, 549 bp, Xylella fastidiosa 9a5c
  CDS (1)..(549): transl_table=11
ttggctcagaccgccttcgggcggttttttgcgttctggagtccccccatgcagaccattggcgaagaaggcattgcactcatcaagttttttgagggttgcaagttgaacccgtacacgtgtcctgggggagtattgaccattggctacggcgagacgggcaagcatgttaggcctgatatgcgtcttgccaatgagcaggaagccgatgcgcggttacgtgctcgattagccaaagagtttgaaccggctgtacggcgttatgtgcgtgtgccactcaagcaacagcagtttgatgcgttggtgtcgttgagcttcaacattggtacgggtgcgttccaccgctcgacgctgttacgcaagctcaatgccggtgatgtggctggtgcggcggagcagtttcatgtgtggaaatgggcggggggcagtatccagtcgggtttaatcatcagacgtgccgccgaacgtgcattgttcgaaggcggtgactggcgtgctgaagcggagaaacagcgtgccgctttgaagagcaagggccgccgtggttga

SEQ ID NO: 153010 - protein, 182 aa, Xylella fastidiosa 9a5c
MAQTAFGRFFAFWSPPMQTIGEEGIALIKFFEGCKLNPYTCPGGVLTIGYGETGKHVRPDMRLANEQEADARLRARLAKEFEPAVRRYVRVPLKQQQFDALVSLSFNIGTGAFHRSTLLRKLNAGDVAGAAEQFHVWKWAGGSIQSGLIIRRAAERALFEGGDWRAEAEKQRAALKSKGRRG

SEQ ID NO: 153011 - DNA, 495 bp, Xylella fastidiosa 9a5c
  CDS (1)..(495): transl_table=11
atgcagaccattggtgaagaaggtattgcactgatcaagttttttgagggttgcaagttgaacccgtacacctgtcctggtggcgtgttgacgattggctatggcgagacgggcaagcatgtgacgcctgatatgtgtcttgccaatgagcaggaagccgatgcgatgttacgtgcacgcttagccaaagagtttgaaccggcggtgcggcgtgatgtgcgtgtgccactgaagcaacagcagttcgatgcgttggtatcgctgagcttcaacattggtgcgggggcgttccaccgctcgaccttgctaaagcggctcaatgccggtgatgtggctggtgcgttggagcaatttcatgtgtggaaatgggcgggcggtcgtatgcagtctggtttaatcatcagacgtgccgccgaacgtgcattgtttgaaggcagtgactggcgtgctgaagagaagcaacggcgtgctgctttaaagggtcgccgtgattga

SEQ ID NO: 153012 - protein, 164 aa, Xylella fastidiosa 9a5c
MQTIGEEGIALIKFFEGCKLNPYTCPGGVLTIGYGETGKHVTPDMCLANEQEADAMLRARLAKEFEPAVRRDVRVPLKQQQFDALVSLSFNIGAGAFHRSTLLKRLNAGDVAGALEQFHVWKWAGGRMQSGLIIRRAAERALFEGSDWRAEEKQRRAALKGRRD

SEQ ID NO: 153013 - DNA, 453 bp, Salmonella typhimurium LT2
  CDS (1)..(453): transl_table=11
atgatgagaatcagtgaaaaaggcattaccctaatcaaagagtttgaaggttgtagcctgacagcttatccggacccgggaacggggggagatccctggacgattggttatggctggacccactctgttgacggtaagccagttaagcccggaatgatgattgacgaggctactgccgagcgcttgcttaacactggtttagtcggttatgaaaatgatgtgtccagactggttaaggtcaagttgacgcaaggccagtttgatgcgctggtgtcgttcgcgtacaacctcggcgcccggacattatcctcatcaactctgctgcggaagctaaacgctggtgattacgctggcgccgctgatgagttcctgcgctggaataaggctggtggcaaagtactgaacgggcttacccgtcggcgtgaggcggagcgtgctctgttcctgtcatga

SEQ ID NO: 153014 - protein, 150 aa, Salmonella typhimurium LT2
MMRISEKGITLIKEFEGCSLTAYPDPGTGGDPWTIGYGWTHSVDGKPVKPGMMIDEATAERLLNTGLVGYENDVSRLVKVKLTQGQFDALVSFAYNLGARTLSSSTLLRKLNAGDYAGAADEFLRWNKAGGKVLNGLTRRREAERALFLS

SEQ ID NO: 153015 - DNA, 453 bp, Salmonella typhimurium LT2
  CDS (1)..(453): transl_table=11
atgatgagaatcagtgaaaaaggcattaccctaatcaaagagtttgaaggttgtagcctgaaagcttatccggacccgggaacggggggagatccctggacgattggttatggctggacccactctgttgacggtaagccagttaagcccggaatgatgattgacgaggctactgccgagcgcttgcttaaaactggtttagtcggttatgaaaatgatgtgtccagactggttaaggtcaagttgacgcaaggccagtttgatgcgctggtgtcgttcgcgtacaacctcggcgcccggacattatccacatcaactctgctgcggaagctaaacgctggtgattacgctggcgccgctgatgagttcctgcgctggaataaggctggtagcaaggtactgaacgggcttacccgtcggcgtgaggcggagcgtgctctgttcctgtcatga

SEQ ID NO: 153016 - protein, 150 aa, Salmonella typhimurium LT2
MMRISEKGITLIKEFEGCSLKAYPDPGTGGDPWTIGYGWTHSVDGKPVKPGMMIDEATAERLLKTGLVGYENDVSRLVKVKLTQGQFDALVSFAYNLGARTLSTSTLLRKLNAGDYAGAADEFLRWNKAGSKVLNGLTRRREAERALFLS

SEQ ID NO: 153017 - DNA, 534 bp, Escherichia coli CFT073
  CDS (1)..(534): transl_table=11
atgaacgcaaaaatcagatacggcctgtcggctgccgttctggcactgattgccgtcggtgcgcctgcgcctgatattctcgaccagtttctggatgaaaaagaaggtaaccacacaacggcataccgcgatggttccggtatatggaccatctgtcgtggtgccacaatggtggatggtaagcccgtcataccgggaatgaggctgtcgaaggaaaaatgcgaccaggttaacgctattgaacgtgataaggcgctggcatgggtggagcgcaatattaaagtaccactgaccgaaccacagaaagcgggtatagcgtcattctgtccctataacattggccccggtaagtgtttcccgtcgacgttttataagcggctgaatgccggtgatcgtaagggcgcatgcgaggcgattcgctggtggataaaagatggtgggcgcgattgccgcatacgttcaaataactgctatggacaggttattcgtcgtgaccaggaaagcgcattagcctgttgggggatagatcagtga

SEQ ID NO: 153018 - protein, 177 aa, Escherichia coli CFT073
MNAKIRYGLSAAVLALIAVGAPAPDILDQFLDEKEGNHTTAYRDGSGIWTICRGATMVDGKPVIPGMRLSKEKCDQVNAIERDKALAWVERNIKVPLTEPQKAGIASFCPYNIGPGKCFPSTFYKRLNAGDRKGACEAIRWWIKDGGRDCRIRSNNCYGQVIRRDQESALACWGIDQ

SEQ ID NO: 153019 - DNA, 495 bp, Xylella fastidiosa Temecula1
  CDS (1)..(495): transl_table=11
atgcagaccattggtgaagaaggcattgcactgattaagttttttgagggttgcaagctgagctcgtatacctgtcctgggggtgtgttgacgattggctatggtgagacgggcaagcacgttacgcctgatatgtgtcttgccaatgagcaggaagcggatgcgcggttacgtgctcgattggccaaggagtttgaaccggcggtgcggcgttatgtgcgtgtgccactcaagcaacatcaatttgatgcgttggtatcgctgagcttcaacattggtgcgggcgcgttccaccgctcgacgctgttacgcaagcttaatgccggtgatattgctggtgcggcgcagcagtttcatgtgtggaaatgggcgggcggtcgtgtgcagtctggcttaatcatcaggcgtgccgccgaacgtgcattgtttgaaggcagtgactggcgtgctgaagagaagcaacggcgtgccgctttaaagggtcgccgtgattga

SEQ ID NO: 153020 - protein, 164 aa, Xylella fastidiosa Temecula1
MQTIGEEGIALIKFFEGCKLSSYTCPGGVLTIGYGETGKHVTPDMCLANEQEADARLRARLAKEFEPAVRRYVRVPLKQHQFDALVSLSFNIGAGAFHRSTLLRKLNAGDIAGAAQQFHVWKWAGGRVQSGLIIRRAAERALFEGSDWRAEEKQRRAALKGRRD

SEQ ID NO: 153021 - DNA, 534 bp, Shigella flexneri 2a str. 2457T
  CDS (1)..(534): transl_table=11
atgagcgcaaaaatcaaatacggcctgtcggctgctgttctggcgctgattgccgcaggcgcgtctgctccccagatacttgaccagtttctgaacgaaaaagagggtaatcacacaacggcataccgtgatggttctggcatatggaccatctgtcgtggtgccacaatggtggatggtaagcctgtcataccgggaatgaagctgtcgaaggaaaaatgtgaccaggttaacgctattgaacgtgataaggcgctggcatgggtggagcgcaatattaaagtacctctgaccgaaccccagaaagcgggtatagcgtcattttgcccctataacattggccccggtaagtgtttcccgtcgacgttttataagcggctgaatgccggtgatcgtaagggcgcatgcgaggcgattcgctggtggataaaagatgttgggcgcgattgccgcatacgttcaaataactgctatggacaggttattcgtcgtgaccaggaaagcgcattagcctgttgggggatagatcaatga

SEQ ID NO: 153022 - protein, 177 aa, Shigella flexneri 2a str. 2457T
MSAKIKYGLSAAVLALIAAGASAPQILDQFLNEKEGNHTTAYRDGSGIWTICRGATMVDGKPVIPGMKLSKEKCDQVNAIERDKALAWVERNIKVPLTEPQKAGIASFCPYNIGPGKCFPSTFYKRLNAGDRKGACEAIRWWIKDVGRDCRIRSNNCYGQVIRRDQESALACWGIDQ

SEQ ID NO: 153023 - DNA, 537 bp, Photorhabdus luminescens subsp. laumondii TTO1
  CDS (1)..(537): transl_table=11
atgacaaagaccagtaagttaagtgctgcggttatcggtctggttctttctggtgcaggtgccacggcgatattgtctcagttcttggacgagaaagagggtaaccggctatcagcgtatcaagatgcggggggagtctggacaatctgccgaggtgttactcggattgatggaactcccgctcgtcaggggatgaggttaatgccgaatcagtgccgtgacctcaatgcacaagaagcaaagcaggctattgcatgggtaaaacgcaatgtgcgggtgccattaactgaacctcagatagcaggtattgccagcttttgcccatataacattggcccatcgaaatgcttctcttccacattctatagaaagctgaatgccggagataagaaaggcgcttgtgctgagataaaacgttgggtatttgataatggtcgagactgtcgacagaccaaagggcaggcaaacggctgttatggtcaagttgagcgacgtgcccaggaatcggaattaacttgctgggggctggatgaatag

SEQ ID NO: 153024 - protein, 178 aa, Photorhabdus luminescens subsp. laumondii TTO1
MTKTSKLSAAVIGLVLSGAGATAILSQFLDEKEGNRLSAYQDAGGVWTICRGVTRIDGTPARQGMRLMPNQCRDLNAQEAKQAIAWVKRNVRVPLTEPQIAGIASFCPYNIGPSKCFSSTFYRKLNAGDKKGACAEIKRWVFDNGRDCRQTKGQANGCYGQVERRAQESELTCWGLDE

SEQ ID NO: 153025 - DNA, 663 bp, Bartonella quintana str. Toulouse
  CDS (1)..(663): transl_table=11
atgcgaaaaatatcacaagaaggacttgcactgattaaacagtgggaaggattgcgcttaaacgcctatcaagatgctgtcggtctatggacaataggttacggccataccagtgatgctggaaaaccttctgttcgcaaaggcatgaagatcacagaaaagcaagctgcagaatttctttgtcaagacttgcaacaatttgaaaatgctgttgagcaagctgtcactgttcctttaacagatgaacaattcgccgcattagtgtccttttgttataatgtaggaacgacagcattttgcaattctatgcttttaaaaaagcttaacaagggtgactatgaagcggttccagtcgaattacagaaatggaccaaagcaggtgggaaacgtcttcaaggtcttgtcaataggcgtgcagccgaagcaggattatgggcaaaagggtcttatgtttcttctaacactcaaacagtggaaataaaagtatcaacggggtttttaaaagcagaagcccttgcaccaattattggttctttttctgggtttggagcctttttagccggcaatggtcctgtccaatgggccttagctcttgtgatgattttagcagcatgtgtcggcattgtctttgttgctaaacgctttcaggagcaacgcttatga

SEQ ID NO: 153026 - protein, 220 aa, Bartonella quintana str. Toulouse
MRKISQEGLALIKQWEGLRLNAYQDAVGLWTIGYGHTSDAGKPSVRKGMKITEKQAAEFLCQDLQQFENAVEQAVTVPLTDEQFAALVSFCYNVGTTAFCNSMLLKKLNKGDYEAVPVELQKWTKAGGKRLQGLVNRRAAEAGLWAKGSYVSSNTQTVEIKVSTGFLKAEALAPIIGSFSGFGAFLAGNGPVQWALALVMILAACVGIVFVAKRFQEQRL

SEQ ID NO: 153027 - DNA, 666 bp, Bartonella henselae str. Houston-1
  CDS (1)..(666): transl_table=11
atggcacgaaaaatcaataaaaattgtctcaattatttaaagaaatgggaagggctacggctccatgcttatagagatgcttctggtgtttggacgataggatatggtcatacagaaaaagcgggtaagccgatagttgttgaaggcatggtcattacggaaaaaagagcggaaattcttcttttggaagacttgcgtcaatatgagcgggcggtagaaaaagcggtttatgttgacttaagtgacgagcagtttggtgctcttgtttccttttgttataatatagggatcatagctttccaaaattctacattacttaaaaagctgaataaaggcgattatgaatctgtacccattgaattgcagaaatggactagagcaggaggaaagcgtttaaaaggcttagtccaccgtcgtgcagcagaagcagggttgtgggcgaaaggcgcgtttgtttcctccaactatcagacggtagaaaaaaagcatgcaacagggcttttcaaagccgaagcccttgcaccagtcattggatctttctcaggtcttagtggttttttagcgggcaatggtcccatccaatgggctttcgctgccgttatggtttttgctgcctgtgctggcattttcttcgtggctaagcgttttcaggagcactgcctatga

SEQ ID NO: 153028 - protein, 221 aa, Bartonella henselae str. Houston-1
MARKINKNCLNYLKKWEGLRLHAYRDASGVWTIGYGHTEKAGKPIVVEGMVITEKRAEILLLEDLRQYERAVEKAVYVDLSDEQFGALVSFCYNIGIIAFQNSTLLKKLNKGDYESVPIELQKWTRAGGKRLKGLVHRRAAEAGLWAKGAFVSSNYQTVEKKHATGLFKAEALAPVIGSFSGLSGFLAGNGPIQWAFAAVMVFAACAGIFFVAKRFQEHCL

SEQ ID NO: 153029 - DNA, 663 bp, Bartonella henselae str. Houston-1
  CDS (1)..(663): transl_table=11
atgcgaaaaatatcaaaagaaggacttgcgctgattaaacaatgggaaggattacgtttgagcgcctatcaagattctattggtgtatggacaatcggttatggccatacaaagagtgctggaaaaccctttgtgcgcaaaggcatgacaatcactgaaaagcaagccgaagaacttctttgtcgagacttgcaacaatttgaaaacgctgttgagcaagctgtcactgtttctttaacagatgaacaattcgcagcgttagtttcgttttgttataatgtaggaacaacagctttttgcaactcgacactcttaaagaaactcaataatggtgattatgaagcaatcccaaccgaattacagaaatggaccaaagcaggaggcaaacgtcttcaaggtctcgtcaatagacgtgcagcagaaacagggttatgggcgaagcgctcttatgtttcttccaacactcaaaaagtagaaatgaaagatgcaacaggtcttttcaaattagaagcgcttgcaccaattataggctccgcttcagggcttggaggcttgttaacagtcaatggtccggtccaatgggcattggcaacggtgatgattatagctgcctgtgctggaattttcttcgttgcgaaacgctttcaggagcatcgtctatga

SEQ ID NO: 153030 - protein, 220 aa, Bartonella henselae str. Houston-1
MRKISKEGLALIKQWEGLRLSAYQDSIGVWTIGYGHTKSAGKPFVRKGMTITEKQAEELLCRDLQQFENAVEQAVTVSLTDEQFAALVSFCYNVGTTAFCNSTLLKKLNNGDYEAIPTELQKWTKAGGKRLQGLVNRRAAETGLWAKRSYVSSNTQKVEMKDATGLFKLEALAPIIGSASGLGGLLTVNGPVQWALATVMIIAACAGIFFVAKRFQEHRL

SEQ ID NO: 153031 - DNA, 489 bp, Yersinia pseudotuberculosis IP 32953
  CDS (1)..(489): transl_table=11
atggcaatgtcccccgcgttgcgcaagaaagtcatgggtgcggcaatcggcggtgcaatggcaatagcaatcgccatggtgggcggcagcgatggtctggaagggcgcgaatataccccttatcgtgatgtggttggcgtgctaacggtatgcgatggtcataccggcaaagatattattcccagcaaacgttatagcgatgctgaatgtgatgctttgctacaccaagatctgatccccgtatttgccaccattgaccgcatcgttaacgttccaatgcctgatttccgcaaagccgcattggcatcatttggctacaacgttggtattactgcaatgacccattcaaccatggtgaaaaagctcaaccgtggcgacacttctggcgcgtgcgatgagctccgcagatggattaaggcaggtggcaaggtctggaaggggttagtgaatcgccgtgaagtcgagcgcgaattatgcctgatgccataa

SEQ ID NO: 153032 - protein, 162 aa, Yersinia pseudotuberculosis IP 32953
MAMSPALRKKVMGAAIGGAMAIAIAMVGGSDGLEGREYTPYRDVVGVLTVCDGHTGKDIIPSKRYSDAECDALLHQDLIPVFATIDRIVNVPMPDFRKAALASFGYNVGITAMTHSTMVKKLNRGDTSGACDELRRWIKAGGKVWKGLVNRREVERELCLMP

SEQ ID NO: 153033 - DNA, 438 bp, Enterobacteria phage ES18
  CDS (1)..(438)
atgcaaatcagcagtaacggaatcaccagattaaaacgtgaagaaggcgaaagactaaaagcctatccagatagcagggggataccaaccattggggttgggcataccggaaaagtggatggtaaacctgtcgtatcagggatgacaatcacagccgaaaaatcttctgagttgctcaaagaggatttgcagtgggttgaagatgcgataagtagtcttgttcgcgtcccgctaaatcagaaccagtatgatgcgctatgtagccttatattcaatataggaaaatcagcatttgccggctctaccgttctacgccagttgaatttaaagaattaccaggcagcagcagatgctttcctgttatggaaaaaagctggtaaagaccctgatattctccttcctcggaggcggcgagaaagagcgctgttcttatcgtga

SEQ ID NO: 153034 - protein, 145 aa, Enterobacteria phage ES18
MQISSNGITRLKREEGERLKAYPDSRGIPTIGVGHTGKVDGKPVVSGMTITAEKSSELLKEDLQWVEDAISSLVRVPLNQNQYDALCSLIFNIGKSAFAGSTVLRQLNLKNYQAAADAFLLWKKAGKDPDILLPRRRRERALFLS

SEQ ID NO: 153035 - DNA, 498 bp, Burkholderia thailandensis E264
  CDS (1)..(498): transl_table=11
atggctaagttgccgaagaagacgctcgccggcgtcgtcggcgcgatcgcggccggtgtgctgacggtgatcgtgccgaagttcgagggcgtcaagctggcgggctacctcgatccggtcggcattccgacgaagtgcatgggcgacacgcgcgacgtcatcgttggcaggacatacagcgaggccgagtgtcgccagtcgctcgaaacgcaattgatcgcgcacgctgaacccgtgctgcgttgcacgccggggctgaaagatcgtccgtatcagctcgcggcggccgtcagctttgcatacaacgtcggcgcgaacgcctactgcgccagcacgacggcgaggcgcttcaacgcgggcgacctgcgcggcgcgtgccgcgcgatcaacgaagccgacgacggccgcccgcaatgggtaacggcgcggggccgggtgttgcccggtttggtgaagcggcgggcggaagagcgcgcgatttgcgagcgggggctgtga

SEQ ID NO: 153036 - protein, 165 aa, Burkholderia thailandensis E264
MAKLPKKTLAGVVGAIAAGVLTVIVPKFEGVKLAGYLDPVGIPTKCMGDTRDVIVGRTYSEAECRQSLETQLIAHAEPVLRCTPGLKDRPYQLAAAVSFAYNVGANAYCASTTARRFNAGDLRGACRAINEADDGRPQWVTARGRVLPGLVKRRAEERAICERGL

SEQ ID NO: 153037 - DNA, 537 bp, Haemophilus somnus 2336
  CDS (1)..(537): transl_table=11
atgaataaattcacaaaatgggggacaggggctatttgtagcgtagttgccattattgcccttgtcaaaacaaaccatcaagagttacgcataagtcaacaaggcttagaccttataggaaatgtagaaggttgcagaagagacccctatcactgccccgccgacgtcttaacggtgggcataggctccacggaagcaaacggaaaaaacattgaccccaaaaaacgttatagcgacaaagaaatagcccaacgatgggcatatgatttacgcctggcggaacaatgcgtaaaccgctatggaaacggcaaaaatctaccgcaaggggcgtttgatgcctttgtttccattacctttaatgtaggatgtggaaaaatgcaaaaaagcaccttatttaaacaagcaaaccaaggctttacccctcaactctgtcaccagtttgaacgctggatttacgcaggcggaaaaaaattaaacggcttagtagcacgcagagcaaaagaaaaagccttctgtttaggtgaataccatgattaa

SEQ ID NO: 153038 - protein, 178 aa, Haemophilus somnus 2336
MNKFTKWGTGAICSVVAIIALVKTNHQELRISQQGLDLIGNVEGCRRDPYHCPADVLTVGIGSTEANGKNIDPKKRYSDKEIAQRWAYDLRLAEQCVNRYGNGKNLPQGAFDAFVSITFNVGCGKMQKSTLFKQANQGFTPQLCHQFERWIYAGGKKLNGLVARRAKEKAFCLGEYHD

SEQ ID NO: 153039 - DNA, 501 bp, Xylella fastidiosa Ann-1
  CDS (1)..(501): transl_table=11
atgcagaccattggtgaagaaggcattgcactgattaagttttttgagggttgcaagctgagctcgtatacctgtcctgggggagtgttgacgattggctatggtgagacgggcaagcacgttacgcctgatatgtgtcttgccaatgagcaggaagccgatgcgatgttacgtgctcgattagccaaagagtttgagccagcggtgcggcgttatgtgcgtgtgccgctcaagcaacagcagttcgatgcgttggtatcgctgagcttcaatattggtgcgggggcgttccaccgctcgacgctgttacgcaagctcaatgccggtgatgttgctggtgcggcgcagcagtttcatgtgtggaaatgggcgggcggtcgtgtgcagtctggtttaatcatcaggcgtgccgccgaacgtgtgttatttgaatatggtgactggcgtgccgaagcggagaaacagcgtgccgctttgaagagcaagggtcgccgtgattga

SEQ ID NO: 153040 - protein, 166 aa, Xylella fastidiosa Ann-1
MQTIGEEGIALIKFFEGCKLSSYTCPGGVLTIGYGETGKHVTPDMCLANEQEADAMLRARLAKEFEPAVRRYVRVPLKQQQFDALVSLSFNIGAGAFHRSTLLRKLNAGDVAGAAQQFHVWKWAGGRVQSGLIIRRAAERVLFEYGDWRAEAEKQRAALKSKGRRD

SEQ ID NO: 153041 - DNA, 582 bp, Xylella fastidiosa Ann-1
  CDS (1)..(582): transl_table=11
atgcctagaacgcgtccatcactgcgcaccctgagaaggctgatgggcaaaggcatcaaaggcaccgcactggtgttggcgatgaccacgccctctggactgcgcacccttggatctctggtgggcaaaggcctcaaaggcgcaacgctcgtcttagcgattgccacacccttcgtcgcctactgggagggcttaaaacatcgtccctacaaagacatcgtcggcgtgtggaccgtgtgctacggccatacgggcgccgatgtggtcatcggaaaaacctacaccgaggcggagtgcgatgccctgctccaagccgacctgcgtgaagccaatggctatgtgcggcgctgcatcagcgtccccatgctgccccacatcgaagcctccctcgtctcggccaccttcaaccttggccccaaagttgtctgcggcagcactctgcaacgtaaagccttagccaatgactggcccggtgcctgcgccgaactggaccgttggaaacatgccggaggccgcgaagtgcgtggcctggtattgcgccgtgccgatgaacgcgccttgtgcgaaggcagggcctcgtga

SEQ ID NO: 153042 - protein, 193 aa, Xylella fastidiosa Ann-1
MPRTRPSLRTLRRLMGKGIKGTALVLAMTTPSGLRTLGSLVGKGLKGATLVLAIATPFVAYWEGLKHRPYKDIVGVWTVCYGHTGADVVIGKTYTEAECDALLQADLREANGYVRRCISVPMLPHIEASLVSATFNLGPKVVCGSTLQRKALANDWPGACAELDRWKHAGGREVRGLVLRRADERALCEGRAS

SEQ ID NO: 153043 - DNA, 582 bp, Xylella fastidiosa Ann-1
  CDS (1)..(582): transl_table=11
atgcctgaccggcgtccatcactgcgcgccctgagaaggctgatgggcaaaggccttaaaggcaccgcactggtgttggcgatgaccatgccctctggactgcgcacccttggatctctggtgggcaaaggcctcaaaggcaccacactggtgttagcgattgccaccccctttgttgcctattgggaaggcttaaaatatcacccctacaaagacatcgtgggcgtgtggaccgtgtgctacggccatacgggcgccgatgtggttatcggaaaaacctacaccgaggctgagtgcgatgccctgctccaagccgacctgcgtgaagccaatggttacgtgcggcgctgcatcagcgtccccatgctgccccacatcgaagcctcccttgtctcagccaccttcaaccttggcccccaagttgtctgcggcagcaccctacaacgtaaagccttagccaatgactggcccggcgcctgtgccgaactggaccgctggaaacacgccgcaggccgcgaagtgcgtggcctggtattacgccgtgccgatgaacgcgccttgtgcgaaggcagggcctcgtga

SEQ ID NO: 153044 - protein, 193 aa, Xylella fastidiosa Ann-1
MPDRRPSLRALRRLMGKGLKGTALVLAMTMPSGLRTLGSLVGKGLKGTTLVLAIATPFVAYWEGLKYHPYKDIVGVWTVCYGHTGADVVIGKTYTEAECDALLQADLREANGYVRRCISVPMLPHIEASLVSATFNLGPQVVCGSTLQRKALANDWPGACAELDRWKHAAGREVRGLVLRRADERALCEGRAS

SEQ ID NO: 153045 - DNA, 501 bp, Xylella fastidiosa Ann-1
  CDS (1)..(501): transl_table=11
atgcagaccattggtgaagaaggcattgcactcatcaagttttttgagggtttgcggttgcaggcgtacatatgcgaaggcggtgcgctgacgattggttatggcgagacgggcaagcatgttacgcctgatatgtgtcttgccaatgagcaggaagccgatgcgatgttacgtgctcgattagccaaagagtttgaaccggctgtacggcgttatgtgcgtgtgccactcaagcaacagcagttcgatgcgttggtatcgctgagcttcaatattggtgtgggcgcgtttcaccgctcgacgctgttacgcaagcttaatgccggtgatgttgctggcgcggcggagcagtttcatgtgtggaaatgggcgggcggtcgtgtgcagtctggtttaattgtcaggcgtgccgccgaacgtgtgttatttgaatatggtgactggcgtgccgaagcggagaaacagcgtgccgctttgaagagcaagggccgccgtggttga

SEQ ID NO: 153046 - protein, 166 aa, Xylella fastidiosa Ann-1
MQTIGEEGIALIKFFEGLRLQAYICEGGALTIGYGETGKHVTPDMCLANEQEADAMLRARLAKEFEPAVRRYVRVPLKQQQFDALVSLSFNIGVGAFHRSTLLRKLNAGDVAGAAEQFHVWKWAGGRVQSGLIVRRAAERVLFEYGDWRAEAEKQRAALKSKGRRG

SEQ ID NO: 153047 - DNA, 495 bp, Xylella fastidiosa Ann-1
  CDS (1)..(495): transl_table=11
atgcagaccattggtgaagaaggcattgcactcatcaagttttttgagggttgcaagctgagcccgtacacctgttctggtggtgtgttgacgattggttatggcgagacgggcaagcatgttacgcctgatatgtgtcttgccaatgagcaggaagcggatgcgatattacgtgctcgattagccaaagagtttgaagcggctgtacggcgttatgtgcgtgtgccactcaagcaacagcagttcgatgcgttggtatcgctgagcttcaatattggtgtgggcgcgtttcaccgctcgacgctgttacgcaagcttaatgccggtgatgttgctggcgcggcggagcagtttcatgtgtggaaatgggcgggcggtcgtgtgcagtctggtttaattgtcaggcgtgccgccgaacgtgtgttatttgaatatggtgactggcgtgccgaagcggagaaacggcgtgctgctttaaagggtcgccgtgattga

SEQ ID NO: 153048 - protein, 164 aa, Xylella fastidiosa Ann-1
MQTIGEEGIALIKFFEGCKLSPYTCSGGVLTIGYGETGKHVTPDMCLANEQEADAILRARLAKEFEAAVRRYVRVPLKQQQFDALVSLSFNIGVGAFHRSTLLRKLNAGDVAGAAEQFHVWKWAGGRVQSGLIVRRAAERVLFEYGDWRAEAEKRRAALKGRRD

SEQ ID NO: 153049 - DNA, 501 bp, Xylella fastidiosa Ann-1
  CDS (1)..(501): transl_table=11
atgcagaccattggtgaagaaggcattgcactcatcaagttttttgagggtttgcggttgcaggcgtacatatgcgaaggcagtgcgctgacgattggttacggcgagacgggcaagcatgtgacgcctgatatgtgtcttgccaatgagcaggaagccgatgcgatgttacgtgctcgattagccaaagagtttgaaccggctgtacggcgttatgtgcgtgtgccactcaagcaacatcaatttgatgcgttggtatcgctgagcttcaacattggtgtgggcgcgtttcaccgctcgaccttgctaaagcggctcaatgccggtgatgttgctggcgcggcggagcagtttcatgtgtggaaatgggcgggcggtcgtgtgcagtctggtttaatcatcagacgtgccgccgaacgtgtgttatttgaatatggtgactggcgtgccgaagcggagaaacagcgtgctgctttgaagagcaagggccgccgtgattga

SEQ ID NO: 153050 - protein, 166 aa, Xylella fastidiosa Ann-1
MQTIGEEGIALIKFFEGLRLQAYICEGSALTIGYGETGKHVTPDMCLANEQEADAMLRARLAKEFEPAVRRYVRVPLKQHQFDALVSLSFNIGVGAFHRSTLLKRLNAGDVAGAAEQFHVWKWAGGRVQSGLIIRRAAERVLFEYGDWRAEAEKQRAALKSKGRRD

SEQ ID NO: 153051 - DNA, 495 bp, Xylella fastidiosa Ann-1
  CDS (1)..(495): transl_table=11
atgcagaccattggtgaagaaggcattgcactgatcaagttttttgagggtttgcggttacaggcgtacatatgcgaaggcggtgcgctgacgattggttacggcgagacgggcaagcatgtgacgccagatatgtgtcttgccaatgagcaggaagccgatgcgatgttacgtgctcgattagccaaagagtttgaaccggctgtacggcgttatgtgcgtgtgccactcaagcaacagcagttcgatgcgctggtatcgctgagcttcaacattggtgcgggcgcgttccaccgttcgacgctgttacgcaagcttaatgccggtgatgttgctggtgcggcgcagcagtttcatgtgtggaaatgggcgggcggtcgtgtgcagtctggtttaatcatcaggcgtgccgccgaacgtgcattgtttgaaggcggtgactggcgtgctgaagagaagaaacggcgtgctgctttaaagggtcgccgtgattga

SEQ ID NO: 153052 - protein, 164 aa, Xylella fastidiosa Ann-1
MQTIGEEGIALIKFFEGLRLQAYICEGGALTIGYGETGKHVTPDMCLANEQEADAMLRARLAKEFEPAVRRYVRVPLKQQQFDALVSLSFNIGAGAFHRSTLLRKLNAGDVAGAAQQFHVWKWAGGRVQSGLIIRRAAERALFEGGDWRAEEKKRRAALKGRRD

SEQ ID NO: 153053 - DNA, 501 bp, Xylella fastidiosa Ann-1
  CDS (1)..(501): transl_table=11
atgcagaccattggtgaagaaggcattgcactgattaagttttttgagggttgcaagctgatcccttacacctgtcctgggggagtattgacgattggctatggtgagacgggtaagcacgtcgtaccagggttgcggcttaccaatgagcaggaagcagatgcgcggttacgtgctcgattagccaaagagtttgaaccggctgtacggcgttatgtgcgtgtgccactcaagcaacagcagttcgatgcgttggtatcgctgagcttcaatattggtgtgggcgcgtttcaccgctcgacgctgttacgcaagctcaatgctggtgatattgctggtgcggcggagcagtttcatgtgtggaaatgggcgggcggtcgtgtgcagtctggtttaattatcaggcgtgccgccgaacgtgtgttatttgaatatggtgactggcgtgccgaagcggagaaacagcgttccgctttgaagagcaagggtcgccgtgattga

SEQ ID NO: 153054 - protein, 166 aa, Xylella fastidiosa Ann-1
MQTIGEEGIALIKFFEGCKLIPYTCPGGVLTIGYGETGKHVVPGLRLTNEQEADARLRARLAKEFEPAVRRYVRVPLKQQQFDALVSLSFNIGVGAFHRSTLLRKLNAGDIAGAAEQFHVWKWAGGRVQSGLIIRRAAERVLFEYGDWRAEAEKQRSALKSKGRRD

SEQ ID NO: 153055 - DNA, 495 bp, Xylella fastidiosa Ann-1
  CDS (1)..(495): transl_table=11
atgcagaccattggtgaagaaggcattgcactgattaagttttttgagggttgcaaactgaacccgtacacctgccctgggggggtattaaccattggctatggcgagacgggcaagcacgttacgcctgatatgtgtcttaccaatgagcaggaagcggatgcgatgttacgtgctcgattagccaaagagtttgaaccggctgtaaggcgttatgtgcgtgtgccactcaagcaacagcagttcgatgcgttggtatcgctgagcttcaacattggtgcgggcgcgttccaccgctcgacgctgttatgcaagcttaatgccggtgatgttgctggtgcggcgcagcagtttcatgtgtggaaatgggcgggcggtcgtgtgcagtcgggtttaatcatcaggcgtgccgccgaacgtgcattgtttgaaggcagtgactggcgtgctgaagagaagcaacggcgtgccgctttaaagggtcgccgtgattga

SEQ ID NO: 153056 - protein, 164 aa, Xylella fastidiosa Ann-1
MQTIGEEGIALIKFFEGCKLNPYTCPGGVLTIGYGETGKHVTPDMCLTNEQEADAMLRARLAKEFEPAVRRYVRVPLKQQQFDALVSLSFNIGAGAFHRSTLLCKLNAGDVAGAAQQFHVWKWAGGRVQSGLIIRRAAERALFEGSDWRAEEKQRRAALKGRRD

SEQ ID NO: 153057 - DNA, 900 bp, Sulfitobacter sp. EE-36
  CDS (1)..(900): transl_table=11
atgaaattcgtgccggatgtctggggggtgctcgggcgctcctattctatgtggtcgatctatctcgggctgatctgcctgatcctgcctaatgtgctctgggggctctggcgcattgaggcggatccgtacccgatcgggtgggcggcgctggtgtttttgatcgctggcctgttcgggcggatcatcgaccaaaagcgcagcggggcgatcgcgcggcttgtgttcctgggggcgtttggctttggcgcgctaatgctggggctatccttgggcggggccgtggccgaggatctctatctccccgagcagacatcgacggcgatcgagcctgacgaacaggcgcaagttcgcgagggcgggctgatctgggggcaggcgtcgatcgtgccggtgatggccgagcggctggatccgcagcccgtggcgtcgggtctggcatcggcggcggcctttctcgaggtggcggtgccctatgttggcaaatgggaggggctgcgactggccgcataccgcgatatcgtcggggtctggacggtctgttatggcgagacaaagggggtcaagccgggcgatcgctataccaaggcgcaatgcgacgccatgcttgcgcgcgagctgatcagctaccgcacgcggttgcaccgctatttcacgcgcgagacgctggccggccggctgccggtgcatcgagatacggcttacacaagccttgcctacaatgtcggcgtcgggggcgctggcgggtcaacggcggtgcgccggttgaatggcggggatatcgtcggcggatgcaaggcaatcacctggtgggatagggccggcaatcgggtggtgcgcgggctgactttgcgccggggcgaagattacgcgctttgcatgttcggggtggtcgcatga

SEQ ID NO: 153058 - protein, 299 aa, Sulfitobacter sp. EE-36
MKFVPDVWGVLGRSYSMWSIYLGLICLILPNVLWGLWRIEADPYPIGWAALVFLIAGLFGRIIDQKRSGAIARLVFLGAFGFGALMLGLSLGGAVAEDLYLPEQTSTAIEPDEQAQVREGGLIWGQASIVPVMAERLDPQPVASGLASAAAFLEVAVPYVGKWEGLRLAAYRDIVGVWTVCYGETKGVKPGDRYTKAQCDAMLARELISYRTRLHRYFTRETLAGRLPVHRDTAYTSLAYNVGVGGAGGSTAVRRLNGGDIVGGCKAITWWDRAGNRVVRGLTLRRGEDYALCMFGVVA

SEQ ID NO: 153059 - DNA, 432 bp, Pseudomonas putida GB-1
  CDS (1)..(432): transl_table=11
atgcggacatcgcaacgcggcttgagcctcatcaagtcgttcgagggcctgcgtctgcaggcatatcaagattcagtaggcgtctggacgattggctacgggaccactcgtggcgtgaaggccggcatgaaaatcagcaaggaccaggcagagcgcatgctgctgaacgacgtgcagcgcttcgagcctgaagttgagcgcctgatcaaggtgccgctgaatcaggatcagtgggacgccctgatgagcttcacctacaacctgggggcggcaaacctcgaatcgtccacgctccgccgactgctcaatgctggcaactacgcagctgctgctgagcagttcccgcgctggaacaaggctggcgggcaagtacttgccggcctaacccgtcggcgtgcagctgagcgggagctgttcctgggggccgcgtga

SEQ ID NO: 153060 - protein, 143 aa, Pseudomonas putida GB-1
MRTSQRGLSLIKSFEGLRLQAYQDSVGVWTIGYGTTRGVKAGMKISKDQAERMLLNDVQRFEPEVERLIKVPLNQDQWDALMSFTYNLGAANLESSTLRRLLNAGNYAAAAEQFPRWNKAGGQVLAGLTRRRAAERELFLGAA

SEQ ID NO: 153061 - DNA, 537 bp, Haemophilus somnus
  CDS (1)..(537): transl_table=11
atgaataaattcacaaaatgggggacaggggctatttgtagcgtagttgccattattgcccttgtcaaagcaaaccatcaagagttacgcataagtcaacaaggcttagaccttataggaaatgtagaaggttgcagaagagacccctatcactgccccgccgacgtcttaacggtgggcataggctccacggaagcaaacggaaaaaacattgaccctaaaaaacgttatagcgacaaagaaatagcccaaagatgggcatatgatttacgcctggcggaacaatgcgtaaaccgctatggaaacggcaaaaatctaccgcaaggggcgtttgatgcctttgtttccattacctttaatgtaggatgtggaaaaatgcaaaaaagcaccttatttaaacaagcaaaccaaggctttacccctcaactctgtcaccagtttgaacgctggatttacgcaggcggaaaaaaattaaacggcttagtagcacgcagagcaaaagaaaaagccctctgtttaggtgaataccatgattaa

SEQ ID NO: 153062 - protein, 178 aa, Haemophilus somnus
MNKFTKWGTGAICSVVAIIALVKANHQELRISQQGLDLIGNVEGCRRDPYHCPADVLTVGIGSTEANGKNIDPKKRYSDKEIAQRWAYDLRLAEQCVNRYGNGKNLPQGAFDAFVSITFNVGCGKMQKSTLFKQANQGFTPQLCHQFERWIYAGGKKLNGLVARRAKEKALCLGEYHD

SEQ ID NO: 153063 - DNA, 441 bp, Enterobacteria phage ES18
  CDS (1)..(441): transl_table=11
atgatgcaaatcagcagtaacggaatcaccagattaaaacgtgaagaaggcgaaagactaaaagcctatccagatagcagggggataccaaccattggggttgggcataccggaaaagtggatggtaaacctgtcgtatcagggatgacaatcacagccgaaaaatcttctgagttgctcaaagaggatttgcagtgggttgaagatgcgataagtagtcttgttcgcgtcccgctaaatcagaaccagtatgatgcgctatgtagccttatattcaatataggaaaatcagcatttgccggctctaccgttctacgccagttgaatttaaagaattaccaggcagcagcagatgctttcctgttatggaaaaaagctggtaaagaccctgatattctccttcctcggaggcggcgagaaagagcgctgttcttatcgtga

SEQ ID NO: 153064 - protein, 146 aa, Enterobacteria phage ES18
MMQISSNGITRLKREEGERLKAYPDSRGIPTIGVGHTGKVDGKPVVSGMTITAEKSSELLKEDLQWVEDAISSLVRVPLNQNQYDALCSLIFNIGKSAFAGSTVLRQLNLKNYQAAADAFLLWKKAGKDPDILLPRRRRERALFLS

SEQ ID NO: 153065 - DNA, 498 bp, Escherichia coli
  CDS (1)..(498): transl_table=11
atgcctccatcattacgaaaagccgttgctgctgctattggtggcggagcaattgctatagcatcagtgttaatcactggcccaagtggtaacgatggtctggaaggtgtcagctacataccatacaaagatattgttggtgtatggactgtatgtcacggacacaccggaaaagacatcatgctcggtaaaacgtataccaaagcagaatgcaaagcactcttgaataaagaccttgccactgtcgccagacaaattaacccgtatatcaaagtcgatataccggaaacaacgcgcggcgctctttactcattcgtttacaacgtgggtgctggcaattttagaacatcgacgcttcttcgcaaaataaaccagggcgatatcaaaggcgcatgtgatcagctgcgtcgctggacatacgctggcggtaagcaatggaaaggcctgatgactcgtcgtgagattgagcgtgaagtctgtttgtgggggcaacagtga

SEQ ID NO: 153066 - protein, 165 aa, Escherichia coli
MPPSLRKAVAAAIGGGAIAIASVLITGPSGNDGLEGVSYIPYKDIVGVWTVCHGHTGKDIMLGKTYTKAECKALLNKDLATVARQINPYIKVDIPETTRGALYSFVYNVGAGNFRTSTLLRKINQGDIKGACDQLRRWTYAGGKQWKGLMTRREIEREVCLWGQQ

SEQ ID NO: 153067 - DNA, 25 bp, Artificial sequence
  primer
atgaacacaaaaatcagatacggcc

SEQ ID NO: 153068 - DNA, 24 bp, Artificial sequence
  primer
ttactgttctatcccccagcaggt

SEQ ID NO: 153069 - protein, 155 aa, Artificial sequence
  consensus sequence
  Variant (3)..(7): Xaa in position 3 to 7 is any amino acid
  Variant (9)..(12): Xaa in position 9 to 12 is any amino acid
  Variant (13)..(13): Xaa in position 13 is any or no amino acid
  Variant (15)..(16): Xaa in position 15 to 16 is any amino acid
  Variant (17)..(18): Xaa in position 17 to 18 is any or no amino acid
  Variant (20)..(22): Xaa in position 20 to 22 is any amino acid
  Variant (24)..(24): Xaa in position 24 is any amino acid
  Variant (26)..(27): Xaa in position 26 to 27 is any amino acid
  Variant (28)..(32): Xaa in position 28 to 32 is any or no amino acid
  Variant (34)..(64): Xaa in position 34 to 64 is any amino acid
  Variant (65)..(69): Xaa in position 65 to 69 is any or no amino acid
  Variant (71)..(71): Xaa in position 71 is any amino acid
  Variant (73)..(79): Xaa in position 73 to 79 is any amino acid
  Variant (80)..(81): Xaa in position 80 to 81 is any or no amino acid
  Variant (83)..(85): Xaa in position 83 to 85 is any amino acid
  Variant (86)..(86): Xaa in position 86 is any or no amino acid
  Variant (88)..(88): Xaa in position 88 is any amino acid
  Variant (90)..(95): Xaa in position 90 to 95 is any amino acid
  Variant (98)..(102): Xaa in position 98 to 102 is any amino acid
  Variant (104)..(104): Xaa in position 104 is any amino acid
  Variant (107)..(109): Xaa in position 107 to 109 is any amino acid
  Variant (111)..(116): Xaa in position 111 to 116 is any amino acid
  Variant (117)..(123): Xaa in position 117 to 123 is any or no amino acid
  Variant (125)..(127): Xaa in position 125 to 127 is any amino acid
  Variant (130)..(133): Xaa in position 130 to 133 is any amino acid
  Variant (134)..(143): Xaa in position 134 to 143 is any or no amino acid
  Variant (145)..(147): Xaa in position 145 to 147 is any amino acid
  Variant (150)..(151): Xaa in position 150 to 151 is any amino acid
  Variant (153)..(154): Xaa in position 153 to 154 is any amino acid
EGXXXXXYXXXXXGXXXXTXXXGXTXXXXXXXVXXXXXXXXXXXXXXXXXXXXXXXXXXXXXXXXXXXXVXLXXXXXXXXXSXXXXNXGXXXXXXSTXXXXXNXGDXXXAXXXXXXXXXXXXXWXXXGGXXXXXXXXXXXXXXGXXXRRXXEXXL

SEQ ID NO: 153070 - protein, 41 aa, Artificial sequence
  protein pattern
  Variant (2)..(6): Xaa in position 2 to 6 is any amino acid
  Variant (7)..(7): Xaa in position 7 is any or no amino acid
  Variant (9)..(12): Xaa in position 9 to 12 is any amino acid
  Variant (13)..(14): Xaa in position 13 to 14 is any or no amino acid
  Variant (17)..(20): Xaa in position 17 to 20 is any amino acid
  Variant (21)..(21): Xaa in position 21 is Ala, Ile or Leu
  Variant (23)..(23): Xaa in position 23 is any amino acid
  Variant (25)..(27): Xaa in position 25 to 27 is any amino acid
  Variant (28)..(28): Xaa in position 28 is Ala, Gly, Gln or Ser
  Variant (29)..(29): Xaa in position 29 is Ala, Gly, Ile, Leu or Val
  Variant (30)..(31): Xaa in position 30 to 31 is any amino acid
  Variant (32)..(32): Xaa in position 32 is Ala, Glu or Gln
  Variant (33)..(33): Xaa in position 33 is Phe, Ile or Leu
  Variant (34)..(35): Xaa in position 34 to 35 is any amino acid
  Variant (37)..(38): Xaa in position 37 to 38 is any amino acid
  Variant (39)..(39): Xaa in position 39 is Ala or Asp
  Variant (40)..(40): Xaa in position 40 is Gly, Asn or Val
  Variant (41)..(41): Xaa in position 41 is Gly, Asn or Ser
SXXXXXXGXXXXXXSTXXXXXNXGXXXXXXXXXXXWXXXXX

SEQ ID NO: 153071 - protein, 21 aa, Artificial sequence
  protein pattern
  Variant (2)..(5): Xaa in position 2 to 5 is any amino acid
  Variant (6)..(6): Xaa in position 6 is Ala, Gly, Pro or Ser
  Variant (8)..(8): Xaa in position 8 is any amino acid
  Variant (9)..(9): Xaa in position 9 is Cys or Asp
  Variant (10)..(11): Xaa in position 10 to 11 is any amino acid
  Variant (13)..(13): Xaa in position 13 is Ala, Ile, Leu or Val
  Variant (14)..(14): Xaa in position 14 is any amino acid
  Variant (16)..(16): Xaa in position 16 is any amino acid
  Variant (17)..(17): Xaa in position 17 is Cys or Gly
  Variant (18)..(18): Xaa in position 18 is any amino acid
  Variant (20)..(20): Xaa in position 20 is any amino acid
GXXXXXYXXXXGXXTXXXGXT

SEQ ID NO: 153072 - DNA, 351 bp, Escherichia coli
  CDS (1)..(351): transl_table=11
atgatggatctcgataacattcccgatacgcaaacggaagctgaagagctggaagaagtggtgatggggctgatcatcaactccggacaagcgcgcagcctggcgtatgcggcactgaaacaggcgaagcagggcgattttgccgcagcaaaagccatgatggatcagtcacggatggcattgaatgaagcgcatctggtacagacgaaactgattgaaggcgatgcgggcgaaggtaagatgaaagtgagtctggtgctggtccacgctcaggatcatttaatgacgtccatgcttgcgcgtgaactgattactgaattaattgagcttcatgaaaaactgaaggcataa

SEQ ID NO: 153073 - protein, 116 aa, Escherichia coli
MMDLDNIPDTQTEAEELEEVVMGLIINSGQARSLAYAALKQAKQGDFAAAKAMMDQSRMALNEAHLVQTKLIEGDAGEGKMKVSLVLVHAQDHLMTSMLARELITELIELHEKLKA

SEQ ID NO: 153074 - DNA, 336 bp, Vibrio cholerae
  CDS (1)..(336): transl_table=11
atggaacaagaacttatcgtgatggaaattatttgcaacgccggtgaagcgcgaagcttgtgttatgaagcattacgtttagcgcgtactcgatcttttgagcaggcagaagagaaattgtgtcaggctaaagagtgcttaaaccgagctcatttaattcaaacacaattgattgaagccgatcagggtgaaggcaaagtaccaatgaccttggtgatggtgcatgctcaagatcatttaatgacgacaattctggcacaggaaatggcgactgaaatggtggctttacataaacacttggcgggtgaggaagcaaaatgtctcgaaatgcattaa

SEQ ID NO: 153075 - protein, 111 aa, Vibrio cholerae
MEQELIVMEIICNAGEARSLCYEALRLARTRSFEQAEEKLCQAKECLNRAHLIQTQLIEADQGEGKVPMTLVMVHAQDHLMTTILAQEMATEMVALHKHLAGEEAKCLEMH

SEQ ID NO: 153076 - DNA, 333 bp, Bacillus halodurans C-125
  CDS (1)..(333): transl_table=11
atgccgacacaacaaaagcctcttgaagaaattgcctttcaaatcattcttcattcagggaatgctcgctcatgtgccatggaaggcattcaattagcaaaagcaggaaaattcgctgctgcacgagaacgtatggagcaagcagataaggaatttcataaagcccatcatgcacagacgagcttaattcaacaggaagcaagtggtgatgccgtctccccttccctgctcttgatccatgcccaagatcatttaatgacctcgatgacgacgaaggacctttgtctagagatcatcgagcttcacgaaaaagtcgataaggagtgtgaatag

SEQ ID NO: 153077 - protein, 110 aa, Bacillus halodurans C-125
MPTQQKPLEEIAFQIILHSGNARSCAMEGIQLAKAGKFAAARERMEQADKEFHKAHHAQTSLIQQEASGDAVSPSLLLIHAQDHLMTSMTTKDLCLEIIELHEKVDKECE

SEQ ID NO: 153078 - DNA, 330 bp, Bacillus halodurans C-125
  CDS (1)..(330): transl_table=11
atggaagcgattgattttgaccaattatcgagtgatcaaattccgtttatgattattctccatagcggaaacgggagaagcaaaatactgcaagcattgcgggagtatcgtgaagggaaggaagcggaagcaaacgaccttctcgtggaggcggaaaaggatttgaatgtagctcacgaaattcactttaagctcgtacaacaagaggctactggagaaaaaacggagctgtccttgttgctcatgcatgcagaggatcatctaatgtctacgttaacaatgaaagatttagtgaaagagttgttagagattttcaaaatgaaaaagtaa

SEQ ID NO: 153079 - protein, 109 aa, Bacillus halodurans C-125
MEAIDFDQLSSDQIPFMIILHSGNGRSKILQALREYREGKEAEANDLLVEAEKDLNVAHEIHFKLVQQEATGEKTELSLLLMHAEDHLMSTLTMKDLVKELLEIFKMKK

SEQ ID NO: 153080 - DNA, 351 bp, Lactococcus lactis subsp. lactis Il1403
  CDS (1)..(351): transl_table=11
atgactgataaatacgagaatccaacaagtgatgactacatgggtgttgtaatgggcattatcatgagtggaggaaatgccaaaggtttagccttccaagccattcaacaagccaaagctggtgaatttgccgaagctgaaagttcattaaacgaagcgagtgaacaacttcgtgaagcacatgatgttcagactgaccttttgacacgtttagctcaaggcgaaaaaattggttggaatctttacatggttcatgctcaagaccacttaatgaatgcgattacctttaaagaccttgctgtagaagttgtcggtcaagaacaacgcctgcaagcacttgaaaacaaataa

SEQ ID NO: 153081 - protein, 116 aa, Lactococcus lactis subsp. lactis Il1403
MTDKYENPTSDDYMGVVMGIIMSGGNAKGLAFQAIQQAKAGEFAEAESSLNEASEQLREAHDVQTDLLTRLAQGEKIGWNLYMVHAQDHLMNAITFKDLAVEVVGQEQRLQALENK

SEQ ID NO: 153082 - DNA, 336 bp, Streptococcus pyogenes M1 GAS
  CDS (1)..(336): transl_table=11
atgacggaaccatccaacttagaagctattatgggcttaatcatgtatggaggcgaagccaagggcaaggccgtagaggctattcatgcagcacgagatgggcagtttgaggaggctcagcacttacttcaagaagcgacaaactcgttaaatattgcccataaatcgcagacacatttgctgtcccaagaagcagctggtgatgcggttgaattgtctttattgatggtgcatgggcaagatcacatgatgactgccttagcctttattgatttagccaaggaattggttaccgtttacgacaaaatgtcagcaatacaaagaggtgagtcatga

SEQ ID NO: 153083 - protein, 111 aa, Streptococcus pyogenes M1 GAS
MTEPSNLEAIMGLIMYGGEAKGKAVEAIHAARDGQFEEAQHLLQEATNSLNIAHKSQTHLLSQEAAGDAVELSLLMVHGQDHMMTALAFIDLAKELVTVYDKMSAIQRGES

SEQ ID NO: 153084 - DNA, 321 bp, Clostridium acetobutylicum ATCC 824
  CDS (1)..(321): transl_table=11
atggatatagagcaaataataatgaatataataatttattccggcgatgctaggagctacatgtatgaagcgcttagcaaggcaagagaaggaaagtatgatgagataaatggcttaataaagcaagcaaatgatgctataggaaaggctcatgatatacagacttcaatgcttcaaaaagaagcagagggcgaggcactaaaggtttcaatattatttgtacatgcgcaggatcaattaatgaccacaatttcagaaaaaaatcttataactgaaatgattgaaatgacaaaggatataaatgctttgtccaataaataa

SEQ ID NO: 153085 - protein, 106 aa, Clostridium acetobutylicum ATCC 824
MDIEQIIMNIIIYSGDARSYMYEALSKAREGKYDEINGLIKQANDAIGKAHDIQTSMLQKEAEGEALKVSILFVHAQDQLMTTISEKNLITEMIEMTKDINALSNK

SEQ ID NO: 153086 - DNA, 315 bp, Clostridium acetobutylicum ATCC 824
  CDS (1)..(315): transl_table=11
atgaataaggaagaattagaattaactacaatggagatagtggcttatgcaggagatgcaagatcaaaatatttggaagctttaaatgcagctaatggcggagattatgataaggcacagcaattagttttagagggaaatgatcttataactgaagcacataacgttcaaactaaaatgattcaaatggaagctcaaggtaagaagatagaggtaggattcttagttgtccatgcgcaggatcatttaatgacagtaatgcttttaagagaccttgtaaagaatttaataaatttatacaagaaggtaaattag

SEQ ID NO: 153087 - protein, 104 aa, Clostridium acetobutylicum ATCC 824
MNKEELELTTMEIVAYAGDARSKYLEALNAANGGDYDKAQQLVLEGNDLITEAHNVQTKMIQMEAQGKKIEVGFLVVHAQDHLMTVMLLRDLVKNLINLYKKVN

SEQ ID NO: 153088 - DNA, 348 bp, Salmonella enterica subsp. enterica serovar Typhi str. CT18
  CDS (1)..(348): transl_table=11
atgtttgatcttgaaaatgttgtagataaccagacagcggctgaggaactcgaagaagtcgttatggggcttatcatcaattctggtcaggcgcgcagcctggcatatggcgcgctcagaaaagcgaaagaaggcgactttgaggcggcgaaagcgatgatggaccagtcgcgcatagcgctcaatgaagcgcatcttgtgcagacaaaactcatcgaaggcgatcagggcgaaggcaaaatgaaagtcagtctggtcctggttcacgctcaggatcatttgatggcctcaatgctggctcgtgaactgatcgctgagttgattgagctccatgagaaactgaaataa

SEQ ID NO: 153089 - protein, 115 aa, Salmonella enterica subsp. enterica serovar Typhi str. CT18
MFDLENVVDNQTAAEELEEVVMGLIINSGQARSLAYGALRKAKEGDFEAAKAMMDQSRIALNEAHLVQTKLIEGDQGEGKMKVSLVLVHAQDHLMASMLARELIAELIELHEKLK

SEQ ID NO: 153090 - DNA, 348 bp, Salmonella typhimurium LT2
  CDS (1)..(348): transl_table=11
atgtttgatcttgaaaatgttgtagataaccagaccgcggctgaggaactcgaagaagtcgttatggggcttatcatcaattctggtcaggcgcgcagcctggcatatggcgcgctcagaaaagcgaaagaaggcgattttgaggcggcgaaagcgatgatggaccagtcgcgcatagcgctcaatgaagcgcatcttgtgcagacaaaactcatcgaaggcgatcagggcgaaggcaaaatgaaagtcagtctggtcctggttcacgctcaggatcatttgatgacatcaatgctggctcgtgaactgatcgccgagttgattgagctccatgagaaactgaaataa

SEQ ID NO: 153091 - protein, 115 aa, Salmonella typhimurium LT2
MFDLENVVDNQTAAEELEEVVMGLIINSGQARSLAYGALRKAKEGDFEAAKAMMDQSRIALNEAHLVQTKLIEGDQGEGKMKVSLVLVHAQDHLMTSMLARELIAELIELHEKLK

SEQ ID NO: 153092 - DNA, 303 bp, Listeria monocytogenes EGD-e
  CDS (1)..(303): transl_table=11
atggaattagaacaaacaattatgcaattaatcgtacacgggggaaacgctaaaagtgacgcaatgctagcaatcgaagcggcaaaaaaaggggattttgacgttgcagatgagcaaatcaaaaatgcagaagcggcactacttgaggcgcatcattcacaaacttcattaattcaaggtgaagcacgtggcgaaaaagcagaagtatcattactacttgttcacgcgcaagatcacttaatgaacgctattacttttaaagacttagcgaaggaaattgttgatttataccgctctaaataa

SEQ ID NO: 153093 - protein, 100 aa, Listeria monocytogenes EGD-e
MELEQTIMQLIVHGGNAKSDAMLAIEAAKKGDFDVADEQIKNAEAALLEAHHSQTSLIQGEARGEKAEVSLLLVHAQDHLMNAITFKDLAKEIVDLYRSK

SEQ ID NO: 153094 - DNA, 303 bp, Listeria monocytogenes EGD-e
  CDS (1)..(303): transl_table=11
atggatttagagcaaactattatgagcttgatcgtgttcggtggtaacgctaaaagcgatgctatgttagccattgattccgctaaaaaaggggatttcgctcaagcagacgaacaaatcgcccaagcagaacaagcactacttgaagcgcatcattctcaaacaaaacttatacaaggtgaagcacgtggcgaaaaaacagaagtttcccttctactcgttcacgcacaagaccacttaatgaatgcaattactttcaaagatttagcgaaagaaattgttgacctttataagaataaataa

SEQ ID NO: 153095 - protein, 100 aa, Listeria monocytogenes EGD-e
MDLEQTIMSLIVFGGNAKSDAMLAIDSAKKGDFAQADEQIAQAEQALLEAHHSQTKLIQGEARGEKTEVSLLLVHAQDHLMNAITFKDLAKEIVDLYKNK

SEQ ID NO: 153096 - DNA, 312 bp, Clostridium perfringens str. 13
  CDS (1)..(312): transl_table=11
atgaaagaaataatcatggatttaataattcatagtggagaagctagaagttatgccatggaagctattcagcttgctaaagcaggagaggtagacggggctagaagcttaatagaaaaagcgtcaatgcaattaggcaaagctcataaatcacaaacagctttgattcaagatgaggctagtgataataaaatagaaatatccatgctattaattcatgcacaggatcaattaatgactactatgacattaaaagatttagcaaatgaaataatagatttgtatgaaaaattaaatcaaaaaaatttttag

SEQ ID NO: 153097 - protein, 103 aa, Clostridium perfringens str. 13
MKEIIMDLIIHSGEARSYAMEAIQLAKAGEVDGARSLIEKASMQLGKAHKSQTALIQDEASDNKIEISMLLIHAQDQLMTTMTLKDLANEIIDLYEKLNQKNF

SEQ ID NO: 153098 - DNA, 333 bp, Thermoanaerobacter tengcongensis MB4
  CDS (1)..(333): transl_table=11
atggatttggaacagattgtatttaccattatatctcatgcagggaatgcacggagtaattcttttgaagcattgaaatacgcaagagaaggcaattttgaagaagcagaaaaatgtttagaaaaagcgagtgaagagcttttagaagctcatcacgtacaaacagatatgatacacaaggaagcggcaggagaaaaacaagagataactttgcttttagttcatgctgaggatcatctcatgaatgctatccttgcgaaagagttgataactgaaatgattgagctctataaaattatttatcaaacaaagggggctacttataatgtctaa

SEQ ID NO: 153099 - protein, 110 aa, Thermoanaerobacter tengcongensis MB4
MDLEQIVFTIISHAGNARSNSFEALKYAREGNFEEAEKCLEKASEELLEAHHVQTDMIHKEAAGEKQEITLLLVHAEDHLMNAILAKELITEMIELYKIIYQTKGATYNV

SEQ ID NO: 153100 - DNA, 318 bp, Thermoanaerobacter tengcongensis MB4
  CDS (1)..(318): transl_table=11
atggatttggaacagataatatacaatttagtgctgcatggaggaaatgcaagagcagaagcatatgaggcattggatgcagcggagaaaggagattttgaagaagcagaaaggcatttacaaaaagcagatgaagagttttacgaagggcataaataccagaacatgctgacacaaggagagcagagtcagacgcctaattttttggtaatacatgcacaggaccagctgatgacagcacttgcagaaaaaaatctgataaagaggatgattgaactgtataaaagggtaagtcaattagaaaaaagattaggttaa

SEQ ID NO: 153101 - protein, 105 aa, Thermoanaerobacter tengcongensis MB4
MDLEQIIYNLVLHGGNARAEAYEALDAAEKGDFEEAERHLQKADEEFYEGHKYQNMLTQGEQSQTPNFLVIHAQDQLMTALAEKNLIKRMIELYKRVSQLEKRLG

SEQ ID NO: 153102 - DNA, 348 bp, Yersinia pestis KIM
  CDS (1)..(348): transl_table=11
atgtttgatttaagtagcatcgttgataacgaacaaaccagtgatgcgctggaagatgtggtcatggggcttatcatcaacgcgggccaagcccgtagcctggcctataacgcactgaaacaggccaaagccggtgattttgcacaagcagatgaactgatggcgcagtcccggagcgccttgaatgacgcccacttggtgcagacacaattgattgaagccgatcagggcgaagggaaaaccaaagttaccctggtgctggtacatgctcaggatcatttgatgaatgccatgttagcgcgagaattgattactgagcttatcgagctgcatcaaaaaattcagtga

SEQ ID NO: 153103 - protein, 115 aa, Yersinia pestis KIM
MFDLSSIVDNEQTSDALEDVVMGLIINAGQARSLAYNALKQAKAGDFAQADELMAQSRSALNDAHLVQTQLIEADQGEGKTKVTLVLVHAQDHLMNAMLARELITELIELHQKIQ

SEQ ID NO: 153104 - DNA, 336 bp, Oceanobacillus iheyensis HTE831
  CDS (1)..(336): transl_table=11
atggccacacaacaggaagaattacaaatgctttcatttcaaattatattacatgctggaaatgccagatcagaagcaatggaagcattacagcttgctagaaaaggagaatttaaagaagcagaattaaaattagaggctgctgataaagaatttaccgaagcgcatcatatacaaacttccttattacaggatgaagctaatggaaacagccctgacttttctataattcttatccatgctcaagatcatttaatgaatgctcttacagttaaagatttagcaatcgaaatgattgcaatgcaaaaacaaataaaaaaattggaggagagataa

SEQ ID NO: 153105 - protein, 111 aa, Oceanobacillus iheyensis HTE831
MATQQEELQMLSFQIILHAGNARSEAMEALQLARKGEFKEAELKLEAADKEFTEAHHIQTSLLQDEANGNSPDFSIILIHAQDHLMNALTVKDLAIEMIAMQKQIKKLEER

SEQ ID NO: 153106 - DNA, 312 bp, Oceanobacillus iheyensis HTE831
  CDS (1)..(312): transl_table=11
atgaatcagacacaattaacagaaactgcatttcaaatcatcctttttgcaggaaatggcaaatcaagtgcgatggaagcaatacatgcagcaaaggaaggaaattttgcagtggcagatgatctaattaaaactgcgagtgatgaattaacaaatgcgcataactttcaaacaaaacttttgcacgatgaagccaatggagataaaaaggacatcaatcttatccttattcattcacaagatcacttaatgaatgcgatgaccattaaagacttagcaatcgaaatcatagatatatacagaaataagtag

SEQ ID NO: 153107 - protein, 103 aa, Oceanobacillus iheyensis HTE831
MNQTQLTETAFQIILFAGNGKSSAMEAIHAAKEGNFAVADDLIKTASDELTNAHNFQTKLLHDEANGDKKDINLILIHSQDHLMNAMTIKDLAIEIIDIYRNK

SEQ ID NO: 153108 - DNA, 312 bp, Streptococcus mutans UA159
  CDS (1)..(312): transl_table=11
atgaatacagaagaattacaagttgccgcatttgaaattattttaaattctggcaatgcgcgctcaattgtccatgaagcatttgatgcaatgcgtgaaaaaaattacattctagctgaacagaagcttcaggaagcgaatgatgaactgctcaaagctcatcaagcacagactgatctactgcaagagtacgctagcggaacggaaattaaaattgaaatcatcatggttcatgcgcaagatcatttaatgacaaccatgacacttcgcgaagtagctattgaaatgttggaattgtataaaaaaagttga

SEQ ID NO: 153109 - protein, 103 aa, Streptococcus mutans UA159
MNTEELQVAAFEIILNSGNARSIVHEAFDAMREKNYILAEQKLQEANDELLKAHQAQTDLLQEYASGTEIKIEIIMVHAQDHLMTTMTLREVAIEMLELYKKS

SEQ ID NO: 153110 - DNA, 309 bp, Vibrio vulnificus CMCP6
  CDS (1)..(309): transl_table=11
atggaacaagaactggtggtgatggaaatcatttgtaatgcaggtgaagcaagaagtttgtgctttgaagcattgaaattatcacggcagaaagagtttgtgctggcggacgaaaaactggctcaagcaaaggagtgtttgaacaagtcacacttagtgcaaacgcagctgattgaagaagatcaaggtgaaggcaaagtgcctatgacattggtcatggtgcatgcacaggatcaccttatgacgacaatcttggctcatgagcttgcagtagaaatggtcgaacttcataagcagttggctggatga

SEQ ID NO: 153111 - protein, 102 aa, Vibrio vulnificus CMCP6
MEQELVVMEIICNAGEARSLCFEALKLSRQKEFVLADEKLAQAKECLNKSHLVQTQLIEEDQGEGKVPMTLVMVHAQDHLMTTILAHELAVEMVELHKQLAG

SEQ ID NO: 153112 - DNA, 339 bp, Lactobacillus plantarum WCFS1
  CDS (1)..(339): transl_table=11
atgacattagccaataatactgaaactcaagatattgcaatgacacttatcgcgtattctggtgaaggtcgtacgctggcttttaatgcgttagatgcgatgcatcgcgatgctttctccgaatctaagatgttattgaagaaatctagtgaagcactggggaaagcacatgatgttcaaacccaactactggtggctgaggcgaatggtcaacaagtttccattgatattttactaattcatgctcaagatcattttatgacgagtctgttagctaacgagttaatcgctgagatgttaaagatgtctcaaaaatttgaaaggatggtcgatttatga

SEQ ID NO: 153113 - protein, 112 aa, Lactobacillus plantarum WCFS1
MTLANNTETQDIAMTLIAYSGEGRTLAFNALDAMHRDAFSESKMLLKKSSEALGKAHDVQTQLLVAEANGQQVSIDILLIHAQDHFMTSLLANELIAEMLKMSQKFERMVDL

SEQ ID NO: 153114 - DNA, 348 bp, Lactobacillus plantarum WCFS1
  CDS (1)..(348): transl_table=11
atggcagaagaacaaacaaaagaagttgaagcaagtctcgaaaccattatgggtttgatcgttaatggtggtaatgcaaagagttccgctttcgaagcaattaaagctgctaaggaaggcgactttgaaaccgctgatgccaagttaaaggaagcagataactttctaaccgaagcacacaattcacaaacctcaatgttaacggcggaagcacaaggggaacatacccacgtgtcattgttattagtacattcacaagatcacatcatgaatgccatcaccttccgcgacttagctggtgaagttgtagacgtttatcggcgtttagctgccgatgaggcgaagtag

SEQ ID NO: 153115 - protein, 115 aa, Lactobacillus plantarum WCFS1
MAEEQTKEVEASLETIMGLIVNGGNAKSSAFEAIKAAKEGDFETADAKLKEADNFLTEAHNSQTSMLTAEAQGEHTHVSLLLVHSQDHIMNAITFRDLAGEVVDVYRRLAADEAK

SEQ ID NO: 153116 - DNA, 312 bp, Vibrio parahaemolyticus RIMD 2210633
  CDS (1)..(312): transl_table=11
atggaacaagaactggttgtaatggaaatcatctgtaatgcgggtgaagccagaagtttaagttatgaagcactccgtttggcgagagagcaaaaatttgaagcagcagaagagaaattgttgcaagccagagagtgcattaacaaggcgcatttaattcagacgcaactgatcgaagaagatcagggggaaggcaaagtgccgatgactctggttatggtgcacgctcaagatcatttaatgacaacgattctagcgcaagaaatggctgttgagattgtcgctttgaacaagcaactcgcgaacaagtaa

SEQ ID NO: 153117 - protein, 103 aa, Vibrio parahaemolyticus RIMD 2210633
MEQELVVMEIICNAGEARSLSYEALRLAREQKFEAAEEKLLQARECINKAHLIQTQLIEEDQGEGKVPMTLVMVHAQDHLMTTILAQEMAVEIVALNKQLANK

SEQ ID NO: 153118 - DNA, 336 bp, Streptococcus pyogenes SSI-1
  CDS (1)..(336): transl_table=11
atgacggaaccatccaacttagaagctattatgggcttaatcatgtatggaggtgaagccaagggcaaggccgtagaggctattcatgcagcacgagatgggcagtttgaggaggctcagcacttacttcaagaagcgacaaactcgttaaatattgcccataaatcgcagacacatttgctgtcccaagaagcagctggtgatgcggttgaattgtctttattgatggtgcatgggcaagatcacatgatgactgccttagcctttattgatttagccaaggaattggttatcgtttacgataaaatgtcagcaatacaaagaggtgagtcatga

SEQ ID NO: 153119 - protein, 111 aa, Streptococcus pyogenes SSI-1
MTEPSNLEAIMGLIMYGGEAKGKAVEAIHAARDGQFEEAQHLLQEATNSLNIAHKSQTHLLSQEAAGDAVELSLLMVHGQDHMMTALAFIDLAKELVIVYDKMSAIQRGES

SEQ ID NO: 153120 - DNA, 321 bp, Enterococcus faecalis V583
  CDS (1)..(321): transl_table=11
atggacggacaacagaacttagaagcaatcatgggtttaatcatgtatggcggaaatgctaaaagcgatgcaatggaagcgattgccgcagcaaaatcgggggattttgaattagcagacaaaaaaattgcagatgcagaagaatcacttgtacatgcacatcattcgcaaacaggaatgttaacagaagaagcaaaaggcaataacatgcaagtaacattgttaacagtgcacagtcaagatcatttaatgactgcgattgcatttacagatttagcaaaagaaattatcgatctttatcgccgtattgataacgagtaa

SEQ ID NO: 153121 - protein, 106 aa, Enterococcus faecalis V583
MDGQQNLEAIMGLIMYGGNAKSDAMEAIAAAKSGDFELADKKIADAEESLVHAHHSQTGMLTEEAKGNNMQVTLLTVHSQDHLMTAIAFTDLAKEIIDLYRRIDNE

SEQ ID NO: 153122 - DNA, 321 bp, Bacillus cereus ATCC 14579
  CDS (1)..(321): transl_table=11
atggctgatatgcaaactccatttgcgttaattttacatggtggcaatgcgagaagtgcggcgcttgaagcaattgcttttgcaagacaaggagatttcgggaatgccggtgaaaagatgaaacttgctagtgaggaaatttcagcagcgcatcgtattcaaacggatttaattcaagaagaggcaagaggaaatcatgcagaaattagtttactgttggtgcacgcacaagatcatttaatgaatgcaattacagtgaaagaactggctgaagaatttattgctcttcataaacgagtagaagagaaagtgaccgtataa

SEQ ID NO: 153123 - protein, 106 aa, Bacillus cereus ATCC 14579
MADMQTPFALILHGGNARSAALEAIAFARQGDFGNAGEKMKLASEEISAAHRIQTDLIQEEARGNHAEISLLLVHAQDHLMNAITVKELAEEFIALHKRVEEKVTV

SEQ ID NO: 153124 - DNA, 324 bp, Bacillus cereus ATCC 14579
  CDS (1)..(324): transl_table=11
atgatgactacagcagaacaaattccattccaattgattttaaatagtggtaacgcacgaagctttgcgatggaggcacttcaatttgccaaacaggggaaaatggtagaagcagatgaagcgatggtaaaggcaaaagaagcgattaatgaagcgcatcatttccaaacagagctcatacaatcagaagcaagaggagaaaaaacagaggttagtgttcttttaattcacgcacaagatcatttaatgaatgcgattacagtgaaagaattagcagcagagtttatcgatctttataaaaagcttgaagcgaaaggggaataa

SEQ ID NO: 153125 - protein, 107 aa, Bacillus cereus ATCC 14579
MMTTAEQIPFQLILNSGNARSFAMEALQFAKQGKMVEADEAMVKAKEAINEAHHFQTELIQSEARGEKTEVSVLLIHAQDHLMNAITVKELAAEFIDLYKKLEAKGE

SEQ ID NO: 153126 - DNA, 318 bp, Bacillus cereus ATCC 14579
  CDS (1)..(318): transl_table=11
atggatacgatagagacgaaagcttttcatttaatcttgcatgggggaaacgcgagaagttgttcaatggaagcaattgattgtgcgaagcgtggggagtttacagaagctgaagctaaattacaagaagcactagaggaattaaaagaggcgcaccgtgtacaaacggagcttatccagaaagaagctggtggtgaaaagaccgaagttactcttttaatggtacacgcacaagaccatttaatgaatgcaattacggtgaaagaattagcgagtgagtttgtagagttatataggaagatgtcggtggatgaatga

SEQ ID NO: 153127 - protein, 105 aa, Bacillus cereus ATCC 14579
MDTIETKAFHLILHGGNARSCSMEAIDCAKRGEFTEAEAKLQEALEELKEAHRVQTELIQKEAGGEKTEVTLLMVHAQDHLMNAITVKELASEFVELYRKMSVDE

SEQ ID NO: 153128 - DNA, 360 bp, Photorhabdus luminescens subsp. laumondii TTO1
  CDS (1)..(360): transl_table=11
atggatttagaacaagctattgatttagaaaaaactattgatttagaaaaaactattgtagaactgctggtttatgccggaagcgcacgcagtcatgcactaatggcattacaacatgccagaaacggtgattttcaaacagcacaaacactgatggctgaatctcaacaggcgatcaaagaagcacacacgattcagactaccctcattggattagatgaaggctgcggtaaattacctgtcaatctcatcaccgtccatgcgcaagatcatttaatgaacgcaatggttattcaagatcttgccagcgatatgattgaactctatcgccgaatgtcatcacaagaggaaaaaacatga

SEQ ID NO: 153129 - protein, 119 aa, Photorhabdus luminescens subsp. laumondii TTO1
MDLEQAIDLEKTIDLEKTIVELLVYAGSARSHALMALQHARNGDFQTAQTLMAESQQAIKEAHTIQTTLIGLDEGCGKLPVNLITVHAQDHLMNAMVIQDLASDMIELYRRMSSQEEKT

SEQ ID NO: 153130 - DNA, 351 bp, Vibrio vulnificus YJ016
  CDS (1)..(351): transl_table=11
ttgaggctgcgaagtcgcagcctctctttggaggagagaaaaatggaacaagaactggtggtgatggaaatcatttgtaatgcaggtgaagcaagaagtttgtgctttgaagcattgaaattatcacggcagaaagagtttgtgctggcggacgaaaaactggctcaagcaaaggagtgtttgaacaagtcacacttagtgcaaacgcagctgattgaagaagatcaaggtgaaggcaaagtgcctatgacattggtcatggtgcatgcacaggatcaccttatgacgacaatcttggctcatgagcttgcagtagaaatggtcgaacttcataagcagttggctggatga

SEQ ID NO: 153131 - protein, 116 aa, Vibrio vulnificus YJ016
MRLRSRSLSLEERKMEQELVVMEIICNAGEARSLCFEALKLSRQKEFVLADEKLAQAKECLNKSHLVQTQLIEEDQGEGKVPMTLVMVHAQDHLMTTILAHELAVEMVELHKQLAG

SEQ ID NO: 153132 - DNA, 327 bp, Lactobacillus johnsonii NCC 533
  CDS (1)..(327): transl_table=11
atggcacaagaaaatagcgataacatgcaagttgtaatgggaattattatgcaagctggtaatgcaaaggctgctgctatgcaagcaatccaagctgctaaaaaaggcgactttgaaaaggctgatgagtttattaagcaagcaaacgaaggcttagtaaatgcccacaatgttcaaactgatatgttaacccaagaagcacaaggtaaccatgtaaaagttgacctttacatggttcatgctcaagaccacttaatgacagctattacttttattgatttagctaaggaagtagtagctgtttacaaaaaaatggctgaaaaataa

SEQ ID NO: 153133 - protein, 108 aa, Lactobacillus johnsonii NCC 533
MAQENSDNMQVVMGIIMQAGNAKAAAMQAIQAAKKGDFEKADEFIKQANEGLVNAHNVQTDMLTQEAQGNHVKVDLYMVHAQDHLMTAITFIDLAKEVVAVYKKMAEK

SEQ ID NO: 153134 - DNA, 321 bp, Bacillus cereus ATCC 10987
  CDS (1)..(321): transl_table=11
atgactgatatgcaaacaccatttgcgttaattttacatggtggcaacgcgagaagcgcgtcacttgaagcaattgcttttgcaagacaaggagattttgagaatgcgagtgaaaagatgacacttgctagggaagaaatttcagcagctcatcgtattcaaacagacttaattcaagaggaagcaagaggaaatcatgcagaaatcagtttactgttagtgcatgcacaagatcatttaatgaatgcaattacagtgaaagaacttgctgaagaatttatcactcttcataaacgaatagaagagaaagtgacagtataa

SEQ ID NO: 153135 - protein, 106 aa, Bacillus cereus ATCC 10987
MTDMQTPFALILHGGNARSASLEAIAFARQGDFENASEKMTLAREEISAAHRIQTDLIQEEARGNHAEISLLLVHAQDHLMNAITVKELAEEFITLHKRIEEKVTV

SEQ ID NO: 153136 - DNA, 321 bp, Bacillus cereus ATCC 10987
  CDS (1)..(321): transl_table=11
atgactacagcagaacaaattccatttcaattaattttaaatagtggtaatgcacgaagctttgcgatggaggcacttcaatttgccaaacaggggaaaatggcagaagctgatgaagcgatggcaaaggcgaaagaagcgattaatgaagcgcatcattttcaaacggagctcatacaatcagaagcaagaggagaaaaaacagagattagtgttcttttaattcatgcacaagatcatttaatgaatgcgattacagtaaaagaattagcagcagagtttattgacctttataaaaagttagaagcgaaaggggaataa

SEQ ID NO: 153137 - protein, 106 aa, Bacillus cereus ATCC 10987
MTTAEQIPFQLILNSGNARSFAMEALQFAKQGKMAEADEAMAKAKEAINEAHHFQTELIQSEARGEKTEISVLLIHAQDHLMNAITVKELAAEFIDLYKKLEAKGE

SEQ ID NO: 153138 - DNA, 309 bp, Clostridium difficile 630
  CDS (1)..(309): transl_table=11
atggaagaaatagttttaaagattataattcatgctggaaatgcaaaatctatgctttatgaagcacttgactatgcaaaggaaaacgattttaaaaaagcagatgaattaattgaaaatgcaaatgaagaaattttaaaagcacataaagtacaaactgaacttatacaaaaggaagctgggggagataaatcagatatatctattttattgattcactctcaagaccatttaatgacttgtatgagtgagagaaaccttataaaagaaatgattatgttaagaaaagaaattcaaaaattaaaataa

SEQ ID NO: 153139 - protein, 102 aa, Clostridium difficile 630
MEEIVLKIIIHAGNAKSMLYEALDYAKENDFKKADELIENANEEILKAHKVQTELIQKEAGGDKSDISILLIHSQDHLMTCMSERNLIKEMIMLRKEIQKLK

SEQ ID NO: 153140 - DNA, 318 bp, Clostridium difficile 630
  CDS (1)..(318): transl_table=11
atggatgagaagatgatagagatatcttttggaataattggatttgcaggtgatgcgaaagggctagcatttgaagcaataaaagaagcaaagagcgggaatatagataaagctagagaatgtattgaaaagtcgaaagaatcaattcataaagctcataaattccaaacagaattgatacaaaatgaagctaatggtaataaaactgaaataagtgttatacttattcatgcacaagaccatttaatgacagctatgaattttcaacaattagcagaagaatttatagatgtatatgaaagattagaaagtaagtaa

SEQ ID NO: 153141 - protein, 105 aa, Clostridium difficile 630
MDEKMIEISFGIIGFAGDAKGLAFEAIKEAKSGNIDKARECIEKSKESIHKAHKFQTELIQNEANGNKTEISVILIHAQDHLMTAMNFQQLAEEFIDVYERLESK

SEQ ID NO: 153142 - DNA, 306 bp, Clostridium difficile 630
  CDS (1)..(306): transl_table=11
atgtcaacagaagtacaaataatggaacttatatcaactgcaggagagagtaaatcgaaagcttttgaggctttaaaaaaagtgaagtcaaaagattttaaaggagcaaaattgttaatagaggaggctcgtaaaatagatattgaagctcacaggatacaaacagaattaataactcaagatttaaatgaagatgttgaaagtccagcaatgagtcttttaatggtacatgctcaagaccactatatgacttctcagctagcaaaagacttgatagaggctttgatatattgtcttgataagtaa

SEQ ID NO: 153143 - protein, 101 aa, Clostridium difficile 630
MSTEVQIMELISTAGESKSKAFEALKKVKSKDFKGAKLLIEEARKIDIEAHRIQTELITQDLNEDVESPAMSLLMVHAQDHYMTSQLAKDLIEALIYCLDK

SEQ ID NO: 153144 - DNA, 318 bp, Clostridium difficile 630
  CDS (1)..(318): transl_table=11
atggatgaaaagattatagaaatatcttttaatataataggttatgcaggtgaaggtaaagggttagcttttgaagcaataaaagaggctaagaatggaaatatagaaaaagcaaaagaattattaaaagagtctagggaagttataaataaagcacatagatatcaaacagaattaatacaaaacgaagctagtggaaacaggactgaaataagtgtcatacttatacatgcacaggaccacttaatgaatggcatgaattttcaacagttagctgaggaaatcgttgatttacatttgaaattacaagataaataa

SEQ ID NO: 153145 - protein, 105 aa, Clostridium difficile 630
MDEKIIEISFNIIGYAGEGKGLAFEAIKEAKNGNIEKAKELLKESREVINKAHRYQTELIQNEASGNRTEISVILIHAQDHLMNGMNFQQLAEEIVDLHLKLQDK

SEQ ID NO: 153146 - DNA, 336 bp, Streptococcus pyogenes str. Manfredo
  CDS (1)..(336): transl_table=11
atgacgggaccatccaacttagaagctattatgggcttaatcatgtatggaggcgaagccaagggcaaggccgtagaggctattcatgcagcacgagatgggcagtttgaggaggctcagcacttacttcaagaagcgacaaactcgttaaatattgcccataaatcgcagacacatttgctctcccaagaagcagctggtgatgcggttgaattgtctttattgatggtgcatgggcaagatcacatgatgactgccttagcctttattgatttagccaaggaattggttaccgtttacgacaaaatgtcagcaatacagaggggcgagtcatga

SEQ ID NO: 153147 - protein, 111 aa, Streptococcus pyogenes str. Manfredo
MTGPSNLEAIMGLIMYGGEAKGKAVEAIHAARDGQFEEAQHLLQEATNSLNIAHKSQTHLLSQEAAGDAVELSLLMVHGQDHMMTALAFIDLAKELVTVYDKMSAIQRGES

SEQ ID NO: 153148 - DNA, 321 bp, Streptococcus pyogenes str. Manfredo
  CDS (1)..(321)
atgcaagttattgtaccagaccaaatcattatgggcttaattttaaatgcaggcgatgccaaacaacatatctaccaagctctgaaatgtgctaaagaggacgattatgccactagtgaaaaagagatggccttagcagatgatgccttattagaagcccacaatttacagacccagtttcttgcccaagaagctagtggtaataagtcagagattacagctctttttgttcactcacaggatcacttgatgacgaccattacagaaattaatctcgtcaaggagattattgaccttcgtaaagaattggcaaccaaataa

SEQ ID NO: 153149 - protein, 106 aa, Streptococcus pyogenes str. Manfredo
MQVIVPDQIIMGLILNAGDAKQHIYQALKCAKEDDYATSEKEMALADDALLEAHNLQTQFLAQEASGNKSEITALFVHSQDHLMTTITEINLVKEIIDLRKELATK

SEQ ID NO: 153150 - DNA, 348 bp, Klebsiella pneumoniae subsp. pneumoniae MGH 78578
  CDS (1)..(348): transl_table=11
atgtttgatctggacaacatcgacgcggtagagaccccggaaaatgacctcgaagaggtagtgatggggctgattatcaactccggacaagcccgtagcctggcctatggcgcgctgaagcaggcgaagcagggcgactttgccgcagcgaaagcgatgatggagcagtcgcgccaggcgctgagcgaggcgcatcgcgtgcagacccagcttatcgaaagcgacgagggcgaagggaaaatgaaggtcagcctggtgctggtgcatgcccaggaccatctgatgacctccatgctggctcgtgagctggtggccgaattgattgagctgcacgagaaggtacaatag

SEQ ID NO: 153151 - protein, 115 aa, Klebsiella pneumoniae subsp. pneumoniae MGH 78578
MFDLDNIDAVETPENDLEEVVMGLIINSGQARSLAYGALKQAKQGDFAAAKAMMEQSRQALSEAHRVQTQLIESDEGEGKMKVSLVLVHAQDHLMTSMLARELVAELIELHEKVQ

SEQ ID NO: 153152 - DNA, 315 bp, Klebsiella pneumoniae subsp. pneumoniae MGH 78578
  CDS (1)..(315): transl_table=11
atggatatggaagcaaccgtcatggaactcatcattaacgccggtgagtcccgcagtctggcgatgcaggcgctgcaagccgccagaaaaagagtgtggcaggacgttgataggctgatgcaggacgccgcagatgccgcaaaacgcgcgcatgatgtacaaaccatgcttatcggtatggatgagggctgtggcaaagtaccggttaatcttattctggtacatgcccaagatcatataatgacctctatgcttgcgcgggagttgatcgcggagcttattgaggttcagcgccagctgcaacatcgcaactga

SEQ ID NO: 153153 - protein, 104 aa, Klebsiella pneumoniae subsp. pneumoniae MGH 78578
MDMEATVMELIINAGESRSLAMQALQAARKRVWQDVDRLMQDAADAAKRAHDVQTMLIGMDEGCGKVPVNLILVHAQDHIMTSMLARELIAELIEVQRQLQHRN

SEQ ID NO: 153154 - DNA, 315 bp, Klebsiella pneumoniae subsp. pneumoniae MGH 78578
  CDS (1)..(315): transl_table=11
atggaattagaagaacaggtgatggggatcatcatcaatgccggccagtcacgtagcctgtgctacgaagcgctgcacgccgctaaagcgggtgatttcgccaccgccgacgccaaaatgcaggaagcggcgcactattcccgcgaagctcaccttgtacagacccagcttatcgaagctgacgaaggcgagggaaaaaccaaaatgacgctggtaatggtccatgctcaggatcacctgatgacatccattctggcgaaagagctaattgccgaactgattgcgatttaccgcgcgcagccgcttcacgcctag

SEQ ID NO: 153155 - protein, 104 aa, Klebsiella pneumoniae subsp. pneumoniae MGH 78578
MELEEQVMGIIINAGQSRSLCYEALHAAKAGDFATADAKMQEAAHYSREAHLVQTQLIEADEGEGKTKMTLVMVHAQDHLMTSILAKELIAELIAIYRAQPLHA

SEQ ID NO: 153156 - DNA, 303 bp, Klebsiella pneumoniae subsp. pneumoniae MGH 78578
  CDS (1)..(303): transl_table=11
atgattgaattagaagatgcggtaatggaaattatcgttaatgcgggacagtcacgctcattatgttttgaagcgctgcatgcggcccgaaccggaaatatcgacgaagcgcgcttactcttaaacgaggccgacggctacgcccgccgggcgcatcagatgcagacccagctcatcgggcaggatgccggtgaagcgcgtcagcccatgacgctgattatggtacatgcccaggatcatttgatgaattcgctgctggcccgcgagttctcagaagaattaatccatctgtaccagcgttaa

SEQ ID NO: 153157 - protein, 100 aa, Klebsiella pneumoniae subsp. pneumoniae MGH 78578
MIELEDAVMEIIVNAGQSRSLCFEALHAARTGNIDEARLLLNEADGYARRAHQMQTQLIGQDAGEARQPMTLIMVHAQDHLMNSLLAREFSEELIHLYQR

SEQ ID NO: 153158 - DNA, 318 bp, Klebsiella pneumoniae subsp. pneumoniae MGH 78578
  CDS (1)..(318): transl_table=11
atggaagatttagaaacgatcatcatggagctgctggttaacgcgggttccgcacgtagcgcggcgctgacggcgctacagctggcgcgcaaaggcgattttgtcgccgcggagcaggccatggctgaatcccatgagttcgtcaaacatgcgcataaaattcagacccagcttatcggcatggatgaaggcagcggtaaattgccggtcaacttgatcaccgtgcattcccaggaccatctgatgaacgctatggtcattcaggatctggcgaccgacatgattgaactctatcgtcgtctgcccctcgcgcaataa

SEQ ID NO: 153159 - protein, 105 aa, Klebsiella pneumoniae subsp. pneumoniae MGH 78578
MEDLETIIMELLVNAGSARSAALTALQLARKGDFVAAEQAMAESHEFVKHAHKIQTQLIGMDEGSGKLPVNLITVHSQDHLMNAMVIQDLATDMIELYRRLPLAQ

SEQ ID NO: 153160 - DNA, 303 bp, Listeria monocytogenes str. 4b F2365
  CDS (1)..(303): transl_table=11
atggaattagaacaaacaattatgcaattaatcgtacacgggggaaacgctaaaagtgacgcaatgctagcaatcgaagcggcaaaaaaaggggattttgacgcggcagatgagcaaatcaaaagtgcagaagcagcactacttgaagcgcatcattcacaaacttcattaattcaaggggaagcacgcggcgaaaaagcagaagtatctttactactagttcacgcgcaagatcacttaatgaacgctattacttttaaagatttagccaaagaaattattgatttataccgctctaaataa

SEQ ID NO: 153161 - protein, 100 aa, Listeria monocytogenes str. 4b F2365
MELEQTIMQLIVHGGNAKSDAMLAIEAAKKGDFDAADEQIKSAEAALLEAHHSQTSLIQGEARGEKAEVSLLLVHAQDHLMNAITFKDLAKEIIDLYRSK

SEQ ID NO: 153162 - DNA, 321 bp, Bacillus anthracis str. Sterne
  CDS (1)..(321): transl_table=11
atggctgatatgcaaactccatttgcattaattttacatggtggcaacgcgagaagtatagcgcttgaagcaattgcttttgcaagacaaggagattttgagaatgcgagtgaaaagatgacacttgctagtgaagaaatttcagcagctcatcgcattcaaacggacttaattcaagaagaagcaagaggaaatcatgcagaaatcagtttactgttagtacatgcacaagatcatttaatgaatgcaattacagtgaaagaacttgcggaagaatttattactcttcataaacgaatggaagagaaagtgatagcataa

SEQ ID NO: 153163 - protein, 106 aa, Bacillus anthracis str. Sterne
MADMQTPFALILHGGNARSIALEAIAFARQGDFENASEKMTLASEEISAAHRIQTDLIQEEARGNHAEISLLLVHAQDHLMNAITVKELAEEFITLHKRMEEKVIA

SEQ ID NO: 153164 - DNA, 321 bp, Bacillus thuringiensis serovar konkukian str. 97-27
  CDS (1)..(321): transl_table=11
atggctgatatgcaaactccatttgcgttaattttacatggtggcaacgcgagaagtgcagcgcttgaagcaattgcttttgcaagacaaggagattttgagaatgcgagtgaaaagatgacacttgctagtgaagaaatttcagcagctcatcgcattcaaacggacttaattcaagaagaagcaagaggaaatcatgcagaaatcagtttactgttagtacatgcacaagatcatttaatgaatgcaattacagtgaaagaacttgcggaagaatttattactcttcataaacgaatggaagagaaagtgatagcataa

SEQ ID NO: 153165 - protein, 106 aa, Bacillus thuringiensis serovar konkukian str. 97-27
MADMQTPFALILHGGNARSAALEAIAFARQGDFENASEKMTLASEEISAAHRIQTDLIQEEARGNHAEISLLLVHAQDHLMNAITVKELAEEFITLHKRMEEKVIA

SEQ ID NO: 153166 - DNA, 309 bp, Erwinia carotovora subsp. atroseptica SCRI1043
  CDS (1)..(309): transl_table=11
atgatgattacattagaagatgcagtaatggaaattatcgtcaatgctgggcagtcacgcagcctgtgttttgaggcactgcacgctgcacgtaaaggcaacattgatgaagccaaaaatctgttgaaagaagccgatggctacgcgcgcaaggcacaccatatgcaaactcagctgatcgaacaggatgcaggtgaagccagacagccgatgacgttaattatggttcatgctcaagatcatttaatgacatcattactcgcccgcgaattatcagaagaaataattcacctttatcaacgacaataa

SEQ ID NO: 153167 - protein, 102 aa, Erwinia carotovora subsp. atroseptica SCRI1043
MMITLEDAVMEIIVNAGQSRSLCFEALHAARKGNIDEAKNLLKEADGYARKAHHMQTQLIEQDAGEARQPMTLIMVHAQDHLMTSLLARELSEEIIHLYQRQ

SEQ ID NO: 153168 - DNA, 324 bp, Erwinia carotovora subsp. atroseptica SCRI1043
  CDS (1)..(324): transl_table=11
atggatgtagaaacgcggatgattgagcttatcgttaaatctggcgaaacacgttcctgcgcaatggaagcacttagagcagctcgccggggcgagtgggatcacgtcgatgaactattaaaaatggctgcggtggcgctgaatcgggcgcaattgatccagaccggatttattggctatcagagtaaggaaaaaaccaatctcgaacttattgtggtgcatgcacaggatcatctgatgaatgcgatgctgtgccgtgaactggctgaagagattattgaactcaggaaagatgtatctggcgtcaatatgcacatgcgctaa

SEQ ID NO: 153169 - protein, 107 aa, Erwinia carotovora subsp. atroseptica SCRI1043
MDVETRMIELIVKSGETRSCAMEALRAARRGEWDHVDELLKMAAVALNRAQLIQTGFIGYQSKEKTNLELIVVHAQDHLMNAMLCRELAEEIIELRKDVSGVNMHMR

SEQ ID NO: 153170 - DNA, 345 bp, Erwinia carotovora subsp. atroseptica SCRI1043
  CDS (1)..(345): transl_table=11
atgaaagacacagagaacctccctgaattcgatatggaacaaaccgtgatggagttgctgatcaacgcgggtgaagcccgctcaaacgccatgatggcaattcaggccgcgcgtcagcgagagtggcaacaggccgacgcgctgcttgccgcgtcacaagagacggcgcgtgccgctcaccgcgttcaaacacggctaatcggtttggatgaaggagaaggaaaggtgcccgtcaacctgatcatggtacatgcgcaggatcatctgatgaccgccatgctatgccgggatttggcggaagagattgtcttgttacggcgagaaatggctacatcacaaaactga

SEQ ID NO: 153171 - protein, 114 aa, Erwinia carotovora subsp. atroseptica SCRI1043
MKDTENLPEFDMEQTVMELLINAGEARSNAMMAIQAARQREWQQADALLAASQETARAAHRVQTRLIGLDEGEGKVPVNLIMVHAQDHLMTAMLCRDLAEEIVLLRREMATSQN

SEQ ID NO: 153172 - DNA, 348 bp, Erwinia carotovora subsp. atroseptica SCRI1043
  CDS (1)..(348): transl_table=11
atgctcgatgaaaccattcttgatgaaactacagtgatggaactaattatttatgcgggagaggcgcgctcaagctcgatggaagcactgagcgctgccagaaaatacgactgggacaaggccgaggaactgctgaatgcggcttctgtggcggcgcgcaaagcccatcaaattcagacggccttgatcggtgccgatgagggtagcggaaaaatccaggtcaacttgattctggttcacgcgcaagatcacctgatgaacgcgatgttatgccgtgaactggttgaggaactgattcaactgcatcgggaaatatcctccctgaaacaacatgtaaacctgaaatga

SEQ ID NO: 153173 - protein, 115 aa, Erwinia carotovora subsp. atroseptica SCRI1043
MLDETILDETTVMELIIYAGEARSSSMEALSAARKYDWDKAEELLNAASVAARKAHQIQTALIGADEGSGKIQVNLILVHAQDHLMNAMLCRELVEELIQLHREISSLKQHVNLK

SEQ ID NO: 153174 - DNA, 321 bp, Propionibacterium acnes KPA171202
  CDS (1)..(321): transl_table=11
atgccagagatcgaaaccgccatttttaccatcatcacgagcgctggtgaggcgcgtgcgtcgctgtatcaggctcttgacaaagcacgggctggcgagatggctgagagtgaacagtgcatgattagggcggacacacagttgaagaaagcccatgatatgcagaccgagctcatcacgcgtgatctcaacggctcgctgccgatgtcgcttttactcgtccatgcccaagaccagttgatgacgacgatgtcagaacagtctctcattgagcacatgattggactaattcgagacataggtatcaacggtgggaagtga

SEQ ID NO: 153175 - protein, 106 aa, Propionibacterium acnes KPA171202
MPEIETAIFTIITSAGEARASLYQALDKARAGEMAESEQCMIRADTQLKKAHDMQTELITRDLNGSLPMSLLLVHAQDQLMTTMSEQSLIEHMIGLIRDIGINGGK

SEQ ID NO: 153176 - DNA, 348 bp, Borrelia garinii PBi
  CDS (1)..(348): transl_table=11
atgaataaaaaaatatacagcatagaagaattaatagataaaataagcatgcctgttgtagcttatgctggtgaagctaaaagctttctaagagaagctttggaatacgctaaaaacaaagactatgaaaaagcagatcttagcatacaagaaagtagaaactctattgcaaaggcgcatgaagcacatagggaaataatacagcaatcagccactaatccaagctctgttaaaccgccttttattttaattcatgccgaagatcatttaatgtctgcaatttcagaattaagcatttttgaagaattaatcaatgtttacaaaataataaatgaaataaaaaaatag

SEQ ID NO: 153177 - protein, 115 aa, Borrelia garinii PBi
MNKKIYSIEELIDKISMPVVAYAGEAKSFLREALEYAKNKDYEKADLSIQESRNSIAKAHEAHREIIQQSATNPSSVKPPFILIHAEDHLMSAISELSIFEELINVYKIINEIKK

SEQ ID NO: 153178 - DNA, 348 bp, Symbiobacterium thermophilum IAM 14863
  CDS (1)..(348): transl_table=11
atggagaacctggaacagctcaacctcattgcgatgcgcatcatcctcgacgccggcgacgcccgggacttcgtcaccaaggccttcgaggccatggggcagcgggacttcgagtctgcggacgagcacctgcgtgcggctttcgagaagctgaagtcggctcaccgtcagcagacggaggtcatccagcacgaagtggctgccgggtcgttgccgccgtcactgctgtttaaccatgctcaggacacgttgatggtggtcggttcggaactgaacctcgcgcgcagtctgctggccatcttcatcaacatcgaccggcggctggcgcagctggaggcaggccgatga

SEQ ID NO: 153179 - protein, 115 aa, Symbiobacterium thermophilum IAM 14863
MENLEQLNLIAMRIILDAGDARDFVTKAFEAMGQRDFESADEHLRAAFEKLKSAHRQQTEVIQHEVAAGSLPPSLLFNHAQDTLMVVGSELNLARSLLAIFINIDRRLAQLEAGR

SEQ ID NO: 153180 - DNA, 324 bp, Bacillus cereus E33L
  CDS (1)..(324): transl_table=11
atgatgactacagcagaacaaattccattccaattgattttaaatagtggtaatgcacgaagctttgcaatggaggcacttcaatttgccaaacaggggaaaatggcagaggctgatgaagcgatggtaaaggcgaaagaagcgatcaatgaagcgcatcatttccaaacagagctcatacaatcagaagcaagaggagaaaaaacagagattagtgttcttttaattcacgcacaagatcatttaatgaatgcgattacagtaaaagaattagcagcagagtttattgatctttataaaaaattagaagtgaaaggggaataa

SEQ ID NO: 153181 - protein, 107 aa, Bacillus cereus E33L
MMTTAEQIPFQLILNSGNARSFAMEALQFAKQGKMAEADEAMVKAKEAINEAHHFQTELIQSEARGEKTEISVLLIHAQDHLMNAITVKELAAEFIDLYKKLEVKGE

SEQ ID NO: 153182 - DNA, 318 bp, Bacillus cereus E33L
  CDS (1)..(318): transl_table=11
atggatacgatagaaacgaaggcttttcacttaatcttgcatgggggaaatgcgagaagttgttcaatggaagcaattgattgtgcaaagcgtggagaatttacagaagcagaagcgaaattacaagaagccttagaagaattaaaagaggcgcaccgtgtacaaacggatctcatacagaaagaagctggtggtgaaaagaccgaagtcacccttctgatggtgcacgcgcaagatcatttaatgaatgcaattacggtgaaggaattagcaagtgaatttgtagaattatataggaagatgtcggtaactgaatga

SEQ ID NO: 153183 - protein, 105 aa, Bacillus cereus E33L
MDTIETKAFHLILHGGNARSCSMEAIDCAKRGEFTEAEAKLQEALEELKEAHRVQTDLIQKEAGGEKTEVTLLMVHAQDHLMNAITVKELASEFVELYRKMSVTE

SEQ ID NO: 153184 - DNA, 336 bp, Bacillus clausii KSM-K16
  CDS (1)..(336): transl_table=11
atgagaaaagtggagaaatcgacggatataacagaggtttccttccgtatcattttgcacgctggaaatgggaaaggaagcgcgatggaagcaattcaagcggcaaaagcaggctcatttgaacaagcggacgagttaatagaagaggcaggaagagagctggccaaagcccatgaatttcagacaaatttaatccagcaagaagcaaatggagggcggacagagttaaacgtgctgctgatccattcccaagaccacttgatgacgtcgatgaccgtacgtgatttagcaattgaaatcattgaaatataccgtacgaaaaggggacttttataa

SEQ ID NO: 153185 - protein, 111 aa, Bacillus clausii KSM-K16
MRKVEKSTDITEVSFRIILHAGNGKGSAMEAIQAAKAGSFEQADELIEEAGRELAKAHEFQTNLIQQEANGGRTELNVLLIHSQDHLMTSMTVRDLAIEIIEIYRTKRGLL

SEQ ID NO: 153186 - DNA, 333 bp, Bacillus clausii KSM-K16
  CDS (1)..(333): transl_table=11
atgacggcacaacaaaagcctcttgaggaaatttcgtttcaaatcatccttcattcaggaaacgcccgttcatttgcgatggagggagtccagctagcgaaaaaaggagaatttgcagcagcgcacgaacgtctcgaacaagcagacaacgaattctaccaagcccaccatgcacaaacgaatttgctgcaaagcgaggctagaggcgatcaagttcccccttctcttttgttaatccacgcccaagaccatttaatgacatcaatgacaacgaaagagctttgtttagaaatcattgaactacacgaaaaatttgctaaggagcgtcgttaa

SEQ ID NO: 153187 - protein, 110 aa, Bacillus clausii KSM-K16
MTAQQKPLEEISFQIILHSGNARSFAMEGVQLAKKGEFAAAHERLEQADNEFYQAHHAQTNLLQSEARGDQVPPSLLLIHAQDHLMTSMTTKELCLEIIELHEKFAKERR

SEQ ID NO: 153188 - DNA, 339 bp, Bacillus clausii KSM-K16
  CDS (1)..(339): transl_table=11
atgaacgtagaggtggaaatattcaacatgatttcgaacgcaggtgatgcaaaatcgattgcttatgaagcgttaaaattagcgcaaaacaacgattttcatttagcgaatgagaaattggaaacagccaataaaacgttagcaaaagcacataatacccagacaaaattgattcaagcagaaatcaatggggagcatgtggaacagtctttattaatggtccatgcgcaagaccacttaatggcagctattagcgagatgtcattaattgaacagatgatcgccattctccgcagggtagctcaattagaagcgagatcggaaagtgagagtgtgtaa

SEQ ID NO: 153189 - protein, 112 aa, Bacillus clausii KSM-K16
MNVEVEIFNMISNAGDAKSIAYEALKLAQNNDFHLANEKLETANKTLAKAHNTQTKLIQAEINGEHVEQSLLMVHAQDHLMAAISEMSLIEQMIAILRRVAQLEARSESESV

SEQ ID NO: 153190 - DNA, 312 bp, Clostridium perfringens ATCC 13124
  CDS (1)..(312): transl_table=11
atgaaagaaataatcatggatttaataattcatagtggagaagctagaagttatgctatggaagctattcagcttgctaaagcaggagatgtagaaggggctagaagcttaatagaaaaagcatcaatacaattaggtaaagctcataaatcacaaacagctttgattcaagatgaggctagtgacaataaaatagaaatatccatgctattaattcatgcacaggatcaattgatgactactatgacattaaaagatttagcaaatgaaataatagatttgtatgaaaaattaaatcaaaaaaatttttag

SEQ ID NO: 153191 - protein, 103 aa, Clostridium perfringens ATCC 13124
MKEIIMDLIIHSGEARSYAMEAIQLAKAGDVEGARSLIEKASIQLGKAHKSQTALIQDEASDNKIEISMLLIHAQDQLMTTMTLKDLANEIIDLYEKLNQKNF

SEQ ID NO: 153192 - DNA, 324 bp, Pediococcus pentosaceus ATCC 25745
  CDS (1)..(324): transl_table=11
atgggcgaacaagaacaaaatctagaagtgatcatgggactaattattaatggtgggaacgcaaagagctctgcatttgaagctatcaacgctgctaaagcaggagactttgaaaaagcagatgaaaaattaaaagaatctgatggttttttgactgaagctcataacgtccaaaccgggatgttaactgaagaagctaagggaaaccatgctaaagtttcactgctaacggttcattcacaagaccacatcatgaatgccattacttttagagatttagctggagaaattgttgatttatataaaaaaatggccgaaaaataa

SEQ ID NO: 153193 - protein, 107 aa, Pediococcus pentosaceus ATCC 25745
MGEQEQNLEVIMGLIINGGNAKSSAFEAINAAKAGDFEKADEKLKESDGFLTEAHNVQTGMLTEEAKGNHAKVSLLTVHSQDHIMNAITFRDLAGEIVDLYKKMAEK

SEQ ID NO: 153194 - DNA, 351 bp, Pediococcus pentosaceus ATCC 25745
  CDS (1)..(351): transl_table=11
atgatagataaagagagtagctctacagtagccgtaaaagaaaccatggaaattattattaatgcaggtgatgcacgtgattttatatttaaagctttagatgaagttgcaaatagtaactatcaaaaagcaagagaattgataaaaaaggctaatgaaaagttggtagtagcacataggatccaaacaaaaaaactacaagaagaggctgagggagatgatgtgacgtattcagtattatttacccatgcccaagacacagtaatgacgattatgagtgaatataatcttgctaaacgattaatcaatatttttgaaaaaaaagaagagaaatttagggggagtaaataa

SEQ ID NO: 153195 - protein, 116 aa, Pediococcus pentosaceus ATCC 25745
MIDKESSSTVAVKETMEIIINAGDARDFIFKALDEVANSNYQKARELIKKANEKLVVAHRIQTKKLQEEAEGDDVTYSVLFTHAQDTVMTIMSEYNLAKRLINIFEKKEEKFRGSK

SEQ ID NO: 153196 - DNA, 324 bp, Oenococcus oeni PSU-1
  CDS (1)..(324): transl_table=11
atgagtgaagagattgaaaaccaaaaggtcatcatgagcctgatcatcgccggcggcaatgccaaaggagcatccttcttagccattaaggccgcaaaagaaaaagacttcaaagaagccgaactaaaactaacagaagccgatcgttttctagcccaggcccataacgcccagactgatatgttgactaaagaagcaaacggagaacacgcccaaatgtgtctgttaatggtccatgcccaggaccatgtcatgaccgcgattacctttcgtgatctggccggtgagatagttgagctgtataaaaggatcgaggataaatga

SEQ ID NO: 153197 - protein, 107 aa, Oenococcus oeni PSU-1
MSEEIENQKVIMSLIIAGGNAKGASFLAIKAAKEKDFKEAELKLTEADRFLAQAHNAQTDMLTKEANGEHAQMCLLMVHAQDHVMTAITFRDLAGEIVELYKRIEDK

SEQ ID NO: 153198 - DNA, 336 bp, Oenococcus oeni PSU-1
  CDS (1)..(336): transl_table=11
atggcagaagaacaacatgatgaacaactacaaacagttatgggactaattattaacggaggaaatgctaagagttcatcttttgaagctatcaatgctgctaaaaaaggtcactttacagttgctgaccaaaaattgaaggaagctgacaagttcttagttgacgctcacaattctcaaacagatatgctaactaaagaagctaatggtgatcacgctaaagttactttgctaatggtacattcacaagatcatattatgaatgctattacatttagagacttagccggagaaattgttgatctatataagaaacttgctaaagaaggagaataa

SEQ ID NO: 153199 - protein, 111 aa, Oenococcus oeni PSU-1
MAEEQHDEQLQTVMGLIINGGNAKSSSFEAINAAKKGHFTVADQKLKEADKFLVDAHNSQTDMLTKEANGDHAKVTLLMVHSQDHIMNAITFRDLAGEIVDLYKKLAKEGE

SEQ ID NO: 153200 - DNA, 360 bp, Leuconostoc mesenteroides subsp. mesenteroides ATCC 8293
  CDS (1)..(360): transl_table=11
atgaaatcagaagacattcaagttgtcgcttttgaaattattttacacagtggaaatgcgcgcacaatggttcataaggcttttgaagccatgagagaaaaaaactttaagttatctaacgaaaatctaaaattatcaaatgacgaattactattagctcataaatcgcaaacaaacttgttacaagaatacgctgagggtagtcatattgatatggaaattatattagtccatgcacaagaccacttaatgacaacgatgactttacgtgagatggctattgaaatgcagactctttatgaggaggtacaagacattgaaaaaaggaatcaaacgagggccaaaaaagccacaggataa

SEQ ID NO: 153201 - protein, 119 aa, Leuconostoc mesenteroides subsp. mesenteroides ATCC 8293
MKSEDIQVVAFEIILHSGNARTMVHKAFEAMREKNFKLSNENLKLSNDELLLAHKSQTNLLQEYAEGSHIDMEIILVHAQDHLMTTMTLREMAIEMQTLYEEVQDIEKRNQTRAKKATG

SEQ ID NO: 153202 - DNA, 309 bp, Haemophilus somnus 2336
  CDS (1)..(309): transl_table=11
atgagtgagcaacttgaaatgcaattgatgaatttaattcttcaagcgggaatatgtcgtagtgctttaatggaagcactacaacatgctaaaaaacagcagtttgaggaagtagatagattacttaaacaggcggatgatgctttgttagcagcacatcacgctcaaacagaactcatcggacaggatgaaggtgaggggaaactacccgtcactattattatggtgcatgcacaagatcatgtaatgaatgctgttttgttaatggacatcatcaaagaatttattgagctatatcgaaaaaaataa

SEQ ID NO: 153203 - protein, 102 aa, Haemophilus somnus 2336
MSEQLEMQLMNLILQAGICRSALMEALQHAKKQQFEEVDRLLKQADDALLAAHHAQTELIGQDEGEGKLPVTIIMVHAQDHVMNAVLLMDIIKEFIELYRKK

SEQ ID NO: 153204 - DNA, 321 bp, Bacillus cereus G9241
  CDS (1)..(321): transl_table=11
atgactgatatgcaaactccatttgcgttaattttacatggtggcaacgcgagaagcgcggcacttgaagcaattgcttttgcaagacaaagagattttgagagtgcgagtgaaaagatgacacttgctagtgaagaaatttcagcagctcatcgtattcaaacggacttaattcaagaagaagcaagaggaaatcatgcagaaataagtttactgttagtgcatgcacaagatcatttaatgaatgcaattacagtgaaagaacttgcggaagaatttattactcttcataaacgagtagaagagaaagtgacagtataa

SEQ ID NO: 153205 - protein, 106 aa, Bacillus cereus G9241
MTDMQTPFALILHGGNARSAALEAIAFARQRDFESASEKMTLASEEISAAHRIQTDLIQEEARGNHAEISLLLVHAQDHLMNAITVKELAEEFITLHKRVEEKVTV

SEQ ID NO: 153206 - DNA, 321 bp, Bacillus cereus G9241
  CDS (1)..(321): transl_table=11
atgactacagcagaacaaattccattccaattaattttaaatagtggtaatgcacgaagctttgcgatggaggcacttcaatttgctaaacaggggaaaatggcagaagcggatgaagcgatggtaaaggcgaaagaagcgattaatgaagcgcatcatttccaaacagagctcatacaatcagaagcaagaggagaaaaaacagaggttagtgttcttttaatccacgcacaagatcatttaatgaatgcgattacagtaaaagaattagcagcagagtttattgacctttataaaaagttagaagcgaaaggggaataa

SEQ ID NO: 153207 - protein, 106 aa, Bacillus cereus G9241
MTTAEQIPFQLILNSGNARSFAMEALQFAKQGKMAEADEAMVKAKEAINEAHHFQTELIQSEARGEKTEVSVLLIHAQDHLMNAITVKELAAEFIDLYKKLEAKGE

SEQ ID NO: 153208 - DNA, 318 bp, Bacillus cereus G9241
  CDS (1)..(318): transl_table=11
atggatacgatagaaacgaaggcttttcatttaattttgcatgggggaaatgcgagaagttgctcaatggaagcaattgattgtgcaaagcgtggagaatttacagaagcagaagcgaaattacaagaagcgttagaggaattaaaagaggcgcaccgtgtacaaacggatctcatccagaaagaagctggtggtgaaaagactgaagttacccttctgatggtgcacgcgcaagatcatttaatgaatgcaattacggtgaaggaattagcgagtgaatttgtagagttatataggaagatgtcaatatctgaatga

SEQ ID NO: 153209 - protein, 105 aa, Bacillus cereus G9241
MDTIETKAFHLILHGGNARSCSMEAIDCAKRGEFTEAEAKLQEALEELKEAHRVQTDLIQKEAGGEKTEVTLLMVHAQDHLMNAITVKELASEFVELYRKMSISE

SEQ ID NO: 153210 - DNA, 324 bp, Bacillus cereus G9241
  CDS (1)..(324): transl_table=11
atgatgactacagcagaacaaattccattccaattaattttaaatagtggtaatgcacgaagctttgcgatggaggcacttcaatttgctaaacaggggaaaatggcagaagcggatgaagcgatggtaaaggcgaaagaagcgattaatgaagcgcatcatttccaaacagagctcatacaatcagaagcaagaggagaaaaaacagaggttagtgttcttttaatccacgcacaagatcatttaatgaatgcgattacagtaaaagaattagcagcagagtttattgacctttataaaaagttagaagcgaaaggggaataa

SEQ ID NO: 153211 - protein, 107 aa, Bacillus cereus G9241
MMTTAEQIPFQLILNSGNARSFAMEALQFAKQGKMAEADEAMVKAKEAINEAHHFQTELIQSEARGEKTEVSVLLIHAQDHLMNAITVKELAAEFIDLYKKLEAKGE

SEQ ID NO: 153212 - DNA, 318 bp, Streptococcus suis 89/1591
  CDS (1)..(318): transl_table=11
atgaacagagaagaaattactttattaggttttgagattgttgcattcgctggtgatgctcgctctcgtttgatggaggcactggctgctgctcaaaaaggtgattacgcaaaagcagaagaactagttgaagctgccaatgcttgtattgttgaagcccaccatgctcagacaagtttgttgcagaaagaagcggctggtgaggatttagcctttagtgtgacgctcatgcatggtcaagaccatctcatgacgacattattattgaaagatatgatgggtcatatgattgaactttacaaacgaggtgataagtaa

SEQ ID NO: 153213 - protein, 105 aa, Streptococcus suis 89/1591
MNREEITLLGFEIVAFAGDARSRLMEALAAAQKGDYAKAEELVEAANACIVEAHHAQTSLLQKEAAGEDLAFSVTLMHGQDHLMTTLLLKDMMGHMIELYKRGDK

SEQ ID NO: 153214 - DNA, 324 bp, Streptococcus suis 89/1591
  CDS (1)..(324): transl_table=11
atggaaatgattgttgcagatcaattgatcatgggattgattatttatgctggagatgcgaaaagtcacgcctaccaagctttgtcgcttgtcaaagcaggtgaagaagagcgagcagaagaggaattagaattggcagatgcagcattattagaagctcacaatatgcagacaaaattcttagcacaagaagctgggggaacaaaatctgatattacagcactatttgtccattcgcaagatcatttgatgacatctattacagagatcaatttgattaaagaaatcattgatttgcggaaagaactaaaaaaagttggctaa

SEQ ID NO: 153215 - protein, 107 aa, Streptococcus suis 89/1591
MEMIVADQLIMGLIIYAGDAKSHAYQALSLVKAGEEERAEEELELADAALLEAHNMQTKFLAQEAGGTKSDITALFVHSQDHLMTSITEINLIKEIIDLRKELKKVG

SEQ ID NO: 153216 - DNA, 315 bp, Streptococcus suis 89/1591
  CDS (1)..(315): transl_table=11
atgaatacagaagaattacaaatggctgcatttgggatcatcctcagtagtggcaatgcaagaagtgttatccacgaagcttttgctgctatgagagaaggtgattatgataaggcagaagagttattggaagccgccaatgctgacatgcttgaagcccaccattctcaaacgggtctcctacaggaatacgcaagcggtactgaagtgaaggtagagattattatggttcatgcgcaagatcatttgatgacaacaatgactttacgtgaggtagcgcttgaaatgttagctttgtatcgtaaagttggttag

SEQ ID NO: 153217 - protein, 104 aa, Streptococcus suis 89/1591
MNTEELQMAAFGIILSSGNARSVIHEAFAAMREGDYDKAEELLEAANADMLEAHHSQTGLLQEYASGTEVKVEIIMVHAQDHLMTTMTLREVALEMLALYRKVG

SEQ ID NO: 153218 - DNA, 318 bp, Photobacterium sp. SKA34
  CDS (1)..(318): transl_table=11
atgaataaagatcaatacgaagaatttgtaatgagtctgatagttcaagccggtcagactagaagtatgttaatgacagccattcgagaagctaaaaatggcaattttgatgaagccgattctcttgttaaaaatgcaagtctatcgttaaaagaagcacatcaaattcaaacaaaactcattgaatatgatgagggtgaaggaaagttaccagtgcatatcgttatggttcatgcacaagaccacctaatgaatgctgtcttaatgatggatctagccactgagataattgatttaagaaaaacagtatctcagtaa

SEQ ID NO: 153219 - protein, 105 aa, Photobacterium sp. SKA34
MNKDQYEEFVMSLIVQAGQTRSMLMTAIREAKNGNFDEADSLVKNASLSLKEAHQIQTKLIEYDEGEGKLPVHIVMVHAQDHLMNAVLMMDLATEIIDLRKTVSQ

SEQ ID NO: 153220 - DNA, 327 bp, Photobacterium sp. SKA34
  CDS (1)..(327): transl_table=11
atggaaaacattgacttagaagaacaggtgatgggtattattatcaatgcagggcaatcacgcagtctttgttacgaagcacttcgtcatgcaaaaagtggcaacttctcagaggtggatagtttattaaaagaggctcaagaatttgccaatcaagcacatcttgttcagacaaagcttattgaagccgatgaaggaactggcaaaacaaaaatgaccttaataatggttcacgcacaagatcacttgatgacatcaatgctagcaaaagaactggtcactgagatgattgaacttcacaaaaaagtggcaaaacaagcggcttaa

SEQ ID NO: 153221 - protein, 108 aa, Photobacterium sp. SKA34
MENIDLEEQVMGIIINAGQSRSLCYEALRHAKSGNFSEVDSLLKEAQEFANQAHLVQTKLIEADEGTGKTKMTLIMVHAQDHLMTSMLAKELVTEMIELHKKVAKQAA

SEQ ID NO: 153222 - DNA, 354 bp, Vibrio sp. Ex25
  CDS (1)..(354): transl_table=11
atgggccgcaattaccgcggcccgattttcggagagaaaatgatggaacaagaattggttgtgatggagatcatctgtaatgctggcgaagccagaagtttgagctacgaggcgttgcgtttatctagagaacaagattttgatgcggctgaggagaagctctctcaagcaagagagtgcattaacaaagcccacttaattcagactcagttgattgaggaagatcagggggaagggaaagtcccgatgacgttagtgatggtacatgctcaagatcacttaatgaccacgattttggctcaagaaatggctgtagaaatcgttgcactgaacaaaaaaatctcgaacaaataa

SEQ ID NO: 153223 - protein, 117 aa, Vibrio sp. Ex25
MGRNYRGPIFGEKMMEQELVVMEIICNAGEARSLSYEALRLSREQDFDAAEEKLSQARECINKAHLIQTQLIEEDQGEGKVPMTLVMVHAQDHLMTTILAQEMAVEIVALNKKISNK

SEQ ID NO: 153224 - DNA, 351 bp, Escherichia coli B
  CDS (1)..(351): transl_table=11
atgatggatctcgacaacattcccgatacgcaaacggaagctgaagagctggaagaagtggtgatggggcttatcatcaactccggacaagcgcgcagcctggcgtatgcggcactgaaacaggcgaagcagggcgattttgccgcagcaaaagccatgatggatcagtcacggctggcattgaatgaagcgcatctggtacagacgaaactgattgaaggcgatgcgggcgaaggtaagatgaaagtgagtctggtgctggtccacgctcaggatcatttaatgacgtccatgcttgcgcgtgaactgattactgaattaattgagcttcatgaaaaactgaaggcataa

SEQ ID NO: 153225 - protein, 116 aa, Escherichia coli B
MMDLDNIPDTQTEAEELEEVVMGLIINSGQARSLAYAALKQAKQGDFAAAKAMMDQSRLALNEAHLVQTKLIEGDAGEGKMKVSLVLVHAQDHLMTSMLARELITELIELHEKLKA

SEQ ID NO: 153226 - DNA, 318 bp, Moritella sp. PE36
  CDS (1)..(318): transl_table=11
atggaaattacagaagaatttttgatgacacttttatgccaggctggtgccgcgcgttcagcagtgatgcaagcaatgctagaagcaaggcaaggtgatttcgaatcagcaaaagcatcacttaaagccgccgatgaagcattagcagaagtacataaatcacaaacagaactcattagctttgacgaaggtgaaggcaaagtaaaaatgaccctgatcttaacgcatattcaagatcacattatgaatgcgatgctgtgtaaagaccttgcattcgaaattattgaacttcaaagacgaatccaaaatgaggactaa

SEQ ID NO: 153227 - protein, 105 aa, Moritella sp. PE36
MEITEEFLMTLLCQAGAARSAVMQAMLEARQGDFESAKASLKAADEALAEVHKSQTELISFDEGEGKVKMTLILTHIQDHIMNAMLCKDLAFEIIELQRRIQNED

SEQ ID NO: 153228 - DNA, 336 bp, Lactobacillus rhamnosus
  CDS (1)..(336): transl_table=11
atggcgacgagagaagagatttcgatggttgggtttgcacttgtggcttatgcaggggatgctcggactgcggctttgcgtgctttgaatgctgcagaagcgggtgactttgaaggagccgaggccaaacttgacgaagcgcaaaaagatattaatgaagcacataatcaacagacgcaattgttaagccaagaagcaggcggagcggaaatggatgtgacttttatcatggtgcatgggcaggatacgttaatgaccaccatgttgcttattgatcagtctcgttacatgattcgaatgcttaaacgtatcaagcaactcgaagacaagcaataa

SEQ ID NO: 153229 - protein, 111 aa, Lactobacillus rhamnosus
MATREEISMVGFALVAYAGDARTAALRALNAAEAGDFEGAEAKLDEAQKDINEAHNQQTQLLSQEAGGAEMDVTFIMVHGQDTLMTTMLLIDQSRYMIRMLKRIKQLEDKQ

SEQ ID NO: 153230 - DNA, 327 bp, Pectobacterium carotovorum subsp
  CDS (1)..(327): transl_table=11
atgctcgatgaaaccacgataatggaattgattatttatgcgggagaggcgcgctccagctcaatggaggcgctgagcgccgccagaaaatatgactgggacaaggctgaagaactgctgaacgcggcttctgtggcggcgcgcaaagcccatcaaatccagactgctttgattggtgccgatgagggcagcggaaaaatcccgatcaatctgattttggttcacgcgcaagatcacctgatgaacgcgatgctatgccgtgaactggtggaggagctgattcaactgcatcgggaaatctcctccctgaaacagcttataaattaa

SEQ ID NO: 153231 - protein, 108 aa, Pectobacterium carotovorum subsp
MLDETTIMELIIYAGEARSSSMEALSAARKYDWDKAEELLNAASVAARKAHQIQTALIGADEGSGKIPINLILVHAQDHLMNAMLCRELVEELIQLHREISSLKQLIN

SEQ ID NO: 153232 - DNA, 333 bp, Bacillus pumilus
  CDS (1)..(333): transl_table=11
atggaaaagaaaacactcgaagggctcacggaggaacaagtgagctttcaattgatcttacacagcgggaatgcacgcagcaaattgcttcaggctctaaaacaatatcgagaaggtctagaagaagaagcttttgatcttatgaaagaagcggaagaagatttacggcttgcacatgacatccattttcaactcgtgcagaaagaggcaggcggagaaagggcatccttttccttactgctcatgcacgctgaagatcacttaatgtcgaccattaccatcaaggagcttgtgggagagctcctgccgatattccaatcgcttaaacaataa

SEQ ID NO: 153233 - protein, 110 aa, Bacillus pumilus
MEKKTLEGLTEEQVSFQLILHSGNARSKLLQALKQYREGLEEEAFDLMKEAEEDLRLAHDIHFQLVQKEAGGERASFSLLLMHAEDHLMSTITIKELVGELLPIFQSLKQ

SEQ ID NO: 153234 - DNA, 327 bp, Bacillus stearothermophilus
  CDS (1)..(327): transl_table=11
atgcaaacgtatgaacaaactgtattccaactgattcttcatggcggaaacggccgcagttatgcaatggaggcgattacggcggcgaaaaaaggggaatttgccgaggcgcgcaggctgcttgaacaggcgggagcagaactgcaggcggcccatgggctgcagaccgcgttgctgcaacaagaagcgagcggcgggcagccggtggtgacgcttctgatggtgcatgcccaagatcatttaatgacggcgatcacggtcaaggatttagccgctgaattcgtggagctgtatgaagcgctcaagcggcaaacaaccgaatcataa

SEQ ID NO: 153235 - protein, 108 aa, Bacillus stearothermophilus
MQTYEQTVFQLILHGGNGRSYAMEAITAAKKGEFAEARRLLEQAGAELQAAHGLQTALLQQEASGGQPVVTLLMVHAQDHLMTAITVKDLAAEFVELYEALKRQTTES

SEQ ID NO: 153236 - DNA, 333 bp, Bacillus subtilis
  CDS (1)..(333): transl_table=11
gtgaatgaggaaatggaacaaatcatttttcaaatcatccttcacggaggaaacggtaggagctccgcaatggaggccattgccgctgcgaaaagcggtgacgcagaagaagcgcggaaaaagcttcaagacgctgctgaagaattgtcaaaagcccatcattatcagacagagctgatccaaaatgaagcgggcggagaaaagacggaaatgacgcttctgatggttcatgcacaggatcatttaatgaatgcaatgacagtgaaggatatggctgcagagatcattgagttatatgaaaaaatcaccgagcaaaggggagcaagcatatga

SEQ ID NO: 153237 - protein, 110 aa, Bacillus subtilis
MNEEMEQIIFQIILHGGNGRSSAMEAIAAAKSGDAEEARKKLQDAAEELSKAHHYQTELIQNEAGGEKTEMTLLMVHAQDHLMNAMTVKDMAAEIIELYEKITEQRGASI

SEQ ID NO: 153238 - DNA, 339 bp, Lactobacillus casei
  CDS (1)..(339): transl_table=11
atgatggctactaaagaagaaatttcaatggttggttttgcacttgtggcgtatgcaggcgatgctcgaacggctgctgtgcatgcacttgatgccgctgaagcaggcgatttcgataaggcaaacgaattggttgagaaggcccaacaggatatcaatgaagcccacaaccaacagacccagcttctaagtcaagaagctggcggtgctgaaatggatgtcacctttatcatggttcatggtcaagatacgttgatgacaaccatgttgctcattgatgaaacacgctacatgattcgcatgtttaagcggatcaaagaacttgagaacaagcagtaa

SEQ ID NO: 153239 - protein, 112 aa, Lactobacillus casei
MMATKEEISMVGFALVAYAGDARTAAVHALDAAEAGDFDKANELVEKAQQDINEAHNQQTQLLSQEAGGAEMDVTFIMVHGQDTLMTTMLLIDETRYMIRMFKRIKELENKQ

SEQ ID NO: 153240 - DNA, 312 bp, Staphylococcus aureus
  CDS (1)..(312): transl_table=11
atgaatagagaagaagtccaattattaggttttgaaattgttgcatttgcaggggatgcacgttctaagtttttagaagcattaacagcagctcaagctggagattttgcaaaagcagatgcactgattgaagaaggaaacaattgcattgcggaagcgcatagagcacaaacaagcctgttggctaaagaagcgcaaggtgatgatattgcatacagtgtaacgatgatgcatggtcaagatcatttaatgacaacaattttactgaaagatttaatgaagcatttattagaattttataaaagagggtga

SEQ ID NO: 153241 - protein, 103 aa, Staphylococcus aureus
MNREEVQLLGFEIVAFAGDARSKFLEALTAAQAGDFAKADALIEEGNNCIAEAHRAQTSLLAKEAQGDDIAYSVTMMHGQDHLMTTILLKDLMKHLLEFYKRG

SEQ ID NO: 153242 - DNA, 24 bp, Artificial sequence
  primer
atgatggatctcgataacattccc

SEQ ID NO: 153243 - DNA, 25 bp, Artificial sequence
  primer
ttatgccttcagtttttcatgaagc

SEQ ID NO: 153244 - protein, 84 aa, Artificial sequence
  consensus sequence
  Variant (2)..(4): Xaa in position 2 to 4 is any amino acid
  Variant (6)..(6): Xaa in position 6 is any amino acid
  Variant (8)..(13): Xaa in position 8 to 13 is any amino acid
  Variant (15)..(17): Xaa in position 15 to 17 is any amino acid
  Variant (19)..(25): Xaa in position 19 to 25 is any amino acid
  Variant (27)..(32): Xaa in position 27 to 32 is any amino acid
  Variant (34)..(39): Xaa in position 34 to 39 is any amino acid
  Variant (42)..(43): Xaa in position 42 to 43 is any amino acid
  Variant (46)..(46): Xaa in position 46 is any amino acid
  Variant (48)..(61): Xaa in position 48 to 61 is any amino acid
  Variant (62)..(66): Xaa in position 62 to 66 is any or no amino acid
  Variant (68)..(68): Xaa in position 68 is any amino acid
  Variant (74)..(80): Xaa in position 74 to 80 is any amino acid
  Variant (82)..(83): Xaa in position 82 to 83 is any amino acid
IXXXGXAXXXXXXAXXXAXXXXXXXAXXXXXXAXXXXXXAHXXQTXLXXXXXXXXXXXXXXXXXXXHXQDHLMXXXXXXXLXXE

SEQ ID NO: 153245 - protein, 24 aa, Artificial sequence
  protein pattern
  Variant (2)..(3): Xaa in position 2 to 3 is any amino acid
  Variant (4)..(4): Xaa in position 4 is any or no amino acid
  Variant (6)..(6): Xaa in position 6 is Ala, Gly or Ser
  Variant (9)..(10): Xaa in position 9 to 10 is any amino acid
  Variant (12)..(12): Xaa in position 12 is Ala, Asn, Thr or Val
  Variant (13)..(17): Xaa in position 13 to 17 is any amino acid
  Variant (18)..(18): Xaa in position 18 is Asp, Glu, Asn or Ser
  Variant (19)..(19): Xaa in position 19 is Phe, Leu or Met
  Variant (20)..(22): Xaa in position 20 to 22 is any amino acid
  Variant (23)..(23): Xaa in position 23 is Phe, Ile, Leu, Met or Val
  Variant (24)..(24): Xaa in position 24 is Ile, Leu or Val
LXXXHXQDXXMXXXXXXXXXXXXX

SEQ ID NO: 153246 - DNA, 1332 bp, Escherichia coli
  CDS (1)..(1332): transl_table=11
atgagtacttcagatagcattgtatccagccagacaaaacaatcgtcctggcgtaaatcagataccacatggacgttaggcttgtttggtacggcaatcggcgccggggtgctgttcttccctatccgcgcaggttttggcggactgatcccgattcttctgatgttggtattggcataccccatcgcgttttattgccaccgggcgctggcgcgtctgtgtctttctggctctaacccttccggcaacattacggaaacggtggaagagcattttggtaaaactggcggcgtggttatcacgttcctgtacttcttcgcgatttgcccactgctgtggatttatggcgttactattaccaatacctttatgacgttctgggaaaaccagctcggctttgcaccgctgaatcgcggctttgtggcgctgttcctgttgctgctgatggctttcgtcatctggtttggtaaggatctgatggttaaagtgatgagctacctggtatggccgtttatcgccagcctggtgctgatttctttgtcgctgatcccttactggaactctgcagttatcgaccaggttgacctcggttcgctgtcgttaaccggtcatgacggtatcctgatcactgtctggctggggatttccatcatggttttctcctttaacttctcgccaatcgtctcttccttcgtggtttctaagcgtgaagagtatgagaaagacttcggtcgcgacttcaccgaacgtaaatgttcccaaatcatttctcgtgccagcatgctgatggttgcagtggtgatgttctttgcctttagctgcctgtttactctgtctccggccaacatggcggaagccaaagcgcagaatattccagtgctttcttatctggctaaccactttgcgtccatgaccggtaccaaaacaacgttcgcgattacactggaatatgcggcttccatcatcgcactcgtggctatcttcaaatctttcttcggtcactatctgggaacgctggaaggtctgaatggcctggtcctgaagtttggttataaaggcgacaaaactaaagtgtcgctgggtaaactgaacactatcagcatgatcttcatcatgggctccacctgggttgttgcctacgccaacccgaacatccttgacctgattgaagccatgggcgcaccgattatcgcatccctgctgtgcctgttgccgatgtatgccatccgtaaagcgccgtctctggcgaaataccgtggtcgtctggataacgtgtttgttaccgtgattggtctgctgaccatcctgaacatcgtatacaaactgttttaa

SEQ ID NO: 153247 - protein, 443 aa, Escherichia coli
MSTSDSIVSSQTKQSSWRKSDTTWTLGLFGTAIGAGVLFFPIRAGFGGLIPILLMLVLAYPIAFYCHRALARLCLSGSNPSGNITETVEEHFGKTGGVVITFLYFFAICPLLWIYGVTITNTFMTFWENQLGFAPLNRGFVALFLLLLMAFVIWFGKDLMVKVMSYLVWPFIASLVLISLSLIPYWNSAVIDQVDLGSLSLTGHDGILITVWLGISIMVFSFNFSPIVSSFVVSKREEYEKDFGRDFTERKCSQIISRASMLMVAVVMFFAFSCLFTLSPANMAEAKAQNIPVLSYLANHFASMTGTKTTFAITLEYAASIIALVAIFKSFFGHYLGTLEGLNGLVLKFGYKGDKTKVSLGKLNTISMIFIMGSTWVVAYANPNILDLIEAMGAPIIASLLCLLPMYAIRKAPSLAKYRGRLDNVFVTVIGLLTILNIVYKLF

SEQ ID NO: 153248 - DNA, 1290 bp, Salmomella typhimurium
  CDS (1)..(1290)
atggaaaccactcagaccagcactattgcttcgattgactctcgaagcgcatggcgcaaaacggataccatgtggatgctgggcctttacggcacggctatcggcgcgggcgttctgttcctgccgatcaacgcaggcgtcggcggcatgattccgctcatcatcatggcgattctcgctttcccgatgacctttttcgcacaccgtggtttaacccgcttcgtgctgtccggtaaaaatccgggtgaagacatcactgaagtcgttgaggaacacttcggtatcggcgcaggtaaactgattaccctgctttacttcttcgcgatttaccccatcctgctggtttacagcgtggcgattactaataccgtggaaagcttcctgacccaccagttagcgattaatccgccgccgcgggcgattctttccctgatcctgattgttggcatgatgaccatcgtgcgcttcggcgagcaaatgatcgttaaggcgatgagtatcctggtattcccgttcgtcgctgcgctgatgctgctggccttgtacctgatcccgcagtggaacggcgcggcgctggaaactctgtcctttgattccgccgcgtctaccggtaacggtctgtggatgacgctgtggctggcgattccggtgatggttttctctttcaaccactccccgatcatctcctccttcgcggttgcgaagcgtgaagagtacggtgaaggcgctgagaagaaatgttctaaaattctggccttcgcccacatcatgatggtgctgaccgtgatgttcttcgtcttcagctgcgtgctgagcctgacgccggcagatctggcagcggcaaaagagcagaacatctctattctgtcttacctggcgaaccattttaacgcgccgatcatcgcctggatggcgccgatcattgcgatgattgctatcaccaaatccttcctcggccactaccttggcgcgcgtgaaggctttaacgggatggtgattaaatcgctgcgtggtaaaggtaaatccatcgaaatcaacaaactgaataaaattaccgcgctgttcatgctggtcaccacctggattgtggcgacgctgaaccccagcatcctgggcatgattgaaaccctgggcggcccgatcatcgcgatgattctgttcctgatgccgatgtatgccatccagaaagtaccggcaatgcgtaagtacagcggtcatatcagcaacgtattcgttgtgattatgggcctgattgccatctccgctattttctactcactgttcagctaa

SEQ ID NO: 153249 - protein, 429 aa, Salmomella typhimurium
METTQTSTIASIDSRSAWRKTDTMWMLGLYGTAIGAGVLFLPINAGVGGMIPLIIMAILAFPMTFFAHRGLTRFVLSGKNPGEDITEVVEEHFGIGAGKLITLLYFFAIYPILLVYSVAITNTVESFLTHQLAINPPPRAILSLILIVGMMTIVRFGEQMIVKAMSILVFPFVAALMLLALYLIPQWNGAALETLSFDSAASTGNGLWMTLWLAIPVMVFSFNHSPIISSFAVAKREEYGEGAEKKCSKILAFAHIMMVLTVMFFVFSCVLSLTPADLAAAKEQNISILSYLANHFNAPIIAWMAPIIAMIAITKSFLGHYLGAREGFNGMVIKSLRGKGKSIEINKLNKITALFMLVTTWIVATLNPSILGMIETLGGPIIAMILFLMPMYAIQKVPAMRKYSGHISNVFVVIMGLIAISAIFYSLFS

SEQ ID NO: 153250 - DNA, 1242 bp, Helicobacter pylori 26695
  CDS (1)..(1242): transl_table=11
atggcacaagaaaaagcagttccaagagatcctaaaaaactcaatgcgtttgatttgcgttggatggtgtccttatttggcacggcggtgggggctgggattttatttttgcctattagagccggtgggcatggggtatgggctattgtggtaatgagcgcgatcattttccctttaacttatctagggcatagagctttagcttatttcataggatctaaagacaaagaagacattaccatggtcgttcgctctcattttggcgctcaatggggttttcttatcactttgctttatttcttagcgatttatcctatttgcttggtttatggggtgggtatcactaacgtgtttgatcattttttcactaaccagttgcatttagcgccttttcatcggggattattggctgtagcgttagtttctttaatgatgttggtgatggtttttaacgctacgattgttacgcgcatttgtaacgctttagtgtatcctttatgcttgattttattgcttttttctttgtatcttatcccttattggcaaggcgctaatctttttgtggtgccgagttttaaagaatttgtgttagcgatttggctaaccttaccggtgcttgtgtttgcattcgaccatagccccatcatttcaaccttcactcaaaatgtgggaaaagaatacggcgttttcaaagaatacaaactcaatcaaattgaattagggacatcgctgatgcttttagggtttgtgatgttttttgtgttttcgtgcgtcatgtgcttgaatgctgatgattttgtgaaagcaagggaacaaaatatccccattttaagctatttggctaacactttaaacaaccctttaatcaattatgcggggcctgtggtggcttttttagcgattttttcatctttttttgggcattattatggggctaaggagggtttagaaggcattattattcaaagcttaaaattgaaaaaagcttctaaacccttgagcgttagcgtaacgatttttttatggctgactatcacgcttgtggcttatattaaccccaatatcttggattttattgaaaatttaggcggccccattatcgcgctcattctgtttgtgatgcccatgatagctttttatagtgtttctagtttgaagcgttttagaaatttcaaagtggatatttttgtgtttgtctttgggagcttgacggctttgagcgtgtttttaggactattttaa

SEQ ID NO: 153251 - protein, 413 aa, Helicobacter pylori 26695
MAQEKAVPRDPKKLNAFDLRWMVSLFGTAVGAGILFLPIRAGGHGVWAIVVMSAIIFPLTYLGHRALAYFIGSKDKEDITMVVRSHFGAQWGFLITLLYFLAIYPICLVYGVGITNVFDHFFTNQLHLAPFHRGLLAVALVSLMMLVMVFNATIVTRICNALVYPLCLILLLFSLYLIPYWQGANLFVVPSFKEFVLAIWLTLPVLVFAFDHSPIISTFTQNVGKEYGVFKEYKLNQIELGTSLMLLGFVMFFVFSCVMCLNADDFVKAREQNIPILSYLANTLNNPLINYAGPVVAFLAIFSSFFGHYYGAKEGLEGIIIQSLKLKKASKPLSVSVTIFLWLTITLVAYINPNILDFIENLGGPIIALILFVMPMIAFYSVSSLKRFRNFKVDIFVFVFGSLTALSVFLGLF

SEQ ID NO: 153252 - DNA, 1242 bp, Helicobacter pylori J99
  CDS (1)..(1242): transl_table=11
atggcacaagaaaaagcggttataagagatcctaaaaaactcaatgcgtttgatttgcgttggatagcgtctttatttggcacggcggtgggggctgggattttatttttgcctattagagccggtgggcatgggatatgggctattgtggtgatgagcgcgatcatattccctttaacttatctagggcatagagccttggcttatttcataggatctaaagataaagaagacattaccatggtcgttcgctctcattttggcgctcaatggggttttcttatcactttgctttatttcttggcgatttatcctatttgtttggcttatggggtgggtatcactaacgtgtttgatcattttttcactaaccagttgcatttagcgccttttcatcggggcttactggctgtagcgttagtctctttaatgatgttggtgatggtttttaacgctacgattgttacgcgcatttgtaacgctttagtgtatcctttatgcttgattttattgcttttttctttgtatcttatcccttattggcaaggcgctaacctttttgtggtgccgagttttaaagaatttgtgctagccatttggctaaccttaccggtgcttgtgttttcattcaaccatagccccattatttcaaccttcacccaaaatgtgggaaaagaatacggcgctttcaaagaatacaaactcaatcaaattgaattagggacatcgctgatgcttttagggtttgtgatgttttttgtgttttcgtgtgttatgtgcttgaatgctgatgattttgtgaaagcaagggaacaaaatatccccattttaagctattttgctaacaccctaaacaaccccttaatcaattatgcggggcctgtggtggcttttttagcgattttttcatctttttttgggcattattatggggctaaagagggtttagaaggcattatcattcaaagtttaaaattgaaacaagcttctaaaaccttgagcgttggcgtaacgatttttttatggctgactatcacgctggtggcttatattaaccctaatatcttggattttattgaaaatttaggcggccccattatcgcgctcattctgtttgtgatgcccatgatagctttttatagcgtttctagtttgaagcgttttagaaacttcaaagtggatatttttgtgtttgtctttgggagcttgacggctttgagcgtgtttttaggactattttaa

SEQ ID NO: 153253 - protein, 413 aa, Helicobacter pylori J99
MAQEKAVIRDPKKLNAFDLRWIASLFGTAVGAGILFLPIRAGGHGIWAIVVMSAIIFPLTYLGHRALAYFIGSKDKEDITMVVRSHFGAQWGFLITLLYFLAIYPICLAYGVGITNVFDHFFTNQLHLAPFHRGLLAVALVSLMMLVMVFNATIVTRICNALVYPLCLILLLFSLYLIPYWQGANLFVVPSFKEFVLAIWLTLPVLVFSFNHSPIISTFTQNVGKEYGAFKEYKLNQIELGTSLMLLGFVMFFVFSCVMCLNADDFVKAREQNIPILSYFANTLNNPLINYAGPVVAFLAIFSSFFGHYYGAKEGLEGIIIQSLKLKQASKTLSVGVTIFLWLTITLVAYINPNILDFIENLGGPIIALILFVMPMIAFYSVSSLKRFRNFKVDIFVFVFGSLTALSVFLGLF

SEQ ID NO: 153254 - DNA, 1254 bp, Vibrio cholerae O1 biovar eltor str. N16961
  CDS (1)..(1254): transl_table=11
atgaaagactctcaggaagtgacccattttagtgctgcccgttcctcaaaatggactcaacatgatacctattggttactaagcctatttggtacagcagtaggtgcagggattttatttttaccgatcaatattggcttagggggattctggccgctggtgctgatggcagtattagcctttcctatgacctatctgtcccaccgtggactggcgcgttttgtactttcatcacgtcgcccaaatgccgattttactgatgtggtcgaagagcactttggccaaaatgctggacgattgatttccctactctattttttatcgatttttcctattctgcttatctacggtgttggccttaccaacacagtcgatagtttcttggttaaccaagcggacatggtatcgccgccacgcgcactactttctggtgctttagtgtttgggcttatcgctatcatgctcagtggcgagaaaatcatgctgcgcgcttttgccatcatggtttatccgctggcggcgatccttgccctactctcgctgtatttgatcccttactggtcaatgccttcgtttgattttccgcaaaccagcgattttctgcacactgtatggctggccgtaccggtagtggtgttctcattcagccatgctgcggccatttcaagttttgccaatatccagcgtcgtcattatggtgaacaagctgatcaaaagtctgagcagattctgcgccacactagcgtggtcttaattttgtttgtgttgttgtttgtcttctcttgtgtacttgccctttcgccacaagcactgcaagaagccaaagcacaaaacatttcggtgctgacttatctggccaatgtcactgacaacccatttatcgcgacgctcgggcctctggtcgccttcatcgccatcacctcttccttcctcggccacttcttaggggcgcgtgaaagtttatctggcctactgaccaaaaacttaggggtatcactacgtttggcggaacgtctcaccatcggctttttatttgtcaccatctggatcgctgcaatcctcaacccaagcattttgggcatgatggaagcgctttctggtccagtcatcgcaatgattctattcataatgccgatgattgccgtcttcaaagtgcccgccctgcgtgaacatcaaaaacgtttcagcactttcttcgtgttactggttggattgctcgccgtttctgctctgctctacagtttacttcgctaa

SEQ ID NO: 153255 - protein, 417 aa, Vibrio cholerae O1 biovar eltor str. N16961
MKDSQEVTHFSAARSSKWTQHDTYWLLSLFGTAVGAGILFLPINIGLGGFWPLVLMAVLAFPMTYLSHRGLARFVLSSRRPNADFTDVVEEHFGQNAGRLISLLYFLSIFPILLIYGVGLTNTVDSFLVNQADMVSPPRALLSGALVFGLIAIMLSGEKIMLRAFAIMVYPLAAILALLSLYLIPYWSMPSFDFPQTSDFLHTVWLAVPVVVFSFSHAAAISSFANIQRRHYGEQADQKSEQILRHTSVVLILFVLLFVFSCVLALSPQALQEAKAQNISVLTYLANVTDNPFIATLGPLVAFIAITSSFLGHFLGARESLSGLLTKNLGVSLRLAERLTIGFLFVTIWIAAILNPSILGMMEALSGPVIAMILFIMPMIAVFKVPALREHQKRFSTFFVLLVGLLAVSALLYSLLR

SEQ ID NO: 153256 - DNA, 1242 bp, Pasteurella multocida subsp. multocida str. Pm70
  CDS (1)..(1242): transl_table=11
atggcaacaaaatcttgtgtcagttggagcaagtttgatcttgtctgggcattaaatttattcggtaccgctgtgggtgcgggtgtcttatttttacccattaatgcaggaaaaggcgggttttggcccttagtatgtatgacactcctagtaggtcccatgacttacttagcacaccgcggactcactcgttttgtcctatcttctgccaaaagcggcagtgatattactgaagtcgtagaagaacattttgggcaaaccgcaggaaaattcattactttactttatttctttgcgatttttcctattctgctgatttatggtaacggaataactaacacagtcgattcatttattgtacatcaactgcatatgaactcacctaatcgcgccttattggctttcatcctcattgccggcttaatttctgttatgttaatgaacgagaagatcatgctaaaaattaccgagtttttagtctatccattagtctgtattctgctcgccttatcactctatcttattccggaatggaatacctcaatgttaacagaatttccgagtacgcaagccctattcagcaccttatggattacgatccctgtattggttttttcgtttaaccactcaccggctatttcatcttttgcccaatctcaacaacgtgaatatggtgatctcacaaacacagaaacgcatactaaccgcactttaaaaataacctcaagtattttgctggtgtttgtgatgttcttcgtttttagctgtgtattaagtttaactcctgctgaattagcacaagcaaaaacacaaaatatcagtatcttatccttcctcgccaacaaatttgataatccttatatttcttaccttggacctttcgttgccttcttggcaattactagctctttctttggtcactatctcggtgcaaaagaaggactagaagggttaattatcaaaatgtctggcaaaaaagagattaagtgtcaaaaattaaattatttcaccgcacttttcttcttgctaaccctgtggattgtcgccattattaatccaagtattcttggcttaatagaatccttcggcggaccgattattgctgcaattttatttatcatgccgatgtatgcgatccgtaaaattcccgcgatgcaacgttaccaaggacgcttttcgaatctcttcgttaccatcatgggtatgttcgccatctcagcggttgtttatggcttattttaa

SEQ ID NO: 153257 - protein, 413 aa, Pasteurella multocida subsp. multocida str. Pm70
MATKSCVSWSKFDLVWALNLFGTAVGAGVLFLPINAGKGGFWPLVCMTLLVGPMTYLAHRGLTRFVLSSAKSGSDITEVVEEHFGQTAGKFITLLYFFAIFPILLIYGNGITNTVDSFIVHQLHMNSPNRALLAFILIAGLISVMLMNEKIMLKITEFLVYPLVCILLALSLYLIPEWNTSMLTEFPSTQALFSTLWITIPVLVFSFNHSPAISSFAQSQQREYGDLTNTETHTNRTLKITSSILLVFVMFFVFSCVLSLTPAELAQAKTQNISILSFLANKFDNPYISYLGPFVAFLAITSSFFGHYLGAKEGLEGLIIKMSGKKEIKCQKLNYFTALFFLLTLWIVAIINPSILGLIESFGGPIIAAILFIMPMYAIRKIPAMQRYQGRFSNLFVTIMGMFAISAVVYGLF

SEQ ID NO: 153258 - DNA, 1251 bp, Campylobacter jejuni subsp. jejuni NCTC 11168
  CDS (1)..(1251): transl_table=11
atgaatactcctaaatggactagtcacgatacaaggtgggttttatctctttttggaacagctattggagccggcgtacttttgttgcctattagtgctgggcttggtggattgatacctttgttagttatacttgttttagcttttcctatgacttacttagctcatagaaatttatgtcgctttgtgctttcaagttctaatccaaaagatgatattacttttgttgcagaaagttattttggcaagggcggtggatttttaattacacttttgtatttttttgctattttgcctattttattggtttatagtgctaatcttacaacaactttgcttgagttcttaatcaatcagttcaatttcaatgcagatcttactcatgctgctcgttggtgggtgagttttttgattgttggagttttggttttgatttctattcttggtgaaaatgttgtaacaaaagcaatgagttttcttgtttttccttttattatatttttatttattttttcattgcttttaattccacaatggaatttatcgttatttgcaaatgttgatttttccgtaatttcaacaagtaatttttgggttactttatggcttgttattcctgtgatggtatttagttttaatcactctcctatcatttcttcacttgcttgttattgtaaaaaagaatatggtggttatgctgaacctcgcgctagaaaaattatttctttggcaattattcttatggtttttgttgtaatgttttttgttttttcttgtgctttaacctttacaccagaagattttgcatcagcaaaagatcaaaatatcaatattcttacttttatagcaaataaatttcctgaagtttctttactagcttatgttggacctattgttgcacttgtggctattagcaaaagtttcttagggcattatcttggttctcaagaaggcttaaatggtattttatataaagcaagtaatggtagaattcaaggtaaattcgctcaaactttaacagcgatcattacctttgctatcgcgtggcttgttgcgtataaaaatccaagtgttataggaattatcgaggctattggtggtcctgttttggctattttgcttttcttaatgccgctttattgtatttatcgttttgatattttggcaaggtttcgtaataaatttttagatctttttgttttggtaatggggatagttgcaatttctgctgcaattcatgatcttttataa

SEQ ID NO: 153259 - protein, 416 aa, Campylobacter jejuni subsp. jejuni NCTC 11168
MNTPKWTSHDTRWVLSLFGTAIGAGVLLLPISAGLGGLIPLLVILVLAFPMTYLAHRNLCRFVLSSSNPKDDITFVAESYFGKGGGFLITLLYFFAILPILLVYSANLTTTLLEFLINQFNFNADLTHAARWWVSFLIVGVLVLISILGENVVTKAMSFLVFPFIIFLFIFSLLLIPQWNLSLFANVDFSVISTSNFWVTLWLVIPVMVFSFNHSPIISSLACYCKKEYGGYAEPRARKIISLAIILMVFVVMFFVFSCALTFTPEDFASAKDQNINILTFIANKFPEVSLLAYVGPIVALVAISKSFLGHYLGSQEGLNGILYKASNGRIQGKFAQTLTAIITFAIAWLVAYKNPSVIGIIEAIGGPVLAILLFLMPLYCIYRFDILARFRNKFLDLFVLVMGIVAISAAIHDLL

SEQ ID NO: 153260 - DNA, 1332 bp, Escherichia coli O157:H7 EDL933
  CDS (1)..(1332): transl_table=11
atggaaattgcatcgaataaaggcgtcattgcagacgcttcgaccccggcgggtcgtgctggaatgagtgagagcgagtggcgagaagcgatcaaattcgacagtactgacaccggctgggtgattatgagtatcgggatggcgattggcgcggggattgtttttctcccggtgcaggtcggtttgatgggattgtgggtatttttgctctcatcggtgattggttacccggcaatgtatctgtttcagcggttgtttattaatacgctggcagaatcaccagaatgtaaagattacccgagcgtcattagcggttatttaggtaaaaactggggcatcctgttaggtgcactctatttcgtaatgctggtgatttggatgttcgtctattccaccgccatcaccaacgatagtgcttcctacctgcataccttcggcgtgacggaagggttgctgtcagacagtcccttttatggtctggtactgatttgcattctggtggcgatctcttcacgcggcgagaaattgttattcaaaatttcgactggcatggtgctgaccaagctgctggtggtcgcggcgctgggcgtgtcgatggtgggaatgtggcatctgtataacgtcggttcgctaccgccgctggggctgctggtgaaaaacgctattattacgctgccgtttaccctgacgtcgattctgtttatccagacgttaagcccgatggtgatctcttatcgctcgcgggaaaaatcgattgaagtagcgcggcataaagcattgcgggcaatgaatatcgcgtttggcattttgtttatcatcgtctttttctacgccgtgtcgttcacgctggcgatgggacatgacgaagcggtaaaagcctacgagcagaatatttccgcgctggcgattgccgcacagtttattagcggtgacggcgcagcgtgggtgaaagtggtcagcgtcattctcaatatctttgctgtcatgactgcattctttggcgtctatttaggttttcgcgaagcaacgcaagggatcgtaatgaacatcctgcgtcgcaagatgcctgccgagaagattaacgaaaatcttgttcagcgcggcatcatgattttcgccattttgctggcctggagcgccatcgtactgaacgcaccggtgttgagcttcacctctatctgtagcccgattttcggcttggtagggtgcctgatcccggcgtggctggtttacaaagtaccggcattgcacaaatacaaagggatgtctctgtacctgattatcgtcactggtttgttgctttgtgtttctccgttcctggcattttcttga

SEQ ID NO: 153261 - protein, 443 aa, Escherichia coli O157:H7 EDL933
MEIASNKGVIADASTPAGRAGMSESEWREAIKFDSTDTGWVIMSIGMAIGAGIVFLPVQVGLMGLWVFLLSSVIGYPAMYLFQRLFINTLAESPECKDYPSVISGYLGKNWGILLGALYFVMLVIWMFVYSTAITNDSASYLHTFGVTEGLLSDSPFYGLVLICILVAISSRGEKLLFKISTGMVLTKLLVVAALGVSMVGMWHLYNVGSLPPLGLLVKNAIITLPFTLTSILFIQTLSPMVISYRSREKSIEVARHKALRAMNIAFGILFIIVFFYAVSFTLAMGHDEAVKAYEQNISALAIAAQFISGDGAAWVKVVSVILNIFAVMTAFFGVYLGFREATQGIVMNILRRKMPAEKINENLVQRGIMIFAILLAWSAIVLNAPVLSFTSICSPIFGLVGCLIPAWLVYKVPALHKYKGMSLYLIIVTGLLLCVSPFLAFS

SEQ ID NO: 153262 - DNA, 1290 bp, Salmonella enterica subsp. enterica serovar Typhi str. CT18
  CDS (1)..(1290): transl_table=11
atgaaaaccactcagaccagcacgattgcttcgattgactctcgaagcgcatggcgcaaaacggataccatgtggatgctgggcctttacggcacggcaatcggcgcgggcgttctgttcctgccgatcaacgcaggcgtcggcggcatgattccgctcatcatcatggcgattctcgctttcccgatgacctttttcgcacaccgtggtttaacccgcttcgtgctgtccggtaaaaacccgggtgaagacatcactgaagtcgttgaggaacacttcggtatcggcgcaggtaaactgattaccctgctctacttcttcgcgatttaccccatcctgctggtttacagcgtggcgattactaataccgtggaaagcttcctgacccaccagttagcgattaatccgccgccgcgggcgattctttccctgatcctgattgttggcatgatgaccatcgtgcgcttcggcgagcaaatgatcgttaaggcgatgagtatcctggtattcccgttcgtcgctgcgctgatgctgctggccttgtacctgatcccgcagtggaacggcgcggcgctggaaactctgtcctttgattccgccgcgtctaccggtaacggtctgtggatgacgctgtggctggcgattccggtgatggttttctctttcaaccactccccgatcatctcctccttcgcggttgcgaagcgtgaagagtacggtgaaggcgctgagaagaaatgttctaaaattctggccttcgcccacatcatgatggtgctgaccgtgatgttcttcgtcttcagctgcgtgctgagcctgacgccggcagatctggcagcggcaaaagagcagaacatctctattctgtcttacctggcgaaccactttaacgcgccgatcatcgcctggatggcgccgatcattgcgatgattgctatcaccaaatccttcctcggccactacctgggcgcgcgtgaaggctttaacgggatggtgattaaatcgctgcgtggtaaaggtaaatccatcgaaatcaacaaactgaataaaattaccgcgctgttcatgctggtcaccacctggattgtggcgacgctgaaccccagcatcctgggcatgattgaaaccctgggcggcccgatcatcgcgatgattctgttcctgatgccgatgtatgccatccagaaagtaccggcaatgcgtaagtacagcggtcatatcagcaacgtattcgttgtgattatgggcctgattgccatctccgctattttctactcactgttcagctaa

SEQ ID NO: 153263 - protein, 429 aa, Salmonella enterica subsp. enterica serovar Typhi str. CT18
MKTTQTSTIASIDSRSAWRKTDTMWMLGLYGTAIGAGVLFLPINAGVGGMIPLIIMAILAFPMTFFAHRGLTRFVLSGKNPGEDITEVVEEHFGIGAGKLITLLYFFAIYPILLVYSVAITNTVESFLTHQLAINPPPRAILSLILIVGMMTIVRFGEQMIVKAMSILVFPFVAALMLLALYLIPQWNGAALETLSFDSAASTGNGLWMTLWLAIPVMVFSFNHSPIISSFAVAKREEYGEGAEKKCSKILAFAHIMMVLTVMFFVFSCVLSLTPADLAAAKEQNISILSYLANHFNAPIIAWMAPIIAMIAITKSFLGHYLGAREGFNGMVIKSLRGKGKSIEINKLNKITALFMLVTTWIVATLNPSILGMIETLGGPIIAMILFLMPMYAIQKVPAMRKYSGHISNVFVVIMGLIAISAIFYSLFS

SEQ ID NO: 153264 - DNA, 1230 bp, Salmonella enterica subsp. enterica serovar Typhi str. CT18
  CDS (1)..(1230): transl_table=11
atgtctaaaatttggtcaaaagatgagactctctggagttttgcattatacggaacggctgtaggcgcaggcactcttttccttcccatccagttgggatcggcaggcgcaatcgtgctatttattaccgcgctggtcgcctggcctctaacatactggccgcataaggcgctgtgtcagtttattctttcctcaaagacttctgcaggtgagggaattactggcgccgttactcattattacggcaagaaaatcggcagtattattaccacgctttatttcattgcgttttttgtcgtggtattaatttatgctgtggcgattaccaattccctgacagagcaattagcgaagcatattcagatagatattcgcatccggatggcagttagcttcggcgtagtacttatcctgaatatgattttcttaatgggaagacatgccactcttcgcgtaatgggctttttagtctttccacttatcgcttacttcttgttcctttcgctctacttaaccggaagctggcaaccctcgttactgaccgggcagatgtctttggatagtcacacgttgcaccaggtatggatttctattccggtgatggtttttgcttttagccatacgcccattatttcgacgtttgccatcgacagacgggaaaattttggcgatcaggccatggataaatgcaaaaagatcatgaaggtcgcctacctgattatctgcctgagtgtgctgttctttgtctttagctgcctgctctccattccgccgtcatacattgaagacgcgcgcaacgaaggcgttaccatcctttccgcgctctcgatgatgcccaatgcgccggcctggctctctatttccggtattatcgttgccgtcgtggccatgtcgaaatctttcctcggcacctatttcggcgtcatcgagggcgcaaccgaaatggtaagaaccaccctacagcaggttggcgtgaaaaaaagccgggcgttcaatcgcgcgctgtctatcatgctggtttccgggattacgtttattatttgctgtattaacccgaatgccatctctatgatttatgccattagcggcccgctcattgcgatgattctgtttattatgcccacgttgtcaacgtacctgataccggcattgaaaccctaccgttcaataggtaatttcattacgttggtcgtcggtttactttgcgtatcggtgatgtttttcggctaa

SEQ ID NO: 153265 - protein, 409 aa, Salmonella enterica subsp. enterica serovar Typhi str. CT18
MSKIWSKDETLWSFALYGTAVGAGTLFLPIQLGSAGAIVLFITALVAWPLTYWPHKALCQFILSSKTSAGEGITGAVTHYYGKKIGSIITTLYFIAFFVVVLIYAVAITNSLTEQLAKHIQIDIRIRMAVSFGVVLILNMIFLMGRHATLRVMGFLVFPLIAYFLFLSLYLTGSWQPSLLTGQMSLDSHTLHQVWISIPVMVFAFSHTPIISTFAIDRRENFGDQAMDKCKKIMKVAYLIICLSVLFFVFSCLLSIPPSYIEDARNEGVTILSALSMMPNAPAWLSISGIIVAVVAMSKSFLGTYFGVIEGATEMVRTTLQQVGVKKSRAFNRALSIMLVSGITFIICCINPNAISMIYAISGPLIAMILFIMPTLSTYLIPALKPYRSIGNFITLVVGLLCVSVMFFG

SEQ ID NO: 153266 - DNA, 1230 bp, Salmonella typhimurium LT2
  CDS (1)..(1230): transl_table=11
atgtctaaaatttggtcaaaagatgagactctctggagttttgcattatacggaacggctgtaggcgcaggcactcttttccttcccatccagttgggatcggcaggcgcaatcgtgctatttattaccgcgctggtcgcctggcctctaacatactggccgcataaggcgctgtgtcagtttattctttcctcaaagacttctgccggtgagggaattactggcgccgttactcattattacggcaagaaaatcggcaatattattaccacgctttatttcattgcgttttttgtcgtggtattaatttatgctgtggcgattaccaattccctgacagagcaattagcgaagcatattcagatagatattcgcatccggatggcagttagcttcggcgtagtacttatcctgaatatgattttcttaatgggaagacatgccactcttcgcgtaatgggctttttagtctttccacttatcgcttacttcttgttcctttcgctctacttaaccggaagctggcaaccctcgttactgaccgggcagatgtctttggatagtcacacgttgcaccaggtatggatttctattccggtgatggtttttgcttttagccatacgcccattatttcgacgtttgccatcgacagacgggaaaattttggcgatcaggccatggataaatgcaaaaagatcatgaaggtcgcctatctgattatctgcctgagcgtgctgttctttgtctttagctgcctgctctccattccgccgtcatacattgaagacgcgcgcaacgaaggcgttaccatcctttccgcgctctcgatgatgcccaatgcgccggcctggctctctatttccggtattatcgttgccgtcgtggccatgtcgaaatctttcctcggcacctatttcggcgtcatcgagggcgcaaccgaaatggtaagaaccaccctacagcaggttggcgtaaaaaaaagccgggcgttcaatcgcgcgctgtctatcatgctggtttccgggattacgtttattatttgctgtattaacccgaatgccatctctatgatttatgctattagcggcccgctcattgcgatgattctgtttattatgcccacgttgtcaacgtacctgataccggcattgaaaccctaccgttcagtaggtaatttcattacgttggtcgtcggtttactttgcgtatcggtgatgtttttcggctaa

SEQ ID NO: 153267 - protein, 409 aa, Salmonella typhimurium LT2
MSKIWSKDETLWSFALYGTAVGAGTLFLPIQLGSAGAIVLFITALVAWPLTYWPHKALCQFILSSKTSAGEGITGAVTHYYGKKIGNIITTLYFIAFFVVVLIYAVAITNSLTEQLAKHIQIDIRIRMAVSFGVVLILNMIFLMGRHATLRVMGFLVFPLIAYFLFLSLYLTGSWQPSLLTGQMSLDSHTLHQVWISIPVMVFAFSHTPIISTFAIDRRENFGDQAMDKCKKIMKVAYLIICLSVLFFVFSCLLSIPPSYIEDARNEGVTILSALSMMPNAPAWLSISGIIVAVVAMSKSFLGTYFGVIEGATEMVRTTLQQVGVKKSRAFNRALSIMLVSGITFIICCINPNAISMIYAISGPLIAMILFIMPTLSTYLIPALKPYRSVGNFITLVVGLLCVSVMFFG

SEQ ID NO: 153268 - DNA, 1323 bp, Yersinia pestis KIM
  CDS (1)..(1323): transl_table=11
atgttcacaatggagattttcatggacactacgcaaacaagcactcttgcctcggcaagaaaaatctcatcaagtacatggcgcaaaagtgacaccatgtggatgttgggtctgtacggtacagcgattggcgcaggtgtactctttttgcccatcaacgccggtattggtggcctgctaccactgattgttatggctatcattgctttcccaatgacctactacgctcaccgtggcctgtgccgattcgtgttatccggtaaaaatccaggtgaagatattactgaggtggttgaagaacatttcggtgtaggcgcaggtaaactgattaccctgctttacttcttcgctatctaccccattctcttggtgtacagcgtagcaattaccaataccgtggatagtttcattacacatcagatacacctgccatcaccaccacgcgccattttgtccctgattctgattgtgggcctgatggctatcgtgcgctttggtgaacagaccatcgtcaaagccatgagcatcttggtattcccgtttgttgccgtattgatgatgttggcgatatacctgatcccaaactggtcaggtgcaatattcgaaaacgtatccatggacggtaacggcacaggtagcggcctgtggatgacaatgtggctaatcattcccgtcatggtgttctctttcaaccactcaccgatcatctcagcctttgctgtagcaaagcgcgaagagtacggggtggatgcagagaaaaaatgttcacgcattttgagctttgcccacatcatgatggttatcaccgtcatgttcttcgtcttcagttgcgtactgagcctgtctcctgcggatctgatggatgcaaaaaaccaaaacatctccattttgtcttatctggcaaaccattttaatacgccagtaattgcctatatggcaccggttattgcctttattgccatcactaaatcattcctgggccactatctgggcgcccgtgaaggttttaacggtatggtcattaagtctctgcgtagtagaggcaaaaccattgagcagaacaaactgaaccgcattactgcgttgttcatgttagtcaccacctgggctgtcgcgaccttaaacccaagtatcttggggatgatcgaaacattgggcggccctatcatcgcgatgctcctgttcctgatgccgatgtatgccattcataaagtcccggccatgcgtaaatacagcggccagatcagtaacgtattcgtggtactcatgggcttgatcgccatctctgggatcttattcaacttaagcaacttgtttaattag

SEQ ID NO: 153269 - protein, 440 aa, Yersinia pestis KIM
MFTMEIFMDTTQTSTLASARKISSSTWRKSDTMWMLGLYGTAIGAGVLFLPINAGIGGLLPLIVMAIIAFPMTYYAHRGLCRFVLSGKNPGEDITEVVEEHFGVGAGKLITLLYFFAIYPILLVYSVAITNTVDSFITHQIHLPSPPRAILSLILIVGLMAIVRFGEQTIVKAMSILVFPFVAVLMMLAIYLIPNWSGAIFENVSMDGNGTGSGLWMTMWLIIPVMVFSFNHSPIISAFAVAKREEYGVDAEKKCSRILSFAHIMMVITVMFFVFSCVLSLSPADLMDAKNQNISILSYLANHFNTPVIAYMAPVIAFIAITKSFLGHYLGAREGFNGMVIKSLRSRGKTIEQNKLNRITALFMLVTTWAVATLNPSILGMIETLGGPIIAMLLFLMPMYAIHKVPAMRKYSGQISNVFVVLMGLIAISGILFNLSNLFN

SEQ ID NO: 153270 - DNA, 1293 bp, Shewanella oneidensis MR-1
  CDS (1)..(1293): transl_table=11
atgcaaaaagatgcgatcagtgttctcgaaacacctcaaagcactcaagaaagcacaacaagacgcttaccttggacgcgccaagatactacttggatgctaagtttatttggtaccgctgtgggggcaggtatcttatttctacccatcaatgcgggcatgggcggtttttggcccttagtcttgatggccattatcatcggacctatgacctatttggctcaccgtggtctttcgcgcttcgtatgctcatctagcattcccggcagtgatattacccaagtagtggaagagcactttgggattggcgcaggtaaagcaattactttgctttatttcttagcgatttatcctatcgtgttgatctatggcgttgggatcaccaatactgtcgatagctttatcgttaatcaattaggcatggcatcaccaccgcgttttctgctttcgggtatcttgattttcggcatgatggccgtgatggtggcgggtgagcaatttatgctgaaggtgactcagctgctggtgtatccgctggtggggattttggcctttatgtctgtgtatcttattcctgaatggaaaatggatgcactgcaggttgtgcctgaaacaggtgcttttttagggactgtgtggttaaccattcctgtattggtgttcgcctttaaccattctccggcgatttcacaattttcggtttccttaaaacgtgaccatggcgcgaatgccgcacgtaaggccgatgtgatcctgcgtaatacttcgatgatgttagtcggatttgtgatgctgtttgtgttctcctgcgtcttgtcgctgtcgcctgaacaattggccgaagcgaaggcaaagaacctgccgattttgtcttatctagcaaacgtgcatgacagcggttttgtcagctattttggtcctttcattgcctttatcgcgattgtgtcttccttctttggtcactatatgggcgctactgaaggtatgaagggcattattgttaagcaattacgctcaagcaaaaagcaagtcagcgaggataagctgaacaagtttatcttagtgtttatgtttgccacgatttggggcgttgcgattaaaaacccaagcattctggggatgattgaggcgctgggcggcccggtgattgcggcaattttgtacttaatgccaatgtatgcggtgtataaagtaccggcacttaaagcataccgtcaccgtatcagcaatgtgtttgtggtgattgctggtttactggcgatgacggcgattctatttggtctactcagttaa

SEQ ID NO: 153271 - protein, 430 aa, Shewanella oneidensis MR-1
MQKDAISVLETPQSTQESTTRRLPWTRQDTTWMLSLFGTAVGAGILFLPINAGMGGFWPLVLMAIIIGPMTYLAHRGLSRFVCSSSIPGSDITQVVEEHFGIGAGKAITLLYFLAIYPIVLIYGVGITNTVDSFIVNQLGMASPPRFLLSGILIFGMMAVMVAGEQFMLKVTQLLVYPLVGILAFMSVYLIPEWKMDALQVVPETGAFLGTVWLTIPVLVFAFNHSPAISQFSVSLKRDHGANAARKADVILRNTSMMLVGFVMLFVFSCVLSLSPEQLAEAKAKNLPILSYLANVHDSGFVSYFGPFIAFIAIVSSFFGHYMGATEGMKGIIVKQLRSSKKQVSEDKLNKFILVFMFATIWGVAIKNPSILGMIEALGGPVIAAILYLMPMYAVYKVPALKAYRHRISNVFVVIAGLLAMTAILFGLLS

SEQ ID NO: 153272 - DNA, 1281 bp, Pseudomonas putida KT2440
  CDS (1)..(1281): transl_table=11
atgaatgagcaggccccaagcgttgaacaacgctttgcagaatcgacccccgccgccctcggcacctgggcgcgtcacgacaccacctggatgctgggcctgttcggcacagccatcggcgccgggacactgttcctgccgatcaacgccggccttggcggcttctggccgctgctgatcctggccgtgctggcctttccgatgacctatttcgcccatcgcgggctgacccgtttcgtcctttccgggcgcgatggcagcgacatcaccgaagtggtcaaggagcatttcggcatcaccgccggtgcctcgatcaccgtgctgtacttcttcgccatcttcccgatcctgcttatctacagcgtggcgctgaccaacaccgtgtccagcttcatggagcaccagctgcacatgcagccgccgccacgggcaatcctgtcattcgtgctgatcctcggtctgctggccatcgtgcgctgcggggagcaggccacggtcaaggtcatgagcctgctggtctacccgttcatcgtcgctctggcgttgctgggcctgtacctggtgccgcactggaccggtggcattctcgacagcgccacagaggtgccgccggcctcggccttcctgcacaccctgtggctggccattccggtgatggtgttctcgttcaaccattcgccgatcatctcggcctttgccgtcgaccagaagcgccgttacggcgcgcacgccgacgagcgcagcggccagatcctgcgtcgtgcccacctgttgatggtggtgatggtgctgttcttcgtgttcagctgcgtgctcaccctgagcagcgcccagctggccgaagccaaggcgcagaacctgtcgatcctgtcgtacctggccaaccacttcagcaacccgaccatcgcgttcgctgcgccgttgatcgccttcgtggccatcgccaagtcgttcctcggccactacatcggcgccagcgaaggcctgaagggcatcatcgccaagaccggtgcgcgcccaggcgccaaggccctggaccgcgtggttgccgcactgatgctggtggtgtgctggatcgtcgccacgctcaacccgagcattctcggcatgatcgagtcgctcggcggcccgattctcgcggtgctgttgttcctgatgccgatgtacgccattcgccgtgtgccatcgatgcgcaagtacagcggtgcggcctccaacgtgttcgtcgttgtggtcggcctggttgcgctgacttccgtggtgtacggccttgtaagctga

SEQ ID NO: 153273 - protein, 426 aa, Pseudomonas putida KT2440
MNEQAPSVEQRFAESTPAALGTWARHDTTWMLGLFGTAIGAGTLFLPINAGLGGFWPLLILAVLAFPMTYFAHRGLTRFVLSGRDGSDITEVVKEHFGITAGASITVLYFFAIFPILLIYSVALTNTVSSFMEHQLHMQPPPRAILSFVLILGLLAIVRCGEQATVKVMSLLVYPFIVALALLGLYLVPHWTGGILDSATEVPPASAFLHTLWLAIPVMVFSFNHSPIISAFAVDQKRRYGAHADERSGQILRRAHLLMVVMVLFFVFSCVLTLSSAQLAEAKAQNLSILSYLANHFSNPTIAFAAPLIAFVAIAKSFLGHYIGASEGLKGIIAKTGARPGAKALDRVVAALMLVVCWIVATLNPSILGMIESLGGPILAVLLFLMPMYAIRRVPSMRKYSGAASNVFVVVVGLVALTSVVYGLVS

SEQ ID NO: 153274 - DNA, 1254 bp, Vibrio vulnificus CMCP6
  CDS (1)..(1254): transl_table=11
atgaaaacaacttcaactgcggctcctgccgtacaatcttctagtaagtttacttacaaagatttcacttggtgtctgtcccttttcggtacagcggtaggtgctggtgtacttttccttccaattaaagcgggtgctggcggcttctggccattagttatgctagcgctacttgcagcaccaatgacttggttcgctcacaaatctctcgctcgtttcgttctttctgctaagaaccctgaagcggacatcactgacactgtagaagagcactttggtaagactggcgcaaaccttattacttttgcctatttcttcgctatctacccaatcgttctgatttacggtgttggtatcacaaacacagtagactctttccttgttaaccaaatgggtatggaatccattccacgtccactgctatctggcgcattgatccttgcaatgaccgctggtgtggtatttggtaaagaactgatgctaaaagcaacgtctgcaatggtttacccactagtattcgttcttcttgcactttctgtctacttgatcccagattggaacacgtcgatgatgcaagtggcacctgattggtcttctatgcctgttgtcgtatggctagctatcccgatcatcgtgttctcattcaaccacagcccaatcatctctcagttctctaaagaacaacgcctacagcatggtgacaaagcggttcagaaaaccgatgcgatcactggcggtgcagcgatgatgctaatgggctttgtgatgttcttcgtattctctgttgtgctgtctatgtctccagagcaactggcttctgcgaaagagcaaaacatctctgtactttcttacctagcgaacgtgcatgagtctccactgatctcttaccttggtccactggttgcgtttgcagcgatcacttctagctacttcggtcacttccttggtgcgcatgaaggtctagttggtctgatcaaatctcgctcaaacagccctatcagcaagatcgagaaagcgtcgctactgttcatcgttatcactacttggatcgtggctatcgttaacccaagtatcctaggcatgattgaaacaatgggcgcaccaatgattgcggcaatcctgttcctaatgcctgtatttgcaatgcaaaaagtgccagcgatggcgaagtataaaacttcagcagctgtgcagattttcacagttatctgtggtcttgcttctattacttctgtaatctacggcgctctttaa

SEQ ID NO: 153275 - protein, 417 aa, Vibrio vulnificus CMCP6
MKTTSTAAPAVQSSSKFTYKDFTWCLSLFGTAVGAGVLFLPIKAGAGGFWPLVMLALLAAPMTWFAHKSLARFVLSAKNPEADITDTVEEHFGKTGANLITFAYFFAIYPIVLIYGVGITNTVDSFLVNQMGMESIPRPLLSGALILAMTAGVVFGKELMLKATSAMVYPLVFVLLALSVYLIPDWNTSMMQVAPDWSSMPVVVWLAIPIIVFSFNHSPIISQFSKEQRLQHGDKAVQKTDAITGGAAMMLMGFVMFFVFSVVLSMSPEQLASAKEQNISVLSYLANVHESPLISYLGPLVAFAAITSSYFGHFLGAHEGLVGLIKSRSNSPISKIEKASLLFIVITTWIVAIVNPSILGMIETMGAPMIAAILFLMPVFAMQKVPAMAKYKTSAAVQIFTVICGLASITSVIYGAL

SEQ ID NO: 153276 - DNA, 1173 bp, Vibrio vulnificus CMCP6
  CDS (1)..(1173): transl_table=11
ttgagtttatttggcaccgccgtgggggctggcattctctttctgcctatcaacctaggaatcggcggcttttggcctttggtactgttagcgcttttggcgtttcccatgacattttggggtcatcgtgcacttgcgcggtttgtgctctcgtcaaaacaagccgatgcggactttaccgatgtcgtcgaggagcactttggagcgaaagcaggtcgtctgatttccttgctctatttcttgtcgatattccccattctgctcatttatggcgtgggcatcaccaacacggttgacagctttatggtcaatcaagcgggaatggagtcattacctcgagtgctgctgtctggtgttttggttttcagcctaattgccatcatgctcggcggtgaaaagctgatgctgcgtgcgtttgcagccatggtttacccactcgccaccatactggcgtttttgtcgctttatctcatcccaagttggcaactgccttctttggctctgccttctgccggcgattttctacaaacggtctggttagccgtgcctgtggtgatcttctcatttagccatgccgcagccatttccagcttcgttggcgtgcaaaaacgccattacggcgagcaggcgaatggtaaatcagaacagattcttcagcgtaccagcatcatgttgattgcttttgtactgctgtttgttttctcctgcgtgctctctttaagcccagagcaattggcgcaagcaaaagcgcaaaatgtgtcggtactttcttatttagccaacgcaacggagaacccatttattgcgacttttggtcctctggttgcctttatcgccattacgtcgtcattccttggccattttttaggtgcacgagaaagccttaacggattgctaaccaagcacacatcaatgcctattcaacgcgccgataaaatgaccatcgtcagcttgtttatctcaatttggattgcggcggtgatcaacccgagcattctcggcatgatggaaaccttatctggcccagtcatcgctatgatcctgtttatcatgccggtttacgccatttaccgagttgattcattaaaaatatatcgtggtaaagccacgactgtgtttgttttgctgacagggctactggccgtttctgcgttgctgttcgcgattgtctaa

SEQ ID NO: 153277 - protein, 390 aa, Vibrio vulnificus CMCP6
MSLFGTAVGAGILFLPINLGIGGFWPLVLLALLAFPMTFWGHRALARFVLSSKQADADFTDVVEEHFGAKAGRLISLLYFLSIFPILLIYGVGITNTVDSFMVNQAGMESLPRVLLSGVLVFSLIAIMLGGEKLMLRAFAAMVYPLATILAFLSLYLIPSWQLPSLALPSAGDFLQTVWLAVPVVIFSFSHAAAISSFVGVQKRHYGEQANGKSEQILQRTSIMLIAFVLLFVFSCVLSLSPEQLAQAKAQNVSVLSYLANATENPFIATFGPLVAFIAITSSFLGHFLGARESLNGLLTKHTSMPIQRADKMTIVSLFISIWIAAVINPSILGMMETLSGPVIAMILFIMPVYAIYRVDSLKIYRGKATTVFVLLTGLLAVSALLFAIV

SEQ ID NO: 153278 - DNA, 1281 bp, Lactobacillus plantarum WCFS1
  CDS (1)..(1281): transl_table=11
atgacaaatatatttaagggttggagaaaaaatgatactttttggatgctgagtttgttcggaacggcgattggggccggcgtgctattcttaccgattggagttggcacggcaggtattcttggtatcatcatgatacttattttggctttgccaaccacattttttgctcacaggggcctgagtaggtttgtcttgtcggctaaaaatgatggtgatgacattactgatgttgttgaacaacattttggctttaagattggattgctttttaccattatttatttcttctccatttatccaatcttattagtttattctgtttctattacgaatactgtatcgaaatttattaccgaccaaatgcacatgcaaacaccacctcgttggctgttgtcgctagtacttgttgggattctcattggaattgctcgctttggtacctctttgattaccaaagttatgagtggcctggcctttccatttattattgtaatcgttctgttttccttttatcttattccgcattggaacggcgcaatcctctcaacattttccagttctgtatctgggggacatttggttggcactttaggaaacttgtggttacttattcctgttatgatcttttcgtttaaccattctccgatcatctcttcattttccgttgccgaacgtaaagaatatagtggggaaggtaaggacaaagtcgataaaaagatttcgacaattctattgtcggccgaaacgttgatggtcattgtcgcaatgttctttgttattagttgtacattggcgttgactccagaccaaatccttgaagctaaaaatgaaaatgtttcaatccttgattacgttgcgactgctttcaataatccaattattaaatatgtttctcccgtaattgcttttattgcaatcgccaagtcctttttaggacattatctaggaacgagtgaaggcttacgtgggattattcgtaagatggaagaaaaatctaacaagacgctttcaagtcgaactgtttcgacaattgttgatcttgttctgctactaagtgcctggatagttgcctgggtcaatccttccattatgggaatgattgaaaccatcattggaccaatcattgcgtttatcttgttcttgatgccaatgtatgccattcataaaagtcctaagttacagcaatatgccggcaaacacagcaatgtctttgttgtggtaattggattaatcgcagttagtggtatcctgttcaatatcatcaaattgtttatttag

SEQ ID NO: 153279 - protein, 426 aa, Lactobacillus plantarum WCFS1
MTNIFKGWRKNDTFWMLSLFGTAIGAGVLFLPIGVGTAGILGIIMILILALPTTFFAHRGLSRFVLSAKNDGDDITDVVEQHFGFKIGLLFTIIYFFSIYPILLVYSVSITNTVSKFITDQMHMQTPPRWLLSLVLVGILIGIARFGTSLITKVMSGLAFPFIIVIVLFSFYLIPHWNGAILSTFSSSVSGGHLVGTLGNLWLLIPVMIFSFNHSPIISSFSVAERKEYSGEGKDKVDKKISTILLSAETLMVIVAMFFVISCTLALTPDQILEAKNENVSILDYVATAFNNPIIKYVSPVIAFIAIAKSFLGHYLGTSEGLRGIIRKMEEKSNKTLSSRTVSTIVDLVLLLSAWIVAWVNPSIMGMIETIIGPIIAFILFLMPMYAIHKSPKLQQYAGKHSNVFVVVIGLIAVSGILFNIIKLFI

SEQ ID NO: 153280 - DNA, 1254 bp, Vibrio parahaemolyticus RIMD 2210633
  CDS (1)..(1254): transl_table=11
atgaatacaactacttctgcggtttctaccgcacaatcgtctagtaagtttacttacaaagacttcacctggtgtctgtctctgttcggcacggcagtaggtgcaggtgtacttttccttcctattaaagctggtgcgggtggtttttggccattagtaatcctagctctaatcgcggcaccaatgacttggttcgcacacaaatctctagctcgcttcgttctttcagctaagaacccagaagcagacatcactgacacagtagaagaacacttcggtaaaactggcgcaaaccttattacgttcgcatacttcttcgctatttacccaatcgtacttatctacggtgttggtatcacaaacacggttgactctttcctagttaaccaaatgggcatggaatcgattcctcgctggctactttctggtgcgcttatcgcagcaatgacagcaggcgtagtattcggtaaagaactgatgctgaaagcaacttcagcaatggtttaccctctagtgttcatcctattggcgttgtctttctacctaatccctgagtggaacacatctatgattgaagtggctccagactgggctgcaatgccaactatcgtttggttagcaattcctatcatcgtattctcattcaaccacagcccaatcatttctcagttctctaaagagcaacgcatgcaatacggcgacgaagcttacaagaaaacagacatgatcactggcggtgcagcgatgatgctaatgggctttgttatgttcttcgtattctctgtagtactttctctatctccagagcaactagcatctgcgaaagaacaaaacatctctgtactttcttacctagcgaacatccacgaatctccactgatctcatacatgggtccattggttgcattcgcggcgatcacttctagctacttcggtcacttcctaggtgcacacgaaggtctagtaggtctaatcaaatctcgctcacaatctccagtaagcaagatcgaaaaaggttctctactgttcatcgttatcactacttggattgtggctatcgttaacccaagcatcctaggcatgatcgaaacaatgggcgcgccaatgattgcggcaatcctattcttgatgcctgtattcgcgatgcaaaaagttccagcaatggcgaagtacaaaacttcagcacctgtgcaaattttcacagcaatctgtggtcttgcagcaattacttctgtaatctacggcgctctttaa

SEQ ID NO: 153281 - protein, 417 aa, Vibrio parahaemolyticus RIMD 2210633
MNTTTSAVSTAQSSSKFTYKDFTWCLSLFGTAVGAGVLFLPIKAGAGGFWPLVILALIAAPMTWFAHKSLARFVLSAKNPEADITDTVEEHFGKTGANLITFAYFFAIYPIVLIYGVGITNTVDSFLVNQMGMESIPRWLLSGALIAAMTAGVVFGKELMLKATSAMVYPLVFILLALSFYLIPEWNTSMIEVAPDWAAMPTIVWLAIPIIVFSFNHSPIISQFSKEQRMQYGDEAYKKTDMITGGAAMMLMGFVMFFVFSVVLSLSPEQLASAKEQNISVLSYLANIHESPLISYMGPLVAFAAITSSYFGHFLGAHEGLVGLIKSRSQSPVSKIEKGSLLFIVITTWIVAIVNPSILGMIETMGAPMIAAILFLMPVFAMQKVPAMAKYKTSAPVQIFTAICGLAAITSVIYGAL

SEQ ID NO: 153282 - DNA, 1257 bp, Vibrio parahaemolyticus RIMD 2210633
  CDS (1)..(1257): transl_table=11
atgaaagaatctcgaaatacgttaaattctagtgaattaaacacaacaacctcttggtcaaaacatgacacacattgggtacttagcctattcgggaccgccgttggtgccggtattttgtttctgccaatcaacttgggcattggtggattttggccactagtcgcaatggcgtttttggcatttccaatgacttacctcgcccatcgcggtttagcgcgctttgtattgtcttctaagatcaaaaatgccgactttaccgatgtggttgaagaacactttggcgcaaaagcgggacgttcaatctctctgctttatttcctatcgatttttcctatcctgttaatttacggcgtgggcatcaccaatactgtagacagctttatggtgaaccaagcgggaatggaagccttaccacgcgagctactttcgggcgtattagtgttcgctttgattgccattatgatggcgggcgaaaaagtgatgctgcgcgcgtttgccgttatggtgtacccacttgttgcgattctagctttcctctcattctacttaatgccgaactggacaatgcccgtgcttgatacaccggacatgggtgcgtttgcgagcacaatgtggttagccgttcctgttgtgattttctcgtttagccatgcagcagcgatctctagctttgccaatgttcagcgccgacactacggcgatgatgccgatgcaaaagccgaactgattttacgttgcacgagcatcatgcttatcgcattcgtactattgtttgttttctcgtgcgtattagcactttcgccagagcaacttgcacaggcaaaagcgcaaaacgtatccgtactctcttaccttgcaaacgcaacggataacccattcatcgcaacacttggtcctttggtggcgtttgtcgcgatcacttcttctttccttggtcatttcttaggcgcacgtgaaagcttgaacggcttaatcacaaagcactcaaatttgtctgaaacacgtgttgatcgtattagcgtagtggttcttttcttgtcaatttgggctgcagcaatcatgaacccaagtattttaggcatgatggaagcgttatctgggccagttatcgcaatgatcttgttcattatgccgatgttggcggtacataagattgagtcgatgaagcagtatcgtggaaagctctctacctattttgttctgatcacaggtattgttgcggtaagtgctttggtttttagcttactcagctaa

SEQ ID NO: 153283 - protein, 418 aa, Vibrio parahaemolyticus RIMD 2210633
MKESRNTLNSSELNTTTSWSKHDTHWVLSLFGTAVGAGILFLPINLGIGGFWPLVAMAFLAFPMTYLAHRGLARFVLSSKIKNADFTDVVEEHFGAKAGRSISLLYFLSIFPILLIYGVGITNTVDSFMVNQAGMEALPRELLSGVLVFALIAIMMAGEKVMLRAFAVMVYPLVAILAFLSFYLMPNWTMPVLDTPDMGAFASTMWLAVPVVIFSFSHAAAISSFANVQRRHYGDDADAKAELILRCTSIMLIAFVLLFVFSCVLALSPEQLAQAKAQNVSVLSYLANATDNPFIATLGPLVAFVAITSSFLGHFLGARESLNGLITKHSNLSETRVDRISVVVLFLSIWAAAIMNPSILGMMEALSGPVIAMILFIMPMLAVHKIESMKQYRGKLSTYFVLITGIVAVSALVFSLLS

SEQ ID NO: 153284 - DNA, 1320 bp, Bacillus cereus ATCC 14579
  CDS (1)..(1320): transl_table=11
atgaatgggaatactgctaaaaaaatagaattgcaatctgaaaatactgtgattacaaacgagaaatatttggatcctaaaaagtggcataagcaagatactacgtgggcattgagcctttttgggacagcaattggagcaggagtactctttttaccaattaatgcaggttcaggtggtttattatcattattactcattacattacttgcctatccagttatgtattactcacatagggcgcttgctaaaatgatatatgcttccaattctgccgatgagggaattacggggacaataagagagtatttcggaaatacagcgagtattatttttaacatcgtatacttcgtctcaatttatacaattgtcttgatgtattcagttgcacttacaaatactgcaagtagttttattgtgaatcaattacatatgaaagagccctcaagagccattttatcgcttgtcttagtactgggtcttatcgctatactaaattttggtcaagatatcactgtaaaaattatgagcttgctagtataccctttcatagcttctctactatttatcgcaatatccctaattcctcagtggaacacatcaatgcttagtttttcagatgtctctactgcttcaaccggaacaggatatttgggaacgatatggatgatactacctatcatagtgttttcatttaaccattctccaatgatttcgtcttttgtgataaaacaaagatctacgtatgggatagaagcaactgatgctaaatgtgctcaaatacaaaagatttgttatatcatgacgttcgttgttgttatgttcttcgtttggagcagcgcactgagtttgactccagatgatttaaaagtggcaaaagagcagaacttatcaatcctatcctatctcgctaatgaacttaattcgccagtaattacgattgcagctcctattattgcttttatggctataacaaagtctttccttggtcattatataggatcatatgaagtaatgcgtgatatgattatcaaatttggtaaaacacgtggaaaagatatagaagaaaaaacagttaagacagtaattcttacttttgtcgtattaacatgctggtatgttgcttatgcaaatccaagtattcttgggctcattgacgctctaagcggtccattagttgctgctatcttatgtctattaccaatgtatgcgatccgtaaagtaccggtattagctaaatatagaggtaaaatgagcaatgtatttgttattattgtaggagtacttacaatcttagcaagtattaaatctttattctaa

SEQ ID NO: 153285 - protein, 439 aa, Bacillus cereus ATCC 14579
MNGNTAKKIELQSENTVITNEKYLDPKKWHKQDTTWALSLFGTAIGAGVLFLPINAGSGGLLSLLLITLLAYPVMYYSHRALAKMIYASNSADEGITGTIREYFGNTASIIFNIVYFVSIYTIVLMYSVALTNTASSFIVNQLHMKEPSRAILSLVLVLGLIAILNFGQDITVKIMSLLVYPFIASLLFIAISLIPQWNTSMLSFSDVSTASTGTGYLGTIWMILPIIVFSFNHSPMISSFVIKQRSTYGIEATDAKCAQIQKICYIMTFVVVMFFVWSSALSLTPDDLKVAKEQNLSILSYLANELNSPVITIAAPIIAFMAITKSFLGHYIGSYEVMRDMIIKFGKTRGKDIEEKTVKTVILTFVVLTCWYVAYANPSILGLIDALSGPLVAAILCLLPMYAIRKVPVLAKYRGKMSNVFVIIVGVLTILASIKSLF

SEQ ID NO: 153286 - DNA, 1320 bp, Bacillus cereus ATCC 14579
  CDS (1)..(1320): transl_table=11
atgaacgggaatactgcaaagaaaatagaagttcaagctgaaaataccgcactaaaaaatgagcaatatgcagatccgaaaaagtggcataagcaggatactacatgggcactcagtctatttggaactgcaattggagcaggggtgctctttttaccgattaatgcaggttcaggtggtttattatctttactactaattacattgcttgcatatccagttatgtactactcacatagggcacttgctaaaatgatatacgcttctaattctgctgatgaggggatcacaggtacaattagagagtatttcggaaataaagcgagtatcatttttaacatcgtatatttcggttcaatttatacaatcgtactaatgtattcggttgcgcttacaaacactgcaagtagttttatcgtgcatcaattgcacatgccagaacctccaagagctattttatcacttgtattagttcttggtcttatcgctatactgaattttggtcaagatattactgtaaaggtaatgagtatgttagtgtatcctttcatagtttctctactgtttatcgcaatatctttaattccacagtggaatacgtcaatgcttagtttttcagctgtttcaactgcttcaacaggaacaggctattttgggacgatattgatgattctaccaatcatcgtattctcatttaatcattcacctatgatttcatcatttgttgtgaaacagagagctacgtatggaatcgaagccactgatgctaaatgtgcgcaaatacaaaaggtttgttatatcatgacattcgctgttgttatgttcttcgtttggagtagcgcattgagcttgactccagatgatataaaaatggcaaaagaacaaaacttatcaattctttcatatcttgctaatgagcttaattcgcctgtaatcactattgcagctccaattattgcttttgtggctattacaaagtctttccttggccattatataggagcatttgaagtaatgcgtgacatgattattaagtttggtaaatcacgtggaaaagatattgaagaaaaaacaattaagacaataattcttacttttgttgtattatcatgctggtttgttgcttatacaaatccaagtattcttggacttattgattctctaagcggtcctttagttgctgctatcttatgtctattaccgatgtatgcgattcaaaaagtgccagtactagctaaatacaaagggaaaatgagcaacgtatttgttattattgtaggtgtacttactgtcttagcaagtattaagtcattattctaa

SEQ ID NO: 153287 - protein, 439 aa, Bacillus cereus ATCC 14579
MNGNTAKKIEVQAENTALKNEQYADPKKWHKQDTTWALSLFGTAIGAGVLFLPINAGSGGLLSLLLITLLAYPVMYYSHRALAKMIYASNSADEGITGTIREYFGNKASIIFNIVYFGSIYTIVLMYSVALTNTASSFIVHQLHMPEPPRAILSLVLVLGLIAILNFGQDITVKVMSMLVYPFIVSLLFIAISLIPQWNTSMLSFSAVSTASTGTGYFGTILMILPIIVFSFNHSPMISSFVVKQRATYGIEATDAKCAQIQKVCYIMTFAVVMFFVWSSALSLTPDDIKMAKEQNLSILSYLANELNSPVITIAAPIIAFVAITKSFLGHYIGAFEVMRDMIIKFGKSRGKDIEEKTIKTIILTFVVLSCWFVAYTNPSILGLIDSLSGPLVAAILCLLPMYAIQKVPVLAKYKGKMSNVFVIIVGVLTVLASIKSLF

SEQ ID NO: 153288 - DNA, 1290 bp, Wigglesworthia glossinidia endosymbiont of Glossina brevipalpis
  CDS (1)..(1290): transl_table=11
atgttttataaaaaacataaaaatatatgtaatatatgtaataataattacaaaaaatcaaatttaatatggatattaagcttatatggtacagcaataggggctggagttttgtttcttccaattaatattggaattaatggcttattttctttattgattattatgataatcgcttttccaatggcatttttttctcatagaggattaacaaggtttgtattgtctagcaaaaaaccaaataaaaatttatttaatgttatacatgaaaactttaataaacaaacatcttttatatttattttattttattttttttctatttatccaatactattaatttatagtactgctataaccaatacagtaatgtcttttattattcatcaattaaatattgcggaacaatcacgtgtttttgtgtcttttatacttatttctgttttaatgggaattattattttaggagaaaaagtaataattaagttcatgagttttttagtaattccatttatactttctttaatttttttttctttttatataattcaattttggaattattcattattttatgaaataaaaaatatttttaatttagatataaatagtttattaaaaattatttggtatattatacctgtaactgtattttcatttaatcattctcctataatatcttcttttgcagttttcaaaaaaagagaatgtagtaattgttgcgaaaaaacatgctctaaaatactattttatagtaatttattaatgatttttacagtaattttctttgtatttagttgcatacttagtgttcctagagaagctatgcaagaagcaaaagataaaaatttatctgtattatcttatttttcaatatattttgaagataatttaatgaattttttaggccctatcatagctattattgctataataaaatctttttttggtcattatttaggagctaaagaaagcatcaataaaatattaatgacgacttttcctaaattaaaaaataaaaaaagaacatatttaacaaattttacaactaactctttaatatttactagttcttggattattgcaatatttaatcctagtattttaaatataatagaagcaataattggacctattatttctataattttatttttaattcctgcatattcaatatataaagttcctaatatgaaacgttataaaaaagaaaaatttactaatttatttttatttgttattggaattttttcatttttagctatgatgcataaattgattatattttaa

SEQ ID NO: 153289 - protein, 429 aa, Wigglesworthia glossinidia endosymbiont of Glossina brevipalpis
MFYKKHKNICNICNNNYKKSNLIWILSLYGTAIGAGVLFLPINIGINGLFSLLIIMIIAFPMAFFSHRGLTRFVLSSKKPNKNLFNVIHENFNKQTSFIFILFYFFSIYPILLIYSTAITNTVMSFIIHQLNIAEQSRVFVSFILISVLMGIIILGEKVIIKFMSFLVIPFILSLIFFSFYIIQFWNYSLFYEIKNIFNLDINSLLKIIWYIIPVTVFSFNHSPIISSFAVFKKRECSNCCEKTCSKILFYSNLLMIFTVIFFVFSCILSVPREAMQEAKDKNLSVLSYFSIYFEDNLMNFLGPIIAIIAIIKSFFGHYLGAKESINKILMTTFPKLKNKKRTYLTNFTTNSLIFTSSWIIAIFNPSILNIIEAIIGPIISIILFLIPAYSIYKVPNMKRYKKEKFTNLFLFVIGIFSFLAMMHKLIIF

SEQ ID NO: 153290 - DNA, 1227 bp, Haemophilus ducreyi 35000HP
  CDS (1)..(1227): transl_table=11
atggttagactatctaatcgtttttcaaaaacttgggtacttaacctttttggtaccgctgtaggcgctggtgtattatttttacctattaatgctggtatgagcggtttttacccgctcatcattatgacgttaatcgttggaccaatgacttatttagcccatcgaggtttaactcgttttgtgctttcttcgcaaaaacctggcagtgatatcactaatgtcgtacgggaacattttggtgaacaagcgggtaaatttattactttactttatttctttgcaatttttcccattctattaatttatggtgttggcattaccaatacggtcagttcatttattgaaaaccaattacatatgacatcgccaccaagagtattactctctggtgccttaattgccgtattgattagcgtaatgttactgaatgaacaagcaatgttaagaattactacttatcttgtttatcctttagttctgattttatttggtttatccatttaccttattcccgaatggaacagcgcagctttagagcaaatgccaagcaccggtgattttataaccactttatggctaacgattccggtattagtgtttgcgtttaaccattcacctgcaatttcttcttttgcactttcgcaacaaaaacatcaccaagatcccgaaaaaaatgatgttgaatcaggcaaagtattacgttcaactgcaacgattttagtgctatttgtaatgttctttgtatttagctgcgtattaaccttaactccggtagaattagcggaagcaaaagtacaaaatatttcaattttgtcttacttagccaataaattcgataatcctattatttcttacttagggccatttattgctttcttagccattggtagttcattctttggccactatttaggtgcgcgtgaaggtttagaaggattagttaatcaattgcgtgataaacctatcgcttcacataaaattcataaaattacagcagtcgtattctttttaattctttggattgtggctactattaatccaagtattcttggcttcattgaaagtttaggcggtccaattattgctatgattctattcattatgcctgtatacgccgtttacactgtgcctgcactagcaaaatataaaggtcaatttagcaatatctttgttgcgattatgggatctattgctatttcagccattctatacggtttactgtaa

SEQ ID NO: 153291 - protein, 408 aa, Haemophilus ducreyi 35000HP
MVRLSNRFSKTWVLNLFGTAVGAGVLFLPINAGMSGFYPLIIMTLIVGPMTYLAHRGLTRFVLSSQKPGSDITNVVREHFGEQAGKFITLLYFFAIFPILLIYGVGITNTVSSFIENQLHMTSPPRVLLSGALIAVLISVMLLNEQAMLRITTYLVYPLVLILFGLSIYLIPEWNSAALEQMPSTGDFITTLWLTIPVLVFAFNHSPAISSFALSQQKHHQDPEKNDVESGKVLRSTATILVLFVMFFVFSCVLTLTPVELAEAKVQNISILSYLANKFDNPIISYLGPFIAFLAIGSSFFGHYLGAREGLEGLVNQLRDKPIASHKIHKITAVVFFLILWIVATINPSILGFIESLGGPIIAMILFIMPVYAVYTVPALAKYKGQFSNIFVAIMGSIAISAILYGLL

SEQ ID NO: 153292 - DNA, 1299 bp, Chromobacterium violaceum ATCC 12472
  CDS (1)..(1299): transl_table=11
atgtctcaagcaatcgcctccaccgcttcccgctccggttcatccggctggtccaagcacgacaccacctggatgctcggcctgtacggcaccgccatcggcgccggcgtcctgttcctcccgatcaacgccggcatcggcggcctgtggccgctgatgctgatggccatcctggccctgccgctgaccttcttcgcccaccgcggcctgacccgcttcgtgctgtccggcagcaaggaaggcgcggacatcaccgaggtggtggaagagcacttcggtctcggcgccggcaagatcatcaccctgctgtacttcttcgccatctacccgatcctgctgatgtacagcgtggccatcaccaacacggtgctgtccttcctgaacaaccagctgcacatcgaagtgggcaccggcatcgccacccgcgccgtgttctcgctggcgctgatcctgggcctgatgtccatcgtgcgcctgggcggccagatgatcgtcaaggcgatgagcatcctggtgtacccgttcgtggtggtgctgatgctgctggcgctgtacctgatcccgcaatggagcgataccgccatccgccacgccggcagcctgggcgacgcgctgtccagcggcgccttctacaagacgctgtggctggccatcccggtgatggtgttctcgttcaaccactcgccgatcatctcgtccttctccgtcgaccagcgcaagcttcacggcgatgacgccgagccggcctccagccgcgtgctgattcgcgcccacaccatgatggtgctgaccgtgatgttcttcgtgttcagctgcgtgttcagcctgagcccggccgacctggccgccgccaaggcccagaacatctccatcctgtcctacctggccaaccacttccaaaacccggtgatggaatgggttgccccgatcatcgccatggtcgccatcagcaagtccttcctgggccactacctgggcgccaaggaaggcttcaacggcctggtgatcaagcagctgcgccagaacggcaagagcatcgaatcgtccaagctggaccgctacaccgccatcttcatgatcgtcacctgctggatcatcgccaccatcaacccgtccatcctgggcatgatcgaaaccctgggcggcccggtgatcgcgatgctgctgttcctgatgccgatgtacgcgatccagaaagtgccggcgatgaagaagtactccggcgccgccagcaacatcttcgtgacgctgatcggcctgatcgccatctccgccatcttctacgatctgatcgcctga

SEQ ID NO: 153293 - protein, 432 aa, Chromobacterium violaceum ATCC 12472
MSQAIASTASRSGSSGWSKHDTTWMLGLYGTAIGAGVLFLPINAGIGGLWPLMLMAILALPLTFFAHRGLTRFVLSGSKEGADITEVVEEHFGLGAGKIITLLYFFAIYPILLMYSVAITNTVLSFLNNQLHIEVGTGIATRAVFSLALILGLMSIVRLGGQMIVKAMSILVYPFVVVLMLLALYLIPQWSDTAIRHAGSLGDALSSGAFYKTLWLAIPVMVFSFNHSPIISSFSVDQRKLHGDDAEPASSRVLIRAHTMMVLTVMFFVFSCVFSLSPADLAAAKAQNISILSYLANHFQNPVMEWVAPIIAMVAISKSFLGHYLGAKEGFNGLVIKQLRQNGKSIESSKLDRYTAIFMIVTCWIIATINPSILGMIETLGGPVIAMLLFLMPMYAIQKVPAMKKYSGAASNIFVTLIGLIAISAIFYDLIA

SEQ ID NO: 153294 - DNA, 1299 bp, Photorhabdus luminescens subsp. laumondii TTO1
  CDS (1)..(1299): transl_table=11
atggatatgactcaaacaggtacgatcgcatcgcaggcgaccagcccaagcgattataaaacctggcgtaaatcagatacagtatggatgcttggcttatacggtactgcgattggtgccggtgtattattcttacccatcaatgctggtattggtggcctactacctcttttggtaatggcgctactggctttcccaatgactttcttcgcccaccgcgggatgtgtcgtttcgttctatcaggtaaaaaccctggcgaagatattaccgaagtcgtagaagaacactttggcaacctggcaggtaaacttattactctgctctacttcttcgctatctacccgattctcttagtttacagcgttgctattaccaacaccgtagacagctttattgttcaccaattacacctgccatcacctcctcgtgctctgctggctctgatcctaattactggtgtaatgaccatcatccgttttggtgaacaggctattgttaaggcaatgagcgtgctggtattcccatttgttgccgttttgatgctactggcgttttatctgatccctaactggaataccgcaatcttcgaaaacatcagcgtttctgcatcgagtgcaagtcatgggctgctcattactctatggctagcgatcccagtaatggtgttctccttcaaccactcgccaattatctcggcatttgcggtggcaaaacgtggagaatatggtgagcatgctgagaaaaaatgctcccgcattctagcttacgcccatatcatgatggttgtaaccgtgatgttcttcgtattcagctgcgtattaagcctgtctccagaaaatctggcagaagccaaagcacaaaatatttctattctgtcttacctggctaaccactttaatacaccagtggttgcctacatcgctccgtttattgcattcatagcaattaccaaatctttccttggccattatctgggtgcacgtgaaggttttaatggtattgtggttaagacattgcgtgaccaaggtaaaactattgagcctaaaaagctgaatcgtatcactaccattttcatgttagtaacgacttggattgtcgctactctgaacccaagtattttggaaatgatcgaaagattaggtggtcctattatcgcaatgttgttgttcattatgccaatgtatgcaatcagcaaagttcctgcaatgcgcaaatatagcggcaagctgagtaatctgtttgtcgtctttatgggattagttgctatctctgctgtcctctactcactgtttgcataa

SEQ ID NO: 153295 - protein, 432 aa, Photorhabdus luminescens subsp. laumondii TTO1
MDMTQTGTIASQATSPSDYKTWRKSDTVWMLGLYGTAIGAGVLFLPINAGIGGLLPLLVMALLAFPMTFFAHRGMCRFVLSGKNPGEDITEVVEEHFGNLAGKLITLLYFFAIYPILLVYSVAITNTVDSFIVHQLHLPSPPRALLALILITGVMTIIRFGEQAIVKAMSVLVFPFVAVLMLLAFYLIPNWNTAIFENISVSASSASHGLLITLWLAIPVMVFSFNHSPIISAFAVAKRGEYGEHAEKKCSRILAYAHIMMVVTVMFFVFSCVLSLSPENLAEAKAQNISILSYLANHFNTPVVAYIAPFIAFIAITKSFLGHYLGAREGFNGIVVKTLRDQGKTIEPKKLNRITTIFMLVTTWIVATLNPSILEMIERLGGPIIAMLLFIMPMYAISKVPAMRKYSGKLSNLFVVFMGLVAISAVLYSLFA

SEQ ID NO: 153296 - DNA, 1254 bp, Vibrio vulnificus YJ016
  CDS (1)..(1254): transl_table=11
atgaaagaatctcgagaaacgttaaattttagtgacacgctgcccactaaaacttggacaaaacacgacactcattgggtattgagtttattcggcaccgccgtgggggctggcattctctttctgcctatcaacctaggaatcggcggcttttggcctttggtactgttagcgcttttggcgtttcccatgacattttggggccatcgtgcacttgcgcggtttgtgctctcgtcaaaacaagccgatgcagactttaccgatgttgtcgaggaacactttggagcgaaagcaggtcgtctgatttccttgctctatttcttgtcgatattccctattctgctcatttatggtgtgggcatcaccaacacggttgacagctttatggtcaatcaagcgggaatggaatcattacctcgagtgctgctgtctggtgtattggttttcagcctgatcgccatcatgctcggcggtgaaaagctgatgctgcgtgcgtttgcagccatggtttacccactcgccaccatactggcgttcttgtcgctttatctcatcccaagttggcaactgccttctttggctctgccttctgccggcgattttctacaaacggtctggttagccgtgcctgtggtgatcttctcatttagccatgccgctgccatttccagcttcgttggcgtgcaaaaacgccattacggtgagcaggcaaatggtaaatcagaacagattcttcagcgtaccagcatcatgttgattgcttttgtgctgctgtttgttttctcctgcgtactctctttaagcccagagcaattggcacaagcaaaagcgcaaaatgtgtcggtactttcttatttagccaacgcaacggagaacccatttattgcgacttttggtcctctggttgcctttatcgccattacgtcgtcattccttggccattttttaggtgcacgagaaagccttaacggattgctaaccaagcacacatcaatgcctattcaacgcgccgataaaatgaccatcgtcagcttgtttatctcaatttggattgcggcggtgatcaacccgagcattctcggcatgatggaaaccttatctggcccagtcatcgctatgatcctgtttataatgccggtttacgccatttaccgagttgattcattaaaaatctatcgtggtaaagccacgactgtgtttgttttgctgacagggctactggccgtttctgcgttgctgttcgcgattgtctaa

SEQ ID NO: 153297 - protein, 417 aa, Vibrio vulnificus YJ016
MKESRETLNFSDTLPTKTWTKHDTHWVLSLFGTAVGAGILFLPINLGIGGFWPLVLLALLAFPMTFWGHRALARFVLSSKQADADFTDVVEEHFGAKAGRLISLLYFLSIFPILLIYGVGITNTVDSFMVNQAGMESLPRVLLSGVLVFSLIAIMLGGEKLMLRAFAAMVYPLATILAFLSLYLIPSWQLPSLALPSAGDFLQTVWLAVPVVIFSFSHAAAISSFVGVQKRHYGEQANGKSEQILQRTSIMLIAFVLLFVFSCVLSLSPEQLAQAKAQNVSVLSYLANATENPFIATFGPLVAFIAITSSFLGHFLGARESLNGLLTKHTSMPIQRADKMTIVSLFISIWIAAVINPSILGMMETLSGPVIAMILFIMPVYAIYRVDSLKIYRGKATTVFVLLTGLLAVSALLFAIV

SEQ ID NO: 153298 - DNA, 1344 bp, Corynebacterium diphtheriae NCTC 13129
  CDS (1)..(1344): transl_table=11
atgtctcagattgtttcccactcagcatctgctggggtccgcgatggtgtagcaccatcagaatcacctgcctcatctagcgcgccttcttggcgtaaaaccgacaccgtatggagcttgagcctcttcggcacagcaatcggtgcgggcgtattgttcctccccatcaacgccggtatcggcggaatcatccccatgctcgtcatggccgtcgttgcgtacccgatggcccactgggcacaccgaggtcttactcgtttcatcctttcagcatccaaggaagacgcagacctaacggacgtcgtcgatgagcacttcggccacaaggccggcgcatttatcaccgtcttgtacttcttgtcggtctacccgatcttgttggtctactcagttactatcaccaacaccgtgaactccttcttggaaaaccagctgggaatcaccccgctgccacgctggttgatgtcgctcatcttggtcggcggacttatcttcgtagtcagcctcggtcgcacggtgatcgtcaaggccatgtcggttttggtattccccttcatcgccatcttggttgtgctctctgtttacttgatccctaagtggaacaccgcactattccagaccttcgacctgcgcacttcagctgaggcttccggtcatagcatctgggttaccctgctgcttctcgtcccagtgatggttttctccttcaaccactcgccaatcatttcctccttcgcccaggaaaagcgtgctgagtatggtcagtgggctgactacaagaccggtcgcattcttagcgccgcccagatcttgatggtcgttgtggttatgttctttgtgttctcttgcgcattgagcttgtcgccagccgacctcgctgctgctaaagaacaaaacatcaccatcttgtcctacttggctaatcactttgataaccctgtgattcagtgggctgctcccattattgccatgattgctgtggcaaagtccttccttggccactacctcggtgctgctgaaggtttccaaggcttgattgcttcgggtgctgcttctaagggcaagactgttgatactcaaagccgtgcgctggtgctgggcactctcgccttcatgctgatctcttcgtggctggtggcatggctgaacccatccatcctcggaatgatcgagacgatgtgtggtcctacgatcgccatcctgctcttcctgatgcctatgtacgccatccataaggttccggcattggctaagtaccgtggtcgtatttcgaattacttggtcttcggcatgggcctgttggcactgtgcaccatcgtctacagcatcgtccaggctttctag

SEQ ID NO: 153299 - protein, 447 aa, Corynebacterium diphtheriae NCTC 13129
MSQIVSHSASAGVRDGVAPSESPASSSAPSWRKTDTVWSLSLFGTAIGAGVLFLPINAGIGGIIPMLVMAVVAYPMAHWAHRGLTRFILSASKEDADLTDVVDEHFGHKAGAFITVLYFLSVYPILLVYSVTITNTVNSFLENQLGITPLPRWLMSLILVGGLIFVVSLGRTVIVKAMSVLVFPFIAILVVLSVYLIPKWNTALFQTFDLRTSAEASGHSIWVTLLLLVPVMVFSFNHSPIISSFAQEKRAEYGQWADYKTGRILSAAQILMVVVVMFFVFSCALSLSPADLAAAKEQNITILSYLANHFDNPVIQWAAPIIAMIAVAKSFLGHYLGAAEGFQGLIASGAASKGKTVDTQSRALVLGTLAFMLISSWLVAWLNPSILGMIETMCGPTIAILLFLMPMYAIHKVPALAKYRGRISNYLVFGMGLLALCTIVYSIVQAF

SEQ ID NO: 153300 - DNA, 1320 bp, Bacillus cereus ATCC 10987
  CDS (1)..(1320): transl_table=11
atgaacgggaatactgcaaagaaaatagaagttcaagctgaaaataccgcacgaaaaaatgagcaatatgcagatccgaaaaagtggcataagcaggatactacatgggcactcagtctatttggaactgcaattggagcaggggtgctctttttaccgattaatgcaggttcaggtggattattatcgttactactaattacattgcttgcatatccagttatgtattactcacatagggcacttgctaaaatgatatacgcttctaattctgctgatgaggggatcacaggtacaattagagagtatttcggaaataaagcgagtatcatttttaacatcgtatatttcggttcaatttatacaatcgtactaatgtattcggttgcgcttacaaacactgcaagtagttttatcgtgcatcaattgcacatgccagaacctccaagggctattttatcacttgtattagttcttggtcttatcgctatactgaattttggtcaagatattactgtaaaagtcatgagtatgctagtgtatcctttcatagcttctctattatttatcgcaatatctttaattccacagtggaatacgtcaatgcttagcttttcagctgtttctactgcttcaacaggaacaggatattttggaacgatattgatgattttaccaatcatcgtattctcatttaatcattcacctatgatttcatcatttgttgtgaaacagagagctacgtatggaatcgaagctactgatgcgaaatgtgcacaaatacaaaaagtttgttacatcatgacattcgtcgtagttatgttcttcgtttggagtagtgcactgagcttaactccagaggatttaaaaatggcaaaagagcaaaacttatcaatcctttcatatctagcgaatgaacttaattcacctgtaattacgattgccgccccaatcattgcttttgtggctattacaaaatctttccttggccattatatcggagcatttgaagtaatgcgtgacatgattattaagttcggtcaatcacgtggaaaagtaattgaagaaaaaacaattaagacaatcgttcttacttttgttgtattatcatgctggtttgttgcttacacaaatccaagtattcttggacttattgattctttaagtggtccattagttgctgctatcttatgtctattaccgatgtatgcgattcaaaaagtaccagtactagctaaatacaaagggaaaatgagtaacgtatttgttattattgtaggtgtacttactgttttagcaagtattaaatcattattctaa

SEQ ID NO: 153301 - protein, 439 aa, Bacillus cereus ATCC 10987
MNGNTAKKIEVQAENTARKNEQYADPKKWHKQDTTWALSLFGTAIGAGVLFLPINAGSGGLLSLLLITLLAYPVMYYSHRALAKMIYASNSADEGITGTIREYFGNKASIIFNIVYFGSIYTIVLMYSVALTNTASSFIVHQLHMPEPPRAILSLVLVLGLIAILNFGQDITVKVMSMLVYPFIASLLFIAISLIPQWNTSMLSFSAVSTASTGTGYFGTILMILPIIVFSFNHSPMISSFVVKQRATYGIEATDAKCAQIQKVCYIMTFVVVMFFVWSSALSLTPEDLKMAKEQNLSILSYLANELNSPVITIAAPIIAFVAITKSFLGHYIGAFEVMRDMIIKFGQSRGKVIEEKTIKTIVLTFVVLSCWFVAYTNPSILGLIDSLSGPLVAAILCLLPMYAIQKVPVLAKYKGKMSNVFVIIVGVLTVLASIKSLF

SEQ ID NO: 153302 - DNA, 1236 bp, Dichelobacter nodosus VCS1703A
  CDS (1)..(1236): transl_table=11
atgaaagactctcaatttaataaatttaatgtcatttgggcgattaacttattcggaacggcggtgggcgcggggattttgttcctgccgattaacgccggtatggcgggttttattcccatgattttaatgacgattctcgtcggtccaatgacttatttttctcaccgcgctttatcacgattcgttctttcttctaacagccccggaaaggatattaccttcgtggtttccgaacatttcggtaaaaaagtaggcgcttttatgggctggctttatttcttagccatttggccgttaattatgatttatgccgttgccattacgaataccgttaaatcatttttagaaaatcaattgcacatgggtgaggtaaatcgagtcagtttatcttttgttttaattgtcgctttgatttctgtcatgctatgtagcgaaaaattcatgttaaaactgactgaatggttagtttatcccttgattgctattttattcttcttttctatttatttaattccgcactggaatttaaccggtctttgggaaatgccgagcttaggcgtattccttaaaacaatgtggctgacaattccagctttggtattctcatttaaccactctccagcgagttcatctttctcattatctatgttgcgccaatacggaaaccgagatgatgctgaaaaaaatgctgttaaatctgaatattatgcaacttatattttagttactttcgtgatgttattcgtatttagctgcgctttatctttaacaccggaagaaatggcgttagcaaaacaacaaaacgttaacgttttaactttctttgctaataagtttgacaatcgcatcatgtctcttgccgcaccaatagttgcattctttgcgattaccagttcattctttggtcactatttaggcgcgcgtgaaggtttggaaggcgttattttcaaaatttttggcgaagaaaacgtcaataaaaccaaattgaaatactgctctgctttattcttcctagcaactttgtgggcagttgcaatttgggatccgaacgtattaagtgttattgaatcattaggcggtccaatcattgcgttaatgttattcatcatgccgatgtacgctatttataccgtacccgcaatgaaacattatcaaaaagaacgttggattaactatttcgtcattaccatgggatctattgcgatttcagcagtaatttacgcgttattctaa

SEQ ID NO: 153303 - protein, 411 aa, Dichelobacter nodosus VCS1703A
MKDSQFNKFNVIWAINLFGTAVGAGILFLPINAGMAGFIPMILMTILVGPMTYFSHRALSRFVLSSNSPGKDITFVVSEHFGKKVGAFMGWLYFLAIWPLIMIYAVAITNTVKSFLENQLHMGEVNRVSLSFVLIVALISVMLCSEKFMLKLTEWLVYPLIAILFFFSIYLIPHWNLTGLWEMPSLGVFLKTMWLTIPALVFSFNHSPASSSFSLSMLRQYGNRDDAEKNAVKSEYYATYILVTFVMLFVFSCALSLTPEEMALAKQQNVNVLTFFANKFDNRIMSLAAPIVAFFAITSSFFGHYLGAREGLEGVIFKIFGEENVNKTKLKYCSALFFLATLWAVAIWDPNVLSVIESLGGPIIALMLFIMPMYAIYTVPAMKHYQKERWINYFVITMGSIAISAVIYALF

SEQ ID NO: 153304 - DNA, 1290 bp, Klebsiella pneumoniae subsp. pneumoniae MGH 78578
  CDS (1)..(1290): transl_table=11
atgaatactgaaaatataattatcaataaaggatattccgatcccgcaaagtggcatagcgaagataccgtttgggtccttggcctgttcggtaccgccattggcgctggggtgctgtttctgccgattaatgccggaattggcggcttctggccgctgctgattgtttttgtcctcgcttttcctattacttatctggctcaccgcggtctggcgagattcatttactcttccaatacgccggaaagcagtattaccgatgttattggcgagcattttggcgcgctggcgggaaaagtatttaccgtcatctatttcttcgccgtctataccattctgattatgtatgcggtggctatcaccaacaccgcgcagagctttatcacccaccagttggcaatggccgagcctccccggtcgctggtggccatcgttctgatcctcgggctgatgtttatcgtccgtttcggacagcgtttgataatgcgggtgatgagcaccctggtttatcccttcatcatctcgcttatttttatggcactttttctgattccgcactggaacggcgcaattttgcaaaccgtaagcttcagcgccgcgggcgatgggcaggggatcatgttatccctgtggatgaccttcccggtactggtgatgtcgtttaaccactatcccatcatttcgccgatggtggtgcgccagaagcagcgttacggtctggcgctcgctgagggtaaatgtgcgcagatccagcgctacggtatcctgctcatgacggtggtggtgctgttttttgttctcagctgcgtgttaagcctgtcgccgcagcaactggcggaagccaaagcccagaatctgtcgattttgtcctatcttgccaatcagtacgatacaccgattattgcctggctatcgccgattatcgcctttgtcgctattactaaatcatttcttggccactacatcggcgcctatgaatcgctgcgcgacctgattctggaggccgccgccgcacgcgggaaaaaacctggtattcgcctcgtcgacgcggtcatcctggtgtttatggtgcttacctgctggttcgccgcgtacaagaaccccagtatcctcggtattatcgaatgcatcagcggtcccaccggggcggcaattctgctgctgttgcctatgtacgccattcataaattaccggtgcttgccccctggcgcggtaaagcgagcaacgttttcgtcaccctgatcggtcttatcaccgtatctgccattttttacggcatgttccaataa

SEQ ID NO: 153305 - protein, 429 aa, Klebsiella pneumoniae subsp. pneumoniae MGH 78578
MNTENIIINKGYSDPAKWHSEDTVWVLGLFGTAIGAGVLFLPINAGIGGFWPLLIVFVLAFPITYLAHRGLARFIYSSNTPESSITDVIGEHFGALAGKVFTVIYFFAVYTILIMYAVAITNTAQSFITHQLAMAEPPRSLVAIVLILGLMFIVRFGQRLIMRVMSTLVYPFIISLIFMALFLIPHWNGAILQTVSFSAAGDGQGIMLSLWMTFPVLVMSFNHYPIISPMVVRQKQRYGLALAEGKCAQIQRYGILLMTVVVLFFVLSCVLSLSPQQLAEAKAQNLSILSYLANQYDTPIIAWLSPIIAFVAITKSFLGHYIGAYESLRDLILEAAAARGKKPGIRLVDAVILVFMVLTCWFAAYKNPSILGIIECISGPTGAAILLLLPMYAIHKLPVLAPWRGKASNVFVTLIGLITVSAIFYGMFQ

SEQ ID NO: 153306 - DNA, 1332 bp, Klebsiella pneumoniae subsp. pneumoniae MGH 78578
  CDS (1)..(1332): transl_table=11
atgagtacgactgagagcattgcatccagccagacaagcctttcgtcctggcgtaaatctgacaccacctggaccctgggcctgtttggcaccgctatcggcgccggggtgctgtttttcccgatccgcgccggcttcggcgggctgatcccgatcctggtgatgctggtgctggcctatcccatcgccttttattgccatcgggccctggcccggctatgcctgtcgggggctaacccctccggcaatatcaccgaaacggtggaagagcattttggcaaaaccggcggggtggtgatcacctttctgtacttcttcgccatctgcccactgctgtggatttatggcgtcacgatcaccaatacctttatgactttctgggagaaccagctgcagatgccggctctcaaccgcggggtggtggcgctgctcctgctgctgctgatggcgtttgtcatctggtttggtaaagacctgatggtcaaggtgatgagctatctggtgtggccgtttatcgccagcttggtggtgatctccctgtccctgatcccctactggaatagcgcggtgattgaccaggtcaacctcagcgatatcgccttaaccggtcacgacggcattctggtgacggtatggctgggcatctccatcatggtgttctccttcaacttctcgccgatcgtctcctcgtttgtggtctccaaacgcgaagagtatgaagcgcagtttggccgcgagtataccgaacgcaaatgctcacagatcatctcccgggccagcatgctgatggtggcggtggtgatgttcttcgccttcagctgcctgtttaccctctcaccgcagaacatggcggacgccaaggcgcagaatatcccggtgctctcctatctggcgaaccactttgcctcgatgtcgggcaccaaatccacctttgccaccctgctggagtatggcgcgtcgatcatcgccctggtggccatcttcaaatcgtttttcggccactatctcggcacgctcgaagggctgaacggtctgatcctgcgctttggctataaaggggataaaacccgggtctccagcggcaagctcaataccctgagcatggtgttcatcatgggctcgacctgggtggtggcgtatgccaaccccaatatcctcgacctgattgaggccatgggcgcgccgattatcgcctcgctgctgtgcctgctgccgatgtacgccattcgtaaagcgccttcgctggccaaataccgtggccgtctcgataacctctttgtgaccgctatcggtctgctgaccatcctcaacatcgtttacaaactgttctaa

SEQ ID NO: 153307 - protein, 443 aa, Klebsiella pneumoniae subsp. pneumoniae MGH 78578
MSTTESIASSQTSLSSWRKSDTTWTLGLFGTAIGAGVLFFPIRAGFGGLIPILVMLVLAYPIAFYCHRALARLCLSGANPSGNITETVEEHFGKTGGVVITFLYFFAICPLLWIYGVTITNTFMTFWENQLQMPALNRGVVALLLLLLMAFVIWFGKDLMVKVMSYLVWPFIASLVVISLSLIPYWNSAVIDQVNLSDIALTGHDGILVTVWLGISIMVFSFNFSPIVSSFVVSKREEYEAQFGREYTERKCSQIISRASMLMVAVVMFFAFSCLFTLSPQNMADAKAQNIPVLSYLANHFASMSGTKSTFATLLEYGASIIALVAIFKSFFGHYLGTLEGLNGLILRFGYKGDKTRVSSGKLNTLSMVFIMGSTWVVAYANPNILDLIEAMGAPIIASLLCLLPMYAIRKAPSLAKYRGRLDNLFVTAIGLLTILNIVYKLF

SEQ ID NO: 153308 - DNA, 1290 bp, Klebsiella pneumoniae subsp. pneumoniae MGH 78578
  CDS (1)..(1290): transl_table=11
atggaaaccactcaaaccagcaccatcgtttcgggcgaaacccgcagcggatggcgtaaaaccgacaccatgtggatgctgggcctgtacggcacggcgattggcgcaggcgtcttgttcctgccgatcaacgccggcgttggcggcatgatccccctgatcatcatggcgattctggccttcccgatgactttcttcgcccaccgcggcatgacccgcttcgtgctctccgggaaaaacccgggcgaagacatcaccgaagtagtggaagaacacttcggcgtaggcgcaggtaagctgattaccctgctttatttcttcgctatctacccgatcctgctggtttacagcgtggcgatcactaacaccgtcgaaaccttcatggcgcatcagctgcacatgacgccgccgccgcgcgccattctgtcgctgatcctgatcgtcggcatgatgaccattgtgcgtttcggcgagcagatgattgtgaaagcgatgagcgtgctggtgttcccattcgttatcgcgctgatggtgctggctctgtatctgatcccgcagtggaacggcgcggcgctggagacgctctccctgagcggcgcttccgttaccggcaacggcctgctgatgaccctgtggctggcgatcccggtgatggtcttctccttcaaccactcgccgatcatctcttccttcgcggtagccaaacgtgaagagtacggcgaaggcgctgagaagaaatgctccagtatcctcgcgcgcgcccacatcatgatggtgctgaccgtgatgttcttcgtcttcagctgcgttctgagcctctctccggcagacctggcggcggcgaaagagcagaacatctcgattctgtcttacctggcgaaccactttaacgcgccaatcattgcctggatggcgccgatcatcgcgatgatcgccatcaccaaatccttccttggccactatctgggcgctcgcgaaggctttaacggcatggtgatcaaatccctgcgcagtaaaggcaaatcgattgaaatcaacaaactgaacaagctgaccgcgctgttcatgctgatcaccacctggattgtggcaaccctgaacccgagcatcctcggtatgatcgagacccttggcggcccgattatcgcgatgatcctgttcctgatgccgatgtacgcgattcagaaagtcccggcgatgcgtaaatacagcggccatatcagcaacgtcttcgtggtgattatgggcctgattgccatctccgcgatcttctactctctgttcagctaa

SEQ ID NO: 153309 - protein, 429 aa, Klebsiella pneumoniae subsp. pneumoniae MGH 78578
METTQTSTIVSGETRSGWRKTDTMWMLGLYGTAIGAGVLFLPINAGVGGMIPLIIMAILAFPMTFFAHRGMTRFVLSGKNPGEDITEVVEEHFGVGAGKLITLLYFFAIYPILLVYSVAITNTVETFMAHQLHMTPPPRAILSLILIVGMMTIVRFGEQMIVKAMSVLVFPFVIALMVLALYLIPQWNGAALETLSLSGASVTGNGLLMTLWLAIPVMVFSFNHSPIISSFAVAKREEYGEGAEKKCSSILARAHIMMVLTVMFFVFSCVLSLSPADLAAAKEQNISILSYLANHFNAPIIAWMAPIIAMIAITKSFLGHYLGAREGFNGMVIKSLRSKGKSIEINKLNKLTALFMLITTWIVATLNPSILGMIETLGGPIIAMILFLMPMYAIQKVPAMRKYSGHISNVFVVIMGLIAISAIFYSLFS

SEQ ID NO: 153310 - DNA, 1230 bp, Klebsiella pneumoniae subsp. pneumoniae MGH 78578
  CDS (1)..(1230): transl_table=11
atgtctaaaatttggtctaaagaagaaactctatggagttttgccttatatggcactgcagtaggcgctgggacgctatttctaccgatccagctgggttcggctggcgccattgtgctgttcatcaccgcgctggtcgcctggccgctcacttactggccccacaaagcgctgagccagtttattctctcggccaatatcgcgccgggaaccgggatcaccggcgcagttaatcactactatggtaagaaaattggcaacctgatcaccggcctctatttccttgccttctttgtggtggtgctcatctacgccgtggccatcaccaactcgctggccgaacaggtggcgcatcgcacgccgatgaccccagggctgcgtgcgctgctgagtctgggggtcgtgctggtcctcaacctgatctttctcatgggacggcaggtcaccatcaaggtgatgggctttctggtcttcccgcttatcgcctgtttcctgtttctctccctctatttaatccgcgactggcatccggagcatctcaccagccagatgcagttcagcccgcagacgctccaccaggtctggatctctattcccgtgatggttttcgcttttagccatacgccgatcatctcgacttttgctatcgatcagcaggagaaacacggcgacctggccatgggtaaatgcaaaaaaatcatgaaggtggcctacaccatcatctgcgccagcgtgctgttttttgtcttcagttgtctgctggcgatcccggcaacctatatagagaccgcccgcgatcagggggtgactatcctctccgccctgtcgatggtgccaggcgcgccgggatggctggcggtgaccggcatcatcgtcgccgtcgtcgctatgtcgaagtcgtttctcggaacctacttcggagtgattgagggcgccagcgaaatcgtcaaaagctcgctgggcctgctgggcgtgcgtaagagccgcgctttcaaccgcgcgatgtcgatcctgctggtctccgccttcacttttgcggtgtgctttatcaacccgaatgcgatctcaatgatctacgctatcagcggaccgcttatcgccatgatcctgtttattatgcccacgctgtcgacatggctcattccggcgctgaagccgtaccgctcggtgggtaacgccattacgctggtggtaggcctgctctgcgtgtcggtgatgttcttcggctaa

SEQ ID NO: 153311 - protein, 409 aa, Klebsiella pneumoniae subsp. pneumoniae MGH 78578
MSKIWSKEETLWSFALYGTAVGAGTLFLPIQLGSAGAIVLFITALVAWPLTYWPHKALSQFILSANIAPGTGITGAVNHYYGKKIGNLITGLYFLAFFVVVLIYAVAITNSLAEQVAHRTPMTPGLRALLSLGVVLVLNLIFLMGRQVTIKVMGFLVFPLIACFLFLSLYLIRDWHPEHLTSQMQFSPQTLHQVWISIPVMVFAFSHTPIISTFAIDQQEKHGDLAMGKCKKIMKVAYTIICASVLFFVFSCLLAIPATYIETARDQGVTILSALSMVPGAPGWLAVTGIIVAVVAMSKSFLGTYFGVIEGASEIVKSSLGLLGVRKSRAFNRAMSILLVSAFTFAVCFINPNAISMIYAISGPLIAMILFIMPTLSTWLIPALKPYRSVGNAITLVVGLLCVSVMFFG

SEQ ID NO: 153312 - DNA, 1320 bp, Bacillus anthracis str. Sterne
  CDS (1)..(1320): transl_table=11
atgaatgggaatactgcaaaaaacatagaatttcaagttgataatactacagtaaaaaatgagaaatatctagaccctaaaaagtggcataaacaggatactacctgggcattgagtctatttggaacagcaattggagcaggagtacttttcttacctattaatgcaggttcaggtggtttattatcgttgctgttaattaccatactggcatatcctgttatgtattactcacatagggcgcttgctaaaatgatatacgcttcaaattctgccgacgaggggattacaggtacaataagagaatatttcggaaataaagcaagtatcatttttaacatcgtatatttcgtctcaatttatacgatcgtgctgatgtattcggttgcacttacaaatactgcaagtagttttattgtacaccaattgcacatgccggagcctccaagggctattttatcacttgtattagtaatcggtcttatcactatactaaattttggtcaggatattactgtaaagataatgagcatgctagtatatcctttcattgcttcgctactttttattgcaatatctttaattccacaatggaatacttcaatgctaagtttttcaagtgtttctactgcttcaactggaacagggtatttcggaacgatttggatgatactaccaatcatcgtattctcgtttaatcattcacctatgatttcgtcattcgttatgaaacagagagctacgtatggaatagatgctactgatgccaagtgtgctcaaatacaaaaagtctgttatatcatgacattcgctgttgttatgttctttgtttggagcagtactttaagtttgactccagatgatcttaaggtggcgaaagaacagaatttgtcaattctatcatatcttgctaatgagcttaattcaccagtaatcactattgcggctcctattattgcgtttgtggctattacaaagtctttccttggtcattatataggagcgtatgaggtaatgcgtgacatgattatcaagtccggtaaaaaacgtgggaaagatataggagaaaaaacagttaagacaatgattcttacttttgttgtactaacatgctggtatgttgcttatacaaatccaagtattcttggaatcattgatgcccttagcggtccgttagtcgctgccatcttatgtctattaccgatgtatgcgattcgtaaagtaccagtgctagcaaaatacagagggaaaatgagcaatgtatttgtaattattatagggatacttactgttctagcaagtattaagtcattattctaa

SEQ ID NO: 153313 - protein, 439 aa, Bacillus anthracis str. Sterne
MNGNTAKNIEFQVDNTTVKNEKYLDPKKWHKQDTTWALSLFGTAIGAGVLFLPINAGSGGLLSLLLITILAYPVMYYSHRALAKMIYASNSADEGITGTIREYFGNKASIIFNIVYFVSIYTIVLMYSVALTNTASSFIVHQLHMPEPPRAILSLVLVIGLITILNFGQDITVKIMSMLVYPFIASLLFIAISLIPQWNTSMLSFSSVSTASTGTGYFGTIWMILPIIVFSFNHSPMISSFVMKQRATYGIDATDAKCAQIQKVCYIMTFAVVMFFVWSSTLSLTPDDLKVAKEQNLSILSYLANELNSPVITIAAPIIAFVAITKSFLGHYIGAYEVMRDMIIKSGKKRGKDIGEKTVKTMILTFVVLTCWYVAYTNPSILGIIDALSGPLVAAILCLLPMYAIRKVPVLAKYRGKMSNVFVIIIGILTVLASIKSLF

SEQ ID NO: 153314 - DNA, 1320 bp, Bacillus anthracis str. Sterne
  CDS (1)..(1320): transl_table=11
atgaacgggaatactgcaaagaaaatagaagttcaagctgaaaataccgcactaaacaatgagcaatatgcagatccgaaaaagtggcataagcaggatactacatgggcactcagtctatttggaactgcaattggagcaggggtgctctttttaccgattaatgcaggttcaggtggtttattatctttactactaattacattgcttgcatatccagttatgtactactcacatagggcgcttgctaaaatgatatacgcttctaattctgctgatgaggggatcacaggtacaattagagagtatttcggaaataaagcgagtatcatttttaacatcgtatatttcggttcaatttatacaatcgtactaatgtattcggttgcgcttacaaacactgcaagtagttttatcgtgcatcaattgcacatgccagaacctccaagagcaattttatcacttgtattagttcttggtcttatcgctatactaaattttggtcaagatattactgtaaaggtaatgagtatgttagtgtatcctttcatcgtttctctactgtttatcgcaatatctttaattccacagtggaatacgtcaatgctgagtttttcagctgtttcaactgcttcaacaggaacaggctattttgggacgatagtgatgattttaccaatcatcgtattctcatttaatcattcacctatgatttcatcatttgttgtgaaacagagagctacgtatggaatcgaagccactgatgcgaaatgtgcgcaaatacaaaaggtttgttatattatgacattcgctgttgttatgttcttcgtttggagtagcgcattgagcttgactccagatgatataaaaatggcaaaagaacaaaacctattaatcctttcatatcttgcgaatgagcttaattcacctgtaattacgattgcagctccaatcattgcttttgtggctattacaaagtctttccttggccattatatcggagcatttgaagtaatgcgtgacatgattattaagtttggtaaatcacgtggaaaagatattgaagaaaaaacaattaagacaataatccttacttttgttgtattatcatgctggtttgttgcttatacaaatccaagtattcttggacttattgattctctaagcggtccattagttgctgctatcttatgtctattaccgatgtatgcgattcaaaaagtaccggtattagctaagtacaaagggaaaatgagtaacgtatttgttattattgtaggtgtacttactgttttagcaagtattaagtcattattctaa

SEQ ID NO: 153315 - protein, 439 aa, Bacillus anthracis str. Sterne
MNGNTAKKIEVQAENTALNNEQYADPKKWHKQDTTWALSLFGTAIGAGVLFLPINAGSGGLLSLLLITLLAYPVMYYSHRALAKMIYASNSADEGITGTIREYFGNKASIIFNIVYFGSIYTIVLMYSVALTNTASSFIVHQLHMPEPPRAILSLVLVLGLIAILNFGQDITVKVMSMLVYPFIVSLLFIAISLIPQWNTSMLSFSAVSTASTGTGYFGTIVMILPIIVFSFNHSPMISSFVVKQRATYGIEATDAKCAQIQKVCYIMTFAVVMFFVWSSALSLTPDDIKMAKEQNLLILSYLANELNSPVITIAAPIIAFVAITKSFLGHYIGAFEVMRDMIIKFGKSRGKDIEEKTIKTIILTFVVLSCWFVAYTNPSILGLIDSLSGPLVAAILCLLPMYAIQKVPVLAKYKGKMSNVFVIIVGVLTVLASIKSLF

SEQ ID NO: 153316 - DNA, 1290 bp, Erwinia carotovora subsp. atroseptica SCRI1043
  CDS (1)..(1290): transl_table=11
atgagcacaattcaagatagcagccacgtgttagaacaggcttcaggatggcgtaaaagcgacaccgtctggatgctcggcctctatggcacggccatcggtgcgggcgtgttattcttacccatcaatgctggcattggtggtttaattccgttaattatcatggcactgattgcctttccgatgacgtattattctcaccgtgcattatgccgctttgtattatccggcaagaaaggtggcgaagatattaccgaagtcgttgaagaacatttcggcgttggtgcgggtaaattaatcactttgctttattttttcgctatttatccgatcctattagtttatagcgtcgctatcaccaatacggtagatagctttattactcaccaattgcatttaccttctccgccgcgtgctgcgctgtcattaatattgatcctcgggttgatgtttattgtccgcttcggtgaagcgatgatcgttaaagcaatgagtgttctggtttacccttttgttgccgtactgatgttgctggcgctttatttaattccgaactggaatacctctgtttttgaaaacatttctctgagttccagcgtaacgggtaacggtctgttggcgacattatggctggctattccggtgatggttttctccttcaaccactcgccaatcatctcctctttcgccgttgccaaacgcaaagaatatggtgatgatgcagagaagaaatgctcacgcattctgtcttacagccacattatgatggtgttgacggtgatgttcttcgttttcagctgcgtactgagcctttctccaaccgagctgatggaagcaaaaacacaaaacatttctattctgtcctatctggcgaaccattttaatagcccggtaatcggctatctggccccagtaattgcaaccatcgcgatctctaaatccttcctgggccactatctgggcgcgggtgaaggctttaacggcatgatcgtgaaatccctgcgcagcagaggaaaaaccatctccagcaccaaactgaaccgtatcacttcgctgttcatgttgatcaccacctggattgtcgcgacgctgaacccaagcattctgggtatgatcgaaaccttgggcggcccgattatcgcgtgcctgctgttcctgatgccgatgtacgccatccagaaagtcccagcgatgaaaaaatacagcggccacattagcaacgtctttgtcaccctcatgggactgatcgctatttccgccattgtttacagcctgcgcgatctgctgtaa

SEQ ID NO: 153317 - protein, 429 aa, Erwinia carotovora subsp. atroseptica SCRI1043
MSTIQDSSHVLEQASGWRKSDTVWMLGLYGTAIGAGVLFLPINAGIGGLIPLIIMALIAFPMTYYSHRALCRFVLSGKKGGEDITEVVEEHFGVGAGKLITLLYFFAIYPILLVYSVAITNTVDSFITHQLHLPSPPRAALSLILILGLMFIVRFGEAMIVKAMSVLVYPFVAVLMLLALYLIPNWNTSVFENISLSSSVTGNGLLATLWLAIPVMVFSFNHSPIISSFAVAKRKEYGDDAEKKCSRILSYSHIMMVLTVMFFVFSCVLSLSPTELMEAKTQNISILSYLANHFNSPVIGYLAPVIATIAISKSFLGHYLGAGEGFNGMIVKSLRSRGKTISSTKLNRITSLFMLITTWIVATLNPSILGMIETLGGPIIACLLFLMPMYAIQKVPAMKKYSGHISNVFVTLMGLIAISAIVYSLRDLL

SEQ ID NO: 153318 - DNA, 1362 bp, Legionella pneumophila subsp. pneumophila str. Philadelphia 1
  CDS (1)..(1362): transl_table=11
atgttaatattgatcaacctgcgaggcgctattttattagttagtattaaaacgaggatgtttttcatgtcatcaaatgaatctgcagctatagtatctccgatagtcaaccaaaaactatcacaatggaaaaaacaagatacgatttggatgttaagcctctatggcacagcaattggtgccggaactcttttccttcctatagatgctggtcttaatggcattttgcctttaatcattatgacaattctggccttccccatgacttattattctcatagggctttatgtcgttttgtcctttcaggctcgtcctcacacaatgacatcaccgatgttgtagaagaacactttggctcatttgcgggtaagatgctaactatcctgtacttttttgcgatttatccaattttgcttatgtacagtgtcgcaataactaataccacggaaagtttcctgattaatcaaatgggaattacccctccgccacgggctcttttagcaatcatattaattcttgggttaatgggtatcgtgcgtttaggacaagaaattattgtcaaatcgatgtcggtattggtatatccttttgccactattctatttctgctttcgctttatttaattccaaattggaataacgctatttttatccaaagcaattccttacatgccaatggagggcatggactattaatgactttatggttaattattccagtgatggtgttctcctttaaccattctcctatcatttcatcttttgctgtgaatcaaaagcagcaatatggtagccaagctgacgagaaaagctcattaattatgaaatacagtcacttgatgatggttttctctgtgatgttttttgtatttagctgtgtgttgagcctgtcacctcaagatcttttgcaagcaaagcaacaaaatatttccattttgtcttatctggcgaatcattttaatacccctattatggcctatattgcaccggttattgcattcatagccatttcaaaatcttttctgggacattatttaggtgccaaggaaggtttaagtggaattattgttaaatcattaaaatcaacaacaggcaaaacaattaataagaattccctgcacagaatcattgaaatctttatgattctgacttgttgggttgttgctacaattaatcctaatattttaaaaatgattgaaacattaggaggtcccatcatagctgtcttattatttatcatgccaatgtatgccattgctaaagtgccagccatgaaaaaatacaacaatcaaatcagtaacgtatttgttaccgtcatgggcattatttctatctcagccatcatttatggcttaatttaa

SEQ ID NO: 153319 - protein, 453 aa, Legionella pneumophila subsp. pneumophila str. Philadelphia 1
MLILINLRGAILLVSIKTRMFFMSSNESAAIVSPIVNQKLSQWKKQDTIWMLSLYGTAIGAGTLFLPIDAGLNGILPLIIMTILAFPMTYYSHRALCRFVLSGSSSHNDITDVVEEHFGSFAGKMLTILYFFAIYPILLMYSVAITNTTESFLINQMGITPPPRALLAIILILGLMGIVRLGQEIIVKSMSVLVYPFATILFLLSLYLIPNWNNAIFIQSNSLHANGGHGLLMTLWLIIPVMVFSFNHSPIISSFAVNQKQQYGSQADEKSSLIMKYSHLMMVFSVMFFVFSCVLSLSPQDLLQAKQQNISILSYLANHFNTPIMAYIAPVIAFIAISKSFLGHYLGAKEGLSGIIVKSLKSTTGKTINKNSLHRIIEIFMILTCWVVATINPNILKMIETLGGPIIAVLLFIMPMYAIAKVPAMKKYNNQISNVFVTVMGIISISAIIYGLI

SEQ ID NO: 153320 - DNA, 1251 bp, Campylobacter jejuni RM1221
  CDS (1)..(1251): transl_table=11
atgaatactcctaaatggactagtcacgatacaaggtgggttttatctctttttggaacagctattggagccggcgtacttttgttacctattagtgctgggcttggtggattgatacctttattagttatacttgttttagcttttcctatgacttacttagctcatagaaatttatgtcgctttgtgctttcaagttctaatccaaaagatgatattacttttgttgcagaaagttattttggcaagggcggtggatttttaattacacttttgtatttttttgctattttgcctattttattggtttatagtgctaatcttacaacaactttgcttgagttcttaatcaatcagttcaatttcaatgcagatcttactcatgctgctcgttggtgggtgagttttttgattgttggagttttggttttgatttctattcttggtgaaaatgttgtaacaaaagcaatgagttttcttgtttttccttttattatatttttatttattttttcattgcttttaattccacaatggaattcatcattatttgcaaatgttgatttttccgtaatttcaacaagtaatttttgggttactttatggcttgttattcctgtgatggtatttagttttaatcactctcctatcatttcttcacttgcttgttattgtaaaaaagaatatggtgattatgctgaacctcgcgctagaaaaattatttctttggcaattattcttatggtttttgttgtaatgttttttgttttttcttgtgctttaacctttacaccagaagattttgcatcagcaaaagatcaaaatatcaatattcttacttttatagcaaataaatttcctgaagtttctttactagcttatgttggacctattgttgcacttgtggctattagcaaaagtttcttaggacattatcttggttctcaagaaggcttaaatggcattttatataaagcaagtaatggtagaattcaaggtaaattcgctcaaactttaacagcgatcattacctttgctattgcttggcttgttgcgtataaaaatccaagtgttataggaattatcgaggctattggtggccctgttttggctattttgcttttcttaatgccactttattgtatttatcgttttgatattttggcaagatttcgtaataaatttttagatctttttattttggtaatggggatagttgcaatttctgctgcaattcatgatcttttataa

SEQ ID NO: 153321 - protein, 416 aa, Campylobacter jejuni RM1221
MNTPKWTSHDTRWVLSLFGTAIGAGVLLLPISAGLGGLIPLLVILVLAFPMTYLAHRNLCRFVLSSSNPKDDITFVAESYFGKGGGFLITLLYFFAILPILLVYSANLTTTLLEFLINQFNFNADLTHAARWWVSFLIVGVLVLISILGENVVTKAMSFLVFPFIIFLFIFSLLLIPQWNSSLFANVDFSVISTSNFWVTLWLVIPVMVFSFNHSPIISSLACYCKKEYGDYAEPRARKIISLAIILMVFVVMFFVFSCALTFTPEDFASAKDQNINILTFIANKFPEVSLLAYVGPIVALVAISKSFLGHYLGSQEGLNGILYKASNGRIQGKFAQTLTAIITFAIAWLVAYKNPSVIGIIEAIGGPVLAILLFLMPLYCIYRFDILARFRNKFLDLFILVMGIVAISAAIHDLL

SEQ ID NO: 153322 - DNA, 1278 bp, Pseudomonas syringae pv. syringae B728a
  CDS (1)..(1278): transl_table=11
atgaatgatcaggctaatggcgtcgtagaacgtctggatgtagctcccgagagcatcgcgtcatggaatcgtaatgacaccacctggatgctcggattgttcggtaccgccatcggtgcgggtaccctgtttttgccaatcaacgcgggtatcggtggtttctggccattgatggcgctggcactgctggcgtttcccatgaccttctacgcccaccgtgggttgacgcgcttcgtgctctcaggacgtgaaggtgccgacatcaccgatgtggtcgaagagcatttcggcaagagtgccggtgcgatgatcaccttgctgtatttcttcgcaattttcccgatcctgctgatctacagcgtggccctcaccaacaccgtcggcagttttcttgagcaccagttgcacatcacgccaccgccgcgcgccgcactggcgtttgtgctgatcatggggctgctggccgtggtgcgttgtggcgagcggttcatcgtcaaggccatgagcctgatggtttatccgttcatcgtcgcactattgtttctggcaatattcctcatcccgcactggaccggcggcattctgagcaccgctaccacgttccctgagctatcggcgttcatacccacgttgtggctggccattccggtgatggtgttctctttcaaccacacaccgatcatctcggcctttgccgtcgatcagaagcgtcagtatggcgaaaacgccgaggtgcgcagttcgcagattctggcccgcgcccacggtctgatggtcgtgatggtgctgttcttcgtgttcagttgcgtgttgaccctgtcgcctgcccaactggccgaggccaaggcgcagaacatctcgatcctgtcttacctggccaaccacttcaacaacccgaccatcgcctttgtcgcgccactgatcgcgttcgtggctatttccaagtcgtttcttggccactacatcggtgcgagcgagggcttgaaaggcctggttctgaaggcgggtcgtcgtcctgcacccaaggccctggaccgcatgaccgcggcgttcatgctggtggtgtgctggctggtggcaacgctcaacccgagcatcctgggcatgatcgaaaccctgggcgggccggtgatttcggctttgctgttcctgatgccgatgtacgccatccacaaagtaccagccatgcgtaaatacgctggcgcgtggtccaactactttgtggtggccgccggtgtggtggcaatttcagcattgatcttttcgctgatccgctga

SEQ ID NO: 153323 - protein, 425 aa, Pseudomonas syringae pv. syringae B728a
MNDQANGVVERLDVAPESIASWNRNDTTWMLGLFGTAIGAGTLFLPINAGIGGFWPLMALALLAFPMTFYAHRGLTRFVLSGREGADITDVVEEHFGKSAGAMITLLYFFAIFPILLIYSVALTNTVGSFLEHQLHITPPPRAALAFVLIMGLLAVVRCGERFIVKAMSLMVYPFIVALLFLAIFLIPHWTGGILSTATTFPELSAFIPTLWLAIPVMVFSFNHTPIISAFAVDQKRQYGENAEVRSSQILARAHGLMVVMVLFFVFSCVLTLSPAQLAEAKAQNISILSYLANHFNNPTIAFVAPLIAFVAISKSFLGHYIGASEGLKGLVLKAGRRPAPKALDRMTAAFMLVVCWLVATLNPSILGMIETLGGPVISALLFLMPMYAIHKVPAMRKYAGAWSNYFVVAAGVVAISALIFSLIR

SEQ ID NO: 153324 - DNA, 1239 bp, Haemophilus influenzae 86-028NP
  CDS (1)..(1239): transl_table=11
atgaaatcaacagaaaaactcaaatggaacaaatttgatgcaacgtggatgttaaaccttttcggtacggcggttggcgcgggcgtattgttcttgccgattaacgcagggatgggtggattttggccgttagttttaatggcaattatcgtcgggccaatgacttattttgctcaccgtggcttagcctactttgtactttcatcaaaaaatcctggcagcgatattactgaagtagtggaagaacactttggtaaaacagcgggtaaacttattaccttactttattttttcgcgattttccctattctgttgatttacggtaacggtatcacgaacaccgtagattctttcattgtaaatcaacttggtatggcatcaccaaatcgagtcattctctcttttgtattaattgcggtattgatttccgtgatgttatttaatgaaaaagtgatgttaaaaatcacagaatggcttgtttatccgttagtcttaattttatttgttctttctatttacttaattcctgaatggaatagtgccgtattatatgaatttccaacaacaggtggtttcttaaccactttatggctaaccattcccgtattagtattttcatttaaccattcgccagcgacttcatcgttcacttgctcacaattccgtgaatacaaaacgtttgagggtgcagaacgccatatcagccatacagaaaaaggcgcttcaacgattttattattcttcgtaatgttcttcgtatttagctgtgtattaacactaacacctgaagaattagtggcagcaaaagaacagaatattagtatcttgtctttcttagcaaataaatttgataatccatatatctcttattttggcccgcttgttgcattcttagcgattacaagttcattcttcggtcactatatgggggcacgtgaaggattagaaggcttatatttgaaaatgaaaggcgaatctgtaaatcgtaaaaaactcaattatgcgaccgcacttttcttcttattaaccttatggggcgttgcgattattaatccaagtatcttaggcttaattgaatctcttggcggcccaatcattgcgatgattttattcattatgccaatgtatgcgattcgcaaaatcccagcaatgaaacgctacagcggacgtttcagtaatgtatttgtaacaattatgggactaattgctatttctgcagttgtttatggattattataa

SEQ ID NO: 153325 - protein, 412 aa, Haemophilus influenzae 86-028NP
MKSTEKLKWNKFDATWMLNLFGTAVGAGVLFLPINAGMGGFWPLVLMAIIVGPMTYFAHRGLAYFVLSSKNPGSDITEVVEEHFGKTAGKLITLLYFFAIFPILLIYGNGITNTVDSFIVNQLGMASPNRVILSFVLIAVLISVMLFNEKVMLKITEWLVYPLVLILFVLSIYLIPEWNSAVLYEFPTTGGFLTTLWLTIPVLVFSFNHSPATSSFTCSQFREYKTFEGAERHISHTEKGASTILLFFVMFFVFSCVLTLTPEELVAAKEQNISILSFLANKFDNPYISYFGPLVAFLAITSSFFGHYMGAREGLEGLYLKMKGESVNRKKLNYATALFFLLTLWGVAIINPSILGLIESLGGPIIAMILFIMPMYAIRKIPAMKRYSGRFSNVFVTIMGLIAISAVVYGLL

SEQ ID NO: 153326 - DNA, 1296 bp, Pseudomonas fluorescens Pf-5
  CDS (1)..(1296): transl_table=11
atgaccgatgtaccgacacctgctgcccaaaaccctgctgtagccacaccccgcgacaccaccagcagccgccagggctggagcaagcacgacaccacctggatgctcggcctgtatggcaccgccatcggcgccggcaccctgttcctgccgatcaacgccggggttggcggcttctggccgctgatcgtgctggcgctgctggccttccccatgaccttcttcgcccaccgcggcctgacccgcttcgttctttccgggcgctccggagacatcaccgaagtggtcgaggagcatttcggggtcggcgccggcaagctgatcaccctgctctacttctttgccatcttcccgatcctgctggtgtacagcgtggcgctgaccaacaccctgagcagtttcatggaacaccagctgcacatgactccaccgccgcgggcgctgctgtcgctgctgctgatcctcggcctgatggccatcgtgcgctgcggccagggcgtgatcgtgcgggccatgagcctgctggtctacccgttcgtcgccgcgttgctgctactggccctgagcctgatccccaactggaacggcgcgttcttcgcctcggccggcgaaggcatgcccctgccgctgttcttcaagaccctgtggctggcgatcccggtgatggtgttttccttcaaccattcgccgatcatctcggccttcgccctggatcagaagcgccattacggcccgcaggccgaagccaagagcagcggtatcctggccacggcccacggcatgatggtgctgacagtgatgttcttctgcttcagttgcgtgctggccctgtcgccggcggacctggtagcggccaaggagcagaacatctcgatcctgtcctacctggccaaccacttccagaccccggtgattgcctatgccgccccgctgatcgccctggtggccattaccaagtcgttcctgggccactacatcggcgccagcgaaggcttccagggcctgatcgtgaaaaacctgcgggggcgctcgctgtcctccagcagcctggaaaagatcaccgcgctgttcatgatcctcacgtgctgggccgtggccaccttcaacccgagcatcctgcgcatcatcgagaccatgggcggaccggtaatcgcctgcctgctgttcctgatgccgatgtatgcgatccggcgggtgccttcactgcgccagtattcgggtcagttgtcgaacctgttcgtggtgctgatcgggctggtcgcactgtctgcgatcatttattcggtcgtgccctga

SEQ ID NO: 153327 - protein, 431 aa, Pseudomonas fluorescens Pf-5
MTDVPTPAAQNPAVATPRDTTSSRQGWSKHDTTWMLGLYGTAIGAGTLFLPINAGVGGFWPLIVLALLAFPMTFFAHRGLTRFVLSGRSGDITEVVEEHFGVGAGKLITLLYFFAIFPILLVYSVALTNTLSSFMEHQLHMTPPPRALLSLLLILGLMAIVRCGQGVIVRAMSLLVYPFVAALLLLALSLIPNWNGAFFASAGEGMPLPLFFKTLWLAIPVMVFSFNHSPIISAFALDQKRHYGPQAEAKSSGILATAHGMMVLTVMFFCFSCVLALSPADLVAAKEQNISILSYLANHFQTPVIAYAAPLIALVAITKSFLGHYIGASEGFQGLIVKNLRGRSLSSSSLEKITALFMILTCWAVATFNPSILRIIETMGGPVIACLLFLMPMYAIRRVPSLRQYSGQLSNLFVVLIGLVALSAIIYSVVP

SEQ ID NO: 153328 - DNA, 1485 bp, Pseudomonas fluorescens Pf-5
  CDS (1)..(1485): transl_table=11
ttgagcgggagagggccgggccagacgctttcccatcaaacgaaaaaatacctgcagcgcataaaccgttcctcagctgagtctatgcagcgcccttggaatcccggacaatcgcgccccctcttttcgctcgggcactgcctgtcgggtactccgatacgcccgggtgaatggcaaacgaccggaatgtggagatcccaccggatgaatgatcaggccaacagcgttgatcaacgctttgaaaccgcggccccagcgaccctgacccgctggaaccgccaagacaccacctggatgctcggcctgtttggcacggccatcggtgccggtaccctgtttctgcccatcaatgccggcatcggcggtttctggccgctgttgatcctggcgctgctggccttccccatgaccttctatgcacaccgcggcctgacccgcttcgtgctttccgggcgtgacggcgcggacatcactgacgtggtggaagagcatttcggcctcaccgccggtgccctgatcaccttgctgtactttttggcgatcttcccgatcctgctgatctacagcgtggccctgaccaacaccgtcgacagcttcatgaccaaccaactgcacatcgcgccgccaccgcgggcgatcctggccctggtgctgatcttcggcctgctggtggtggtgcgttgcggcgagcaggtgatcgtcaaggccatgagcctgatggtctacccgttcatcgtggccctgctgttcctcgcggtgttcctgatcccgcactggaatggcggcatcctcgccaccgtcagcgatgtcccggcgccttcggccttcctgcataccctgtggctggcgattccggtgatggtcttctcgttcaaccattcgccgatcatctcggcctttgccgtggaccagaagcgccgctatggcgtgcacgccgaagagcgcagttcgcagattctctcccgcgcccacctgctgatggtgggcatggtgctgttcttcgtcttcagctgcgtactgaccctgaacccggcgcagctggcggaagccaaggcgcagaacctgtccatcctgtcctacctggccaaccatttccagaatccgaccatcgccttcgccgcgccgttgattgccttcgtggccatcgccaagtccttcctgggccactacatcggtgccagcgaaggcctcaagggcctgatcggcaagagcggccggcgcccgggcacgaaaaccctggaccgcgtcaccgccgccttcatgctggtgatctgctgggccgtggccaccctcaacccgagcatcctgacgatgatcgagaccatgggcggcccggtgatcgcggcgatcctgttcctgatgccgatgtacgccatccgcaaggtgccggccatggcccgctaccgcggccaggcttccaacgtcttcgtgaccctggtgggcctggtggccattactgccctggtgtactccctggcgtcctga

SEQ ID NO: 153329 - protein, 494 aa, Pseudomonas fluorescens Pf-5
MSGRGPGQTLSHQTKKYLQRINRSSAESMQRPWNPGQSRPLFSLGHCLSGTPIRPGEWQTTGMWRSHRMNDQANSVDQRFETAAPATLTRWNRQDTTWMLGLFGTAIGAGTLFLPINAGIGGFWPLLILALLAFPMTFYAHRGLTRFVLSGRDGADITDVVEEHFGLTAGALITLLYFLAIFPILLIYSVALTNTVDSFMTNQLHIAPPPRAILALVLIFGLLVVVRCGEQVIVKAMSLMVYPFIVALLFLAVFLIPHWNGGILATVSDVPAPSAFLHTLWLAIPVMVFSFNHSPIISAFAVDQKRRYGVHAEERSSQILSRAHLLMVGMVLFFVFSCVLTLNPAQLAEAKAQNLSILSYLANHFQNPTIAFAAPLIAFVAIAKSFLGHYIGASEGLKGLIGKSGRRPGTKTLDRVTAAFMLVICWAVATLNPSILTMIETMGGPVIAAILFLMPMYAIRKVPAMARYRGQASNVFVTLVGLVAITALVYSLAS

SEQ ID NO: 153330 - DNA, 1278 bp, Pseudomonas syringae pv. phaseolicola 1448A
  CDS (1)..(1278): transl_table=11
atgaatgatcaggctaacggcgtcgtagaacgcctggatgtagctcccgagagcatcgcctcttggaaccgtaatgacaccacctggatgctcggactgttcggtactgccattggcgcaggtacgctgttcctgcccatcaatgcaggcatcggtggtttctggccactgatggcgctggcgctgctggcgtttcccatgacgttctatgctcaccgcgggctgacccgtttcgtattgtccgggcgtgaaggggccgacatcacggaagtggtcgagcaacatttcggcaaaagcgccggcgcgatgatcaccttgctgtatttttttgcgatctttccgatcctgctgatctacagcgtggccctcaccaataccgtgggcagttttcttgagcatcagttgcacatagcgccgccgccacgcgcagcgctggcgttcgtgctgatcatgggcctgctggccgtggtgcgttgtggcgagcggatcatcgtcaaggccatgagcctgatggtttacccgttcatcgtcgcactgctgtttctggcggtattcctgattccgcactggactggtggcatcctgagtacctcaaccacctttcccgagccttcggcgttcctgcctactttgtggctggccattccggtaatggtgttttctttcaaccacacgccgatcatctcggcgtttgccgttgatcaaaaacgtcagtatggagaaaacgccgaggtacgcagttcgcagatactggcccgtgcccacggtttgatggtggtgatggtgctgtttttcgtgttcagctgcgtattgacgctgtcgccagcccaattggctgaggccaaagcacagaacatttcgatcctctcctacctggccaaccacttcaacaacccgaccatcgccttcgtggcgccgctgattgcgttcgtggctatttccaagtcgttcctcggccactacatcggtgcaagcgagggcctgaaagggctggttctgaaaaccgggcgtcgtcctgcaccaaaggctctggatcgtctgacagcagtcttcatgctggtggtgtgctggctggtcgcaacgctgaacccgagcattctgggtatgatcgagaccctgggcgggccggtgatttcggcgctgctgttcctgatgccgatgtatgccgtctacaaagtacccgccatgcgcaaatatgcaggtgcatggtcgaactactttgtggtggccgccggtgtggtggcgatctctgcactgattttttcgctgacacgctga

SEQ ID NO: 153331 - protein, 425 aa, Pseudomonas syringae pv. phaseolicola 1448A
MNDQANGVVERLDVAPESIASWNRNDTTWMLGLFGTAIGAGTLFLPINAGIGGFWPLMALALLAFPMTFYAHRGLTRFVLSGREGADITEVVEQHFGKSAGAMITLLYFFAIFPILLIYSVALTNTVGSFLEHQLHIAPPPRAALAFVLIMGLLAVVRCGERIIVKAMSLMVYPFIVALLFLAVFLIPHWTGGILSTSTTFPEPSAFLPTLWLAIPVMVFSFNHTPIISAFAVDQKRQYGENAEVRSSQILARAHGLMVVMVLFFVFSCVLTLSPAQLAEAKAQNISILSYLANHFNNPTIAFVAPLIAFVAISKSFLGHYIGASEGLKGLVLKTGRRPAPKALDRLTAVFMLVVCWLVATLNPSILGMIETLGGPVISALLFLMPMYAVYKVPAMRKYAGAWSNYFVVAAGVVAISALIFSLTR

SEQ ID NO: 153332 - DNA, 1302 bp, Pseudomonas fluorescens PfO-1
  CDS (1)..(1302): transl_table=11
atgaccgatgtacgcacacctgctgccgaaaatcccgctgtagaccgcacacgcaataacgaaaccgcccacaagggctggagcaagttcgacaccacctggatgctcggcctgtatggcaccgccattggcgccggcaccctgttcctgccgatcaacgccggtgtcggcggcttctggccgttgctgatcctggcgttgctggctttcccgatgaccttcttcgcgcaccgtggcctcacccgcttcgtgctctcgggccgctccggtgacatcaccgaagtggtggaggaacacttcggcatcggcgccggcaaactgattacgctgctgtatttcttcgcaatcttcccgatcctgctggtgtacagcgtggcgctgaccaacactctcggcagcttcctcgaacaccagttgcacatcgccccgccaccgcgcgcggtgctgtcgctggcgctgatcctcggtctgatggccatcgtccgttgcggtcagaacgtgatcgtcaaagccatgagtgtgctggtgtatccgttcgtcgccgcgttgctgttgctcggcatcagcctgattccgaactggaacggcgcattcttcgccagcgctcaagaaccgatggaaatgtcggtgttcctcaagaccctgtggctggcgatcccggtgatggtgttctcgttcaaccattcacccatcatctctgcgttcgccgtcgagcagaaacagcgctacggcgagcaggccgaacgcaagagcagcggcatcctcgccatggcccacggcatgatggtcgtcacggtgatgttcttctgcttcagctgcgtgctggcgctgtcgccgacggatctggcagcggccaaggcgcagaacatctcgatcctgtcgtatctggccaaccacttccagaccccggtcatcgcttacgccgcgccattgattgcgctggtggcgatcaccaaatccttcctcggccactacatcggcgccagcgaaggcttccagggcatgatcgtcaaaagcctgcgcagccgtggccgggtgatgtcggcgagctggctgaaccgtgcgaccgcgctgttcatgatcctcagctgctgggccgtggcgaccttcaacccgagcatcctcggcatgatcgaaaccctcggcgggccggtgattgcctgcctgctgttcctgatgccgatgtacgcgatccgccgcgtgccagccttgcgccagtattcgggccaggtgtcgaacgtgttcgtggtgctgatcggcctgattgcactgtcagcgatcatctactcggttctgccctga

SEQ ID NO: 153333 - protein, 433 aa, Pseudomonas fluorescens PfO-1
MTDVRTPAAENPAVDRTRNNETAHKGWSKFDTTWMLGLYGTAIGAGTLFLPINAGVGGFWPLLILALLAFPMTFFAHRGLTRFVLSGRSGDITEVVEEHFGIGAGKLITLLYFFAIFPILLVYSVALTNTLGSFLEHQLHIAPPPRAVLSLALILGLMAIVRCGQNVIVKAMSVLVYPFVAALLLLGISLIPNWNGAFFASAQEPMEMSVFLKTLWLAIPVMVFSFNHSPIISAFAVEQKQRYGEQAERKSSGILAMAHGMMVVTVMFFCFSCVLALSPTDLAAAKAQNISILSYLANHFQTPVIAYAAPLIALVAITKSFLGHYIGASEGFQGMIVKSLRSRGRVMSASWLNRATALFMILSCWAVATFNPSILGMIETLGGPVIACLLFLMPMYAIRRVPALRQYSGQVSNVFVVLIGLIALSAIIYSVLP

SEQ ID NO: 153334 - DNA, 1281 bp, Pseudomonas fluorescens PfO-1
  CDS (1)..(1281): transl_table=11
atgaatgatcaggccaatagcgtcgaacaacgctttgaggcggcagcaccagccgaactgtcgagctggaatcgccatgacactacctggatgttgggactgtttgggacggccatcggcgccggtaccctgtttttgccgatcaacgcaggtctgggtggcttctggccgctggtgatcctcgcgctgctggccttcccgatgacgttttacgcacaccgcggcctgacccgcttcgtgctttccggtcgcgaaggcgccgacatcacagacgtggtggaacagcatttcggcatcaaggccggcgcgctgatcaccctgctgtacttcttcgctatcttcccgatcctgctgatctacagcgtcggcctgaccaacacggtcgccagtttcctcgagcaccaactgcacatcacgcagccaccgcgcgcgctgctgtcgttcgtgctgattctcggcctgctggccgtggtgcgctgcggcgagcaagtgatcgtcaaggccatgagccttatggtgtatccgttcatcgtcgcgctgctgttcctggcggtgtatctgattccgcactggaacggcggcatcctgaccaccgcttcgcaagtgccggcaccgtcggcgctgctgcacacgctgtggctggcgattccggtgatggtgttctcgttcaaccactcgccgatcatctcggcgtttgcggtggatcagaagcgccgttacggcgtccacgctgacgagcgcagctcgcagatcctgtcccgcgcgcacctgctgatggtggtgatggtgctgttcttcgtcttcagttgcgtgctgaccctgtcgccggagcaactggcgcaagccaaggcgcagaacctgtcgatcctgtcttacctggccaaccacttcagcaacccgaccatcgcgttcgcggcgccgctgattgcgtttgtggcgatctccaagtcgttcctcggccactacatcggtgccagcgaaggcctgaagggcttgatcgtcaagagcggcaagcgtccgggcgccaaggcgctggaccgcatcgtggcggcgttcatgctggtggtgtgctggatcgtggcgaccctgaacccgagcatcctcggcatgatcgaaaccatcggtggcccggtcatcgcggcgatcctgttcctgatgcctatgtacgcgatccgcaaagtgccggcgatggcccgttatcgtgggcagatgtcgaacgtgtttgtcaccgcagtgggtctggtggcgatttcggcgttgatctactcgctgactgcttaa

SEQ ID NO: 153335 - protein, 426 aa, Pseudomonas fluorescens PfO-1
MNDQANSVEQRFEAAAPAELSSWNRHDTTWMLGLFGTAIGAGTLFLPINAGLGGFWPLVILALLAFPMTFYAHRGLTRFVLSGREGADITDVVEQHFGIKAGALITLLYFFAIFPILLIYSVGLTNTVASFLEHQLHITQPPRALLSFVLILGLLAVVRCGEQVIVKAMSLMVYPFIVALLFLAVYLIPHWNGGILTTASQVPAPSALLHTLWLAIPVMVFSFNHSPIISAFAVDQKRRYGVHADERSSQILSRAHLLMVVMVLFFVFSCVLTLSPEQLAQAKAQNLSILSYLANHFSNPTIAFAAPLIAFVAISKSFLGHYIGASEGLKGLIVKSGKRPGAKALDRIVAAFMLVVCWIVATLNPSILGMIETIGGPVIAAILFLMPMYAIRKVPAMARYRGQMSNVFVTAVGLVAISALIYSLTA

SEQ ID NO: 153336 - DNA, 1224 bp, Francisella tularensis subsp. holarctica
  CDS (1)..(1224): transl_table=11
atgaaaaaaaatgaagatttaatgtggtcccttagtctgtatggtacagctatcggtgccggtgtactatttttgccaattcaaactggaatttcaggaattataccaatattagtgatattagtatttatcttcccaatggtgtttttatcacatcgtgcattatgtagatttgtgatatctaacccaaatactaactctgatatcacagtagttgctgatgactattttggtaagcttggtggaattattttcaacattttatatctatttgctatcttgccaatactactggtttatagtgttggtataacaaatactctggctagtttttttaagtatcagtttcattacgatattcaaaatagatttcttttgagtttttttactatactttcgctagtttttatcattaactttggtcagaagcttatcatccgtgttatgagccttctagtttttccatttatcatcgctttgctagtactttcattatggatgattccatattggaatattgagatactgcaaaagagcattgagtacaatcatagtttttctggtattttgatagctatctggataattatgccaatattgatattttcttttaaccactcaccgattatctcttctttagccgtatatgcaaaaaccaaatacaaacaaaatgccgacaaaaaagcctctaagataatcgcttttagtaatattctaatgattattactgtagttatatttgtaattagctcaatgcttaccctctctccaaaagagctaatgatcgcaaaagaagagaatatttctatactatcttatctagcaagtcattttaataattattctcttgattatgtagctccaatagtagctctagttgctatgagtaagtctttttttggtcattatttaggttcaaaagaaggtatagatggtctagtttataaagttacaaaaaataaaattagtgaaaaaactataaaaccaattacattatcaatagtgtttttatcatgctggctagttgcttatttaaacccaaatatcttagatatgatatctagtataggtggtctagttttagcggtgatactgtttattatgcctatttatagtatctataaaataaaatatctaaagccttataaaaacctattagcagatagttttatactttttgtcggtattattgcactatcatcggcaatttatgttttgttgtag

SEQ ID NO: 153337 - protein, 407 aa, Francisella tularensis subsp. holarctica
MKKNEDLMWSLSLYGTAIGAGVLFLPIQTGISGIIPILVILVFIFPMVFLSHRALCRFVISNPNTNSDITVVADDYFGKLGGIIFNILYLFAILPILLVYSVGITNTLASFFKYQFHYDIQNRFLLSFFTILSLVFIINFGQKLIIRVMSLLVFPFIIALLVLSLWMIPYWNIEILQKSIEYNHSFSGILIAIWIIMPILIFSFNHSPIISSLAVYAKTKYKQNADKKASKIIAFSNILMIITVVIFVISSMLTLSPKELMIAKEENISILSYLASHFNNYSLDYVAPIVALVAMSKSFFGHYLGSKEGIDGLVYKVTKNKISEKTIKPITLSIVFLSCWLVAYLNPNILDMISSIGGLVLAVILFIMPIYSIYKIKYLKPYKNLLADSFILFVGIIALSSAIYVLL

SEQ ID NO: 153338 - DNA, 1263 bp, Francisella tularensis subsp. holarctica
  CDS (1)..(1263): transl_table=11
atgaaaaaaccagattactcaaatactacaaaagtcgatatccagtgggtatttacgttatttggtactgcaataggtgcagggttactttatctacctgttcaagcaggggatagcggcctttgggctttagtaacagtacttatttttgctttacctttaacgtattactcacataaaaatatgtcaaatattgtactttgcacagataatggtggtattacagatgtatttacccacaatcttggtagattttttggtttaacctgcgtagtgctatatttctttgcaatattcctaaatatgccaatgtactctattggtctaaatagcgaactaagtaattttcttttaaactacaatattgtaaaaaccaatttatcaacacatatatggtttagttttagtattttagcccttttattaataatagtttctttaggtatcaatataattctaaagtttatgcagcttatagttatattattgattatattagtagtgacactgtccatatatataataccttattggaactttgagtttataactgatagtcattttgatactgttggttatattacaggtgtattaatggtattaccaatcttgatattatcgatgaatcactcacctgttatttctagtctagtaattttttatcgtgattatgtaaaagttgagcgatcacaagaaaaatataaagtttataaaatacttaaaattaatgctctaattctttttatctttgtactgctttttgtaacatcttgcctacttagcactactataccagaccttaatagggctaatgcaaataatctaacaatagtaactctaatacaagagcagcatcatagtactttattgaatattttagcaccaatgatagttttcactgctattattagttcatttataggctgttacataggttcaaaagaagctttgaaatatctatttaaatatttctttaaaaatatttataaaatagaattttctgattcattaataaataaaatctgtgttgggctaatatttatagttctctggatatgcacaatatgtaattttaaaatccttaatattataggcatattagttgcgcctactgtggcttttctactatatgttttacctgtaataataatttacaaaaatatccaatgtaaagattatagacgcgtaatattagactctattttatttataatgggattaataattatatttggctatgtaattggtttacttctaaaataa

SEQ ID NO: 153339 - protein, 420 aa, Francisella tularensis subsp. holarctica
MKKPDYSNTTKVDIQWVFTLFGTAIGAGLLYLPVQAGDSGLWALVTVLIFALPLTYYSHKNMSNIVLCTDNGGITDVFTHNLGRFFGLTCVVLYFFAIFLNMPMYSIGLNSELSNFLLNYNIVKTNLSTHIWFSFSILALLLIIVSLGINIILKFMQLIVILLIILVVTLSIYIIPYWNFEFITDSHFDTVGYITGVLMVLPILILSMNHSPVISSLVIFYRDYVKVERSQEKYKVYKILKINALILFIFVLLFVTSCLLSTTIPDLNRANANNLTIVTLIQEQHHSTLLNILAPMIVFTAIISSFIGCYIGSKEALKYLFKYFFKNIYKIEFSDSLINKICVGLIFIVLWICTICNFKILNIIGILVAPTVAFLLYVLPVIIIYKNIQCKDYRRVILDSILFIMGLIIIFGYVIGLLLK

SEQ ID NO: 153340 - DNA, 1293 bp, Shewanella sp. MR-4
  CDS (1)..(1293): transl_table=11
atgcaaaaagatgcgatcagtgttctcgaaacacctcaaagcacgcaagaaaacacaacaagacacttaccatggacgcgccaagacacgacttggatgctaagtttatttggcaccgctgtgggggcgggcattctatttcttccaatcaatgcgggcatgggcggtttttggcccttagtcttgatggccattatcattgggcctatgacctatctcgcgcaccgtggcctatcgcgcttcgtatgttcatcgagcattcccggcagtgacattacccaagtggtcgaagaacactttgggattggcgcgggcaaggcgattacgctgctgtattttttagcgatttatcccatcgtattgatctacggcgtggggatcactaataccgtcgacagctttatcgtcaaccaattgggcatggcttcaccgccacgttttttgctgtctggcattttgattttcggcatgatggctgtgatggtctctggtgagcaatttatgctgaaggtgactcagttgctggtgtatccgctggtgggcattttagcctttatgtccatctatctggtcccagagtggaaaatggatgcgctgcaagtcgtgccagaaacgggcgcctttttaggcacagtatggttaaccattcctgtactggtgtttgcctttaatcattctccggcgatttcgcaattttcggtttcccttaagcgtgaccatggggccaacgcggcccgtaaggccgatgtgatcctgcgtaatacctcgatgatgttagtcggctttgtgatgttattcgtgttctcctgcgtcttgtcactgtcgccagaacagttggctgaagcgaagtcgaagaacctgccgattttatcttaccttgcgaacgtgcatgacagtggttttgtcagctatttcgggcctttcatcgcgtttgtggcgattgtatcttctttctttggccactacatgggggcgactgagggcatgaagggcattatcgttaagcagctgcgttcaagtaacaaacaaatcagtgagaacaagctgaacaattttatcttagtgtttatgtttgccacgatttgggccgttgcgattataaacccaagtattttgggaatgatcgaggcgctgggcggcccgattattgcggcgattttgtacttaatgccaatgtatgccgtgtacaaagtgccggcgctgaaggcttatcgaaaccgcatcagcaacgtatttgtgattattgcgggcctactggcgatgaccgccattctgtttggtctcctgagataa

SEQ ID NO: 153341 - protein, 430 aa, Shewanella sp. MR-4
MQKDAISVLETPQSTQENTTRHLPWTRQDTTWMLSLFGTAVGAGILFLPINAGMGGFWPLVLMAIIIGPMTYLAHRGLSRFVCSSSIPGSDITQVVEEHFGIGAGKAITLLYFLAIYPIVLIYGVGITNTVDSFIVNQLGMASPPRFLLSGILIFGMMAVMVSGEQFMLKVTQLLVYPLVGILAFMSIYLVPEWKMDALQVVPETGAFLGTVWLTIPVLVFAFNHSPAISQFSVSLKRDHGANAARKADVILRNTSMMLVGFVMLFVFSCVLSLSPEQLAEAKSKNLPILSYLANVHDSGFVSYFGPFIAFVAIVSSFFGHYMGATEGMKGIIVKQLRSSNKQISENKLNNFILVFMFATIWAVAIINPSILGMIEALGGPIIAAILYLMPMYAVYKVPALKAYRNRISNVFVIIAGLLAMTAILFGLLR

SEQ ID NO: 153342 - DNA, 1293 bp, Shewanella sp. ANA-3
  CDS (1)..(1293): transl_table=11
atgcaaaaagatgcgatcagtgttctcgaaacacctcaaagcacgcaagaaagcacaacaagacacttaccatggacgcgccaagacaccacttggatgctaagtttattcggcaccgctgtgggggcgggcattctatttcttcctatcaatgcgggcatgggcggtttttggcccttagtcttgatggccattatcatcggcccaatgacctatcttgcccaccgcggcctgtcacgcttcgtatgttcatcgagtattcccggcagtgacattacccaagtcgttgaagaacactttggaattggcgcgggcaaggcgattacattgctgtatttcttagcgatttatcccattgtgttgatctacggtgtggggatcactaacacagtcgacagttttatcgtcaaccagttgggcatggcctcaccaccacgtttcctgctgtcaggcgtgttgattttcggcatgatggccgtgatggttgctggtgagcaatttatgctgaaggtgactcagctgctggtctatccgctggtgggcattttggcttttatgtccatctatttgatcccggagtggaaaatggatgcgctgcaagtcgtgccagacaccggcgcctttttaggtactgtatggttaaccattcctgtgttggtgtttgccttcaaccattctccggcgatttcgcaattttcggtttcccttaagcgtgaccatggtgtcaacgcggcccgtaaggccgatgtgatcctgcgtaatacctcgatgatgttagtcggctttgtgatgttattcgtgttctcctgcgtgttgtcactgtcgccagaacagttggccgaagcgaaggcgaagaacctgccgattttatcttaccttgcgaacgtgcatgacagtggttttgtcagctatttcgggccttttatcgcatttgtggcgattgtgtcttctttctttggccattacatgggcgcgactgagggcatgaagggcattatcgttaagcagctgcgctcaagtaacaaacaaatcagtgagaacaagctgaacaagtttatcttagtgtttatgtttgccacgatttgggccgttgcgattaaaaacccaagtattttggggatgattgaggcgctgggcggcccgattattgcggcaattttgtacttaatgccaatgtatgccgtgtacaaagtgccggctctgaaggcttaccgtaaccgcatcagcaacgtgtttgtgattattgcgggcctgctggcgatgacggctattctgtttggcttgttaagctaa

SEQ ID NO: 153343 - protein, 430 aa, Shewanella sp. ANA-3
MQKDAISVLETPQSTQESTTRHLPWTRQDTTWMLSLFGTAVGAGILFLPINAGMGGFWPLVLMAIIIGPMTYLAHRGLSRFVCSSSIPGSDITQVVEEHFGIGAGKAITLLYFLAIYPIVLIYGVGITNTVDSFIVNQLGMASPPRFLLSGVLIFGMMAVMVAGEQFMLKVTQLLVYPLVGILAFMSIYLIPEWKMDALQVVPDTGAFLGTVWLTIPVLVFAFNHSPAISQFSVSLKRDHGVNAARKADVILRNTSMMLVGFVMLFVFSCVLSLSPEQLAEAKAKNLPILSYLANVHDSGFVSYFGPFIAFVAIVSSFFGHYMGATEGMKGIIVKQLRSSNKQISENKLNKFILVFMFATIWAVAIKNPSILGMIEALGGPIIAAILYLMPMYAVYKVPALKAYRNRISNVFVIIAGLLAMTAILFGLLS

SEQ ID NO: 153344 - DNA, 1239 bp, Haemophilus influenzae R2846
  CDS (1)..(1239): transl_table=11
atgaaaccaacagaaaaactcaaatggaacaaatttgatgcaacatggatgttaaaccttttcggtacggcggttggcgcgggcgtattgttcttgccgattaacgcagggatgggtggattttggccgttagttttaatggcaattatcgtcgggccaatgacttattttgctcaccgtggcttagcctactttgtactttcatcaaaaaatcctggcagcgatattactgaagtagtggaagaacactttggtaaaacagcgggtaaacttattaccttactttattttttcgcgattttccctattctgttgatttacggtaacggtattactaacaccgtagattcttttattgtaaatcaacttggtatggcatcaccaaatcgagtcattctctcttttgtattaattgcggtattgatttccgtgatgttatttaatgaaaaagtgatgttaaaaatcacagaatggcttgtttatccgttagtcttaattttatttgttctttctatttacttaattcctgaatggaatagtgccgtattatatgaacttccaacagcaggcggtttcttaacaactttatggctaaccattcccgtattagtattttcatttaaccattcaccagcaatttcatctttcacttgctcacaattccgtgaatacaaaacgtttgagggtgcagaacgccatatcagccatacagaaaaaggcgcctcaacgattttgttattctttgtaatgttcttcgtatttagctgtgtactaacattaacacctgaagaattagtggcagcaaaagaacagaatattagtatcttgtctttcttagcgaataaatttgataatccatatatctcttattttggcccgcttgttgcattcttagcgattactagttcattcttcggtcactatatgggggcgcgtgaaggcttagaaggtttatatttaaaaatgaaaggtgaagcagtaaatcgtaaaaaactcaattatgcgaccgcacttttcttcttattaacgttatggggcgttgcgattattaatccaagtatcttaggcttaatcgaatctcttggcggtccaatcattgcgatgattttgtttatcatgccaatgtacgcgattcgaaaaatcccagcaatgaaacgctacagcggacatttcagtaatgtatttgtaacaattatggggctgattgctatttctgcagttgtttatggattattataa

SEQ ID NO: 153345 - protein, 412 aa, Haemophilus influenzae R2846
MKPTEKLKWNKFDATWMLNLFGTAVGAGVLFLPINAGMGGFWPLVLMAIIVGPMTYFAHRGLAYFVLSSKNPGSDITEVVEEHFGKTAGKLITLLYFFAIFPILLIYGNGITNTVDSFIVNQLGMASPNRVILSFVLIAVLISVMLFNEKVMLKITEWLVYPLVLILFVLSIYLIPEWNSAVLYELPTAGGFLTTLWLTIPVLVFSFNHSPAISSFTCSQFREYKTFEGAERHISHTEKGASTILLFFVMFFVFSCVLTLTPEELVAAKEQNISILSFLANKFDNPYISYFGPLVAFLAITSSFFGHYMGAREGLEGLYLKMKGEAVNRKKLNYATALFFLLTLWGVAIINPSILGLIESLGGPIIAMILFIMPMYAIRKIPAMKRYSGHFSNVFVTIMGLIAISAVVYGLL

SEQ ID NO: 153346 - DNA, 1320 bp, Bacillus cereus G9241
  CDS (1)..(1320): transl_table=11
atggatgggaatactgcgaaaaacatagaatttcaagctgataacactgcagtaaaaaatgagaaatatctagaccctaaaaagtggcataaacaggatactacctgggcattgagcctttttggaacagcaattggagcaggagtactctttttacctattaatgcaggttcaggtggtttattatcattgctgttaattaccatacttgcatatcctgttatgtattattcacatagggcgcttgctaaaatgatttacgcttcgaattctgccgatgaggggattacaggtacaataagagaatatttcggaaataaagcaagtatcatttttaacattgtatatttcgtctccatttatacgatcgtgctgatgtactcggtcgcacttacaaatactgcaagtagttttattgtacaccaattgcacatgccggagcctccaagggctattttatcacttgtattagtactcggtcttatcactatactaaattttggtcaggatattactgtaaagataatgagcgtgctagtatatcctttcattgcttctctactttttattgcaatatctttaattccacaatggaatacttcaatgctaagtttttcaagtgtttctactgcttcaactggaacaggttatttcggaacgatttggatgatactaccaatcatagtgttctcgtttaatcattctcctatgatttcgtcattcgttatgaaacagagagctacgtatggaatagacgctaccgatgccaagtgtgcccaaatacaaaaagtttgttatatcatgacattcgctgttgttatgttctttgtttggagcagtactttaagtttgactccagatgatcttaaggtggcaaaagaacagaacttgtcaatcctatcatatcttgctaatgaacttaattcgccagtaatcacgattgcagctcctatcattgcgtttgtggctattacaaagtctttccttggccattatataggagcgtatgaggtaatgcgtgacatgattatcaagtccagtaaaaaacatgggaaagatataggagaaaaaacagttaagacaatgattcttacttttgttgtattaacatgctggtatgttgcttatacaaatccaagtattcttggaatcattgatgcccttagcggtcctttagtcgctgctatcttatgtctattaccgatgtatgcgattcgtaaagtaccagtactagcaaaatacagagggaaaatgagtaatgtatttgtaattgttatagggatacttactgttctagcgagtattaagtcattattctaa

SEQ ID NO: 153347 - protein, 439 aa, Bacillus cereus G9241
MDGNTAKNIEFQADNTAVKNEKYLDPKKWHKQDTTWALSLFGTAIGAGVLFLPINAGSGGLLSLLLITILAYPVMYYSHRALAKMIYASNSADEGITGTIREYFGNKASIIFNIVYFVSIYTIVLMYSVALTNTASSFIVHQLHMPEPPRAILSLVLVLGLITILNFGQDITVKIMSVLVYPFIASLLFIAISLIPQWNTSMLSFSSVSTASTGTGYFGTIWMILPIIVFSFNHSPMISSFVMKQRATYGIDATDAKCAQIQKVCYIMTFAVVMFFVWSSTLSLTPDDLKVAKEQNLSILSYLANELNSPVITIAAPIIAFVAITKSFLGHYIGAYEVMRDMIIKSSKKHGKDIGEKTVKTMILTFVVLTCWYVAYTNPSILGIIDALSGPLVAAILCLLPMYAIRKVPVLAKYRGKMSNVFVIVIGILTVLASIKSLF

SEQ ID NO: 153348 - DNA, 1278 bp, Photobacterium sp. SKA34
  CDS (1)..(1278): transl_table=11
atgtcttccagtacccttacgtcaaaccttaagtcaaatacaattggaaatagttttaaaactgatgtgttatggatattagctatttatggatgtgctgttggaagcggatcacttttttggccgataagtcttggtagtgcaggtatatggtcaatggttatattaatcgcacttgcatttcctgtaacctatttcacgtatagagttcttgcccaatatatagctgaaggtaccgtttcaaaaacctcaaaaagtaatcttattgatacaacaaatgagcttttagggaataaagccgtaaaatatttgactgtagcttactttctaataatgattccttcgttagctgtttatgccattacaatgagtaatacatttttggattttttcaaaacacagttggagtttgatcctttaaatagaaatcttactgtctgtggtatccttactgtgatgtcactcatttcattgggtaagactgaaacaatagttaaagtcgttggctttatagtattcccatttataatttcattaatattttttggtgttatgtctattcctcattggaatacagcatttctatcttcagaagcaaatacaaattttattcctgaaatctttaaatctacttttaataacttacctgttcttatttttgcatttagttttactccgatagtttcaagtttagtggctcattacaaacagtctcatggtgagcatgcatttaaaaaaattgataatatcctaattatatccttgataattatcatatcaacagtagtatttttctctctgagttgtattttcacacttacgccatctgaaattaaattggctagagttgaaaatttaacttcactatcaatcttagcaagaaagtttgatgctccttggcttgctatttgttctcaggtgattattttctttgccgcaatgaaagcctttcttggaacgtttatagctacaagagaaagccttatagggatggctaagaatatatttaaatgtggggatgactttgctaatggacttgcaatgcgtcttatttctgtcagtgtggtttttgtaataacattaattccaactatagaaaatctagatatcattaatattataaagtactttatggtacctgtaagtgtctttattgtattcttcttacctcaatattcattttacaaagttcctaagttaaatcattgtaaaggtgggtttatcaattggtttgtaatttttaccggtatttttgcaatgttctctggttttatttaa

SEQ ID NO: 153349 - protein, 425 aa, Photobacterium sp. SKA34
MSSSTLTSNLKSNTIGNSFKTDVLWILAIYGCAVGSGSLFWPISLGSAGIWSMVILIALAFPVTYFTYRVLAQYIAEGTVSKTSKSNLIDTTNELLGNKAVKYLTVAYFLIMIPSLAVYAITMSNTFLDFFKTQLEFDPLNRNLTVCGILTVMSLISLGKTETIVKVVGFIVFPFIISLIFFGVMSIPHWNTAFLSSEANTNFIPEIFKSTFNNLPVLIFAFSFTPIVSSLVAHYKQSHGEHAFKKIDNILIISLIIIISTVVFFSLSCIFTLTPSEIKLARVENLTSLSILARKFDAPWLAICSQVIIFFAAMKAFLGTFIATRESLIGMAKNIFKCGDDFANGLAMRLISVSVVFVITLIPTIENLDIINIIKYFMVPVSVFIVFFLPQYSFYKVPKLNHCKGGFINWFVIFTGIFAMFSGFI

SEQ ID NO: 153350 - DNA, 1323 bp, Photobacterium sp. SKA34
  CDS (1)..(1323): transl_table=11
atgataattaaaacctttcccctaccccgcgataaaaataccccgttacaccaaaaagcgaacatgacgaaagaggaatggaaggaagcaatcaaattcgataacgtagatattggatggattgtaatgagtattggaatggcaattggcgcaggaattgtatttcttccagtacaagtaggagtcatggggctgtggttttttttactatcgtctgttattggttaccctgcaatgtatttatttcaaaagttatttataaatacgttagctgaatcaaaagagtgtacagattatcctggtgttatttctggatatttaggaaaaaactggggaatatgccttggtgcgctttatttcattatgcttgttatttgggtattagtttatgcattatcagtgactaatgacagtgcctcatatttacactcatttggaataacagaacactatttaaatcataatgtattttatggcttagggcttatttgtttgttatgtttcattggctcaaaaagtgaaaaaattctttttaaaatatctggtgtaatggcagtcacagtgataagcctcgtcgctttaatgggtattctaatgattcctgaatggaatatgagtaacatacctgaagtcagtaattggcaacctttaattaagaatgcaattattacattaccttttacattaacctctattctctttatccaatcattgagtccaatggttatctcgtatcgttcacatgaaaaatccatcgaagtcgcgcgctataaggcttcgagagcaatgaaaattgcatttacaatactcttcatttctgtttttttctttgctctttcatttacttttgcaattagccaagatgaagcaatgcatgcaaaacaagcaaatatctctgcgttggccatgattgctcactttttccctggtagttgggcgacgactgtaggtgtaatcattaatatttttgctgtagttacatctttctttggtgttttcctcgcattcaaagaagcgtgtagcggtatggcaatgaatgttcttgaaaggaaatataaaagagaaaatataaacaaaaaattagtaagtaaattaacgatattatttactattctaatcgcatggggagctgttgcgttaaacctaccgattttatcttttacttcaatttgctcgcctgtctttggtattgttgggtgtcttattcccgcttatcttgtatataaagttcctcatcttcacaagtacaaaggattatcaacaaacttgattatcattacaggtattttactttgtatttctccgcttctagcatttatttga

SEQ ID NO: 153351 - protein, 440 aa, Photobacterium sp. SKA34
MIIKTFPLPRDKNTPLHQKANMTKEEWKEAIKFDNVDIGWIVMSIGMAIGAGIVFLPVQVGVMGLWFFLLSSVIGYPAMYLFQKLFINTLAESKECTDYPGVISGYLGKNWGICLGALYFIMLVIWVLVYALSVTNDSASYLHSFGITEHYLNHNVFYGLGLICLLCFIGSKSEKILFKISGVMAVTVISLVALMGILMIPEWNMSNIPEVSNWQPLIKNAIITLPFTLTSILFIQSLSPMVISYRSHEKSIEVARYKASRAMKIAFTILFISVFFFALSFTFAISQDEAMHAKQANISALAMIAHFFPGSWATTVGVIINIFAVVTSFFGVFLAFKEACSGMAMNVLERKYKRENINKKLVSKLTILFTILIAWGAVALNLPILSFTSICSPVFGIVGCLIPAYLVYKVPHLHKYKGLSTNLIIITGILLCISPLLAFI

SEQ ID NO: 153352 - DNA, 1263 bp, Photobacterium sp. SKA34
  CDS (1)..(1263): transl_table=11
atgtcattaacaacaatccaagagcaccccgaaaaagagatcaccgtacattcttcgaaatggacccaacatgacactcgttggatgttgagcttatttggtacatctgttggtgcgggtattttatttttaccaataaatattggctcaggtggattctggtcactggttataatggcattattagctggacctatgacattttgggctcatcgtggattagcgcgttttgttttatcatcatcttcttctgacgctgattttaccgatgtagttgaagagcattttggttcccgttacgggcgcttaatttcagcactgtattttctttctatctttcctattttactcatttatggtgtcggcctaaccaataccgttgatagttttattgtccatcaattaggttggcaagcgccgtcacgggtgttgttatcaggcggattagtttttttgatgatcactgtgatgcttgcgggtgaaaaagcgatgcttaaagcgtttgaagtgattgtctacccactggcatttattctggcgggcatttctatttacttgatcccaagctggcatgtacctaatcttaatttctctcaaaacatcaatgaatttagctcatcattatggttatcaataccggttgttgtttttgcttttagttatacacctgtcgtttctggctttgtaaatgctcaacgtcgtcagtatggcgatcatgcacatcgaaaatcagaaacaatcttaaagcgtacctcaatgatgttgattacttttgttttgttctttgtgttctcttgcgtgttaagtttatcccctgagcagttgcagcatgcaaaaatggataatgtgtcagtgttatcttatttagcgaacgttaaagacagtcattttattatgttgctaggccctttaattgcttttattgcgattacatcatcgtttttagggcactttatgggcgcacgtgaaagcttcaatggcattgtcgcgaaacaaacatcactgtcattaaaaaccatcgacaagattggtgtagtgatcatgttcttctctatttggtttgcagctgttatgaacccaagtattttagggatgatggaagcgttatctggacctattattgcgatgatactttttattatgccaatgcttgcggtatatcgaattgaaagtctgaaaatgtaccgaggtaagatcagtacttggtttattttattgatgggatgtttagcagtagcggcgatcatttttagcttagtgtaa

SEQ ID NO: 153353 - protein, 420 aa, Photobacterium sp. SKA34
MSLTTIQEHPEKEITVHSSKWTQHDTRWMLSLFGTSVGAGILFLPINIGSGGFWSLVIMALLAGPMTFWAHRGLARFVLSSSSSDADFTDVVEEHFGSRYGRLISALYFLSIFPILLIYGVGLTNTVDSFIVHQLGWQAPSRVLLSGGLVFLMITVMLAGEKAMLKAFEVIVYPLAFILAGISIYLIPSWHVPNLNFSQNINEFSSSLWLSIPVVVFAFSYTPVVSGFVNAQRRQYGDHAHRKSETILKRTSMMLITFVLFFVFSCVLSLSPEQLQHAKMDNVSVLSYLANVKDSHFIMLLGPLIAFIAITSSFLGHFMGARESFNGIVAKQTSLSLKTIDKIGVVIMFFSIWFAAVMNPSILGMMEALSGPIIAMILFIMPMLAVYRIESLKMYRGKISTWFILLMGCLAVAAIIFSLV

SEQ ID NO: 153354 - DNA, 1257 bp, Photobacterium sp. SKA34
  CDS (1)..(1257): transl_table=11
atgtcgttttccaataacattgaagtttccaataacatagaacaaaaacttaccctcaacaaacacgataaaacctggatcataagcctatttggcacagccgttggcgcagggatcttattcctacccattaatatcggtgtcagcggtttatggcctttgatcaccatggctctattagctggcccaatgacatttttagcccaccgtggtttggcacgatttattttgtcatcaaataacccgaaagcagaattcaccgatgttgttgaagagcactttggtcatcgcttcgggtttctgatttcactactctacttcttatctatttttccgattttaatgatttatggggtgggattaaccaatacagttgaaagttatatagtcaatcaaatggggatggcagcgccaccacgcattattttgtcgggtgtactggttgctgcaatgattggtattatgacggcaggtgagaaaaccgtattacgtgcctttgaagtaattgtttatccattagtattcatcttatttgggatctcgctttacatgatccctaactggcaaatgccaaactttgctgaaataccagatgcaaaaacatttactcaaaccctatggctcgctattcctaccactatttttgccttcagccacacagcagctatttccagtttttctgttgcccagaaaagacattacggagatcaggctggtaagcgtgtcgactttatcttaaaacacacatcgatgatgttaatcacctttgtattgttttttgttttctcttgtgcgctaagcttaactcctgctcagttagccgaagctaaggcacaaaatatttctattttatcttaccttgcaaatgtaacaggaagcggcttgattgcgtcatttggtcccttcattgcttgtattgcgatcatctcatcgttctttggtcacttccttggtggacgagaaagtttagacgggatcattgccaagcacaccaacctaaaacctaacgtggttaataaactcaccattggtattttatttttctctgtttggtatgccgcagtaaaaaatccaagtgtgctgggtattatggaaaccttttcaggccctgtgatcgccctgattttatttattctgccgatgtatgcgattaaaaatgttgaatcaatgaagaaatatcgtggaaagataagtaatattttcattactattattggtttaattgctatctctgcgattctatataatttggtatag

SEQ ID NO: 153355 - protein, 418 aa, Photobacterium sp. SKA34
MSFSNNIEVSNNIEQKLTLNKHDKTWIISLFGTAVGAGILFLPINIGVSGLWPLITMALLAGPMTFLAHRGLARFILSSNNPKAEFTDVVEEHFGHRFGFLISLLYFLSIFPILMIYGVGLTNTVESYIVNQMGMAAPPRIILSGVLVAAMIGIMTAGEKTVLRAFEVIVYPLVFILFGISLYMIPNWQMPNFAEIPDAKTFTQTLWLAIPTTIFAFSHTAAISSFSVAQKRHYGDQAGKRVDFILKHTSMMLITFVLFFVFSCALSLTPAQLAEAKAQNISILSYLANVTGSGLIASFGPFIACIAIISSFFGHFLGGRESLDGIIAKHTNLKPNVVNKLTIGILFFSVWYAAVKNPSVLGIMETFSGPVIALILFILPMYAIKNVESMKKYRGKISNIFITIIGLIAISAILYNLV

SEQ ID NO: 153356 - DNA, 1290 bp, Photobacterium sp. SKA34
  CDS (1)..(1290): transl_table=11
atgggcaccgaacaaaatttaacggcaacggcttctgcacaaagcaaaaaattagggtggagcaaaagtgatacattatggatgcttggtctatacggtacagccgtaggcgcaggtactctatttttaccaattaatgcgggggttggtggtttaattccattacttgtaatggccgttctcgcttttccaatgacattctttgcccaccgtgcaatgacacgttttgtattatcaagttcgaatcctggcgctgatattacagaagttgttgaagagcactttggtaagggcatgggtaaagtgatcacattactttatttctttgctatctaccctatcctattagtttacagtgttgcactaacaaatactgttgaaagctttatgcttaaccagttaggtatcgaaccaccagcacgtgcaattttagcgttagtattgatccttggtttaatggcaattgttcgtttaggtgagcaattaattgttaaagcgatgagtatcttggtattcccattcgttgctgtattattaattcttgcactatttcttgtaccgtactggaatgactctatcttccacaacgttatgccagcagacggtggcttaaactcagtgatgcttgcagtatggctaattttaccggtaatggttttctcgtttaaccactcacctgttatctcatcatttgctgttgctaagcaaaaagaatacggcgtaaacgcagagcgtcaaagttcacgtattctagcgcgtgctcacattatgatggtattaaccgtaatgttcttcgttttcagctgtgtattaagcttatcacctgaaaacttagcagaagctaaagcgaataacgtatctattctgacttacttagcgaaccacttcgatacaccgatcattgcttatgttgcaccgattgtagcgattattgcaattactaagtctttccttggccactacttaggtgcaagtgaaggtctaaatggtttagttatcaaagttactcgtgataagaataaagagatctcaagtaaggcactaaaccgttttaccgcaatctttatgctagtaacaacatgggcagtagcaacactaaacccaagcattctaggtatgattgagagcttaggtggtcctatcattgcaatgttgctatttattatgccaatgtatgcaatcaaaaaagtaccagcgatgaagaaatactcaggcgcaatcagtaatgtatttgtgacggttatcggacttgtttctatctctgcaatcttctactcattatttatgtaa

SEQ ID NO: 153357 - protein, 429 aa, Photobacterium sp. SKA34
MGTEQNLTATASAQSKKLGWSKSDTLWMLGLYGTAVGAGTLFLPINAGVGGLIPLLVMAVLAFPMTFFAHRAMTRFVLSSSNPGADITEVVEEHFGKGMGKVITLLYFFAIYPILLVYSVALTNTVESFMLNQLGIEPPARAILALVLILGLMAIVRLGEQLIVKAMSILVFPFVAVLLILALFLVPYWNDSIFHNVMPADGGLNSVMLAVWLILPVMVFSFNHSPVISSFAVAKQKEYGVNAERQSSRILARAHIMMVLTVMFFVFSCVLSLSPENLAEAKANNVSILTYLANHFDTPIIAYVAPIVAIIAITKSFLGHYLGASEGLNGLVIKVTRDKNKEISSKALNRFTAIFMLVTTWAVATLNPSILGMIESLGGPIIAMLLFIMPMYAIKKVPAMKKYSGAISNVFVTVIGLVSISAIFYSLFM

SEQ ID NO: 153358 - DNA, 1254 bp, Photobacterium sp. SKA34
  CDS (1)..(1254): transl_table=11
atgcaaaatacatcgaccgcagttaaaactggtgtagaaaaaactcgttggacttataaagatttcacatgggcattgtcactcttcggtaccgccgtaggtgctggtgttctattccttcctattaaagcaggtgcgggcggtttttggccgttggttattttagcacttatcgcagcaccaatgacttggcttgctcacaaaggccttgctcgttttgttctttctgcgaaaaatccaaatgctgacattacagataccgttgaagaacattacggaaaaacaggcgcaaatcttataacatttgcttacttttttgctatttttccgattgtacttatctacggtgtaggtattaccaatacagtggattctttcatggttaaccaattaggcatggactctgttcctcgttggttactatccggtgtgcttatttcactaatgactgcaggtgttgtatttggtaaagagctgatgctcaaagcaacgtcggcaatggtttaccctctggttatcattttacttctattgtctatttacctaattcctgattggaacatgtcaatggtgtctgtggcacctgattggtcatcaatgcctactgttatttggctagcgattcctatcatcgtgttctctttcaaccacagccctgtcatcagccagtttgcaaaagagcaacgccatgtatatggcgataatgcagttaagaagacggacatgatcacaggcggtgcagcaatgatgctcatgggctttgttatgttcttcgtattctctgtcgtattgtctatgacaccagagcagttgaacatggcgaaagagcaaaatatctctgttctttcatacttagcaaacgtgaaagagtcacctgcgatatcttacctaggtccactggttgcttttgctgctatcacttcaagctactttggtcactttttaggtgcacacgaaggccttgtaggtcttgttaaatctcgtagcagcctgcctgtaaatacgattgaaaaactgtctttggcatttatcgttatcattacgtggattgtggcaattaaaaacccaagtatcttaggcatgattgaaacgatgggtgcgccaatgattgcagctatcctattcctgctgcctgttgttgcgatgcaaaaagtacctgcaatggcaaaatacaaaacatctgttgcagcacgcattttcacagcggtttgtggtattgcggcaatcagttcagtaatttacggcgctttctaa

SEQ ID NO: 153359 - protein, 417 aa, Photobacterium sp. SKA34
MQNTSTAVKTGVEKTRWTYKDFTWALSLFGTAVGAGVLFLPIKAGAGGFWPLVILALIAAPMTWLAHKGLARFVLSAKNPNADITDTVEEHYGKTGANLITFAYFFAIFPIVLIYGVGITNTVDSFMVNQLGMDSVPRWLLSGVLISLMTAGVVFGKELMLKATSAMVYPLVIILLLLSIYLIPDWNMSMVSVAPDWSSMPTVIWLAIPIIVFSFNHSPVISQFAKEQRHVYGDNAVKKTDMITGGAAMMLMGFVMFFVFSVVLSMTPEQLNMAKEQNISVLSYLANVKESPAISYLGPLVAFAAITSSYFGHFLGAHEGLVGLVKSRSSLPVNTIEKLSLAFIVIITWIVAIKNPSILGMIETMGAPMIAAILFLLPVVAMQKVPAMAKYKTSVAARIFTAVCGIAAISSVIYGAF

SEQ ID NO: 153360 - DNA, 1254 bp, Vibrio sp. Ex25
  CDS (1)..(1254): transl_table=11
atgaatacaactacttctgcggtttctaccgcacaatcgtctagtaagttttcttacaaagactttacctggtgtctgtccctttttggtacggcagtaggtgccggtgtactattccttcctattaaagcaggtgcaggtggcttttggccattagtaatcctagccctaatcgcagcaccaatgacttggttcgcacacaaatctttagctcgcttcgttctttctgcgaaaaacccagaagcggacatcactgacacagtagaagagcactttggtaagactggcgcaaaccttattacgttcgcttacttcttcgctatctacccaatcgtacttatctacggtgttggtatcacaaacacggttgactctttcctagttaaccaaatgggtatggaatctattcctcgctggctactttccggtgcacttatcgctgcaatgacagcgggcgtagtgttcggtaaagagcttatgctgaaagcaacttcagcgatggtttaccctctagtgttcatcctactagcgctgtctgtgtacctaattcctggttggaacacttcaatgatggaagtatcacctgactggggtgcaatgccagctatcgtatggctagcaatccctgttatcgtgttctctttcaaccacagcccaatcatttctcagttctctaaagaacaacgtcgtgtatacggtgatgacgcagttaagaaaactgacgctatcactggtggtgcagcgatgatgctaatgggctttgtaatgttcttcgtattctctgttgtgctttctctgtctccagagcaactagcaacagcacaagagcaaaacatctctgttctttcttacctagcaaacgttcatgagtctccactgatctcttacttaggtccactggttgctttcgcggctatcacttctagctacttcggccacttcctaggtgcgcatgaaggtctagttggtctagtgaaatctcgttcaaaatcgccagtaagcaagatcgagaagatgtctcttatcttcatcgtaatcacaacttggatcgttgctatcgttaacccaagcatcctaggtatgattgaaacaatgggcgcaccgatgattgcggcaatcctattcttgatgcctatcttcgcaatgcaaaaagttccagcgatggctaagtacaaaacttcagcacctgtgcaaattttcacagcaatctgtggtcttgctgccattagttctgtaatctacggcgctctttaa

SEQ ID NO: 153361 - protein, 417 aa, Vibrio sp. Ex25
MNTTTSAVSTAQSSSKFSYKDFTWCLSLFGTAVGAGVLFLPIKAGAGGFWPLVILALIAAPMTWFAHKSLARFVLSAKNPEADITDTVEEHFGKTGANLITFAYFFAIYPIVLIYGVGITNTVDSFLVNQMGMESIPRWLLSGALIAAMTAGVVFGKELMLKATSAMVYPLVFILLALSVYLIPGWNTSMMEVSPDWGAMPAIVWLAIPVIVFSFNHSPIISQFSKEQRRVYGDDAVKKTDAITGGAAMMLMGFVMFFVFSVVLSLSPEQLATAQEQNISVLSYLANVHESPLISYLGPLVAFAAITSSYFGHFLGAHEGLVGLVKSRSKSPVSKIEKMSLIFIVITTWIVAIVNPSILGMIETMGAPMIAAILFLMPIFAMQKVPAMAKYKTSAPVQIFTAICGLAAISSVIYGAL

SEQ ID NO: 153362 - DNA, 1284 bp, Alteromonadales bacterium TW-7
  CDS (1)..(1284)
atgacaacacctttagatgcaacgcattcaaatgcatcaacacacgcgcattcaagtgcaaattcaaacgctaaatctaagtggaacctgcacgatacgcagtggaccttaagcctttttggtaccgccgttggtgcgggtattttatttttacctataaatattggtattggcggtttttggccgctgattattatggcgtgtttagcgtttccgatgacctttttagcccaccgtggtttagcacgctttgtattatcgtctaaaaataagcatgccgattttaccgatgtagttgaagaacactttggcgttaatgctgggcgattaatctcattgttatactttttatctatattccctattttgcttatttacggtgtaggcttaaccaacacggtagacagctttatggtaaaccagctgggcatggagtcgccgcctcgcgtagtgctttcgggtgttttggtagccggtatgataagcctaatgatgggtggcgagcgcctaatgctgcgcgcgttttctattttggtgtatccgcttgtgggtattttgttttttttatccttgtatttaatacctagctggcaaatgccagacatgagcctacctgaagtgggtaactttggtaaaacgctgtggttatctattcctatcattgtgttttcgtttagccatgcagcggctatttcaagctttgtgcatgtacaacgcgaacactatgacgaccttgctacacgcaaatcagaagccattttaaagcgcacaagcttactgttaattgtgtttgtattgctgtttgtattttcgtgcgtgctgtcgctaacaggtgagcagatggcacaagcaaaagccgataatgtctcggttttatcgtaccttgctaacattacccataactcgtttattgcaacgcttgggcctttagttgcctttattgccattacgtcgtcgtttttaggtcactttttaggagcccgcgaaagctttacaggtttggtgactaagcaaacacagcttggtgctaaaacggtagataaaattggtgtagttattatgttttttgcaatttggttttgtgcagttaaaaacccaagcatactcgatatgatggatcagctatcgggccctattattgcaatgatattatttatcatgcctatgattgcagtttataaagtaccggctctgcataagtatcgtaaccgtttaagtactttgtttgtgttagcggtaggtgcgcttgcggtatttgcacttatttacagcatgattaaataa

SEQ ID NO: 153363 - protein, 427 aa, Alteromonadales bacterium TW-7
MTTPLDATHSNASTHAHSSANSNAKSKWNLHDTQWTLSLFGTAVGAGILFLPINIGIGGFWPLIIMACLAFPMTFLAHRGLARFVLSSKNKHADFTDVVEEHFGVNAGRLISLLYFLSIFPILLIYGVGLTNTVDSFMVNQLGMESPPRVVLSGVLVAGMISLMMGGERLMLRAFSILVYPLVGILFFLSLYLIPSWQMPDMSLPEVGNFGKTLWLSIPIIVFSFSHAAAISSFVHVQREHYDDLATRKSEAILKRTSLLLIVFVLLFVFSCVLSLTGEQMAQAKADNVSVLSYLANITHNSFIATLGPLVAFIAITSSFLGHFLGARESFTGLVTKQTQLGAKTVDKIGVVIMFFAIWFCAVKNPSILDMMDQLSGPIIAMILFIMPMIAVYKVPALHKYRNRLSTLFVLAVGALAVFALIYSMIK

SEQ ID NO: 153364 - DNA, 1332 bp, Escherichia coli B
  CDS (1)..(1332): transl_table=11
atggaaattgcatcgaataaaggcgtcattgcagacgcttcgaccccggcgggtcgtgctggaatgagtgagagcgagtggcgagaagcgatcaaattcgacagtactgacaccggctgggtgattatgagtatcgggatggcgattggcgcggggattgtttttctcccggtgcaggtcggtttgatgggattgtgggtatttttgctctcatcggtgattggttacccggcaatgtatctgtttcagcggttgtttattaatacgctggcagaatcaccagaatgtaaagattacccgagtgtcattagcggttatttaggtaaaaactggggcatcctgttaggtgcgctctatttcgtaatgctggtgatttggatgttcgtctattccaccgccatcaccaacgatagtgcttcctacctgcataccttcggcgtgacggaagggttgctgtcagacagtcccttttatggtctggtactgatttgcattctggtggcgatctcctcacgcggcgagaaattgttattcaaaatttcgaccggcatggtgctgaccaagctgctggtggtcgcggcgctgggcgtgtcgatggtgggaatgtggcatctgtataacgtcggttcgctaccgccgctggggctgctggtgaaaaacgccattattacgctgccgtttaccctgacgtcgattctgtttattcagacgttaagcccgatggtgatctcttatcgctcgcgggaaaaatccattgaagtggcgcggcataaagcattgcaggcaatgaatatcgcgtttggcattttgtttgtcaccgtctttttctacgccgtgtcgttcacgctggcgatgggacatgacgaagcggtaaaagcctacgagcagaatatttccgcgctggcgattgccgcacagtttattagcggtgacggcgcagcgtgggtgaaagtggtcagcgtcattctcaatatctttgctgtcatgactgcattctttggcgtctatttaggctttcgcgaagcaacgcaagggatcgtaatgaacatcctgcgtcgcaagatgcctgccgagaagattaacgaaaatcttgttcagcgcggcatcatgattttcgccattttgctggcctggagcgccatcgtactgaacgcaccggtgttgagcttcacctctatctgtagcccgattttcggcatggtagggtgcctgatcccggcgtggctggtttacaaagtaccggcattgcacaaatacaaagggatgtctctgtacctgattatcgtcactggtttgttgctttgtgtttctccgttcctggcattttcttga

SEQ ID NO: 153365 - protein, 443 aa, Escherichia coli B
MEIASNKGVIADASTPAGRAGMSESEWREAIKFDSTDTGWVIMSIGMAIGAGIVFLPVQVGLMGLWVFLLSSVIGYPAMYLFQRLFINTLAESPECKDYPSVISGYLGKNWGILLGALYFVMLVIWMFVYSTAITNDSASYLHTFGVTEGLLSDSPFYGLVLICILVAISSRGEKLLFKISTGMVLTKLLVVAALGVSMVGMWHLYNVGSLPPLGLLVKNAIITLPFTLTSILFIQTLSPMVISYRSREKSIEVARHKALQAMNIAFGILFVTVFFYAVSFTLAMGHDEAVKAYEQNISALAIAAQFISGDGAAWVKVVSVILNIFAVMTAFFGVYLGFREATQGIVMNILRRKMPAEKINENLVQRGIMIFAILLAWSAIVLNAPVLSFTSICSPIFGMVGCLIPAWLVYKVPALHKYKGMSLYLIIVTGLLLCVSPFLAFS

SEQ ID NO: 153366 - DNA, 1290 bp, Escherichia coli B
  CDS (1)..(1290): transl_table=11
atggaaacgactcaaaccagcacgattgcgtcgaaagactctcgtagtgcctggcgcaagacagacaccatgtggatgctgggcctttacggcacggcaatcggcgcgggcgtgctgttcctgccaatcaacgccggtgttggcggtatgatcccgctgatcatcatggctatccttgcgttcccgatgacgttttttgctcaccgcggcctgactcgcttcgtactgtctggtaaaaacccgggcgaagacatcaccgaggttgtagaagaacactttggtattggcgcaggtaaactgattaccctgctctatttcttcgctatctacccgatcctgctggtttatagcgtagcaatcaccaatacagttgaaagcttcatgtctcaccagctgggtatgacaccaccgccgcgtgcgattctgtcgctgatcctgatcgtgggtatgatgaccatcgttcgcttcggtgagcagatgatcgttaaagcgatgagtattctggtattcccgtttgttggcgtactgatgctgctggctctgtacctgatcccgcagtggaacggcgcagcactggaaacgctgtctctggacactgcatctgcaaccgggaacggtctgtggatgaccctgtggcaggcaattccggtaatggtgttctcgttcaaccactctccgatcatctcttctttcgccgttgcgaagcgtgaagagtacggcgatatggcagaacagaaatgctcgaagatccttgcattcgcacacatcatgatggtgctgaccgtaatgttcttcgtcttcagctgcgtactgagcctgactccggcagacctggctgcggctaaagagcagaacatctcgattctgtcttacctggctaaccactttaacgcaccggttatcgcgtggatggctccgattatcgcgattatcgctatcaccaaatccttcctcggccactacctgggcgcacgtgaaggcttcaacggtatggtgattaaatctctgcgtggtaaaggtaagtctatcgaaatcaacaagctgaaccgtatcactgcgctgttcatgctggtaacgacctggattgttgccaccctgaacccgagcatcctgggtatgattgaaaccctgggcggcccaatcatcgcgatgatcctgttcctgatgccgatgtacgcaattcagaaagtaccggcaatgcgtaagtacagcggtcacatcagcaacgtattcgttgtcgtgatgggtctgattgcaatctccgcaatcttctactctctgttcagctaa

SEQ ID NO: 153367 - protein, 429 aa, Escherichia coli B
METTQTSTIASKDSRSAWRKTDTMWMLGLYGTAIGAGVLFLPINAGVGGMIPLIIMAILAFPMTFFAHRGLTRFVLSGKNPGEDITEVVEEHFGIGAGKLITLLYFFAIYPILLVYSVAITNTVESFMSHQLGMTPPPRAILSLILIVGMMTIVRFGEQMIVKAMSILVFPFVGVLMLLALYLIPQWNGAALETLSLDTASATGNGLWMTLWQAIPVMVFSFNHSPIISSFAVAKREEYGDMAEQKCSKILAFAHIMMVLTVMFFVFSCVLSLTPADLAAAKEQNISILSYLANHFNAPVIAWMAPIIAIIAITKSFLGHYLGAREGFNGMVIKSLRGKGKSIEINKLNRITALFMLVTTWIVATLNPSILGMIETLGGPIIAMILFLMPMYAIQKVPAMRKYSGHISNVFVVVMGLIAISAIFYSLFS

SEQ ID NO: 153368 - DNA, 1281 bp, Pseudomonas putida GB-1
  CDS (1)..(1281): transl_table=11
atgaatgagcaggccccaagcgttgaacaacgctttgcagaatcgacccccgccacccttggcagctgggcgcgtcacgacaccacctggatgctgggcctgttcggcacagccattggcgccggaaccctgttcctgccgatcaacgccggccttggcggcttctggccgctgctgatcctggccatcctggccttcccgatgacgtactttgcccaccgtgggttgacccgattcgtcctgtcggggcgcaacggtggcgacattaccgaagtggtcaaggagcacttcggcagcaccgccggtgcctcgatcaccgtgctgtacttcttcgccatcttccccatcctgcttatctatagcgtggcgctgaccaacaccgtgtccagcttcatggagcaccagttgcacatgcagccgccgccgcgggccatcctgtcgttcgtgctgatcctcggcctgctggccatcgtgcgctgtggcgagcaggccacggtcaaggtcatgagcctgctggtgtacccgttcatcgtcgccctggcgttgctgggcctgtacctggtgccgcactggacgggtggcatcctcgacagcgctacccaggtgccaccggcctcggccttcctgcacaccctgtggctggccattccggtgatggtgttctcgttcaaccactcgccgatcatctcggcctttgccgttgaccagaagcgccgctacggcgagcacgccgatgagcgcagcggccagatcctgcgccgtgcccacctgctgatggtggtgatggtgctgttcttcgtgttcagctgcgtgctcaccctgagcagcgcccagctggccgaagccaaggcacagaacctgtcgatcctgtcgtacctggccaaccatttcagcaacccgaccatcgcgttcgctgcgccgttgatcgccttcgtggccattgccaagtcgttcctgggccattacatcggtgccagcgaaggcctgaagggcatcatcgccaagaccggcgcgcgcccgggtgccaaaaccctggaccgcgtagttgccgcgctgatgctggtggtgtgctggatcgtcgccaccctcaacccgagcatcctgcgcatgatcgaatcgctcggcggtccgatccttgcggtgctgctgttcctgatgccgatgtacgccatccgccgtgtaccgtcgatgcgcaagtacagcggtgcagcctccaacgtattcgttgtggtggtcggcctggttgcgttgacctcggtggtgtacggcctgctcggctga

SEQ ID NO: 153369 - protein, 426 aa, Pseudomonas putida GB-1
MNEQAPSVEQRFAESTPATLGSWARHDTTWMLGLFGTAIGAGTLFLPINAGLGGFWPLLILAILAFPMTYFAHRGLTRFVLSGRNGGDITEVVKEHFGSTAGASITVLYFFAIFPILLIYSVALTNTVSSFMEHQLHMQPPPRAILSFVLILGLLAIVRCGEQATVKVMSLLVYPFIVALALLGLYLVPHWTGGILDSATQVPPASAFLHTLWLAIPVMVFSFNHSPIISAFAVDQKRRYGEHADERSGQILRRAHLLMVVMVLFFVFSCVLTLSSAQLAEAKAQNLSILSYLANHFSNPTIAFAAPLIAFVAIAKSFLGHYIGASEGLKGIIAKTGARPGAKTLDRVVAALMLVVCWIVATLNPSILRMIESLGGPILAVLLFLMPMYAIRRVPSMRKYSGAASNVFVVVVGLVALTSVVYGLLG

SEQ ID NO: 153370 - DNA, 1293 bp, Moritella sp. PE36
  CDS (1)..(1293): transl_table=11
atggatacgttaacagcaaatatttcaactgcaaatacagcaagtaagccaagctcggcatggactaaaagtgacatcgtgtgggtacttggcctatatggtacagccgttggtgcaggcaccttattcctccctattaccgctggtgtaggcggccttattccgttaattataatggctgtgttagccttacctatgaccttttttgcccatcgaagcatgactcggtttgtgttatcaagttctaatcctggtgccgatattaccgaagtagttgaagaacattttggcgtcggaatgggtaaactaatcaccctattgtatttctttgctatttatccaattttacttgtttacagtgtggcactaaccaacacagtgcaagatttcatgttaaaccaactgcatattcaaccaccaccacgagctattctagcgcttgttctgatcctcggcttgatcgcaattgtacgactgggtgagcaactcatcattaaagcaatgagcattttagtatttccatttgtggcggtgttgttaatgctagcgtgttacctcatcccttattggaatggtgcaatcttcgagcaagttatgcctgcagaaggtggcatgagttcggtgatgatgtcggtctggctaattttgccagtcatggtgttctcgtttaatcactcgcctgttatctcttcatttgcagtcgcgaaaagaaatgagtacggtgatgatgccgagaaaaaatgctcacgtatcttattgtgtgcacacgtaatgatggtggtgacggtgatgtttttcgtattcagctgtgtattaagcttatcaccagcgaatcttgcagaagccaaagaaatgaacgtgtctattttgacttatttagccaatcactttgatactccggtcatcgcttatactgcgccaattgtggcaatcattgctatcaccaagtcatttttaggtcattatatcggcgcaagcgaaggtcttaacggtctagttgtaaaagcagcacgcagccaaggtaaagaaataagtaaaaaaacattaaacagtttcacaactgtattcatgctagttacggcttgggcagtggcaaccattaatccaaatattttgcatatgattgaaagcctaggcggaccaatcattgcattactgctcttcattatgcctatgtatgcaatccataaagtaccggcaatgcagaagtactcaggtgcactgagtaatgtattcgtaaccctaattggtctgatctcaattacggctattttttattcactcgtgcaataa

SEQ ID NO: 153371 - protein, 430 aa, Moritella sp. PE36
MDTLTANISTANTASKPSSAWTKSDIVWVLGLYGTAVGAGTLFLPITAGVGGLIPLIIMAVLALPMTFFAHRSMTRFVLSSSNPGADITEVVEEHFGVGMGKLITLLYFFAIYPILLVYSVALTNTVQDFMLNQLHIQPPPRAILALVLILGLIAIVRLGEQLIIKAMSILVFPFVAVLLMLACYLIPYWNGAIFEQVMPAEGGMSSVMMSVWLILPVMVFSFNHSPVISSFAVAKRNEYGDDAEKKCSRILLCAHVMMVVTVMFFVFSCVLSLSPANLAEAKEMNVSILTYLANHFDTPVIAYTAPIVAIIAITKSFLGHYIGASEGLNGLVVKAARSQGKEISKKTLNSFTTVFMLVTAWAVATINPNILHMIESLGGPIIALLLFIMPMYAIHKVPAMQKYSGALSNVFVTLIGLISITAIFYSLVQ

SEQ ID NO: 153372 - DNA, 1275 bp, Moritella sp. PE36
  CDS (1)..(1275): transl_table=11
atgttaaatattaaaagtagtcaatctcattctcaaccacaatctaagtctcattcagctactggccgctggaacgcccatgatacgaagtggacgcttagtttatttggtactgccgtaggcgctggtatattgtttttacctatcaatatcggtgctggtggattctggccacttatcattatggctctgctcgctgggcctatgacgttcttggcgcatcgaggcttatctcgatttgtactgtcatcggaaaaacctgaagctgattttaccgatgttgtggaagaacatttcggccccaacgcaggtcgtattatttctattttgtacttcttatctatttatcctattttgcttatttatggtgttggcttaaccaatacggtcgatagttttattgttaatcagcttggtttagtatctccttcacgtgtgttgttatccggcatattggttgcaggtatggtaggcgtgatgatgggaggagaaaagctcgtactcaaagcgtttgagatcatcgtttatccattggtgcttattcttgctggactgtcaatttacatgatccaagattggcaagtacctgatatatcaatggcgacggatatgggtgaattctcgcgtacgttatggttagccgtgccagtcactgtatttgcgtttagtcatgcagcggctatctctagcttttcctcggcacaaaagcgccattatggtcaacaagctggggagaagtcagaacagatcctgaaacgtacgtcaatcatgcttatttcgttcgttattttctttgtattttcttgtgtatttagtttaacccctgagcagttgttagaagctaaagtacaaaatatatctgttttatcgtatcttgcaaatgtgaaagacaatgccttaattgcttctctaggtccgttaattgctttcattgccattacatcttcattctttggccacttcttaggtgcacgtgaaggtttaaatggtctgatacgtaaacaagtaaatatgacgcctgctgcgattaacaagctgactatttttctactgtttactagtatctgggctgtttcggtaatgaatccaagtattttaaatatgatggaaatgttttctggaccggttattgcgatgatcttgtttgtgatgccaatgtacgcggtatctaaagttgaagcattggctaaataccgtggagcgttaagtaatatcttcgttaccatcatgggattgattgcaatttcagcgctgatatttaacgtgtttttataa

SEQ ID NO: 153373 - protein, 424 aa, Moritella sp. PE36
MLNIKSSQSHSQPQSKSHSATGRWNAHDTKWTLSLFGTAVGAGILFLPINIGAGGFWPLIIMALLAGPMTFLAHRGLSRFVLSSEKPEADFTDVVEEHFGPNAGRIISILYFLSIYPILLIYGVGLTNTVDSFIVNQLGLVSPSRVLLSGILVAGMVGVMMGGEKLVLKAFEIIVYPLVLILAGLSIYMIQDWQVPDISMATDMGEFSRTLWLAVPVTVFAFSHAAAISSFSSAQKRHYGQQAGEKSEQILKRTSIMLISFVIFFVFSCVFSLTPEQLLEAKVQNISVLSYLANVKDNALIASLGPLIAFIAITSSFFGHFLGAREGLNGLIRKQVNMTPAAINKLTIFLLFTSIWAVSVMNPSILNMMEMFSGPVIAMILFVMPMYAVSKVEALAKYRGALSNIFVTIMGLIAISALIFNVFL

SEQ ID NO: 153374 - DNA, 1296 bp, Aeromonas salmonicida
  CDS (1)..(1296): transl_table=11
atgtctgacatgaacattgcagtagaaggcagcgcagccagtaatgcgtcttcccgtggcaacaccaaggccgatctggtctggatgctgggtttgtacggtaccgccatcggtgccggtgtactcttcctgccgatcaacgccggcgtaggtggtttgtggccgctggtggccatggcgattctggcgttggcgctgaccttctttggacaccgtggtctgactcgcttcgtactgtccggctccacccgtgatggcgacatcaccgaagtggtggaagagcactttggcaagaccgcagggaagttcatcaccctgctctacttctttggcatctatcccatagtactgatgtactcggtcggcatcaacaacaaggttgaaagcctgctggttcaccaactcggtatgacagcaccaccccgtgccgtcctgtcgctggcactgatcctgggtctgatggcggtggtacgcctcggtggccagttcatcgtcaaggcgatgagcgtgctggtattcccgttcgtgctgaccctgatgggcctggccttctatctggttccacactggaacggcgccatcatcacagaagcaccggccctgtccgatgccttcaacggcgacttcatcaagaccctgtggctggccattcctgtgatggtgttctccttcaaccactccccgatcatctcctccttcgcggtggacaacaagggtcgttacggcgccggtgctgagaagaagtgcggcaacatactgctgggtgcccacgtcatgatggtcatgaccgtcatgttcttcgtgttcagctgcgtactgagcctctccccggctgatctgtctcccgccaaggaacagaacatcaccattctgtcctacctggccaaccatttcgataacgccttcattgccacagcggctccgctgatcgccatggttgccatcagcaagtccttcctcggccactatctgggtgccaaagagggcatgaacggtctgatgcccaaggcgctgcgcgagaaaggcaagcaggtcgacatcaagcaactggacaaggtgactgccgtcttcatgatactgaccacctgggctgtggttaccgtcaaccccagcatcctcggcatgatcgaagacctgggcgggcccatcatcgccatgctgctgttcctgatgccgatgtacgccatcaccaaggtacctgccatgcgcaaatacgctggcaacatcagaaacggcttcgtgaccctgattgggctgatcgccatgtccggtatcatctacaagatgattgcctga

SEQ ID NO: 153375 - protein, 431 aa, Aeromonas salmonicida
MSDMNIAVEGSAASNASSRGNTKADLVWMLGLYGTAIGAGVLFLPINAGVGGLWPLVAMAILALALTFFGHRGLTRFVLSGSTRDGDITEVVEEHFGKTAGKFITLLYFFGIYPIVLMYSVGINNKVESLLVHQLGMTAPPRAVLSLALILGLMAVVRLGGQFIVKAMSVLVFPFVLTLMGLAFYLVPHWNGAIITEAPALSDAFNGDFIKTLWLAIPVMVFSFNHSPIISSFAVDNKGRYGAGAEKKCGNILLGAHVMMVMTVMFFVFSCVLSLSPADLSPAKEQNITILSYLANHFDNAFIATAAPLIAMVAISKSFLGHYLGAKEGMNGLMPKALREKGKQVDIKQLDKVTAVFMILTTWAVVTVNPSILGMIEDLGGPIIAMLLFLMPMYAITKVPAMRKYAGNIRNGFVTLIGLIAMSGIIYKMIA

SEQ ID NO: 153376 - DNA, 1290 bp, Escherichia coli O157
  CDS (1)..(1290): transl_table=11
atggaaacgactcaaaccagcacgattgcgtcgaaagactctcgtagtgcctggcgcaagacagacaccatgtggatgctgggcctttacggcacggcaatcggcgcgggcgtgctgttcctgccaatcaacgccggtgttggcggtatgatcccgctgatcatcatggctatccttgcgttcccgatgacgttttttgctcaccgcggcctgactcgcttcgtactgtctggtaaaaacccgggcgaagacattaccgaggttgtagaagaacactttggtattggcgcaggtaaactgattaccctgctctacttcttcgctatctacccgatcctgctggtttatagcgtggcaatcaccaatacagttgaaagcttcatgtctcaccagctgggtatgacaccaccgccgcgtgcgattctgtcgctgatcctgatcgtgggtatgatgaccatcgttcgctttggtgaacagatgatcgttaaagcgatgagtattctggtattcccgtttgttggcgtactgatgctgctggctctgtacctgatcccgcagtggaacggcgcagcactggaaacgctgtctctggacactgcatctgcaaccggaaacggtctgtggatgaccctgtggctggcaattccggtaatggtgttctcgttcaaccactctccgatcatctcttctttcgccgttgcgaagcgtgaagagtacggcgatatggcagaacagaaatgctcgaagatcctggcattcgcacacatcatgatggtgctgaccgtaatgttcttcgtcttcagctgcgtactgagcctgactccggcagacctggctgcggctaaagagcagaacatctcgattctgtcttacctggctaaccactttaacgcaccggttatcgcgtggatggctccgattatcgcgattatcgctatcaccaaatccttcctcggccactacctgggcgcacgtgaaggcttcaacggtatggtgattaaatctctgcgtggtaaaggtaagtctatcgaaatcaacaagctgaaccgtatcactgcgctgttcatgctggtaacgacctggattgttgccaccctgaacccgagcatcctgggtatgattgaaaccctgggcggcccaatcatcgcgatgatcctgttcctgatgccgatgtacgcaattcagaaagtaccggcaatgcgtaagtacagcggtcacatcagcaacgtattcgttgtcgtgatgggtctgattgcaatctccgcaatcttctactctctgttcagctaa

SEQ ID NO: 153377 - protein, 429 aa, Escherichia coli O157
METTQTSTIASKDSRSAWRKTDTMWMLGLYGTAIGAGVLFLPINAGVGGMIPLIIMAILAFPMTFFAHRGLTRFVLSGKNPGEDITEVVEEHFGIGAGKLITLLYFFAIYPILLVYSVAITNTVESFMSHQLGMTPPPRAILSLILIVGMMTIVRFGEQMIVKAMSILVFPFVGVLMLLALYLIPQWNGAALETLSLDTASATGNGLWMTLWLAIPVMVFSFNHSPIISSFAVAKREEYGDMAEQKCSKILAFAHIMMVLTVMFFVFSCVLSLTPADLAAAKEQNISILSYLANHFNAPVIAWMAPIIAIIAITKSFLGHYLGAREGFNGMVIKSLRGKGKSIEINKLNRITALFMLVTTWIVATLNPSILGMIETLGGPIIAMILFLMPMYAIQKVPAMRKYSGHISNVFVVVMGLIAISAIFYSLFS

SEQ ID NO: 153378 - DNA, 1239 bp, Haemophilus influenzae
  CDS (1)..(1239): transl_table=11
atgaaatcaacagaaaaactcaaatggaacaaatttgatgcaacgtggatgttaaaccttttcggtacggcggttggcgcgggcgtattgttcttgccgattaacgcagggatgggtggattttggccgttagttttaatggcaattatcgtcgggccaatgacttattttgctcaccgtggcttagcctactttgtactttcatcaaaaaatcctggcagcgatattactgaagtagtggaagaacactttggtaaaacagcgggtaaacttattaccttactttattttttcgcgattttccctattctgttgatttacggtaacggtatcacgaacaccgtagattcttttattgtgaatcaacttggtatggcatcaccaaatcgagtcattctctcttttgtattaattgcggtattgatttccgtgatgttatttaatgaaaaagtgatgttaaaaatcacagaatggcttgtttatccgttagtcttaattttatttgttctttctatttacttaattcctgaatggaatagtgccgtattatatgaatttccaacagtaggcggtttcttaacaactttatggctaaccattcccgtattagtattttcatttaaccattcgccagcaatttcatctttcacttgctcacaattccgtgaatataaaactttcgatggtgcagaacgccatatcagccatacagaaaaaggcgcctcaacgattttgttattcttcgtaatgttcttcgtatttagctgtgtattaacattaacacctgaagaattagtggcagcaaaagaacagaatattagtatcttgtctttcttagcgaataaatttgataatccatatatctcttattttggcccgcttgttgcattcttagcgattactagttcattcttcggtcactatatgggggcacgtgaaggcttagaaggtttatatttaaaaatgaaaggtgaagcagtaaatcgtaaaaaactcaattatgcgaccgcacttttcttcttattaacgttatggggcgttgcgattattaatccaagtatcttaggcttaatcgaatctcttggcggcccaatcattgcgatgattttgtttatcatgccaatgtacgcgattcgaaaaatcccagcaatgaaacgctacagcggacgtttcagtaatgtatttgtaacaattatggggctaattgctatttctgcagttgtttatggattattataa

SEQ ID NO: 153379 - protein, 412 aa, Haemophilus influenzae
MKSTEKLKWNKFDATWMLNLFGTAVGAGVLFLPINAGMGGFWPLVLMAIIVGPMTYFAHRGLAYFVLSSKNPGSDITEVVEEHFGKTAGKLITLLYFFAIFPILLIYGNGITNTVDSFIVNQLGMASPNRVILSFVLIAVLISVMLFNEKVMLKITEWLVYPLVLILFVLSIYLIPEWNSAVLYEFPTVGGFLTTLWLTIPVLVFSFNHSPAISSFTCSQFREYKTFDGAERHISHTEKGASTILLFFVMFFVFSCVLTLTPEELVAAKEQNISILSFLANKFDNPYISYFGPLVAFLAITSSFFGHYMGAREGLEGLYLKMKGEAVNRKKLNYATALFFLLTLWGVAIINPSILGLIESLGGPIIAMILFIMPMYAIRKIPAMKRYSGRFSNVFVTIMGLIAISAVVYGLL

SEQ ID NO: 153380 - DNA, 1290 bp, Shigella flexneri
  CDS (1)..(1290): transl_table=11
atggaaacgactcaaaccagcacgattgcgtcgaaagactctcgtagtgcctggcgcaagacagacaccatgtggatgctgggcctttacggcacggcaatcggcgcgggcgtgctgttcctgccaatcaacgccggtgttggcggtatgatcccgctgatcatcatggctatccttgcgttcccgatgacgttttttgctcaccgcggcctgactcgcttcgtactgtctggtaaaaacccgggcgaagacatcaccgaggttgtagaagaacactttggtattggcgcaggtaaactgattaccctgctctacttcttcgctatctacccgatcctgctggtttatagcgtggcaatcaccaataccgttgaaagcttcatgtctcaccagctgggtatgacgccaccgccgcgtgcgattctgtcgctgatcctgatcgtgggtatgatgaccatcgttcgctttggtgagcagatgatcgttaaagcgatgagtattctggtattcccgtttgttggcgtactgatgctgctggctctgtacctgatcccgcagtggaacggcgcagcactggaaacgctgtctctggacactgcatctgcaaccggaaacggtctgtggatgaccctgtggctggcaattccggtaatggtgttctcgttcaaccactctccgatcatctcttctttcgccgttgcgaatcgtgaagagtacggcgatatggcagaacagaaatgctccaagatcctggcattcgcacacatcatgatggtgctgaccgaaatgatcttcgtcttcatctgcgtactgagcctgactccggcagacctggctgcggctaaagagcacaacatctcgattctgtcttacctggctaaccactttaacgcaccggttatcgcgtggatggctccgattatcgcgattatcgctatcaccaaatccttcctcggccactacctgggcgcacgtgaaggcttcaacggtatggtgattaaatctctgcgtggtaaaggtaagtctatcgaaatcaacaagctgaaccgtatcactgcgctgttcatgctggtaacgacctggattgttgccaccctgaacccgagcatcctgggtatgattgaaaccctgggcggcccaatcatcgcgatgatcctgttcctgatgccgatgtacgcaattcagaaagtaccggcaatgcgtaagtacagcggtcacatcagcaacgtattcgttgtcgtgatgggtctgattgcaatctccgcaatcttctactctctgttcagctaa

SEQ ID NO: 153381 - protein, 429 aa, Shigella flexneri
METTQTSTIASKDSRSAWRKTDTMWMLGLYGTAIGAGVLFLPINAGVGGMIPLIIMAILAFPMTFFAHRGLTRFVLSGKNPGEDITEVVEEHFGIGAGKLITLLYFFAIYPILLVYSVAITNTVESFMSHQLGMTPPPRAILSLILIVGMMTIVRFGEQMIVKAMSILVFPFVGVLMLLALYLIPQWNGAALETLSLDTASATGNGLWMTLWLAIPVMVFSFNHSPIISSFAVANREEYGDMAEQKCSKILAFAHIMMVLTEMIFVFICVLSLTPADLAAAKEHNISILSYLANHFNAPVIAWMAPIIAIIAITKSFLGHYLGAREGFNGMVIKSLRGKGKSIEINKLNRITALFMLVTTWIVATLNPSILGMIETLGGPIIAMILFLMPMYAIQKVPAMRKYSGHISNVFVVVMGLIAISAIFYSLFS

SEQ ID NO: 153382 - DNA, 1332 bp, Edwardsiella tarda
  CDS (1)..(1332): transl_table=11
atgagtagcactgacagtgtcgttgcgggtcaggccaaggtgagcacttggcgcaaaacggatacacgctgggttttagggttgttcggtacagcgatcggggccggcgttttgttcttcccgatcagcgccggtatcggcgggctgttgccgatcattttcatgcttattcttgcctttcccatcgcgttcttttgccatcgcgcgttggctcgtctgtgcctgtccgggcgcagcatatcggataatattaccgataccgtcgatcagcacttcggccatgtcggcggcgtggtgatcaccttcctgtatttttttgccatctgtccgctgctgtggatctacggcgtgaccatcaccaatacgtttattgccttctggcagcatcagctgctgctgccggccattaaccgcggcgtggtggcgctggctatcctgctggtcatggcgttttttatctacttcggcaaggatttaatggttaaggtaatgggatatctggtctttcccttcattacctgcctggtgctgatctccctgtcgctgatcccctactggacgagtgacatctttaccagcttcgatatgcacagcctgagcctgttcggcagccatggcattctggtaaccgtctggctggggatcgcgattatggtgttctccttcaacttctcccccattgtttcgtcgtttgtagtctccaaacgcgaagagtatgaggcggactttggccgggaatataccgagcaaaagtgtgcgaagatcatttcgcgcgccagcgtgctgatggtggtggtggtgatgttctttgcctttagctgcctctttaccctgtcgccgcaggatatggcgcaggctaaacagcagaacattcccattctctcctatctggccaaccacttcagctcactgggcagcggtaaatctacctatgccaccgttctggagtatggcgcctcgattatcgccctggtggctatttttaaatcgttctttggtcattacctgggaaccctggaggggttgaacggtttgatcattaaatttggctaccatggagagaagtcgcaggcgccgatgaagaagctcaatatgatcagcatggtcatcattatgggctctacctgggtgatcgcgtatatcaacccgaatattctggacctgatcggtgccatgggtgcgcctattattgctgcgctgctgtgtctgctgccgatgtatgcggtatggcgagttcctgcgctggcgaaatacaaaggcaaggcgtctaactatttcgtcacgattatcggcctgctgaccatcctgaatattgtttatcagctgatgtaa

SEQ ID NO: 153383 - protein, 443 aa, Edwardsiella tarda
MSSTDSVVAGQAKVSTWRKTDTRWVLGLFGTAIGAGVLFFPISAGIGGLLPIIFMLILAFPIAFFCHRALARLCLSGRSISDNITDTVDQHFGHVGGVVITFLYFFAICPLLWIYGVTITNTFIAFWQHQLLLPAINRGVVALAILLVMAFFIYFGKDLMVKVMGYLVFPFITCLVLISLSLIPYWTSDIFTSFDMHSLSLFGSHGILVTVWLGIAIMVFSFNFSPIVSSFVVSKREEYEADFGREYTEQKCAKIISRASVLMVVVVMFFAFSCLFTLSPQDMAQAKQQNIPILSYLANHFSSLGSGKSTYATVLEYGASIIALVAIFKSFFGHYLGTLEGLNGLIIKFGYHGEKSQAPMKKLNMISMVIIMGSTWVIAYINPNILDLIGAMGAPIIAALLCLLPMYAVWRVPALAKYKGKASNYFVTIIGLLTILNIVYQLM

SEQ ID NO: 153384 - DNA, 1332 bp, Salmonella choleraesuis
  CDS (1)..(1332): transl_table=11
atgagtactactgatagcattgtatccagccaggcaaaacagtcgtcatggcgtaaatcggacacgacgtggacgctgggtttatttggtaccgccattggcgccggggtgctgtttttccctatccgcgccgggtttggcgggcttatccccattctgctgatgctggttttagcttaccccattgcgttctattgtcaccgggcgctggcgcgtctgtgtttatccggatctaatccgtccggcaatattacggaaacggtcgaagagcactttggtaaaacgggcggggtagttatcacgttcctttacttctttgcgatttgtccgctgctgtggatttatggcgtcaccatcactaacacgttcatgacattttgggaaaaccagttgcagatgccagcgttgaatcgcggtttcgtggcgctgttcttgctgctgctgatggcctttgtgatctggtttggtaaagatctgatggttaaggtgatgagttacctggtatggccgtttatcgccagcctggtgctaatctcattatcgctgattccttactggaactcggcggttatcgatcaggttgatctcagtaatatcgcgctgaccgggcacgatggcatactggttacggtgtggctgggcatctctatcatggtgttctcctttaacttttcgcccatcgtctcttccttcgtggtgtctaagcgggaagagtatgagaaagagtttggccgcgaatttaccgagcgtaaatgttcacagatcatctcgcgcgccagtatgctgatggtcgccgtggtgatgttcttcgcctttagctgcctgtttacgctctctccgcagaacatggcggatgcgaaagcgcagaacattccggtactttcctacctggccaaccatttcgcctctttgtcggggacaaaatccacttttgcaacggtgctggagtatggcgcgtctatcatcgcgctggttgctattttcaaatctttcttcggtcactacctggggacgctggaagggctgaacggcctggtgctgaaattcggttataaaggcgataaaaccaaagtctctatgggcaagcttaacaccatcagcatgatcttcattatggggtctacctgggtcgtagcttacgcaaacccgaacattctggacctgattgaagcgatgggcgcgccgattatcgcctcgctgttatgtctgctgccgatgtacgccattcgtaaagcgccgtcgctggcgaagtaccgtggtcgtctggataacgtgttcgtcaccctgattggtctgctgaccatcctgaatattgtctacaaattgttctaa

SEQ ID NO: 153385 - protein, 443 aa, Salmonella choleraesuis
MSTTDSIVSSQAKQSSWRKSDTTWTLGLFGTAIGAGVLFFPIRAGFGGLIPILLMLVLAYPIAFYCHRALARLCLSGSNPSGNITETVEEHFGKTGGVVITFLYFFAICPLLWIYGVTITNTFMTFWENQLQMPALNRGFVALFLLLLMAFVIWFGKDLMVKVMSYLVWPFIASLVLISLSLIPYWNSAVIDQVDLSNIALTGHDGILVTVWLGISIMVFSFNFSPIVSSFVVSKREEYEKEFGREFTERKCSQIISRASMLMVAVVMFFAFSCLFTLSPQNMADAKAQNIPVLSYLANHFASLSGTKSTFATVLEYGASIIALVAIFKSFFGHYLGTLEGLNGLVLKFGYKGDKTKVSMGKLNTISMIFIMGSTWVVAYANPNILDLIEAMGAPIIASLLCLLPMYAIRKAPSLAKYRGRLDNVFVTLIGLLTILNIVYKLF

SEQ ID NO: 153386 - DNA, 1230 bp, Escherichia coli O157
  CDS (1)..(1230): transl_table=11
atgtctaatatttggtctaaagaagaaactctgtggagtttcgcgctctacggcacagccgttggtgcaggcacgctcttccttcctattcagttaggttcggcaggggctgtggtcctgtttattactgctctggtcgcctggcctttaacatactggccacataaagctttatgccagttcatcctctcatcgaaaacatcagcaggtgaagggataacgggcgcggtaacacactactatggcaagaagattggtaatctgattaccacgctgtacttcatcgccttttttgtcgtcgtgttgatatatgcagtggcaattaccaactcacttacggaacagctggcaaagcatatggttattgatcttcgcatccgtatgttggtgagtctgggtgttgtattaattctgaatctcatttttctgatgggacgtcatgccactattcgggtaatgggatttttggtattcccattgattgcctatttcttatttctttccatttaccttgtaggtagttggcaacctgatctattaacaacccaggtagagttcaatcagaatacccttcaccagatatggatatcgattcccgtgatggttttcgcctttagccatacgcccattatttctacgtttgccatagacagacgtgaaaaatatggcgaacacgctatggataaatgcaaaaaaattatgaaagtcgcttatctcatcatctgcataagtgtactgttctttgtctttagctgcctgctttctattccaccttcgtatattgaagcggctaaagaagaaggggtcaccattttatcggcgctttctatgctgccgaacgccccagcatggttgtcaatttccgggattattgtcgcagtagttgcgatgtcgaaatcattcctgggtacgtactttggcgttattgaaggtgccacggaggtcgtcaaaacaacactacagcaggttggtgtaaagaaaagtcgtgcatttaaccgcgcactatcaattatgttggtatcgctgattaccttcattgtttgttgcattaacccgaacgcgatttcgatgatttatgcgatcagcggcccgctcattgccatgatacttttcatcatgcctacgctatcaacatatctcatcccggcgcttaaaccctggcgctccatcggaaatctgattacgctgatcgtgggtatcctgtgcgtatcggtaatgttctttagctaa

SEQ ID NO: 153387 - protein, 409 aa, Escherichia coli O157
MSNIWSKEETLWSFALYGTAVGAGTLFLPIQLGSAGAVVLFITALVAWPLTYWPHKALCQFILSSKTSAGEGITGAVTHYYGKKIGNLITTLYFIAFFVVVLIYAVAITNSLTEQLAKHMVIDLRIRMLVSLGVVLILNLIFLMGRHATIRVMGFLVFPLIAYFLFLSIYLVGSWQPDLLTTQVEFNQNTLHQIWISIPVMVFAFSHTPIISTFAIDRREKYGEHAMDKCKKIMKVAYLIICISVLFFVFSCLLSIPPSYIEAAKEEGVTILSALSMLPNAPAWLSISGIIVAVVAMSKSFLGTYFGVIEGATEVVKTTLQQVGVKKSRAFNRALSIMLVSLITFIVCCINPNAISMIYAISGPLIAMILFIMPTLSTYLIPALKPWRSIGNLITLIVGILCVSVMFFS

SEQ ID NO: 153388 - DNA, 26 bp, Artificial sequence
  primer
atgagtacttcagatagcattgtatc

SEQ ID NO: 153389 - DNA, 27 bp, Artificial sequence
  primer
ttaaaacagtttgtatacgatgttcag

SEQ ID NO: 153390 - protein, 420 aa, Artificial sequence
  consensus sequence
  Variant (2)..(3): Xaa in position 2 to 3 is any amino acid
  Variant (5)..(5): Xaa in position 5 is any amino acid
  Variant (7)..(7): Xaa in position 7 is any amino acid
  Variant (9)..(9): Xaa in position 9 is any amino acid
  Variant (13)..(13): Xaa in position 13 is any amino acid
  Variant (17)..(17): Xaa in position 17 is any amino acid
  Variant (23)..(24): Xaa in position 23 to 24 is any amino acid
  Variant (26)..(27): Xaa in position 26 to 27 is any amino acid
  Variant (29)..(31): Xaa in position 29 to 31 is any amino acid
  Variant (33)..(40): Xaa in position 33 to 40 is any amino acid
  Variant (42)..(46): Xaa in position 42 to 46 is any amino acid
  Variant (49)..(49): Xaa in position 49 is any amino acid
  Variant (51)..(55): Xaa in position 51 to 55 is any amino acid
  Variant (57)..(61): Xaa in position 57 to 61 is any amino acid
  Variant (62)..(66): Xaa in position 62 to 66 is any or no amino acid
  Variant (69)..(74): Xaa in position 69 to 74 is any amino acid
  Variant (77)..(79): Xaa in position 77 to 79 is any amino acid
  Variant (81)..(85): Xaa in position 81 to 85 is any amino acid
  Variant (89)..(90): Xaa in position 89 to 90 is any amino acid
  Variant (92)..(93): Xaa in position 92 to 93 is any amino acid
  Variant (95)..(95): Xaa in position 95 is any amino acid
  Variant (97)..(97): Xaa in position 97 is any amino acid
  Variant (99)..(99): Xaa in position 99 is any amino acid
  Variant (101)..(102): Xaa in position 101 to 102 is any amino acid
  Variant (106)..(108): Xaa in position 106 to 108 is any amino acid
  Variant (110)..(112): Xaa in position 110 to 112 is any amino acid
  Variant (114)..(120): Xaa in position 114 to 120 is any amino acid
  Variant (121)..(124): Xaa in position 121 to 124 is any or no amino acid
  Variant (126)..(131): Xaa in position 126 to 131 is any amino acid
  Variant (133)..(142): Xaa in position 133 to 142 is any amino acid
  Variant (144)..(154): Xaa in position 144 to 154 is any amino acid
  Variant (156)..(156): Xaa in position 156 is any amino acid
  Variant (158)..(161): Xaa in position 158 to 161 is any amino acid
  Variant (163)..(168): Xaa in position 163 to 168 is any amino acid
  Variant (172)..(172): Xaa in position 172 is any amino acid
  Variant (174)..(190): Xaa in position 174 to 190 is any amino acid
  Variant (191)..(198): Xaa in position 191 to 198 is any or no amino acid
  Variant (200)..(202): Xaa in position 200 to 202 is any amino acid
  Variant (204)..(205): Xaa in position 204 to 205 is any amino acid
  Variant (210)..(210): Xaa in position 210 is any amino acid
  Variant (212)..(212): Xaa in position 212 is any amino acid
  Variant (214)..(214): Xaa in position 214 is any amino acid
  Variant (217)..(217): Xaa in position 217 is any amino acid
  Variant (219)..(236): Xaa in position 219 to 236 is any amino acid
  Variant (237)..(241): Xaa in position 237 to 241 is any or no amino acid
  Variant (243)..(253): Xaa in position 243 to 253 is any amino acid
  Variant (255)..(255): Xaa in position 255 is any amino acid
  Variant (262)..(262): Xaa in position 262 is any amino acid
  Variant (264)..(264): Xaa in position 264 is any amino acid
  Variant (266)..(266): Xaa in position 266 is any amino acid
  Variant (268)..(272): Xaa in position 268 to 272 is any amino acid
  Variant (275)..(276): Xaa in position 275 to 276 is any amino acid
  Variant (278)..(280): Xaa in position 278 to 280 is any amino acid
  Variant (283)..(283): Xaa in position 283 is any amino acid
  Variant (287)..(297): Xaa in position 287 to 297 is any amino acid
  Variant (298)..(306): Xaa in position 298 to 306 is any or no amino acid
  Variant (308)..(309): Xaa in position 308 to 309 is any amino acid
  Variant (311)..(312): Xaa in position 311 to 312 is any amino acid
  Variant (315)..(316): Xaa in position 315 to 316 is any amino acid
  Variant (319)..(319): Xaa in position 319 is any amino acid
  Variant (323)..(323): Xaa in position 323 is any amino acid
  Variant (325)..(326): Xaa in position 325 to 326 is any amino acid
  Variant (328)..(330): Xaa in position 328 to 330 is any amino acid
  Variant (332)..(356): Xaa in position 332 to 356 is any amino acid
  Variant (357)..(363): Xaa in position 357 to 363 is any or no amino acid
  Variant (365)..(366): Xaa in position 365 to 366 is any amino acid
  Variant (368)..(369): Xaa in position 368 to 369 is any amino acid
  Variant (372)..(372): Xaa in position 372 is any amino acid
  Variant (375)..(376): Xaa in position 375 to 376 is any amino acid
  Variant (378)..(380): Xaa in position 378 to 380 is any amino acid
  Variant (381)..(381): Xaa in position 381 is any or no amino acid
  Variant (384)..(385): Xaa in position 384 to 385 is any amino acid
  Variant (387)..(388): Xaa in position 387 to 388 is any amino acid
  Variant (390)..(392): Xaa in position 390 to 392 is any amino acid
  Variant (394)..(395): Xaa in position 394 to 395 is any amino acid
  Variant (397)..(400): Xaa in position 397 to 400 is any amino acid
  Variant (402)..(405): Xaa in position 402 to 405 is any amino acid
  Variant (407)..(412): Xaa in position 407 to 412 is any amino acid
  Variant (413)..(414): Xaa in position 413 to 414 is any or no amino acid
  Variant (416)..(419): Xaa in position 416 to 419 is any amino acid
DXXWXLXLXGTAXGAGXLFLPIXXGXXGXXXLXXXXXXXXPXXXXXHRXLXXXXXSXXXXXXXXXXITXXXXXXFGXXXGXXXXXLYFXXIXXIXLXYXVXXTNTXXXFXXXQXXXXXXXXXXXRXXXXXXLXXXXXXXXXXGXXXXXXXXXXXVXPXXXXLXXXXXXLIPXWXXXXXXXXXXXXXXXXXXXXXXXXXWXXXPXXVFSFXHXPXISXFXXXXXXXXXXXXXXXXXXXXXXXIXXXXXXXXXXXVXFFVFSCXLXLXPXXXXXAKXXNXXXLSXLANXXXXXXXXXXXXXXXXXXXXPXXAXXAIXXSFXGHYXGXXEXXXGXXXXXXXXXXXXXXXXXXXXXXXXXXXXXXXXWXXAXXNPXILXXIXXXXGPXXAXXLXXXPXXAXXXXPXXXXYXXXXXXXXFXXXXG

SEQ ID NO: 153391 - protein, 48 aa, Artificial sequence
  protein pattern
  Variant (2)..(2): Xaa in position 2 is any amino acid
  Variant (3)..(3): Xaa in position 3 is Thr or Val
  Variant (4)..(4): Xaa in position 4 is Ala, Ile or Val
  Variant (5)..(5): Xaa in position 5 is Asp, Glu, Lys or Arg
  Variant (6)..(6): Xaa in position 6 is Glu, Gln or Ser
  Variant (7)..(7): Xaa in position 7 is His or Tyr
  Variant (10)..(15): Xaa in position 10 to 15 is any amino acid
  Variant (16)..(17): Xaa in position 16 to 17 is any or no amino acid
  Variant (19)..(19): Xaa in position 19 is any amino acid
  Variant (20)..(21): Xaa in position 20 to 21 is any or no amino acid
  Variant (24)..(24): Xaa in position 24 is any amino acid
  Variant (25)..(25): Xaa in position 25 is Ala, Gly or Ser
  Variant (26)..(26): Xaa in position 26 is Ile or Val
  Variant (27)..(27): Xaa in position 27 is any amino acid
  Variant (28)..(28): Xaa in position 28 is Pro or Thr
  Variant (29)..(29): Xaa in position 29 is Ile or Leu
  Variant (30)..(32): Xaa in position 30 to 32 is any amino acid
  Variant (34)..(34): Xaa in position 34 is Gly or Ser
  Variant (35)..(35): Xaa in position 35 is Ala, Asn or Val
  Variant (36)..(36): Xaa in position 36 is Ala, Gly, Asn, Ser or Thr
  Variant (37)..(37): Xaa in position 37 is Ile or Leu
  Variant (38)..(39): Xaa in position 38 to 39 is Asn or Thr
  Variant (40)..(47): Xaa in position 40 to 47 is any amino acid
TXXXXXXFGXXXXXXXXIXXXYFXXXXXXXXXYXXXXXXXXXXXXXXQ

SEQ ID NO: 153392 - protein, 37 aa, Artificial sequence
  protein pattern
  Variant (2)..(3): Xaa in position 2 to 3 is any amino acid
  Variant (5)..(10): Xaa in position 5 to 10 is any amino acid
  Variant (11)..(11): Xaa in position 11 is any or no amino acid
  Variant (13)..(13): Xaa in position 13 is any or no amino acid
  Variant (15)..(15): Xaa in position 15 is any amino acid
  Variant (16)..(16): Xaa in position 16 is Gly, Ile, Leu or Val
  Variant (17)..(17): Xaa in position 17 is Ala or Ser
  Variant (18)..(18): Xaa in position 18 is any amino acid
  Variant (19)..(19): Xaa in position 19 is Ile, Leu or Met
  Variant (21)..(21): Xaa in position 21 is any amino acid
  Variant (22)..(22): Xaa in position 22 is Ile, Leu or Val
  Variant (23)..(23): Xaa in position 23 is Leu or Met
  Variant (25)..(25): Xaa in position 25 is Ile, Met or Val
  Variant (26)..(26): Xaa in position 26 is any amino acid
  Variant (28)..(28): Xaa in position 28 is Phe, Ile, Met or Val
  Variant (29)..(30): Xaa in position 29 to 30 is any amino acid
  Variant (31)..(31): Xaa in position 31 is Ala, Ile, Leu or Val
  Variant (32)..(32): Xaa in position 32 is Asp, Glu, Pro or Ser
  Variant (33)..(33): Xaa in position 33 is Ala, Ser or Val
  Variant (34)..(34): Xaa in position 34 is Leu or Met
  Variant (35)..(36): Xaa in position 35 to 36 is any amino acid
  Variant (37)..(37): Xaa in position 37 is Phe, His, Trp or Tyr
PXXLXXXXXXXGXPXXXXXLXXXPXXAXXXXXXXXXX

SEQ ID NO: 153393 - protein, 17 aa, Artificial sequence
  protein pattern
  Variant (3)..(4): Xaa in position 3 to 4 is any amino acid
  Variant (6)..(6): Xaa in position 6 is Ile, Leu or Val
  Variant (7)..(7): Xaa in position 7 is Asn, Pro, Ser or Thr
  Variant (8)..(8): Xaa in position 8 is Ile or Val
  Variant (10)..(10): Xaa in position 10 is Asp, Ser or Thr
  Variant (11)..(11): Xaa in position 11 is Phe or Tyr
  Variant (12)..(12): Xaa in position 12 is Phe, Ile, Leu or Val
  Variant (14)..(16): Xaa in position 14 to 16 is any or no amino acid
AKXXNXXXLXXXAXXXN

SEQ ID NO: 153394 - protein, 17 aa, Artificial sequence
  protein pattern
  Variant (2)..(2): Xaa in position 2 is Phe or Leu
  Variant (3)..(5): Xaa in position 3 to 5 is any amino acid
  Variant (7)..(8): Xaa in position 7 to 8 is any amino acid
  Variant (9)..(9): Xaa in position 9 is Phe, Ile, Leu or Met
  Variant (10)..(10): Xaa in position 10 is Ala, Gly or Ser
  Variant (11)..(12): Xaa in position 11 to 12 is any amino acid
  Variant (14)..(14): Xaa in position 14 is Ile, Met or Val
  Variant (16)..(16): Xaa in position 16 is any amino acid
PXXXXLXXXXXXLXPXW

SEQ ID NO: 153395 - DNA, 1008 bp, Escherichia coli
  CDS (1)..(1008): transl_table=11
atgactgataaaaccattgcgttttcgctactcgatctggcccccattcccgaaggttcttcagcgcgagaagcattctcccactctctcgatctcgcccgtctggctgaaaagcgcggctatcatcgctactggctggcagaacaccacaatatgactggcattgccagtgctgccacgtcggtattgatcggctatctggcggcgaataccaccacgctgcatctggggtctggcggcgtgatgttgcctaaccactcaccgttggtcattgcagaacagttcggcacgcttaatacactctatccggggcgaatcgatttggggctgggtcgtgctccgggtagtgaccaacggacaatgatggcgctacgtcgtcatatgagcggcgatattgataatttcccccgcgatgtggcggagctggtggactggtttgacgcccgcgatcccaatccgcatgtgcgcccggtaccaggctatggcgagaaaatccccgtgtggttgttaggctccagcctttacagcgcgcaactggcggcgcagcttggtctgccgtttgcgtttgcctcacacttcgcgccggatatgctgttccaggcgctgcatctttatcgcagcaacttcaaaccgtcagcacggctggaaaaaccatacgcgatggtgtgcatcaatattatcgccgccgacagcaaccgcgacgctgaatttctgtttacctcaatgcagcaagcctttgtgaagctgcgccgtggcgaaaccgggcaactgccgccgccgattcaaaatatggatcagttctggtcaccgtctgagcagtatggcgtgcagcaggcgctgagtatgtcgttggtaggtgataaagcgaaagtgcgtcatggcttgcagtcgatcctgcgcgaaaccgacgccgatgagattatggtcaacgggcagattttcgaccaccaggcgcggctgcattcgtttgagctggcgatggatgttaaggaagagttgttgggataa

SEQ ID NO: 153396 - protein, 335 aa, Escherichia coli
MTDKTIAFSLLDLAPIPEGSSAREAFSHSLDLARLAEKRGYHRYWLAEHHNMTGIASAATSVLIGYLAANTTTLHLGSGGVMLPNHSPLVIAEQFGTLNTLYPGRIDLGLGRAPGSDQRTMMALRRHMSGDIDNFPRDVAELVDWFDARDPNPHVRPVPGYGEKIPVWLLGSSLYSAQLAAQLGLPFAFASHFAPDMLFQALHLYRSNFKPSARLEKPYAMVCINIIAADSNRDAEFLFTSMQQAFVKLRRGETGQLPPPIQNMDQFWSPSEQYGVQQALSMSLVGDKAKVRHGLQSILRETDADEIMVNGQIFDHQARLHSFELAMDVKEELLG

SEQ ID NO: 153397 - DNA, 1008 bp, Salmonella typhi
  CDS (1)..(1008): transl_table=11
  misc_feature (26)..(26): n is a, g, c or t
atgactgacaaaactattccgttctnggtgctggatctggcgccgatccctgaaggatcttcggcaaaagaagccttcacgcactcgcttgatctcgcacggctggctgaaaagcgtggctatcaccgctactggctggcggaacatcacaacatgaccggtatcgccagcgcggcgacctcggtattgattggttatctggcggccaataccacaacattacatcttggctccggcggcgtgatgctgcctaaccattcaccgctggtgattgccgagcagttcggcacgctgaatacgctctacccgggacgtatcgacttaggattgggacgcgcgccgggtagcgatcagccgacgatgcgcgcgctgcgtcgccatatgagcggcgatatcgataactttccacgcgatgtcgcagagctggtggactggttcgacgctcgcgatcctaatccgcatgtgcgcccggtgcccggctacggcgagaagatcccgatctggctgttgggctccagcctgtatagcgcgcaactggcggcccagcttggcctgccgttcgcctttgcttcgcatttcacgccggatatgttgttccaggcgctgcatctgtaccgtactcagttcaaaccttcagcgcggctggaaaaaccgtacgcgatggtgtgtatcaatattatcgccgccgacagcaaccgcgacgccgaattcctgtttacctccatgcagcaggcttttgtgaagctacgccgtggagaaaccggccaactgccgccgccgattgagaatatggaaaccttctggtcgccatccgagcagtatggcgtgcagcaggcgctgagtatgtcgctggtcggcgataaagcgaaagtccgccacgggctggtgtccattctgcgggaaacccaggcggatgaaattatggtaaacgggcagattttcgaccaccaggcacgcctgcattcgtttgatttagcgatggatgtgaagcaggaattgttggggtag

SEQ ID NO: 153398 - protein, 335 aa, Salmonella typhi
  misc_feature (9)..(9): The Xaa at location 9 stands for Stop, Leu, Ser, or Trp.
MTDKTIPFXVLDLAPIPEGSSAKEAFTHSLDLARLAEKRGYHRYWLAEHHNMTGIASAATSVLIGYLAANTTTLHLGSGGVMLPNHSPLVIAEQFGTLNTLYPGRIDLGLGRAPGSDQPTMRALRRHMSGDIDNFPRDVAELVDWFDARDPNPHVRPVPGYGEKIPIWLLGSSLYSAQLAAQLGLPFAFASHFTPDMLFQALHLYRTQFKPSARLEKPYAMVCINIIAADSNRDAEFLFTSMQQAFVKLRRGETGQLPPPIENMETFWSPSEQYGVQQALSMSLVGDKAKVRHGLVSILRETQADEIMVNGQIFDHQARLHSFDLAMDVKQELLG

SEQ ID NO: 153399 - DNA, 1002 bp, Pseudomonas aeruginosa PAO1
  CDS (1)..(1002): transl_table=11
atgacaacgcttgctgatattcccctgtccatgctcgacctggtgccggtgcgcaccggcggcagcgtggccgaagccctgcacaactccctggacctggcgcgccatgtggagcgcctgggcttcaaccgtttctggctggccgagcaccacaacatggatggcatcgccagctccgccaccgcgctgctgatcggccatatcgccggcggcacctcgcggatccgcgtcggctcgggtggggtgatgctgccgaaccatgcgccgctggtggtggcggaaaacttcggcaccctggagacgctctacccgggccgcatcgacctcggccttggccgcgcccccggcgccgaccaggcgaccatgcgcgccttgcgtcgcgaccgcctgggcaacggcgacgacttccccgagcaggtcgccgagctggaaatgctgctcggcccgcgccgttcccagcagagcctgctggcggtgccgggcgagggtacccaggtgccgatctggctactcggttcgagcctgttcagcgcccacctggcggcgcagaaaggcttgccctatgccttcgcttcgcattttgcaccgcgttacctgcacgaggcgctgcgcatctaccgcagcaacttccagccctcggcggtactcgacaaaccctacgcgatgatcggcgtgccgctgatcgccgcacctaccgacgaagaggccgagttcctcgccactaccgccttccagcgcgtgctggcgctgatccgcggcgagagcctgaaacagaagccgccggtggaaagtatggcgccgttgtggctgccccacgagcaggatgcggtcggcagcttcttcggcctggcggtgatcggcggtccggagaaggttcgcgcgcgtctggagatcctcctggagcagaccggcgccgacgagcttatcttcaccagcgacttctacgagcacgcccatcggctgcgctcttgcgaaatcgtcgcggagctgaaaggggcgtga

SEQ ID NO: 153400 - protein, 333 aa, Pseudomonas aeruginosa PAO1
MTTLADIPLSMLDLVPVRTGGSVAEALHNSLDLARHVERLGFNRFWLAEHHNMDGIASSATALLIGHIAGGTSRIRVGSGGVMLPNHAPLVVAENFGTLETLYPGRIDLGLGRAPGADQATMRALRRDRLGNGDDFPEQVAELEMLLGPRRSQQSLLAVPGEGTQVPIWLLGSSLFSAHLAAQKGLPYAFASHFAPRYLHEALRIYRSNFQPSAVLDKPYAMIGVPLIAAPTDEEAEFLATTAFQRVLALIRGESLKQKPPVESMAPLWLPHEQDAVGSFFGLAVIGGPEKVRARLEILLEQTGADELIFTSDFYEHAHRLRSCEIVAELKGA

SEQ ID NO: 153401 - DNA, 1017 bp, Deinococcus radiodurans R1
  CDS (1)..(1017): transl_table=11
atggctcctcttatttctgttctcgacctgacgccggtcagtaccggccagcagccgggcgaagcgctgcggcacacgctggagttggcggaagttgccgattcgtatcaatacacaaggttttggattgccgagcatcacaacagtggcgctttcgtcagcgcggccaccgaaatcttgatcgcgctcgccgctgcccggacaggccggatccgcgtcggctcgggcggcgtcatgctgcccaaccactcgccgctgaaggtggccgagaactttatgagtctggaagcgctgtttccgggccgtattgacctcggcctgggccgcgcgcccggcaccgatggacgcacggcactggcgctgcggcgctcgcgggaagcgctggccgccgacgattttcccacccagatcgcgctgctgcgggcctttgccggggaaacaccctggcccgccgggtcggtgtttgacggcgtgctggccgagccgcgcggtgtgaagctgccgccgctgtggattctgggctcaagcctctacggggcgcagctcgccggggaactgggggtcgggtacgcgttcgcctaccacttcagtcaagaagaccccgccgtggccgtgcagacctaccaccggcatttccgccccggcccgctcgccgagccctacgccatcctcggcgtcaatgcgctggcagcccccaccgaggacgaagcccgtgacctttcgctgacctcggcggcgctctcgctcggcatcctcagtggacagcgcggggtgctgcgctcgcccgaagaggcccggcagtggctgcaagagatggacaccgaccccgccaaactgctgaaaaaagcccgcatcggcacgccggagcaggtctgggccagcttgcaggaactcggcgaaagcaccggcgcccaggaaatgctggtcacgacctacgcccacgacccgcttaagcgccagcagtcgtaccggttgctcgctcaggcggcgggcatgacgccgcagaaggaagcctaa

SEQ ID NO: 153402 - protein, 338 aa, Deinococcus radiodurans R1
MAPLISVLDLTPVSTGQQPGEALRHTLELAEVADSYQYTRFWIAEHHNSGAFVSAATEILIALAAARTGRIRVGSGGVMLPNHSPLKVAENFMSLEALFPGRIDLGLGRAPGTDGRTALALRRSREALAADDFPTQIALLRAFAGETPWPAGSVFDGVLAEPRGVKLPPLWILGSSLYGAQLAGELGVGYAFAYHFSQEDPAVAVQTYHRHFRPGPLAEPYAILGVNALAAPTEDEARDLSLTSAALSLGILSGQRGVLRSPEEARQWLQEMDTDPAKLLKKARIGTPEQVWASLQELGESTGAQEMLVTTYAHDPLKRQQSYRLLAQAAGMTPQKEA

SEQ ID NO: 153403 - DNA, 1008 bp, Escherichia coli O157:H7 EDL933
  CDS (1)..(1008): transl_table=11
atgactgataaaaccattgcgttttcgctactcgatctggcccccattcccgaaggttcttcagcgcgagatgcattctcccactctctcgatctcgcccgtctggctgaaaagcgcggctatcatcgctactggctggcagaacaccacaatatgactggcattgccagtgctgccacgtcggtattgattggctatctggcggcgaataccaccacgctgcatctggggtctggcggcgtgatgttgcctaaccactcaccgttggtcattgcagaacagttcggcacgctcaatacactctatccggggcgaatcgatttggggctgggtcgtgctccgggtagtgaccagcgaaccatgatggcgctacgtcgtcatatgagcggggatattgataatttcccccgcgatgtcgcggagctggtggcctggtttgacgcccgcgatcccaatccgcatgtgcgcccggtaccaggctacggcgagcaaatccccgtgtggttgttaggctccagcctttacagcgcgcaactggcggcgcagcttggtctgccgtttgcgtttgcctcacacttcgcgccggatatgttgttccaggcgctgcatctttatcgcagcaacttcaaaccgtcggcacgactggaaaaaccatacgcgatggtgtgcatcaatattatcgctgccgacagcaaccgcgacgctgaatttctgtttacctcaatgcagcaagcctttgtgaagctgcgccgtggcgaaaccgggcaactgccgccgccgattcaaaatatggatcagttctggtcaccgtctgagcagtatggcgtgcaacaggcgctgagtatgtcgctggtgggcgataaagcgaaagcgcgtcatggtttgcagtcgatcctgcgcgaaaccgacgccgatgagattatggttaacgggcagattttcgaccaccaggcgcgcctgcattcgtttgagctggcgatggatgttaaggaagagttgttgggatag

SEQ ID NO: 153404 - protein, 335 aa, Escherichia coli O157:H7 EDL933
MTDKTIAFSLLDLAPIPEGSSARDAFSHSLDLARLAEKRGYHRYWLAEHHNMTGIASAATSVLIGYLAANTTTLHLGSGGVMLPNHSPLVIAEQFGTLNTLYPGRIDLGLGRAPGSDQRTMMALRRHMSGDIDNFPRDVAELVAWFDARDPNPHVRPVPGYGEQIPVWLLGSSLYSAQLAAQLGLPFAFASHFAPDMLFQALHLYRSNFKPSARLEKPYAMVCINIIAADSNRDAEFLFTSMQQAFVKLRRGETGQLPPPIQNMDQFWSPSEQYGVQQALSMSLVGDKAKARHGLQSILRETDADEIMVNGQIFDHQARLHSFELAMDVKEELLG

SEQ ID NO: 153405 - DNA, 1002 bp, Agrobacterium tumefaciens str. C58
  CDS (1)..(1002): transl_table=11
atgatccccttttccattctcgacctttcgccgatcggcgaaggcgagagcgtcagcgcggcgctcgaaaattcccgccgcatggccatcaaggccgaagaacacggttataatcgcctctggctggcagagcatcacggcatgcccggcattgccagtgctgcaacctcgctggtgatcgcccatgtgggtgccgccaccaaacatatccgtgtcggttccggcggcatcatgctgcccaaccactccccgctcgtcattgccgagcagttcggaacactggcggcacttctgcccggtcgtgtcgatctcggcctaggccgcgctcccggaaccgatatgcgcacagcgcgagccctgcgccgcaacctcgatgccggcgcggaaaatttcccgcacgatatcgtcgaactccagcgttaccttggcccgccgcagccggatcaggcgatcctcgccgtgcccggcatgaattccaacgtaccgctctggctgctcggctccagcacctacagcgcgcatctcgccgcagcactcggcctgccctattccttcgcctcgcattttgcccctgatatgctgatggaggcgatccatatctatcgcgagcgtttccagccctccgaggtgctggacaagccctatgtgatggtcggtgtgatgggtgtcggcgccgatacggacgaagaggcgcagcatctcttcacctcgtcccagcagcaattcgtcaacctgcgccgcaatgtgcgcacgcagtttccgaaaccggtgcacagcatggacgattactggaacgagatggaacgtttctccgtcgaacacacgctgcgtttcgccgccgttggttcacccgaaacgatcgagcgccatctcgacggttttctcgctgaaacacaggcggatgaactgatcgtttccatgccgatccatgacatcgaaaagcggctgcgttccgtggaaattttcgccgatgtgcggaccgccatccgaaaggcagcctag

SEQ ID NO: 153406 - protein, 333 aa, Agrobacterium tumefaciens str. C58
MIPFSILDLSPIGEGESVSAALENSRRMAIKAEEHGYNRLWLAEHHGMPGIASAATSLVIAHVGAATKHIRVGSGGIMLPNHSPLVIAEQFGTLAALLPGRVDLGLGRAPGTDMRTARALRRNLDAGAENFPHDIVELQRYLGPPQPDQAILAVPGMNSNVPLWLLGSSTYSAHLAAALGLPYSFASHFAPDMLMEAIHIYRERFQPSEVLDKPYVMVGVMGVGADTDEEAQHLFTSSQQQFVNLRRNVRTQFPKPVHSMDDYWNEMERFSVEHTLRFAAVGSPETIERHLDGFLAETQADELIVSMPIHDIEKRLRSVEIFADVRTAIRKAA

SEQ ID NO: 153407 - DNA, 1020 bp, Staphylococcus aureus subsp. aureus Mu50
  CDS (1)..(1020): transl_table=11
atggcgattaaatattcagcattaaaccttgtccctattcgagaaggtgacgatgaacgaacagcaattaatgatatggttaagctcgcacaacatttagatgaattatcgtatgaaagatattggattgctgaacaccataacgctcccaacctagtaagttcagcaactgctttattgattcaacatacgttagaacatacgaaacacatacgtgtaggttctggaggaatcatgttacctaaccatgctccattaatcgttgcggaacaattcggcacgatggcaacattatttccaaatcgtgtcgatttaggattaggacgtgcacctggaacagatatgatgaccgcaagtgcattaagacgagatcaacatgatggtgtttataaatttccagaagaagtttcattattacaacaatatttcggcccagctcaccaacaagcatatgttcgtgcttatccagcagtaggtaaaaatgtgcctttatacattcttggttcttcaacagattctgcacatttagctgctcgcaaagggcttccatatgtgttcgctggacattttgcacctcaacaaatgaaagaagctatcgaaatttacaaaacgttatttgaaccttctgatgtattagacgaaccttatgttattgtatgtttaaatacaatcgttgctgaaaatgatgacgaagcacaatatttagcttcatctatggcacaagtaatggttagtatcactcgtggcagaatgcagcccgttcaaccgccaacacatgatctacaaaatatattaacgccgagagaatatgcgatggctatggaaagacagaaaatatcattaataggttcagaaaatactgttcaacaaaaaattcaagattttatggaaacttatggtgaagtcaacgaaattatggcaataagttatatttatgataaagatatgcaattagactcttatcgtcggttcaagaatgttataaatcagataaatgaaaaaaaacactttataatgtga

SEQ ID NO: 153408 - protein, 339 aa, Staphylococcus aureus subsp. aureus Mu50
MAIKYSALNLVPIREGDDERTAINDMVKLAQHLDELSYERYWIAEHHNAPNLVSSATALLIQHTLEHTKHIRVGSGGIMLPNHAPLIVAEQFGTMATLFPNRVDLGLGRAPGTDMMTASALRRDQHDGVYKFPEEVSLLQQYFGPAHQQAYVRAYPAVGKNVPLYILGSSTDSAHLAARKGLPYVFAGHFAPQQMKEAIEIYKTLFEPSDVLDEPYVIVCLNTIVAENDDEAQYLASSMAQVMVSITRGRMQPVQPPTHDLQNILTPREYAMAMERQKISLIGSENTVQQKIQDFMETYGEVNEIMAISYIYDKDMQLDSYRRFKNVINQINEKKHFIM

SEQ ID NO: 153409 - DNA, 1014 bp, Staphylococcus aureus subsp. aureus N315
  CDS (1)..(1014): transl_table=11
atggcgattaaatattcagcattaaaccttgtccctattcgagaaggtgacgatgaacgaacagcaattaatgatatggttaagctcgcacaacatttagatgaattatcgtatgaaagatattggattgctgaacaccataacgctcccaacctagtaagttcagcaactgctttattgattcaacatacgttagaacatacgaaacacatacgtgtaggttctggaggaatcatgttacctaaccatgctccattaatcgttgcggaacaattcggcacgatggcaacattatttccaaatcgtgtcgatttaggattaggacgtgcacctggaacagatatgatgaccgcaagtgcattaagacgagatcaacatgatggtgtttataaatttccagaagaagtttcattattacaacaatatttcggcccagctcaccaacaagcatatgttcgtgcttatccagcagtaggtaaaaatgtgcctttatacattcttggttcttcaacagattctgcacatttagctgctcgcaaagggcttccatatgtgttcgctggacattttgcacctcaacaaatgaaagaagctatcgaaatttacaaaacgttatttgaaccttctgatgtattagacgaaccttatgttattgtatgtttaaatacaatcgttgctgaaaatgatgacgaagcacaatatttagcttcatctatggcacaagtaatggttagtatcactcgtggcagaatgcagcccgttcaaccgccaacacatgatctacaaaatatattaacgccgagagaatatgcgatggctatggaaagacagaaaatatcattaataggttcagaaaatactgttcaacaaaaaattcaagattttatggaaacttatggtgaagtcaacgaaattatggcaataagttatatttatgataaagatatgcaattagactcttatcgtcggttcaagaatgttataaatcagataaatgaaaaaaacactttataa

SEQ ID NO: 153410 - protein, 337 aa, Staphylococcus aureus subsp. aureus N315
MAIKYSALNLVPIREGDDERTAINDMVKLAQHLDELSYERYWIAEHHNAPNLVSSATALLIQHTLEHTKHIRVGSGGIMLPNHAPLIVAEQFGTMATLFPNRVDLGLGRAPGTDMMTASALRRDQHDGVYKFPEEVSLLQQYFGPAHQQAYVRAYPAVGKNVPLYILGSSTDSAHLAARKGLPYVFAGHFAPQQMKEAIEIYKTLFEPSDVLDEPYVIVCLNTIVAENDDEAQYLASSMAQVMVSITRGRMQPVQPPTHDLQNILTPREYAMAMERQKISLIGSENTVQQKIQDFMETYGEVNEIMAISYIYDKDMQLDSYRRFKNVINQINEKNTL

SEQ ID NO: 153411 - DNA, 990 bp, Sinorhizobium meliloti 1021
  CDS (1)..(990): transl_table=11
atgatccccttttccattctcgacctgtcgccgatcaccgaagggggcagcatcgcagagtcgctcgaaaattcgcagcggctggcaatcgcggcggaggagaatggctatcagcgcttctggctggccgaacaccatggcatgaagggcattgccagcgccgcgacgtctctcgtgatttcgcatgtggcttcggccacgcggacgatccgcgtcggctcaggtggcatcatgctgcccaaccattcaccgctcgtcatcgccgagcaattcggcacgcttgcggcgctttaccccggccgcatcgatctcggcctcggccgcgcgcccggcacggacatgagaacggcgcaggcgctccgccgcaacatggaggcgagcgccaacaatttccccaacgatgtcgtggaactgcaggcgctgctcggcccggcgaccgaagaccagaagatcatcgccgttccgggcgcggattcgaacgtgccgatctggctgctcggttcgagccatttcagcgcccatctcgccggcatgctcggccttcccttcgccttcgcctcgcatttcgcgccggacatgctgctttccgcgctcgaaatataccgcgagcgcttcaccccgtcgccacagctcgacaagccgcatgtcatggtgggcgtcatgggcgtcgcagcggacacggacgaggaggcgaaccacctcttcacctccatgcagcaatccttcgtcgcgcttcgccgcaatgcgcgcgggcgcttcccgccgccggtcaaatcgatggacggcctctggagccaggacgagaagattttcgtcgaccacgcaatgagctacgcggtggtcggcggccccgagacgatccgccgaaagatcgaggcatttgtggatctcaccagggcggacgagctgatcgtctcaatgccgatcttcgacatggaagcgcggttgcgttcggtgaagcttttcggcggggtccgaagaacgggttga

SEQ ID NO: 153412 - protein, 329 aa, Sinorhizobium meliloti 1021
MIPFSILDLSPITEGGSIAESLENSQRLAIAAEENGYQRFWLAEHHGMKGIASAATSLVISHVASATRTIRVGSGGIMLPNHSPLVIAEQFGTLAALYPGRIDLGLGRAPGTDMRTAQALRRNMEASANNFPNDVVELQALLGPATEDQKIIAVPGADSNVPIWLLGSSHFSAHLAGMLGLPFAFASHFAPDMLLSALEIYRERFTPSPQLDKPHVMVGVMGVAADTDEEANHLFTSMQQSFVALRRNARGRFPPPVKSMDGLWSQDEKIFVDHAMSYAVVGGPETIRRKIEAFVDLTRADELIVSMPIFDMEARLRSVKLFGGVRRTG

SEQ ID NO: 153413 - DNA, 1014 bp, Caulobacter crescentus CB15
  CDS (1)..(1014): transl_table=11
atgcgccatctagcggacatgaccagcgccgctcttccgcccatttcggttcttgaccttgcgcccgttccgcaaggctccagtgtcgggcaggcgctgagaaacagcatcgatctggcgcaacatgctgaaacgctcgggtttcaccgctactggctcgccgagcaccacaacatgccgggaatcgccagcgcggcgacggccgtggtcatcggtcagatcgcggccgcgacgacaacgattcgggtcggctcaggcggcgtcatgctgccaaaccatgcaccactgatggtggccgagcagtttggcaccctgaacgcgctctatcctggacgcattgatctgggcctgggccgcgcgccaggtacggatcaggcgacgatgcgggcccttcgccgctatgccggcgcggtcgattcgttcgctcaggacgttgtcgagctgcagcactggttcaagccggcgagcaccgatcagagcgtgcgtgccgttccgggcgaaggccaggacgttcccatctggattctgggctcctcgacctggggggcgcagctggcggcggcgctgggcctgccctacgccttcgccgcgcactttgcgccggacgccctgatcgaggccctgacgctgtaccgccgccatttcaagccgtcggaaagcctggaccgcccctacgccatggtctgcatcggcgtttgcgccgccgacaccgacgaggaggccaagcggctgtcgacctcgactcagcagcagttcctggccttgcggcgtgggcgtccgggccttctgccgccgccggtggacgatattcgcgagcacgcctcaccgggcgagctggcggggctggatcacacgctgcagtacgccgcaatcggctcgcctgagacggtgaggcgcaagatcgacagagtgctcgaactgacaggcgcggacgaactgatggccgccgcccagatccatgatcacgcggcgcgcaggcgcagctatgagatcttggcgtccttgcgagcctag

SEQ ID NO: 153414 - protein, 337 aa, Caulobacter crescentus CB15
MRHLADMTSAALPPISVLDLAPVPQGSSVGQALRNSIDLAQHAETLGFHRYWLAEHHNMPGIASAATAVVIGQIAAATTTIRVGSGGVMLPNHAPLMVAEQFGTLNALYPGRIDLGLGRAPGTDQATMRALRRYAGAVDSFAQDVVELQHWFKPASTDQSVRAVPGEGQDVPIWILGSSTWGAQLAAALGLPYAFAAHFAPDALIEALTLYRRHFKPSESLDRPYAMVCIGVCAADTDEEAKRLSTSTQQQFLALRRGRPGLLPPPVDDIREHASPGELAGLDHTLQYAAIGSPETVRRKIDRVLELTGADELMAAAQIHDHAARRRSYEILASLRA

SEQ ID NO: 153415 - DNA, 1008 bp, Salmonella enterica subsp. enterica serovar Typhi str. CT18
  CDS (1)..(1008): transl_table=11
atgactgacaaaactattccgttctcggtgctggatctggcgccgatccctgaaggatcttcggcaaaagaagccttcacgcactcgcttgatctcgcacggctggctgaaaagcgtggctatcaccgctactggctggcggaacatcacaacatgaccggtatcgccagcgcggcgacctcggtattgattggttatctggcggccaataccacaacattacatcttggctccggcggcgtgatgctgcctaaccattcaccgctggtgattgccgagcagttcggcacgctgaatacgctctacccgggacgtatcgacttaggattgggacgcgcgccgggtagcgatcagccgacgatgcgcgcgctgcgtcgccatatgagcggcgatatcgataactttccacgcgatgtcgcagagctggtggactggttcgacgctcgcgatcctaatccgcatgtgcgcccggtgcccggctacggcgagaagatcccgatctggctgttgggctccagcctgtatagcgcgcaactggcggcccagcttggcctgccgttcgcctttgcttcgcatttcacgccggatatgttgttccaggcgctgcatctgtaccgtactcagttcaaaccttcagcgcggctggaaaaaccgtacgcgatggtgtgtatcaatattatcgccgccgacagcaaccgcgacgccgaattcctgtttacctccatgcagcaggcttttgtgaagctacgccgtggagaaaccggccaactgccgccgccgattgagaatatggaaaccttctggtcgccatccgagcagtatggcgtgcagcaggcgctgagtatgtcgctggtcggcgataaagcgaaagtccgccacgggctggtgtccattctgcgggaaacccaggcggatgaaattatggtaaacgggcagattttcgaccaccaggcacgcctgcattcgtttgatttagcgatggatgtgaagcaggaattgttggggtag

SEQ ID NO: 153416 - protein, 335 aa, Salmonella enterica subsp. enterica serovar Typhi str. CT18
MTDKTIPFSVLDLAPIPEGSSAKEAFTHSLDLARLAEKRGYHRYWLAEHHNMTGIASAATSVLIGYLAANTTTLHLGSGGVMLPNHSPLVIAEQFGTLNTLYPGRIDLGLGRAPGSDQPTMRALRRHMSGDIDNFPRDVAELVDWFDARDPNPHVRPVPGYGEKIPIWLLGSSLYSAQLAAQLGLPFAFASHFTPDMLFQALHLYRTQFKPSARLEKPYAMVCINIIAADSNRDAEFLFTSMQQAFVKLRRGETGQLPPPIENMETFWSPSEQYGVQQALSMSLVGDKAKVRHGLVSILRETQADEIMVNGQIFDHQARLHSFDLAMDVKQELLG

SEQ ID NO: 153417 - DNA, 1008 bp, Salmonella typhimurium LT2
  CDS (1)..(1008): transl_table=11
atgactgacaaaactattccgttctcggtgctggatctggcgccgatccctgaaggatcttcggcaaaagaagccttcacgcactcgctggatctcgcacggctggctgaaaagcgcggttatcaccgctactggctggcagaacatcacaacatgaccggtatcgccagcgcggcgacctcggtattgattggttatctggcagccaataccacaacattacatcttggctccggcggcgtgatgctgcctaaccattcaccgctggtgattgccgagcagttcggcacgctgaatacgctctacccgggacgtatcgacttagggttgggacgcgcgccgggtagcgatcagtcgacgatgcgcgcgctgcgtcgccatatgagcggcgatatcgataactttccacgcgatgtcgcagagctggtggactggttcgacgctcgcgaccctaatccgcatgtgcgcccggtgcccggctacggcgagcagatcccggtctggctgttgggatccagcctgtatagtgcgcaactggcggcccagcttggcctgccgttcgcctttgcttcgcatttcgcgccggatatgttgttccaggcgctgcatctgtaccgtacccagttcaaaccttcagcgcggctggaaaaaccgtacgcgatggtgtgtatcaatattatcgccgccgacagcaaccgcgacgccgaattcctgtttacctccatgcagcaggctttcgtgaagctacgccgtggggaaaccggccaactgccgccgccgattgagaatatggagaccttccggtcgccatccgagcagtatggcgtgcagcaggcgctgagtatgtcgctggtcggtgataaagcgaaagtccgccacgggctggaatccatcctgcgggagacccaggcggatgaaattatggtaaacgggcagattttcgaccaccaggcacgcctgcattcgtttgatttagcgatggatgttaaggaagagttgttgggctga

SEQ ID NO: 153418 - protein, 335 aa, Salmonella typhimurium LT2
MTDKTIPFSVLDLAPIPEGSSAKEAFTHSLDLARLAEKRGYHRYWLAEHHNMTGIASAATSVLIGYLAANTTTLHLGSGGVMLPNHSPLVIAEQFGTLNTLYPGRIDLGLGRAPGSDQSTMRALRRHMSGDIDNFPRDVAELVDWFDARDPNPHVRPVPGYGEQIPVWLLGSSLYSAQLAAQLGLPFAFASHFAPDMLFQALHLYRTQFKPSARLEKPYAMVCINIIAADSNRDAEFLFTSMQQAFVKLRRGETGQLPPPIENMETFRSPSEQYGVQQALSMSLVGDKAKVRHGLESILRETQADEIMVNGQIFDHQARLHSFDLAMDVKEELLG

SEQ ID NO: 153419 - DNA, 984 bp, Brucella melitensis 16M
  CDS (1)..(984): transl_table=11
atgatacctttatccgttcttgacctttcgcccgtttcagaaggcagcgatgcggcccattcgcttcgcaacacgctggagcttgcgcagcacgctgaacggctgggcttccaccgctactggctggcggaacatcacaatatgccgggcatcaccagcgcggctacctcggtcgtaatcggctatgtggccaacggaacctcgaccattcgcgtgggggcgggcggtgtcatgctgccgaaccattcgcctctggtgatcgcggaacagttcgggacacttgcttcgttgtttccgggccgcatcgatcttggccttgggcgcgcaccgggaacagacccagttacggcccatgcgcttcgccgcaatctggacagtgacgccaatgcgtttccgcaggatgtcgtggaactgctcaactatttcaaaccggccgaacccggccagcgggtgcgggccgtgccgggcgaggggttgaacgtgcctgtctggatattgggttccagcccgttcggtgcgcagcttgctgccatgctgggcctgccttacgcctttgcctcgcattttgctccggcggagatggagcgcgccatcgcgctttatcgcgaacgcttcgagccgtccgaatatatgcagaagccttatgtgatgctgggcctcaatgtgattgcagccgacacggacgaggaggcaaattatctgttcacctcgcagttacaggctttcatcaatttgcgcagcggtcgccccggcaagctgcctgcacctgtcgaaggctatatggagcggcttgatccggcagcacaagccctcgtccgccagatgctttcctgccgtgtagttggcgggccggagactgtggcgaagggcatcaaggcctttgcggaaaataccggcgcagatgagttgatgattaccggcatgatccacgaccacaaaaagcgtttgcgctcttacgagatcgtcagtaattcgattgcgtga

SEQ ID NO: 153420 - protein, 327 aa, Brucella melitensis 16M
MIPLSVLDLSPVSEGSDAAHSLRNTLELAQHAERLGFHRYWLAEHHNMPGITSAATSVVIGYVANGTSTIRVGAGGVMLPNHSPLVIAEQFGTLASLFPGRIDLGLGRAPGTDPVTAHALRRNLDSDANAFPQDVVELLNYFKPAEPGQRVRAVPGEGLNVPVWILGSSPFGAQLAAMLGLPYAFASHFAPAEMERAIALYRERFEPSEYMQKPYVMLGLNVIAADTDEEANYLFTSQLQAFINLRSGRPGKLPAPVEGYMERLDPAAQALVRQMLSCRVVGGPETVAKGIKAFAENTGADELMITGMIHDHKKRLRSYEIVSNSIA

SEQ ID NO: 153421 - DNA, 1101 bp, Streptomyces coelicolor A3(2)
  CDS (1)..(1101): transl_table=11
atgcccgcagacgccgcagaggagatccggggcaccgcccacggcaccgctcccgtccccctctccgtactggacctggtgaccgtcggggccggccggaccgccaccgatgccctgcggaccggcgtggacatcgtgcggctcgccgaggcccgcggctttcagcgctactgggtcgccgagcaccactccatgcccggcgtcgcctcgtcctcccccgcggtcatcctggcccacctggcggcccacaccgaccgcatccggctcgggtccggcggcgtcatgctgcccaaccatgcgccgctcgtcatcgcggagcagttcgggacgctggaggcgatggcgccggggcgcgtcgacctcgggctcggccgggcacccggcaccgacggggccaccgccgccgccctgcgccgcaccgaccggctgaacgagggcgccgacgacttcccgcagcagctcgccgagctgatccggttcctggacgacgacttcccggacgggcacccgtacgcccgtatccacgccgtgccgggccccgtgcaggccacctcgcccgggggcgtgcagtcggcgcaccggccgccggtgtggctgctcgggtcctccgggttcagcgcgcggctggccggcaccctcgggctgccgttcgccttcgcgcaccacttctcggcgcagaacacgatcccggcgctcgacctgtaccgcgagtccttccggccgtccgccgtcctggacgcgccgtacgccctcatcggcgtctccgcgctcgccaccgacgacgagaaggaggcccgcaggcaggtgctggcggccgcgctgaacatggtccggctgcgcaccggccgcccggggctggtgccgacgccggaggaggccgaggcgtacgacttcagcccgatggagcaggacttcatccagtcctggaacgccaacgtcatccacggcaccgccgacgaggtgcgctccggcctcgacgacctgcacaagcgcaccggcgccgacgagctgatgctcaccgccaacgcccacggcggcgacgtacgcctgcgctcctacgagctgatcgccgacgcctacgggttgccgacgcccgcctga

SEQ ID NO: 153422 - protein, 366 aa, Streptomyces coelicolor A3(2)
MPADAAEEIRGTAHGTAPVPLSVLDLVTVGAGRTATDALRTGVDIVRLAEARGFQRYWVAEHHSMPGVASSSPAVILAHLAAHTDRIRLGSGGVMLPNHAPLVIAEQFGTLEAMAPGRVDLGLGRAPGTDGATAAALRRTDRLNEGADDFPQQLAELIRFLDDDFPDGHPYARIHAVPGPVQATSPGGVQSAHRPPVWLLGSSGFSARLAGTLGLPFAFAHHFSAQNTIPALDLYRESFRPSAVLDAPYALIGVSALATDDEKEARRQVLAAALNMVRLRTGRPGLVPTPEEAEAYDFSPMEQDFIQSWNANVIHGTADEVRSGLDDLHKRTGADELMLTANAHGGDVRLRSYELIADAYGLPTPA

SEQ ID NO: 153423 - DNA, 1110 bp, Xanthomonas axonopodis pv. citri str. 306
  CDS (109)..(1110): transl_table=11
ttgtccgactgctggaatgctgtaatccctcacggcacccaacacgccgctggcaatgccgccgggccagccccatctctggcatatcactcttcccggagtcatccgatgacccccatttccgtgctcgacctggcgccggtctgcgaaggcagcgacaccacccacgccttcgccaacatgctcgatctggcccagcacgccgagcgttggggctatcagcgctactggctggccgaacaccacaacatgccaggcatcgccagcgctgccaccgccgtgctgatcggtcacgtcgccggcggcaccaaggccattcgcgtgggtgccggcggcatcatgttgcccaaccacgcgccgctgcaggtggccgaacaattcggcacgctggcatcgctctatccgcagcgtatcgacctgggcctgggccgcgcgccgggcaccgatcagcccaccgcccgcgcattgcgccgctatttcgacagcgccgatcactttccgcaggacgtggccgaattgatgcgctatttcgcgccggcggtgccggggcagctggtacaggccgtgcccggcgccgggctggaggtgccggtgtggctgttgggatcgagcctgttcagcgcacgccttgccgccgcgatgggcttgtcgttcgcgttcgcctcgcatttcgcgccggacgcgatggacgaagcggtggcgatctatcgccgcgaattccgcccgtccgcacagctcgccaagccgcacgtgatgctggccctgaatgtggtggcggccgagacgcaagcgcaggcacggcgtctgttcactacccagcagcaaagcttcgtcaatctgcgtcgcggcaagccgggcaagatcccgccgcccatcgacgatatcgacagcttctggcaaccgcatgagcgtgtcggggtggagcgtgcactggcctgcacggtgctcggcgatgccgagcagattgcgcgcggcgtggccgagttcatcgagcgccacacgcccgacgagctgttgttcaccgccaacatctacgaccacgccgcgcgtctgcgctccttcgaaatcgccgctgccgcgtgccgcgagctggacgtgaccttggtgtga

SEQ ID NO: 153424 - protein, 333 aa, Xanthomonas axonopodis pv. citri str. 306
MTPISVLDLAPVCEGSDTTHAFANMLDLAQHAERWGYQRYWLAEHHNMPGIASAATAVLIGHVAGGTKAIRVGAGGIMLPNHAPLQVAEQFGTLASLYPQRIDLGLGRAPGTDQPTARALRRYFDSADHFPQDVAELMRYFAPAVPGQLVQAVPGAGLEVPVWLLGSSLFSARLAAAMGLSFAFASHFAPDAMDEAVAIYRREFRPSAQLAKPHVMLALNVVAAETQAQARRLFTTQQQSFVNLRRGKPGKIPPPIDDIDSFWQPHERVGVERALACTVLGDAEQIARGVAEFIERHTPDELLFTANIYDHAARLRSFEIAAAACRELDVTLV

SEQ ID NO: 153425 - DNA, 1056 bp, Yersinia pestis KIM
  CDS (1)..(1056): transl_table=11
atggacgattctatgattgataacaccggttctgtagtcgataaaaatactgtccccctttctgtgctcgatttatccccgatagcacagggtaaaacagcacgggatgcatttcatgcttcactggatttagcacaacatgctgaaaaatggggatatcagcgctactggctcgctgaacatcacaatatgaccggtatcgccagcgcggcgacgtcggtgctgatcggctatattgcgagtggcacgaataagatccgcgtcggcgctggtggtgtcatgctgccgaaccattcaccgctggtgattgctgagcagttcggtaccctcgcgtcgctctaccctgatcgtatcgatctcggtttgggccgtgcacccggtagcgatcaacgcaccatgatggcattacgtcgccatctctctggtgaagtggataatttcccagccgatgtgcgtgaactgcagaattactttgccgaagtacaaccggggcaagcagtacaagcagtgccaggccaggggctgcatgttccgctgtggctactaggctccagtctgtatagcgcacaactggccgccgcgatgggcctgccgtttgcctttgcctcacatttcgccccagatatgttgttacaggcactctcgctataccgtgagaactttacaccatccgctcaatggccaaagccctatgccattgtctgcgtaaacgtggtcgcggcagatagcgagcgcgatgcacgcttcctgtttacctcaatgcagcaacaatttgtcagcctgcgccgggggacaccgggccagttaccaccgccagtggagaatatggcggcaatttgctcgccagcggaacagtttggtgtcgatcaggcgctgcgcttatccatcgtcggtgataaaagtaaagtacgccatgggcttcagtcattattacgggaaacacaggctgacgaattgatgattaatggccaaatttttgatcatcaagcacggctgtattcctttgaaaccgttgccagcttacagcaagatctgatgcataccccgcgccggtaa

SEQ ID NO: 153426 - protein, 351 aa, Yersinia pestis KIM
MDDSMIDNTGSVVDKNTVPLSVLDLSPIAQGKTARDAFHASLDLAQHAEKWGYQRYWLAEHHNMTGIASAATSVLIGYIASGTNKIRVGAGGVMLPNHSPLVIAEQFGTLASLYPDRIDLGLGRAPGSDQRTMMALRRHLSGEVDNFPADVRELQNYFAEVQPGQAVQAVPGQGLHVPLWLLGSSLYSAQLAAAMGLPFAFASHFAPDMLLQALSLYRENFTPSAQWPKPYAIVCVNVVAADSERDARFLFTSMQQQFVSLRRGTPGQLPPPVENMAAICSPAEQFGVDQALRLSIVGDKSKVRHGLQSLLRETQADELMINGQIFDHQARLYSFETVASLQQDLMHTPRR

SEQ ID NO: 153427 - DNA, 1020 bp, Oceanobacillus iheyensis HTE831
  CDS (1)..(1020): transl_table=11
atgttaacaaacgacaaacacaaaacatttcaaggtataccgctctctgtattagatttagctcctattgttcaaggttctaatgctaaacaagcttttcaagatagcgtgcgtttagcccagcatgtagaaaagctaggatttaatcgttattggctagcagagcatcataatatgcaaggtattggcagttcagcaacctcggttctaataggctatatagcaagccatacgaatcatatgagaattggatctggtggagtaatgttgccaaaccatgctacgcttgtgattgccgagcaattcggaacattagaatcactttatccaggcagaattgaccttggattaggtagagctcccggaagcgatcaagctaccgcttacgcattaagacgaacattacatgcaggtcccgacgagttccctatgcaggtaaatgaactacaagattatttttctaatgatcctgtatcacaagtaaaagcagttcctggtcaaggtttggatattcctatatggctactaggatctagtgactttagtgctcgattagcagctgaaaaaggacttcctttctcgtttgcttctcatttcgcaccacaatacaccgtgccagcgatacagttatataaacgaaatttccaaccttcaaatataatggaaaaaccgtatgcgatggttggaataaatgttattgccgcagataccgatgaagaagcggaatacttagcgaactctcatcgtatgcagtttctaaatttacgcagaggaaaagaatccaaacttcagccacctgtggaaaatatggacaccgtatggactccaatggagaaagctgcagtagaagaatctcttgatcctcgtacaaccataattggcagtaaagaaacaatcaaaaaaggaattgaagcattccaaaaagaaacagacgcagatgagatgataattacctctcaaatttatgatatgaaggctcgccttcgttcgtatgaaattattggagagattatggattaa

SEQ ID NO: 153428 - protein, 339 aa, Oceanobacillus iheyensis HTE831
MLTNDKHKTFQGIPLSVLDLAPIVQGSNAKQAFQDSVRLAQHVEKLGFNRYWLAEHHNMQGIGSSATSVLIGYIASHTNHMRIGSGGVMLPNHATLVIAEQFGTLESLYPGRIDLGLGRAPGSDQATAYALRRTLHAGPDEFPMQVNELQDYFSNDPVSQVKAVPGQGLDIPIWLLGSSDFSARLAAEKGLPFSFASHFAPQYTVPAIQLYKRNFQPSNIMEKPYAMVGINVIAADTDEEAEYLANSHRMQFLNLRRGKESKLQPPVENMDTVWTPMEKAAVEESLDPRTTIIGSKETIKKGIEAFQKETDADEMIITSQIYDMKARLRSYEIIGEIMD

SEQ ID NO: 153429 - DNA, 984 bp, Brucella suis 1330
  CDS (1)..(984): transl_table=11
atgatacctttatccgttcttgacctttcgcccgtttcagaaggcagcgatgcggcccattcgcttcgcaacacgctggagcttgcgcagcacgctgaacggctgggcttccaccgctactggctggcggaacatcacaatatgccgggcatcaccagcgcggctacctcggtcgtaatcggctatgtggccaacggaacctcgaccattcgcgtgggggcgggcggtgtcatgctgccgaaccattcgcctctggtgatcgcggaacagttcgggacacttgcttcgttgtttccgggccgcatcgatcttggccttgggcgcgcaccgggaacagacccagttacggcccatgcgcttcgccgcaatctggacagtgacgccaatgcgtttccgcaggatgtcgtggaactgctcaactatttcaaaccggccgaacccggccagcgggtgcgggccgtgccgggcgaggggttgaacgtgcctgtctggatattgggttccagcctgttcggtgcgcagtttgctgccatgctgggcctgccttacgcctttgcctcgcattttgctccggcggagatggagcgcgccatcgcgctttatcgcgaacgcttcgagccgtccgaatatatgcagaagccttatgtgatgctgggcctcaatgtgattgcagccgacacggacgaggaggcaaattatctgttcacctcgcagttacaggctttcatcaatttgcgcagcggtcgccccagcaagctgcctgcacctgtcgaaggctatatggagcggcttgatccggcagcacaagccctcgtccgccagatgctttcctgccgtgtagttggctggccggagactgtggcgaagggcatcaaggcctttgcggaaaataccggcgcagatgagttgatgattaccggcatgatccacgaccacaaaaagcgtttgcgctcttacgagatcgtcagcaattcgattgcgtga

SEQ ID NO: 153430 - protein, 327 aa, Brucella suis 1330
MIPLSVLDLSPVSEGSDAAHSLRNTLELAQHAERLGFHRYWLAEHHNMPGITSAATSVVIGYVANGTSTIRVGAGGVMLPNHSPLVIAEQFGTLASLFPGRIDLGLGRAPGTDPVTAHALRRNLDSDANAFPQDVVELLNYFKPAEPGQRVRAVPGEGLNVPVWILGSSLFGAQFAAMLGLPYAFASHFAPAEMERAIALYRERFEPSEYMQKPYVMLGLNVIAADTDEEANYLFTSQLQAFINLRSGRPSKLPAPVEGYMERLDPAAQALVRQMLSCRVVGWPETVAKGIKAFAENTGADELMITGMIHDHKKRLRSYEIVSNSIA

SEQ ID NO: 153431 - DNA, 1008 bp, Shigella flexneri 2a str. 301
  CDS (1)..(1008): transl_table=11
atgactgataaaaccattgcgttttcgctactcgatctggcccccatacccgaaggctcttcagcgcgggaagcgttctcccactctctcgatctcgcccgtctggctgaaaagcgcggctatcatcgctactggctggcagaacaccacaatatgaccggcattgccagtgctgcaacatcggtattgattggctatctggcggcgaataccaccacgctgcatctggggtctggcggcgtgatgttgcctaaccacttaccgttggtcattgccgaacagttcggcacactcaatacgctctatccggggcgaatcgatttggggctgggtcgtgctccgggtagtgaccaacggacaatgatggcgctacgtcgtcatatgagcggcgatattgataatttcccccgcgatgtcgcggagctggtggactggtttgacgcccgcgatcccaatccgcatgtgcgcccggtaccaggctatggcgagaaaatccccgtgtggttgttaggctccagcctttacagtgcacaactggcggcgcagcttggtctgccatttgcgtttgcctcacacttcgcgccggatatgttgttccaggcgctgcatctttatcgcagtaacttcaaaccgtcggctcggctggaaaaaccatacgcgatggtgtgcatcaatattatcgccgccgacagcaaccgcgacgctgaatttctgtttacctcaatgcagcaagcctttgtgaagctgcgccgtggcgaaaccgggcaactgccgccgccgattcaaaatatggatcagttctggtcaccgtctgagcagtatgacgtgcagcaggcgctgagtatgtcgttggtaggcgataaagcgaaagtgcgtcatggtttgcagtcgatcctgcgcgaaaccgacgctgatgagattatggttaacgggcagattttcgaccaccaggcgcgcctgcattcgtttgagctggcgatggatgttaaggaagagttgttgggatag

SEQ ID NO: 153432 - protein, 335 aa, Shigella flexneri 2a str. 301
MTDKTIAFSLLDLAPIPEGSSAREAFSHSLDLARLAEKRGYHRYWLAEHHNMTGIASAATSVLIGYLAANTTTLHLGSGGVMLPNHLPLVIAEQFGTLNTLYPGRIDLGLGRAPGSDQRTMMALRRHMSGDIDNFPRDVAELVDWFDARDPNPHVRPVPGYGEKIPVWLLGSSLYSAQLAAQLGLPFAFASHFAPDMLFQALHLYRSNFKPSARLEKPYAMVCINIIAADSNRDAEFLFTSMQQAFVKLRRGETGQLPPPIQNMDQFWSPSEQYDVQQALSMSLVGDKAKVRHGLQSILRETDADEIMVNGQIFDHQARLHSFELAMDVKEELLG

SEQ ID NO: 153433 - DNA, 1041 bp, Corynebacterium efficiens YS-314
  CDS (1)..(1041): transl_table=11
atgacagcacaccccgtccccgttcgcacaaggaaagaaccaatgtcagtaccgttgaacatcctcgacctcgtgtccatctccgagggctccaccgcccgcgatgccatcgcagcctccatggacgccgcccggctcgccgatgaactggggtatcaccggctgtggttcgccgagcaccacaacaccgtgaacctggcctccagtgccaccgcactgctggtcgggcaggcggcctccgtcaccgaccggatccgggtgggctccggtggggtcatgctccccaaccacgccccactgatggtcgccgaacagtacggcaccctggccaacatgttcggcgaccggatcgatctgggtctgggccgcgcaccgggaaccgatgggatgaccgcccaggcactcagccgctcctccgccgaaccgcaggccttcgccgagagcatctatgacctgcagggatggttcagcgaggccggatcctcccacagcatgccgattgtctccgccgcctccgccggtaccgacgtgccgatctgggtactggggtccaccatcaacggcgccgccatcgccggacagctgggcctgccgttctccctcgcctcgcattttgcacccgaccagatcgatcaggccatccgggtctaccgggacaccttctccaccgagatgcccaccgcgcagatagacaagccctacatcatggccggcatcaatgtcctggtcgccgacaccgatgccgaggccgagcgcgaattcaccgtgatccagcagatgttcgccgacatccagaccgggcagcgccggaagctccaacccccggtggatccggcgaccctccccggtggcggtggggcccagtccatgctgcagatccaggcggtgggttcaccgaagacggccaccgcccagctggaggagttcgtggagcgcaccggcgccgatgagctgatcaccgtcacctacgccttcgacccgaaggtgcgggagcgttccctgcagctgctggccgaggcatggttccagggcgggcggtga

SEQ ID NO: 153434 - protein, 346 aa, Corynebacterium efficiens YS-314
MTAHPVPVRTRKEPMSVPLNILDLVSISEGSTARDAIAASMDAARLADELGYHRLWFAEHHNTVNLASSATALLVGQAASVTDRIRVGSGGVMLPNHAPLMVAEQYGTLANMFGDRIDLGLGRAPGTDGMTAQALSRSSAEPQAFAESIYDLQGWFSEAGSSHSMPIVSAASAGTDVPIWVLGSTINGAAIAGQLGLPFSLASHFAPDQIDQAIRVYRDTFSTEMPTAQIDKPYIMAGINVLVADTDAEAEREFTVIQQMFADIQTGQRRKLQPPVDPATLPGGGGAQSMLQIQAVGSPKTATAQLEEFVERTGADELITVTYAFDPKVRERSLQLLAEAWFQGGR

SEQ ID NO: 153435 - DNA, 987 bp, Corynebacterium efficiens YS-314
  CDS (1)..(987): transl_table=11
atgtctgtgccactttcactcatcgactttgccaccatttttgagggtgaacgccccggggacagtttcaaacgttccgtcgccatggcacagaaagcggaggccctgggctttaagcgcatctggtacgccgagcatcacaacatgcccaccatctcctcgtcggctcccgcggtgctcatctcccacatcggtgcgcacaccaacaccatccgcctgggcgcgggtggtgtcatgctgcccaaccactccccctatgtgatcgccgagcagttcggtaccctcgcggagctctacccggaccgcattgatctggggttgggccgtgccccgggcacggatatgaacaccctgcgcgctttgcgacgcgaaccctcctccgcggagtacttcccgcaggatgtcgtcgagctgcagtcctacctggctggccgctcccgtctgcccggtgtggaggccatccccggcaagggcaccaatgtgccgctctacatcctgggttcctccctcttcggcgcccagcttgctgcccagctcggcatgccatactccttcgcctcccacttcgcccccgcccacctggagcaggcggtgtccacctaccgtgagaactaccagccctcggagcaacacccggagccgtatgtcatcgccgcggtcaacgtgaccgccgcagacagcaccgatgttgcccacgagcacttcgccaccgtggcgcgtgcccgggtgcgcagcatggcggcccgcggccgtgcgaccatcaccgatgagcagttggatgccatcatggattccccctcgggtcgccagattgtggacatgctccgctacaccgccatcggcaccggaacggaggtcagggatttcctagaggatttcacacgcacagctcaggccgatgagctcatgatctcgctgcagtcccccggcaccgaggcgacctcgcgcagcatggagattctcgcggaggcatggttccgggcctaa

SEQ ID NO: 153436 - protein, 328 aa, Corynebacterium efficiens YS-314
MSVPLSLIDFATIFEGERPGDSFKRSVAMAQKAEALGFKRIWYAEHHNMPTISSSAPAVLISHIGAHTNTIRLGAGGVMLPNHSPYVIAEQFGTLAELYPDRIDLGLGRAPGTDMNTLRALRREPSSAEYFPQDVVELQSYLAGRSRLPGVEAIPGKGTNVPLYILGSSLFGAQLAAQLGMPYSFASHFAPAHLEQAVSTYRENYQPSEQHPEPYVIAAVNVTAADSTDVAHEHFATVARARVRSMAARGRATITDEQLDAIMDSPSGRQIVDMLRYTAIGTGTEVRDFLEDFTRTAQADELMISLQSPGTEATSRSMEILAEAWFRA

SEQ ID NO: 153437 - DNA, 966 bp, Corynebacterium efficiens YS-314
  CDS (1)..(966): transl_table=11
atggcaaaaccacgattgagcgttctcgacctcgttgccctcagtgagggtatgacggcgggtgaggcgatcgcgcattccgtggaggcggcccaaatcgccgaggcatccgggtatacccgttactggttggcggaacaccacaactcggaggctctggcctcctctgcgaccaccctgctcatgggacatatcgctggtcgcacctcctccatcagggtgggctccgggggcatcatgcttcccaatcactcccctctccatgtcgcggaggaactcggtacccttgatgcgatgtacccggggcggatcgaggcgggtctgggccgggccccgggaaccgatccggccacagcgagggaactcgggcggggaagtgcccatgtcggcgatgtcacggcgtcgataagcgctcttatccggtacctggacgacccggaggggcggccgacggtgatcgcccaccccggccggggatcgaaggtgcccctctacatgcttggttcctccatcaacggggctgcgatggcggcggagctcgggttgccgttcgccttcgccagtcatttcgcgccgttccagatggggccggcgatcgcctcctaccgtgagcgcgcggagaatccgtatgtcatggccgcggcgaatgtcatggttgccgatactgaggaggaggcacgtttccagctgtccaccctgcatcggatgttcgcgggtatcgtcaccaaccagcgttcggctctcgccccgcccgaacatgggctggaggagaagctcggacccatggtgtggaaacacatcacggattccctggagatcactttcgccggcacggccgagcaggtggccgcggatctggaggaattcgcccagcgctatgccctcgatgagatcatcactgtgacgtattccttcgatcccgccgttcggaaggcatccatcgaggcgctcggccgggtgtggtga

SEQ ID NO: 153438 - protein, 321 aa, Corynebacterium efficiens YS-314
MAKPRLSVLDLVALSEGMTAGEAIAHSVEAAQIAEASGYTRYWLAEHHNSEALASSATTLLMGHIAGRTSSIRVGSGGIMLPNHSPLHVAEELGTLDAMYPGRIEAGLGRAPGTDPATARELGRGSAHVGDVTASISALIRYLDDPEGRPTVIAHPGRGSKVPLYMLGSSINGAAMAAELGLPFAFASHFAPFQMGPAIASYRERAENPYVMAAANVMVADTEEEARFQLSTLHRMFAGIVTNQRSALAPPEHGLEEKLGPMVWKHITDSLEITFAGTAEQVAADLEEFAQRYALDEIITVTYSFDPAVRKASIEALGRVW

SEQ ID NO: 153439 - DNA, 1005 bp, Pseudomonas putida KT2440
  CDS (1)..(1005): transl_table=11
atgacgcagctgcgtgacctgaagatttccaccctggacctggtgcccgtacgcgccgacgctggccccgcgcaatcgctgcgcaactcgctggacctggcgcagcatgtcgagcgctttggctataaccgcttctgggtggccgagcaccacaacatggacggcatcgccagttcggcgactgcggtgctgatcggctacctggccggggggacctcacgtattcgcgtgggctctggcggggtgatgctgcccaaccatgcgccactggtgatcgccgagcagttcggcaccttggccagcctgtatccggggcgtatcgaccttggcctgggccgtgcaccgggttcggaccagatgacggcctatgccctgcgacgcgaccgtgccggcggcccggacgacttcccagacgatgtcgaggagctttcgcgctacctcgggccacgcactgatgatcaaaaagtgatcgccgtaccggggtacgacaccgacgtgccgatgtggttgctgggatccagcctgttcagtgcccagctggcgggcatgcgcggcatgccctacgccttcgcctcgcatttcgcgccacgctacatgcacgaggccattcgcgtgtaccgcaaccatttcaagccctcgaccacgctggacaagccgtatgtgatgctgggcattcccatggtggtggcgcagaccgacgagaaggccgaatacctggccacctcggtctaccagcgcatcctggcgctgattcgcggccagagcctgatgcagaagccacccgtggaaagcatggatgggctgtggttgccccatgagcgagagacggtgggcagcttcctggggctggccatgatcggcagcccgcggaaggtaaaggccaaggtagaagtgctgctggaacagacgggtgcggatgagctgatctttacctgtgacctgtatgagcatgcggaccgcattcggtcatatgagctgatggcgcaggccctcaagaccgagtga

SEQ ID NO: 153440 - protein, 334 aa, Pseudomonas putida KT2440
MTQLRDLKISTLDLVPVRADAGPAQSLRNSLDLAQHVERFGYNRFWVAEHHNMDGIASSATAVLIGYLAGGTSRIRVGSGGVMLPNHAPLVIAEQFGTLASLYPGRIDLGLGRAPGSDQMTAYALRRDRAGGPDDFPDDVEELSRYLGPRTDDQKVIAVPGYDTDVPMWLLGSSLFSAQLAGMRGMPYAFASHFAPRYMHEAIRVYRNHFKPSTTLDKPYVMLGIPMVVAQTDEKAEYLATSVYQRILALIRGQSLMQKPPVESMDGLWLPHERETVGSFLGLAMIGSPRKVKAKVEVLLEQTGADELIFTCDLYEHADRIRSYELMAQALKTE

SEQ ID NO: 153441 - DNA, 981 bp, Pseudomonas putida KT2440
  CDS (1)..(981): transl_table=11
atgactgcactgtccgtactggatctggtcatgatcggcgaaggcaagaccttcgccgacgcgatcgaagaatcccgccagctggcgcggcatgtcgagcaacagcactacagccgctactggatcgccgagcaccatgacatgccgggcattggctcggctgccacgtcgctggtgatcaacgaaatcgccaacgccacccgacacattcgtgtgggtgctggcggtatcatgctgcccaaccatgcgccgttggtggtggccgaacagtttggcaccctcaatacattgcacccaggtcgtatcgacctgggcctgggccgtgcgccaggcacgtccgggccgaccgttcgggcattgcgcggcgccgcgccagagcgggatttcggccaggacatcgccgagctgcgtgattacctggccgacaacggcaaacgccgggtgcgcggcgtaccgggtgcgcacgatgtgccggtgtggatcctcggttccagcctgttcggtgctgacctggcggcgaagctgggcctgccttatgccttcgcctcgcactttgccccgcgttacctgctgcaggccattgcccattaccgcgccaacttccagccttccgcgcaactggccaaaccctatgtgatggttggcatgaacctgttcgccgctgccagcgatgctgaggcggactacctggccagctcccaccgcaagtggatgctggacctgcatgtcgggcgctttggcttgctgcccaagccgcaagagggttacctcgaacgcttgccggaccacgagcgcgccgtgctcgatcaggtgatggcctgctccgtagccggagggcccgaacgggtgagggaagggctgcgctcgctgatcgagcagaccggggcggacgagctgatgatcgactgccgcatccatgacccgctggcgcggcagcggtcacatgcctatgccgcgcaggcgctggctgaactgggctga

SEQ ID NO: 153442 - protein, 326 aa, Pseudomonas putida KT2440
MTALSVLDLVMIGEGKTFADAIEESRQLARHVEQQHYSRYWIAEHHDMPGIGSAATSLVINEIANATRHIRVGAGGIMLPNHAPLVVAEQFGTLNTLHPGRIDLGLGRAPGTSGPTVRALRGAAPERDFGQDIAELRDYLADNGKRRVRGVPGAHDVPVWILGSSLFGADLAAKLGLPYAFASHFAPRYLLQAIAHYRANFQPSAQLAKPYVMVGMNLFAAASDAEADYLASSHRKWMLDLHVGRFGLLPKPQEGYLERLPDHERAVLDQVMACSVAGGPERVREGLRSLIEQTGADELMIDCRIHDPLARQRSHAYAAQALAELG

SEQ ID NO: 153443 - DNA, 996 bp, Staphylococcus epidermidis ATCC 12228
  CDS (1)..(996): transl_table=11
atgaaaaatataaaattatctgcgttaaacttagtacctatacgtgaaggtcaagaagataaagatgcaattaacgatatggttacactcgctcaagcattagatgatttagattatgagcgctactggattgcagagcatcataatgctccaaatttagttagttcagctacttctctattaattcaacatacattagaacatactcattctatcaaagtaggttctggaggcataatgttaccgaatcatgcaccactagtcgtagcagaacaatttgggacattggaaacattattccctcaacgtgtggacttaggattaggacgtgctcctggtacagatatgatgacagcgagcgcattaagaagaaatcagcataatggtgtttatcaattccctgaagaagttgaacaactgcaacaatattttggaccgagtcatcaacaagcatatgtacgtgcttatcctgcggtagataaaaatgtcccaatgtatattctaggttcatctacagattctgcacatttagctgcacgtaaagggttaccatatgtttttgcaggacattttgctccacaacaaatgaaggaagcactacaaatttatagagaattatttgaaccttcagaagtacttgataaaccttatgtaattgtttgtttaaatacaattgtgtcagattctgatgaacaagcagaatatttagcaactacgatgtctcaaataatggtaagtataacacgaggaaaaatgcaacctgtccaaccaccaacagatgatttaaaggccctattaacaccacgcgaatatgaattagcacaacaacgtttaaaagggtcacttataggatctgaagatacagttaaacaaaaacttgaatcgttcataaaagagtacggggatatcgatgaacttatggcaattagttatatctatgatcaagacaaacaaatagaatcatatcgaagattagaacgtgcaattaaatcatag

SEQ ID NO: 153444 - protein, 331 aa, Staphylococcus epidermidis ATCC 12228
MKNIKLSALNLVPIREGQEDKDAINDMVTLAQALDDLDYERYWIAEHHNAPNLVSSATSLLIQHTLEHTHSIKVGSGGIMLPNHAPLVVAEQFGTLETLFPQRVDLGLGRAPGTDMMTASALRRNQHNGVYQFPEEVEQLQQYFGPSHQQAYVRAYPAVDKNVPMYILGSSTDSAHLAARKGLPYVFAGHFAPQQMKEALQIYRELFEPSEVLDKPYVIVCLNTIVSDSDEQAEYLATTMSQIMVSITRGKMQPVQPPTDDLKALLTPREYELAQQRLKGSLIGSEDTVKQKLESFIKEYGDIDELMAISYIYDQDKQIESYRRLERAIKS

SEQ ID NO: 153445 - DNA, 1008 bp, Bradyrhizobium japonicum USDA 110
  CDS (1)..(1008): transl_table=11
atgatccccttctccgtgctcgacctcgctcccatccgccagggtggcgacgccgcgcaggcgtttcgcaattcgcttgatcttgcccagcacgccgaggcctggggctacaagcggttctggctggccgagcatcacaacatgacggggattgcgagcgcggcgacgtccgtggtgatcgggcatgtcgcgggcgggacgaagacgatccgtgtcggctccggcggcgtcatgctgccgaaccattcgccgctggtcatcgccgagcagttcggcacgctggagtcgctctatccgggacggatcgatctcgggctcgggcgggcgccgggcaccgaccagttcacagcaagggcgctgcggcgtgacctcgccaccacgtccgagaattttccgcatgacgtgctggaattgcaggcgttgctcggcgatgtgcaaccgaaccagacgatccgcgccgtgcccggcatggggaccaaggtgccgctgtggatcctgggatcgagcacgttcggcgcgcagcttgcggccatgctcggcctgcccttcgccttcgcctcgcatttcgcgccgcagatgatgatgccggcgctgcgcgagtatcgcgcgcgtttcgagccctcggcgcagctcgacaagccctatgcgatggtcggcgtcaacgtgttcgcggcggagagcgacgccgaggcgcaacgcatgttctcctcgctgcagcagcagttcatcaacctgcgccgcggcacgcccggcccgctgccgccgccggtcgacgacatggacgcgctgtggtcgccggcggagaaggccatggtcggccagtcgctgtcctgctccgcggtcggctcgcccaccgtggtcgaagagaagctgaaggcgctgatcgccgagaccggcgcggacgaattgatgaccaccggccagatctacgaccacgccgcccggctgcgctcgttcgagatcgcggccgaggtgcgcggccggctggcggcgcaaccggcccggtga

SEQ ID NO: 153446 - protein, 335 aa, Bradyrhizobium japonicum USDA 110
MIPFSVLDLAPIRQGGDAAQAFRNSLDLAQHAEAWGYKRFWLAEHHNMTGIASAATSVVIGHVAGGTKTIRVGSGGVMLPNHSPLVIAEQFGTLESLYPGRIDLGLGRAPGTDQFTARALRRDLATTSENFPHDVLELQALLGDVQPNQTIRAVPGMGTKVPLWILGSSTFGAQLAAMLGLPFAFASHFAPQMMMPALREYRARFEPSAQLDKPYAMVGVNVFAAESDAEAQRMFSSLQQQFINLRRGTPGPLPPPVDDMDALWSPAEKAMVGQSLSCSAVGSPTVVEEKLKALIAETGADELMTTGQIYDHAARLRSFEIAAEVRGRLAAQPAR

SEQ ID NO: 153447 - DNA, 1014 bp, Bradyrhizobium japonicum USDA 110
  CDS (1)..(1014): transl_table=11
atgatcccgctctcagtccttgacctctccgtcgtcaccacaggcacaaaacccgccgcggcgctgcgcaacagcatcgatctggcgaagcatgtcgatgggctcggctatgtccgctactggctcgccgagcatcacaacctcgcctccgtcgcgagcccggcgcccgacgtgatgatcgggcagatcgcggcggtgacgaagcagatccgcgtcggctccggcggggtaatgctgcccaaccacgcgccgctggtggtggccgagcgcttcaagatgctggaggcgctgtttcccggccgcatcgacctgggcctcggccgcgcgcccggtaccgatggtgccacggcctacgcgctgcgcagccggctcgatcgccgcgagggcgacgattttctggagcggctgcacgaactgatcttgtgggagacgagagaatttccgtcagggcacccctacaacaacgtcgtcgcgatgcccgacgacaccaagctgccgccgatctggctgctcggctccagcgattattcgtcggagcttgccgcgcaagtcggcatgggcttcgccttcgcgcatcattttgcgtcccatgatgcgatcgatgcgatggtgcattaccgcaaccgcttccagccctcggcctggcgcgccacgccgcacgcgatccttgccgtcgccgtcatcgcggcggagaccgacgaggaagctgaaaagctcgcgacatccttcgacctcaatcgcctccgccgcgaccgcggccagtatctgccgctgccgagcgtcgaggaggcgctggcctatccctactccgacgccgagcgcatctcgatcgcccgcaaccgctcgcgcttattcgtcggcagccctgcgaccgtgcagaagaagctccagccgctgatcgattccagcaagccggacgaattgatggtgatcacggcggtgtacgaccacgaggcgcgaaagaagtcgtattcgctgctggcggcggcgttcggattggcgaaggcggcgtaa

SEQ ID NO: 153448 - protein, 337 aa, Bradyrhizobium japonicum USDA 110
MIPLSVLDLSVVTTGTKPAAALRNSIDLAKHVDGLGYVRYWLAEHHNLASVASPAPDVMIGQIAAVTKQIRVGSGGVMLPNHAPLVVAERFKMLEALFPGRIDLGLGRAPGTDGATAYALRSRLDRREGDDFLERLHELILWETREFPSGHPYNNVVAMPDDTKLPPIWLLGSSDYSSELAAQVGMGFAFAHHFASHDAIDAMVHYRNRFQPSAWRATPHAILAVAVIAAETDEEAEKLATSFDLNRLRRDRGQYLPLPSVEEALAYPYSDAERISIARNRSRLFVGSPATVQKKLQPLIDSSKPDELMVITAVYDHEARKKSYSLLAAAFGLAKAA

SEQ ID NO: 153449 - DNA, 1002 bp, Pseudomonas syringae pv. tomato str. DC3000
  CDS (1)..(1002): transl_table=11
atgaaacgtctggcagatgtaaaaatttcgacccttgatctggtgcccgtgcgccacgacaaagggcccgccgaatccctgcgcaattcgctcagcctcgctcagcacgttgaaaagctgggctacaaccgtttttgggtggctgaacaccacaacatggacggcattgcgagttcggcgacctccgtgctgctcgcgtacctggccgggggcacttcaaccattcgtgtgggcgctggcgggatcatgctgcccaatcacgcgccgctggtggttgccgagcagttcggcaccctggccagcctctatcctgatcgaattgatctaggcctgggccgcgcgccgggctccgatcagatgaccgcccgtgccttgcgccgcgagcgctccggcagcgccgaagactttccggatgatgtcactgaactgatggagtacctggggccgcgcacacctgatcaaaaagtgatcgcagtgccgggctccggcaccaatgtgccgatctggttgctgggctcgagcctgttcagcgcgcaattggcgggcatgcgcgggctgccttatgcgttcgcttcgcacttcgcaccgcgttacatgcacgaggccattcgcgtgtaccgcaatcacttccagccctcggccgtgctcgacaagccctacgtgatgctcggggttccgctgtcggcagccgataccgatgagcaggctgaatacctggccacctcggtctaccagcgcattctggcgctgatgcgcgggcacagtctgatgcagcggccaccggtcgattccatggacggcctgtggctgccacacgaacgtgaagcggtggcgagcttcctggggctggcgatggtcggcggcccggagaagatccgcgccaagctggacgtgctgcttgagcagaccgatgccgacgagctgatctttacctgcgacatgtacgagcatgaagacaggctgcggtcctacgagattctcgcgcaggtcgcacacggctag

SEQ ID NO: 153450 - protein, 333 aa, Pseudomonas syringae pv. tomato str. DC3000
MKRLADVKISTLDLVPVRHDKGPAESLRNSLSLAQHVEKLGYNRFWVAEHHNMDGIASSATSVLLAYLAGGTSTIRVGAGGIMLPNHAPLVVAEQFGTLASLYPDRIDLGLGRAPGSDQMTARALRRERSGSAEDFPDDVTELMEYLGPRTPDQKVIAVPGSGTNVPIWLLGSSLFSAQLAGMRGLPYAFASHFAPRYMHEAIRVYRNHFQPSAVLDKPYVMLGVPLSAADTDEQAEYLATSVYQRILALMRGHSLMQRPPVDSMDGLWLPHEREAVASFLGLAMVGGPEKIRAKLDVLLEQTDADELIFTCDMYEHEDRLRSYEILAQVAHG

SEQ ID NO: 153451 - DNA, 1152 bp, Streptomyces avermitilis MA-4680
  CDS (1)..(1152): transl_table=11
atgacggcagacgagacggcaggcgacacgacggccaagacggcggacgagacggcggccgagacggcggacgagatccggggcacggcacagggcaccgcccccgtccccctctccgtactggacctggtcaccgtgggcgcgggccgcaccgccaccgacgccctgcgcaccagcgtccggatctcccgcctcgcggagtcccgcggcttccaccgctactgggtcgccgagcaccactcgatgccgggtgtggcctcgtcctcgcccgccgtgatcctggcccacctcgccgcccacacggaccgtatccggctcggctcgggcggcgtgatgctcccgaaccacgcgcccctcgtcatcgcggagcagttcggcaccctggaggccatggccccgggccgcgtcgacctcggcctcggccgcgcgcccggcacggacggcgcgacggccgccgccctccgccgcaccgaccggctgaacgagggcgccgacgacttccccgagcagctcgccgaactcacccgtttcctggacgacgacttccccgacggccacccctacgcccgtatccacgcggtcccgggcccgatccagtcgacctcgcccggcggcgtccagtccccgcaccgccccccgatctggctgctcgggtcctccggcttcagcgcccgcctcgccggcatcctcggactcccgttcgccttcgcgcaccacttctcggcgcagaacaccgtccccgcgctggacctctaccgcgagtcgttccggccgagcgaggtgctggacgccccgtacgccctgatcggcgtctcggccctggcgaccgacgacgagaaggaggcccgccgccaggtcctggccgcggccctcaacatggtccgcctgcgcaccggccgccccggcctggtcccgaccccggaggaggcggaggcgtacgagttcagtcccatggagcgcgagttcgtcgccacctggaactccaacgtcatccacggcaccgcggacgaggtccgcgccggcctcgacgacctccagaagcgcaccggcgccgacgagttgatgatcacgggcaacgcccacagcggcgacgtacgcctgcgctcgtacgaactgatcgcggacgcctacgggctgcccacggccggctga

SEQ ID NO: 153452 - protein, 383 aa, Streptomyces avermitilis MA-4680
MTADETAGDTTAKTADETAAETADEIRGTAQGTAPVPLSVLDLVTVGAGRTATDALRTSVRISRLAESRGFHRYWVAEHHSMPGVASSSPAVILAHLAAHTDRIRLGSGGVMLPNHAPLVIAEQFGTLEAMAPGRVDLGLGRAPGTDGATAAALRRTDRLNEGADDFPEQLAELTRFLDDDFPDGHPYARIHAVPGPIQSTSPGGVQSPHRPPIWLLGSSGFSARLAGILGLPFAFAHHFSAQNTVPALDLYRESFRPSEVLDAPYALIGVSALATDDEKEARRQVLAAALNMVRLRTGRPGLVPTPEEAEAYEFSPMEREFVATWNSNVIHGTADEVRAGLDDLQKRTGADELMITGNAHSGDVRLRSYELIADAYGLPTAG

SEQ ID NO: 153453 - DNA, 1017 bp, Streptomyces avermitilis MA-4680
  CDS (1)..(1017): transl_table=11
atggacgattcctatactgaccggatgatcaccgttccgctcagcgcgctcgaagtggccatggtccaagcgggcgcccgagccgcagacacgttacgagacaccaccgagttcgccctgcgcctcgaagacctcggctacctgcgactctggtacgccgagcatcaccattccccggccatcggagcgttcccgcccgtcgtcctgaccgcccacgcggccgcgttgacgtcgtccatccggctcggctccgggggcgttctcgctcccaaccacgctccgatcatgctggcggagcagttcggcacgctgtccgcactgcacgcgggccggatcgacctgggcatgggccgtgggccgggtaccttcgacgattccacggcgcgggccctgcgccgtggggccggtccgacaacggacgtcgagtaccgcgacgatgtgtcatcgactctgggtttcttggtggacgaggtcgcgctcggcccgctcccggagccatggctgctgtcctcgagcacggccggtgccgcgctcgctgcggaactcggactgccgatcgccttcgcccatcacattcgccctgacaacaccctggccgcgctcagccactaccgagagcgtttctccccctcccgttggtgcgagcgcccgcgcgtgctgatctgcgtggaaacggtatgcgccgagacgcaggaggaggcggcccggctcgccggtccgatggatgtcgtcaaggccggactcctcaaggggcgaggcgacatccccttccccacgcccgaagaggcggcgacccactcgttcaccgcggaagaggcgcaggcgctgacggccttccgtgcccaacaggcacacggctcacccgagaccgtggcgaagcacctgacggacctggtggacctgacgggtgcggacgaactcatgctggtgacgcccatctacgcgctggccgaccggttgaggtcgtacgagctcgtcaggcagcacgtcatgatgccgacggcgtcctggcaatga

SEQ ID NO: 153454 - protein, 338 aa, Streptomyces avermitilis MA-4680
MDDSYTDRMITVPLSALEVAMVQAGARAADTLRDTTEFALRLEDLGYLRLWYAEHHHSPAIGAFPPVVLTAHAAALTSSIRLGSGGVLAPNHAPIMLAEQFGTLSALHAGRIDLGMGRGPGTFDDSTARALRRGAGPTTDVEYRDDVSSTLGFLVDEVALGPLPEPWLLSSSTAGAALAAELGLPIAFAHHIRPDNTLAALSHYRERFSPSRWCERPRVLICVETVCAETQEEAARLAGPMDVVKAGLLKGRGDIPFPTPEEAATHSFTAEEAQALTAFRAQQAHGSPETVAKHLTDLVDLTGADELMLVTPIYALADRLRSYELVRQHVMMPTASWQ

SEQ ID NO: 153455 - DNA, 1026 bp, Bordetella parapertussis 12822
  CDS (1)..(1026): transl_table=11
atgagtgtattggccagcgtgccgttctcggtcctcgaccttgcccccatcgtgcagggcggcacggccgcgcaggcgtttcgcaacaccgtcgacctggcgcgccacgtcgaaggctggggctatcgccgcttctggctggccgaacaccacaacatcaccggcgtggccagcagcgccacggcggtactgatcggccacgtcgccgcgcataccagcacgctgcgggtgggctcgggcggcgtgatgctgcccaaccacgcgccgctcatcatcgccgagcagttcggcaccctggagagcctgtttcccggccgcatcgacctgggcctgggccgcgcgcccggcagcgacggggccacccagcaggcgctgcggcgcgggccgcgcagcggcctggactttcccgaactgctgcacgagctgcgcgcgtacctcgcgccggcgcggccgggccagccggtgcgcgcgattcccggcgccggcaccgacgtgcccatctggctgctgggctcgagcgatttcagcgcgcggctggccgccgagctgggcctgcccttctcgttcgcgggccacttctcgcccgaaggcatggccgccatgcgcctgtatcggcaactgttcaagccgtcgcagacgctggcgcgcgcccatgccatgataggcgtgccggtggtggcggccgacaccgacgagcaggcgcatttcctgtccaccacccagcaactgaaattcctgtcgctgatccgcggcaaccgcctgccgctgcagccgcccgtggaaagcatggacggcatatggaacgagtgggagcgctccgcggtccaacagagactgggcgcggccatcgttggcggccccgatacggtcaagcgcgaactggagagcctggtcgcgcagacccaggccgacgaggtgatgatcgtttccgatttttacgacttttccgatcggctgcgttcgtacgagatcgtcgcctcgctcaagcaggacgcaggcgtatcgacccgcaccgcgaacgcctga

SEQ ID NO: 153456 - protein, 341 aa, Bordetella parapertussis 12822
MSVLASVPFSVLDLAPIVQGGTAAQAFRNTVDLARHVEGWGYRRFWLAEHHNITGVASSATAVLIGHVAAHTSTLRVGSGGVMLPNHAPLIIAEQFGTLESLFPGRIDLGLGRAPGSDGATQQALRRGPRSGLDFPELLHELRAYLAPARPGQPVRAIPGAGTDVPIWLLGSSDFSARLAAELGLPFSFAGHFSPEGMAAMRLYRQLFKPSQTLARAHAMIGVPVVAADTDEQAHFLSTTQQLKFLSLIRGNRLPLQPPVESMDGIWNEWERSAVQQRLGAAIVGGPDTVKRELESLVAQTQADEVMIVSDFYDFSDRLRSYEIVASLKQDAGVSTRTANA

SEQ ID NO: 153457 - DNA, 972 bp, Bordetella bronchiseptica RB50
  CDS (1)..(972): transl_table=11
atgaccgcgctttccgttctcgatctggtaatgatcggcgaagacaaggacctcgccaccgccatcgaagaatcccggcaacttgcccgccatgtagaccggcatggctacacgcgctactggatcgccgaacaccatgacatgcccggcatcggctcggccgcgacttccctcatcatcgaccagatcgccgccgccacctcgcgcatacgggtgggagcgggcggcatcatgttgcccaaccatgcgcccctggcgatagccgaacagttcggcaccctgaacgccctctatcccggccggatcgacctgggcatggggcgggccccgggcagcgccggcgccgcggtgcgcgcgctgcgccgcggcgcggccgagagcgacttcgccgccgatgtcacggaagtcatggactatctcgccaacaatggccgccagcctgcccgcggcgtgcccggacggcatgacgtaccggtgtggatcctgggttcgagcatgtacggcgcccagctggccgcggcgctgggcctgccctacgcattcgcctcgcatttcgcgccgcggttcctggaccaggccgtcgaccactatcgcaggaacttccgtccctccaggtggctcgcatccccgtacgtgatggtcggcgccaacatcttcgcggcggactcgaacgagcaggcggaatttctggccagttcccaccgccagtggatgctcgacctgcacatggggcgcctcgggctgctgccccgtcccgtgcacggctatgtcgaaggcctgcctgacaacgagcgccgggtgctcgacgaggtgctcgccatgaccgtcgccggcgacaaggcaaaggtcagggcttggatacacagcgtggtggaacggaccggcgccgacgagctgatgatagacagcaggatctacgatccgcacgaaagggccaggtcccacgagtacgtggcgcaggcattgcaatag

SEQ ID NO: 153458 - protein, 323 aa, Bordetella bronchiseptica RB50
MTALSVLDLVMIGEDKDLATAIEESRQLARHVDRHGYTRYWIAEHHDMPGIGSAATSLIIDQIAAATSRIRVGAGGIMLPNHAPLAIAEQFGTLNALYPGRIDLGMGRAPGSAGAAVRALRRGAAESDFAADVTEVMDYLANNGRQPARGVPGRHDVPVWILGSSMYGAQLAAALGLPYAFASHFAPRFLDQAVDHYRRNFRPSRWLASPYVMVGANIFAADSNEQAEFLASSHRQWMLDLHMGRLGLLPRPVHGYVEGLPDNERRVLDEVLAMTVAGDKAKVRAWIHSVVERTGADELMIDSRIYDPHERARSHEYVAQALQ

SEQ ID NO: 153459 - DNA, 1026 bp, Bordetella bronchiseptica RB50
  CDS (1)..(1026): transl_table=11
atgagtgtattggccagcgtgccgttctcggtcctcgaccttgcccccatcgtgcagggcggcacggccgcgcaggcgtttcgcaacaccgtcgacctggcgcgccacgtcgaaggctggggctatcgccgcttctggctggccgaacaccacaacatcaccggcgtggccagcagcgccacggcggtactgatcggccacgtcgccgcacataccagcacgctgcgggtgggctcgggcggcgtgatgctgcccaaccacgcgccgctcatcatcgccgagcagttcggcaccctggagagcctgtttcccggccgcatcgacctgggcctgggccgcgcgcccggcagcgacggggccacccagcaggcgctgcggcgcgggccgcgcagcggcctggactttcccgaactgctgcacgagctgcgcgcgtacctcgcgccggcgcggccgggccagccggtgcgcgcgattcccggcgccggcaccgacgtgcccatctggctgctgggctcgagcgatttcagcgcgcggctggccgccgagctgggcctgcccttctcgttcgcgggccacttctcgcccgaaggcatggccgccatgcgcctgtatcggcaactgttcaagccgtcgcagacgctggcgcgcccccatgccatgataggcgtgccggtggtggcggccgacaccgacgagcaggcgcatttcctgtccaccacccagcaactgaaattcctgtcgctgatccgcggcaaccgcctgccgctgcagccgcccgtggaaagcatggacggcatatggaacgagtgggagcgctccgcggtccaacagagactgggcgcggccatcgttggcggccccgatacggtcaagcgcgaactggagagcctggtcgcgcagacccaggccgacgaggtgatgatcgtttccgatttttacgacttttccgatcggctgcgttcgtacgagatcgtcgcctcgctcaagcaggacgcaggcgtatcgacccgcaccgcgaacgcctga

SEQ ID NO: 153460 - protein, 341 aa, Bordetella bronchiseptica RB50
MSVLASVPFSVLDLAPIVQGGTAAQAFRNTVDLARHVEGWGYRRFWLAEHHNITGVASSATAVLIGHVAAHTSTLRVGSGGVMLPNHAPLIIAEQFGTLESLFPGRIDLGLGRAPGSDGATQQALRRGPRSGLDFPELLHELRAYLAPARPGQPVRAIPGAGTDVPIWLLGSSDFSARLAAELGLPFSFAGHFSPEGMAAMRLYRQLFKPSQTLARPHAMIGVPVVAADTDEQAHFLSTTQQLKFLSLIRGNRLPLQPPVESMDGIWNEWERSAVQQRLGAAIVGGPDTVKRELESLVAQTQADEVMIVSDFYDFSDRLRSYEIVASLKQDAGVSTRTANA

SEQ ID NO: 153461 - DNA, 1032 bp, Chromobacterium violaceum ATCC 12472
  CDS (1)..(1032): transl_table=11
atgaccccttccccatccccgcgcctctccatgctggagctggcgcccatcgtcgccggcggcgacgccgcccaggcgctgcgcaacagcgcggccctggcccgccatgtcgagcaactgggctacacccgcttctgggtggccgagcaccacaatatggccggcgtggccagctccgccaccgcggtgctgatcggccacatcgccgcccacacccagcgcatacgcgtcggctccggcggcatcatgctgcccaaccacgcgccgctggtggtggccgagcagttcggcacgctggcgacgctgttccccggccgcatcgacctgggcctgggccgcgcgcccgggaccgatccgctcaccgcccgcgcgctgcgccgcgaccggctgggcgccggcgacgacttcccgcagcaggtcgccgagctgcgcggctacctggggccggaacaagctggccaagcggtgcgcgccattcccggaaccggcaccgacgtgccggtatggctgctgggctccagcctctacggcgcccagctggccgcgcagctgggcctgcccttcgccttcgccgcccacttcgccccggcccagctgcatcaggcgctgaaactgtaccgccagttgttccagccctcccctgcgctgagccagccgtacgcgatggcctgcatcccggtgctggccgcggacagcgaggagaaagcccagcgcctcgccaccacgccgtaccagaaattccttaacctgatccgcggcgaccgccgcccgctgccgccgccggtggacagcatggacggcctgtggagcccgcgcgaggaattcgccgtcctgggcgaatggctgggcgcggcggtgttcggcgggccggagacggtgcaggccgggctgcaaaagctgctggacgagaccggcgtggacgagatcatgctgtcggtcgactgccacgacttttccgaccggctgcgctgctgcgagatcgtcgccgacctgctgccgcggctgagcgcggccaagactgcgccggcctga

SEQ ID NO: 153462 - protein, 343 aa, Chromobacterium violaceum ATCC 12472
MTPSPSPRLSMLELAPIVAGGDAAQALRNSAALARHVEQLGYTRFWVAEHHNMAGVASSATAVLIGHIAAHTQRIRVGSGGIMLPNHAPLVVAEQFGTLATLFPGRIDLGLGRAPGTDPLTARALRRDRLGAGDDFPQQVAELRGYLGPEQAGQAVRAIPGTGTDVPVWLLGSSLYGAQLAAQLGLPFAFAAHFAPAQLHQALKLYRQLFQPSPALSQPYAMACIPVLAADSEEKAQRLATTPYQKFLNLIRGDRRPLPPPVDSMDGLWSPREEFAVLGEWLGAAVFGGPETVQAGLQKLLDETGVDEIMLSVDCHDFSDRLRCCEIVADLLPRLSAAKTAPA

SEQ ID NO: 153463 - DNA, 954 bp, Corynebacterium diphtheriae NCTC 13129
  CDS (1)..(954): transl_table=11
atgaagctgtcgctcatcgacttcgccacaatctaccacggcgagcgcccacgcgacagcttccaacgctccgtcgccctcgcacagcaagctgaggcgacgggtttttcgcgtgtgtggtacgccgagcatcacaacatgcctacgatttcttcctccgcccccgcagtgctcatctcgcacgtgggggctcacacatctacgatccgactcggcgcaggcggcgtcatgctccccaaccactccccctacaccatcgctgagcaattcggcacgctcgcagagctctacccaggccgcatcgatcttggcttaggtcgcgcgcctggcacggatcacaccaccctagcccaagcgttacgacgctccccgcacgccgcacaatctttccccgaagacgtagttgagctgtatcagtacctcaacggcacatccagcattgctgcgatccccggcgcgggaacaaacgtcccactctatattttgggctcctcactcttcggtgctcatctggcagcaaaacttggtctaccttttggttttgcttcccacttcgcaccgacgcaccttgatgcggcaattcgcacataccgcgacaattttgtgccctcccaagagttggatgcaccctatgttattgcggccgtcaacgtcgttgcagcagacacgttatcgcaggcacacgaacagttggaggaagtgaaacggcatcgtcttcgggcggggagaaatctcagcgacgaccaactccacattttgatgaataccgtcgcaggccagcgcattgaccagatgttgaaatacaccgcaataggaaatggtgaggtagtacgtgactacctcaccaagtttcagcgccattgtggggctgatgagctcatggtgtctttgttatccacttcgtgggaggacaccatgcgggctgtggaaattaccagtcttcttgtgtcttag

SEQ ID NO: 153464 - protein, 317 aa, Corynebacterium diphtheriae NCTC 13129
MKLSLIDFATIYHGERPRDSFQRSVALAQQAEATGFSRVWYAEHHNMPTISSSAPAVLISHVGAHTSTIRLGAGGVMLPNHSPYTIAEQFGTLAELYPGRIDLGLGRAPGTDHTTLAQALRRSPHAAQSFPEDVVELYQYLNGTSSIAAIPGAGTNVPLYILGSSLFGAHLAAKLGLPFGFASHFAPTHLDAAIRTYRDNFVPSQELDAPYVIAAVNVVAADTLSQAHEQLEEVKRHRLRAGRNLSDDQLHILMNTVAGQRIDQMLKYTAIGNGEVVRDYLTKFQRHCGADELMVSLLSTSWEDTMRAVEITSLLVS

SEQ ID NO: 153465 - DNA, 1017 bp, Rhodopseudomonas palustris CGA009
  CDS (1)..(1017): transl_table=11
atgttgccactctcgatcctcgatctgtccgtcgtcaccaccggcacaccgccggcggcgtcattgcgcaactcgatcgaccttgcgcgccacgcggattcgctgggctatgtgcgctactggctggccgagcatcacaatcttccctcggtcgccagtcccgcgcccgaaatcatgattgggcagatcgcggcggtgaccgaacgcattcgcgtcggctccggtggcgtgatgctgccgaaccacgcgccgctggtcgtggcggaacgcttcaagatgcttgaagcgctgttccccggtcggatcgatctcggtatcggccgcgcaccgggcaccgaccaggcgacgatgcacgcgttgcgccgccggctcgatggccgtgagggcgacgattttctggagcggctgcaagagctgacgctgtgggagacgcgcggctttccgccgggtcatccgtacaacaacgtcgtcgcgatgcccgacgatacgccgctgccgccgatctggctgctcggctccagcgactacagttccgagctcgccgcgcaggtcggtatgggcttcgcgttcgcgcaccacttcgcctcgcacgatgcggtcgaggcactgacgcattatcgcagtaacttccgtccgacgcgctggcggtcgacgccacacggtattttagccgtcgccgccgttgtcgccgccaccgatgaggacgcggagcggctggcgagttcgatggatctcagtcgcctgctacgcgaccgtggccgctacgtgccgctgccaagtgtcgaggaagctctgtcttattcgtacactgaagccgaccgtgcctcgatcgcgcgcaatcgctcgcggctgttcgtcggcagtccggcgacggttcggcaggcgctgcagccgctgattaccgcaagccgcgccgacgagctgatggtgatcaccgcggtgtatgaccacgatgcgcgcaagcgttcctacagcttgctggccgacgcgttcgagctgcagaaggtggcagcttag

SEQ ID NO: 153466 - protein, 338 aa, Rhodopseudomonas palustris CGA009
MLPLSILDLSVVTTGTPPAASLRNSIDLARHADSLGYVRYWLAEHHNLPSVASPAPEIMIGQIAAVTERIRVGSGGVMLPNHAPLVVAERFKMLEALFPGRIDLGIGRAPGTDQATMHALRRRLDGREGDDFLERLQELTLWETRGFPPGHPYNNVVAMPDDTPLPPIWLLGSSDYSSELAAQVGMGFAFAHHFASHDAVEALTHYRSNFRPTRWRSTPHGILAVAAVVAATDEDAERLASSMDLSRLLRDRGRYVPLPSVEEALSYSYTEADRASIARNRSRLFVGSPATVRQALQPLITASRADELMVITAVYDHDARKRSYSLLADAFELQKVAA

SEQ ID NO: 153467 - DNA, 1011 bp, Bdellovibrio bacteriovorus HD100
  CDS (1)..(1011): transl_table=11
atgtctgatactaaaaagctttctgaaattcagctctctgtcctggaccttgcgcccatcatcgacggtaaatccgtcgcggactcttttcacaacactctggatctggctcagcacacagaaaagtggggatacaaccgctattggctggccgaacatcacaacctggatggtatcgccagttctgcgacctctgtgctgattgggtatgtggcaggcgggaccaaaaccatccgcgtgggctctggcggcgtgatgctgccgaatcatgcgccgctggtcatcgccgaacagttcggcacgcttgcgcatttatacccgggtcgcattgacctggggttgggacgtgcccccggcacggatcgtctgaccatgcacgctttacggcgcgatatgcagggaaatgaaaacgacttcccggaaaatgtgcgcgagctgatcggatacttcgcaaaaagccatggacatgaacgtgtgcgcgccatcccggcaatgggaaccgaagttccggtgtggctgttagggtccagcctttacagtgctcaactggcggcagtcatggggcttccttattcctttgccgaccacttcgccccggaacaaatggaagaggcgattcatgtctaccgctcgggtttccaggcttcacggtatttaaagaaaccttatgtgatggtgggcttgcaggttgtcgccgccgacaccagtgaaaaagcccagcgcctggctaccaccttgtatctgcgatttttgggaattattcgcaatcagcgcgtgaatctgctgcccccagtaagcagtatggagcagatctggcgaccaggggaaaaagaaattgtcttaagcaaattaagcaacgccatcatcggcgacaaagacgaagtcaaagccggcctggagcgatttatccagcgcaccggggctgatgaggtgatgattttgtctgatatgtacgatcacgctgatcgcctgcgctcttttgaactgaccgctgaagtctggaaaagctag

SEQ ID NO: 153468 - protein, 336 aa, Bdellovibrio bacteriovorus HD100
MSDTKKLSEIQLSVLDLAPIIDGKSVADSFHNTLDLAQHTEKWGYNRYWLAEHHNLDGIASSATSVLIGYVAGGTKTIRVGSGGVMLPNHAPLVIAEQFGTLAHLYPGRIDLGLGRAPGTDRLTMHALRRDMQGNENDFPENVRELIGYFAKSHGHERVRAIPAMGTEVPVWLLGSSLYSAQLAAVMGLPYSFADHFAPEQMEEAIHVYRSGFQASRYLKKPYVMVGLQVVAADTSEKAQRLATTLYLRFLGIIRNQRVNLLPPVSSMEQIWRPGEKEIVLSKLSNAIIGDKDEVKAGLERFIQRTGADEVMILSDMYDHADRLRSFELTAEVWKS

SEQ ID NO: 153469 - DNA, 1002 bp, Herminiimonas arsenicoxydans
  CDS (1)..(1002)
atgaaatccttgaaaaacacgcccctatccgttctcgatttatcgccgattctggtggatggcacgccggccgacgccttccatcgttcgctcgatctggcgcagcgcgtagagaagcggggctataaccgctactggctggccgagcatcacagcatgccgggcattgcgagtgctgcaaccgcggttgtgatcggctatgtggccggcggcacttcgacaatacgcgtcggctccggcggcatcatgttgccgaatcatgcgccgctggtggtggccgaacagttcggtacgctggaatcgctgtaccccggacgcatcgatctggggctgggccgtgcgcccggttcggatcaggcgactgcgcgcgcattgcggcgcgagatcagcgatgacggcagcgaatttccgcgtcagctgaatgagttgcgtgcattcctgcagccggcagacactcatgcccgagtgcaggcaattcccggcgccgggctgaatattccaatctggttattgggctccagcagctatagcgcgcaactggccggttatctgggtttgccgtttgcatttgcgggccagttttcgcccgactacatgctgaccgcgctggagctgtacagacaaaccttcaggccatcgcaggctttggataaaccgtatgcgatggtgggcgtgaatatctttgccgccgacaccgatgaagaagcacagcatcttgccacctcgcagcagcaaatgcatttggatctggtgcgcggcacaccgggaaaattgccgccgccgatagagaatatggacgatgtatggctgccgcatgaacgggcctcggttgaatcgatgttgcgcgcttccatcatcggtaatgcggcgaccgtgcaacagaaattgcaggcatttctggatgccacgcatgccgatgaaatcatcatcaatacgatgatcttcgatcatgccgcgcgtgtacgttcgtatgaaatcgtcgccgatgtctggcaggcataa

SEQ ID NO: 153470 - protein, 333 aa, Herminiimonas arsenicoxydans
MKSLKNTPLSVLDLSPILVDGTPADAFHRSLDLAQRVEKRGYNRYWLAEHHSMPGIASAATAVVIGYVAGGTSTIRVGSGGIMLPNHAPLVVAEQFGTLESLYPGRIDLGLGRAPGSDQATARALRREISDDGSEFPRQLNELRAFLQPADTHARVQAIPGAGLNIPIWLLGSSSYSAQLAGYLGLPFAFAGQFSPDYMLTALELYRQTFRPSQALDKPYAMVGVNIFAADTDEEAQHLATSQQQMHLDLVRGTPGKLPPPIENMDDVWLPHERASVESMLRASIIGNAATVQQKLQAFLDATHADEIIINTMIFDHAARVRSYEIVADVWQA

SEQ ID NO: 153471 - DNA, 999 bp, Burkholderia vietnamiensis G4
  CDS (1)..(999): transl_table=11
atgattccgttttccgtactcgacctcgcccccatccccgaaggcgccgacgccgcgcaggcattccgcaacaccgtcgatctggcgcagcatgcggaacgcctcggctaccgccgctactggctcgccgagcaccacaacatgccgggtatcgcgagcgcggcgaccgccgtcgtgatcggccacgtggcgggcgcgacgcagacgatccgcgtcggctcgggcgggatcatgctgccgaaccacgcgccgctcgtgatcgccgagcagttcggcacgctggcgtcgctgtaccccggccgcatcgacctcgggctcggccgcgcgcccggcaccgaccagaccacgtcgcgcgcgctgcggcgtgacctgatcggcagcgccgattcctttccggacgacgtcgccgagctgcagcgctacttcgcggcgccggtgcccggccagcgcgtgcgggcggtgcccggcgcggggctcgacgtgccgatctggctgctcggctcgagcctgttcagcgcgcagctcgccgcgatgctcggcttgccgttcgcattcgcatcgcactttgcgccggactatctgatgcgcgcgctcgaactctatcgcgcgcaataccgcccgtcggccgcgtggccgaagccgtatgcgatggtcggcgtgaacgtgttcgccgccgataccgacgaagaagcacggcgcctcttcacgtcgctgcagcagcagttcatcaacctgcgccgcggcacgccgggcaagctgccgccgccggtcgacgcgctcgaggccagcgaattcgaactcgcgaacgtcgcgcatgcgctgtcgttcgcggccgtcggctcgcgcgacacggtgcgcgaccagttacgcgaccggatcgcgcagacgggtgcggacgagctgatcgtcaccgcccagatctacgatcacgcggcgcggctgcgctcgttcgagctggccgcgcagatccgcgacgagctggcgagcgaaacgcgctga

SEQ ID NO: 153472 - protein, 332 aa, Burkholderia vietnamiensis G4
MIPFSVLDLAPIPEGADAAQAFRNTVDLAQHAERLGYRRYWLAEHHNMPGIASAATAVVIGHVAGATQTIRVGSGGIMLPNHAPLVIAEQFGTLASLYPGRIDLGLGRAPGTDQTTSRALRRDLIGSADSFPDDVAELQRYFAAPVPGQRVRAVPGAGLDVPIWLLGSSLFSAQLAAMLGLPFAFASHFAPDYLMRALELYRAQYRPSAAWPKPYAMVGVNVFAADTDEEARRLFTSLQQQFINLRRGTPGKLPPPVDALEASEFELANVAHALSFAAVGSRDTVRDQLRDRIAQTGADELIVTAQIYDHAARLRSFELAAQIRDELASETR

SEQ ID NO: 153473 - DNA, 1008 bp, Klebsiella pneumoniae subsp. pneumoniae MGH 78578
  CDS (1)..(1008): transl_table=11
atgactgacaaatctgttccattctcggtgctcgatctggcgccgatcccgcaaggatcttctgccaaagaagcctttacccactctctggatctcgcccggctggccgaatcgcgcggctatcatcgctactggctggcggagcaccataatatggtcggcattgccagcgcagcgacctcggtgctgattggctatctcgccgccaacaccaccaccctgcatctcgggtccggcggcgtgatgctgcctaaccactctccactggtgatagctgagcagttcggcaccctgaacaccctttaccccgggcggatcgacctcggccttggccgcgcgccgggcagcgatcagccgaccatgcgcgccctgcgtcgccatatgagcggcgatgtcgataatttcccgcgcgatgtagcggaactggtggactggtttgacgcccgcgatccgaacccgcacgtgcgcccggttcccggctacggggagcgcattccagtatggctgctgggctcaagcctctatagcgcgcaactggcggcgcagctcggcctgccgtttgccttcgcctcgcacttcgcgccggatatgttgttccaggccctacatctgtatcgcagcaatttcaaaccttcggcgcggctggaaaaaccgtacgcgatggtgtgtatcaatatcatcgccgccgacagcaaccgcgatgcggagtttctcttcacctccatgcagcaggcgtttgtgaagctgcgtcgcggcgagaccgggcagttgccgccgccggtggaaaatatgcatcagctgtggtcagcgtccgagcagtatggtgtgcagcaggcactgagcatgtcgctggtcggcgataaaactaaagtccgccatgggctagagtcgattctgcgtgaaaccgaggcggacgaaatcatggtcaatggccagatcttcgaccaccaggcgcgtctgcattctttcgatttagcgatgcaggtgaaagaggagctgttggggtaa

SEQ ID NO: 153474 - protein, 335 aa, Klebsiella pneumoniae subsp. pneumoniae MGH 78578
MTDKSVPFSVLDLAPIPQGSSAKEAFTHSLDLARLAESRGYHRYWLAEHHNMVGIASAATSVLIGYLAANTTTLHLGSGGVMLPNHSPLVIAEQFGTLNTLYPGRIDLGLGRAPGSDQPTMRALRRHMSGDVDNFPRDVAELVDWFDARDPNPHVRPVPGYGERIPVWLLGSSLYSAQLAAQLGLPFAFASHFAPDMLFQALHLYRSNFKPSARLEKPYAMVCINIIAADSNRDAEFLFTSMQQAFVKLRRGETGQLPPPVENMHQLWSASEQYGVQQALSMSLVGDKTKVRHGLESILRETEADEIMVNGQIFDHQARLHSFDLAMQVKEELLG

SEQ ID NO: 153475 - DNA, 1041 bp, Kineococcus radiotolerans SRS30216
  CDS (1)..(1041): transl_table=11
atggtgaacgtcccgctgtcggtcctggacctctcccccaccacctccgggtcgcccgcgtcggcggcgctgcgccgcagcgtcgagctggcccgggacgtggaggcgctgggctaccagcggtactggctggccgagcaccacggggtggcgagcaccgccagctcgaacccggtggtgctgatcgcgacgatcgcggcggccacgagcacgctgcgggtgggggcggggggcgtcatgctgcccaaccactccccgctggcggtggcggagagcttccgggccctggagggtctgcacccgggccgcatcgacctcggcctcggccgggcggtggggaccgacgggcgcaccgcgctggccctgcagcgctcccgccaggcgctggccctggacgacttcgaggagcagctcgccgagctgcacggctacgtcgacggcttcccgcccgggcacccgttcgccggggtccgggcccagcccgacgacgtcccgctgccgccggtgtggctgctgggttccagcgagcacggttcggccctcgccgcgcggctgggcacgggctacgcctacgcggggcacttcggctcggccgagccggtgcaggtgctgcgctcctaccgcgagggcttcgtcccctcgccgcggtggccgcgcccgcacgcggtgctgacgatggcggtgctggtcgcggagaccgccgaacgggcccgggcgctggcggcggccgcgacgctggccacggtgcgcctgcgcctgggcgccccggggccgctgcccagccccgaggaggccgcggcccaccgctggacgctggcggagcgcaacaccgccggccggctggggtcgcggctggtggcggggacgccggcggaggtcgtgccccggctgcgggacctggtgcagcgcaccggcgccgacgagctgatggtgctcacccaggtgcacgacccggccgagcggcggctgtcccacgcgctgctggccgaggggtggggtctgggggcggaccgcctcgacgcgagccgctccgcccgctga

SEQ ID NO: 153476 - protein, 346 aa, Kineococcus radiotolerans SRS30216
MVNVPLSVLDLSPTTSGSPASAALRRSVELARDVEALGYQRYWLAEHHGVASTASSNPVVLIATIAAATSTLRVGAGGVMLPNHSPLAVAESFRALEGLHPGRIDLGLGRAVGTDGRTALALQRSRQALALDDFEEQLAELHGYVDGFPPGHPFAGVRAQPDDVPLPPVWLLGSSEHGSALAARLGTGYAYAGHFGSAEPVQVLRSYREGFVPSPRWPRPHAVLTMAVLVAETAERARALAAAATLATVRLRLGAPGPLPSPEEAAAHRWTLAERNTAGRLGSRLVAGTPAEVVPRLRDLVQRTGADELMVLTQVHDPAERRLSHALLAEGWGLGADRLDASRSAR

SEQ ID NO: 153477 - DNA, 990 bp, Kineococcus radiotolerans SRS30216
  CDS (1)..(990): transl_table=11
atgtcgctcgccctctcgatcctggacctcgcccccatcgccccgggggagtccgcgggcgacagcatcgccgccagcgtcgcgctcgcgcggaccgcggaggagcacggctaccggcgggtctggtacgccgagcaccacaacatggcgacgatcgcgtcctcggcgccggcggtgctcatcgcccacgtgggggcgaagacgagcaccatccggctcggggcgggcggggtcatgctgcccaaccactccccgctgtccatcgccgagcagttcggcactttggaggcgatgtaccccgggcgcatcgacctcggcctgggccgcgcgccgggttcggacgaggccacgacgtacgcgctgcggcgcgacccggccgcctcggcgcagttccccgaggacgtcgcggagctgcgcgcctacttcgccgggcggtcccgcgtgcccggcgtcgacgccgtgcccggttccgggtcgaaggtcccgctgtacgtgctgggttcctcgacgttcggcgcgcacctggccgccgccctcggcctgccctacgccttcgcctcgcacttcgccccgcagcagctcggggcggccgtcgccgcgtaccgcgcggagttccgcccctccgagcagctcgccgaaccccacgtcatcgtgggggtgaacgtcgtcgccgccgacacgaccgacacggcccgtgaggcgttcgggcaggtgcagcgccggttcgcgacgtcgctgttcgggcgcgggcgcacgttcaccgaggccgaggtcgacatcctcatggagaccgccgcggggcagcacgtgcggcagatgcaggcgtactccgccgtcggcaccccgcgcgaggtccgcacctacctcgacgagttcgccgcctccaccggcgccgacgagctcatcgtggcccaccaggccctcagcacccccgcgcggttgcggtcggtgaccctgctggccgaggcgatggagaccgtcgccgcctga

SEQ ID NO: 153478 - protein, 329 aa, Kineococcus radiotolerans SRS30216
MSLALSILDLAPIAPGESAGDSIAASVALARTAEEHGYRRVWYAEHHNMATIASSAPAVLIAHVGAKTSTIRLGAGGVMLPNHSPLSIAEQFGTLEAMYPGRIDLGLGRAPGSDEATTYALRRDPAASAQFPEDVAELRAYFAGRSRVPGVDAVPGSGSKVPLYVLGSSTFGAHLAAALGLPYAFASHFAPQQLGAAVAAYRAEFRPSEQLAEPHVIVGVNVVAADTTDTAREAFGQVQRRFATSLFGRGRTFTEAEVDILMETAAGQHVRQMQAYSAVGTPREVRTYLDEFAASTGADELIVAHQALSTPARLRSVTLLAEAMETVAA

SEQ ID NO: 153479 - DNA, 1011 bp, Xanthobacter autotrophicus Py2
  CDS (1)..(1011): transl_table=11
atggtgcagctttccattctcgatctggtgcgggtgcggcaggggtccagcccccgcgatgccctcgacaatgcccgcgatctggcggcccacgcggaagagtggggctatcgccgcttctgggtggccgagcatcacaacatgcagggcatcgccagcgccgcgacctccgtggtcatcgcccatgtggccgccggctcccgccacatccgggtgggggcggggggcatcatgctgcccaaccacgcgcccatggtcatcgccgagcagttcggcacgctggcgcaactgttccccggccgcatcgacctcggcctcggccgcgcgccgggcaccgaccagaacaccatgcgggcgctgcgccgctcgctgaccaattccgaccatttccccaatgacgtgatcgagcttcaggcctatctgggcgatgccgagccgggccagtccctgttcgcggtgccggccaccggcaccaacgtgcccctgtggatcctcggatcgagtacgtatggggcgcagctggcggcggcgctgggcctgccctatgcgttcgcctcccatttcgcgccggcggacctgatcccggcgctggagctgtatcgtgcccgcttccagccctcggcgcagctttcccggccctatgccatggccggcctcaacgtgatcgccgccgagacggacgaggaggcgcgccacctcgccaccacccagcagatgtcggtggcggacattttccgtggcgcccgcggcctcagccagccgcctatcgccgatatcgagacctattggtcccccatggagaaggcgcaggccgcccgcttcctctcccgctccgtggtgggcagtccgcagaccgtgcgcgccggcatcgaggccttcgtggccgagaccttggtggacgaggtgatgatcgtgtccgacgtgttcgaccaccacaagcgcctcgcctcctatcgcatgatcgccgacgcggtaccccacgccgccgactgggaaaaatcggcggcgtga

SEQ ID NO: 153480 - protein, 336 aa, Xanthobacter autotrophicus Py2
MVQLSILDLVRVRQGSSPRDALDNARDLAAHAEEWGYRRFWVAEHHNMQGIASAATSVVIAHVAAGSRHIRVGAGGIMLPNHAPMVIAEQFGTLAQLFPGRIDLGLGRAPGTDQNTMRALRRSLTNSDHFPNDVIELQAYLGDAEPGQSLFAVPATGTNVPLWILGSSTYGAQLAAALGLPYAFASHFAPADLIPALELYRARFQPSAQLSRPYAMAGLNVIAAETDEEARHLATTQQMSVADIFRGARGLSQPPIADIETYWSPMEKAQAARFLSRSVVGSPQTVRAGIEAFVAETLVDEVMIVSDVFDHHKRLASYRMIADAVPHAADWEKSAA

SEQ ID NO: 153481 - DNA, 996 bp, Listeria monocytogenes str. 4b F2365
  CDS (1)..(996): transl_table=11
atgacgattcgattcagtattttggaccaaagtattataaatccaggcgaaaaacctagtgaagctttgcaaaataccgtagaacttgcgcaactcgcagaacaactcggctatcatcgtttctgggttgccgagcatcataattcagacgaaatagctggtgcagctccggaagttcttttagggtatattgctgcaaaaacgagcacaatcaagcttgcatctggcggaataatgctacaacattatagtccatataaagtcgctgaacaatttcatgtgcttgaaaacttagcgccgggtcggatgtcacttggcgtcggaaaagcgccaggcggatttcaaccagcaaccgatgcccttcaaaaagacttcgtaaaacctacgcgaacctttgatgccaaattgaaagaactagtcgattttgtaacccatcattcagaggtggctattgcagcaaaaccacttccagaaaacaaaccagagatatttttgcttggaggaagtgcagctagcgcgaaacaagctgccaaactaggtatttcctttgtgtttgcttattttataaatggagaagaagctgttttaaaagaagcacgcgagctatttgaacagtaccgaataaacacaaaagctagtttccaactagcaccaattgttgtagtagctgagactaaaatcgcagcagaccgacatattccagagcgagagtcaatcaaagtcgagcttgcggatggacgtagagttaatgtcggatcgcgcgaacaagcggaatcctacgtaaaagatatcaaccaaacataccggtttattacccaaagaattggtgcaataacaggaaccaaacaagaagtcggagcagagattaaacgcctttcaaaagaatataatatccaagattttgttgttttaacaccagttaaatctacggaaatcaagcgatactcgtaccaattattaagtgaatcgataaaggaggaagttgtccatggctaa

SEQ ID NO: 153482 - protein, 331 aa, Listeria monocytogenes str. 4b F2365
MTIRFSILDQSIINPGEKPSEALQNTVELAQLAEQLGYHRFWVAEHHNSDEIAGAAPEVLLGYIAAKTSTIKLASGGIMLQHYSPYKVAEQFHVLENLAPGRMSLGVGKAPGGFQPATDALQKDFVKPTRTFDAKLKELVDFVTHHSEVAIAAKPLPENKPEIFLLGGSAASAKQAAKLGISFVFAYFINGEEAVLKEARELFEQYRINTKASFQLAPIVVVAETKIAADRHIPERESIKVELADGRRVNVGSREQAESYVKDINQTYRFITQRIGAITGTKQEVGAEIKRLSKEYNIQDFVVLTPVKSTEIKRYSYQLLSESIKEEVVHG

SEQ ID NO: 153483 - DNA, 1014 bp, Staphylococcus aureus subsp. aureus MRSA252
  CDS (1)..(1014): transl_table=11
atggcgattaaatattcagcattaaaccttgtccctattcgagaaggtgaagatgaacgaacagcaattaatgatatggttaagctcgcacaacatttagacgaattatcatatgaaagatattggattgctgaacaccataacgctcccaacctagtaagttcagcaactgctttattaattcaacatacgttagaacatacgaaacacatacgtgtaggttctggaggaatcatgttacctaaccatgctccattaatcgttgcggaacaatttggcacgatggcaacattatttccaaatcgtgtcgatttaggattaggacgtgcacctggaacagatatgatgaccgcaagtgcattaagacgagatcaacatgatggtgtttataaatttccggaagaagtttcattattacaacaatatttcggccccgctcaccaacaagcatatgttcgtgcttatccagcagtaggtaaaaatgtgcctttatatattcttggttcttcaacagattctgcacatttagctgctcgcaaagggcttccatatgtgttcgctggacattttgcacctcaacaaatgaaagaagctatcgaaatctacaaaacgttatttgaaccttctgatgtattagacgaaccttatgttattgtatgtttaaatacaatcgttgctgaaaatgatgacgaagcacaatatttagcttcatctatggcacaagtaatggttagtatcactcgtggcagaatgcagcccgttcaaccgccaacacatgaactgcaaaatatattaacgccgagagaatatgcgatggctatggaaagacagaaaatatcattaataggttcagaaaatactgttcaacaaaaaattcaagattttatggaaacttatggtgaagtcaacgaaattatggctataagttatatttatgataaagatatgcaattagactcttatcgtcgattcaaaaatgttataaatcagttaaatgaaaaaaacactttataa

SEQ ID NO: 153484 - protein, 337 aa, Staphylococcus aureus subsp. aureus MRSA252
MAIKYSALNLVPIREGEDERTAINDMVKLAQHLDELSYERYWIAEHHNAPNLVSSATALLIQHTLEHTKHIRVGSGGIMLPNHAPLIVAEQFGTMATLFPNRVDLGLGRAPGTDMMTASALRRDQHDGVYKFPEEVSLLQQYFGPAHQQAYVRAYPAVGKNVPLYILGSSTDSAHLAARKGLPYVFAGHFAPQQMKEAIEIYKTLFEPSDVLDEPYVIVCLNTIVAENDDEAQYLASSMAQVMVSITRGRMQPVQPPTHELQNILTPREYAMAMERQKISLIGSENTVQQKIQDFMETYGEVNEIMAISYIYDKDMQLDSYRRFKNVINQLNEKNTL

SEQ ID NO: 153485 - DNA, 1014 bp, Staphylococcus aureus subsp. aureus MSSA476
  CDS (1)..(1014): transl_table=11
atggcgattaaatattcagcattaaaccttgtccctattcgagaaggtgaagatgaacgaacagcaattaatgatatggttaagctcgcacaacatttagacgaattatcatatgaaagatattggattgctgaacaccataacgctcccaacctagtaagttcagcgactgctttattgattcaacatacgttagaacatacgaaacacatacgtgtaggttctggaggaatcatgttacctaaccatgctccattaatcgttgcggaacaatttggcacgatggcaacattatttccaaatcgtgtcgatttaggattaggacgtgcacctggaacagatatgatgaccgcaagtgcattaagacgagatcaacatgatggtgtttataaatttccggaagaagtttcattattacaacaatatttcggtcccgctcaccaacaagcatatgttcgtgcttatccagcagtaggtaaaaatgtgcctttatatattcttggttcttcaacagattctgcacatttagctgctcgtaaagggcttccatatgtgttcgctggacattttgcacctcaacaaatgaaagaagctatcgaaatttacaaaacgttatttgaaccttctgatgtattagacgaaccttatgttattgtatgtttaaatacaatcgttgctgaaaatgatgacgaagcacaatatttagcttcatctatggcacaagtaatggttagtatcactcgtggcagaatgcagcccgttcaaccgccaacacatgaactacaaaatatattaacgccgagagaatatgcgatggctatggaaagacagaaaatatcattaataggttcagaaaatactgttcaacaaaaaattcaagattttatggaaacttatggtgaagtcaacgaaattatggcaataagttatatttatgataaagatatgcaattagactcttatcgtcggttcaagaatgttataaatcagataaatgaaaaaaacactttataa

SEQ ID NO: 153486 - protein, 337 aa, Staphylococcus aureus subsp. aureus MSSA476
MAIKYSALNLVPIREGEDERTAINDMVKLAQHLDELSYERYWIAEHHNAPNLVSSATALLIQHTLEHTKHIRVGSGGIMLPNHAPLIVAEQFGTMATLFPNRVDLGLGRAPGTDMMTASALRRDQHDGVYKFPEEVSLLQQYFGPAHQQAYVRAYPAVGKNVPLYILGSSTDSAHLAARKGLPYVFAGHFAPQQMKEAIEIYKTLFEPSDVLDEPYVIVCLNTIVAENDDEAQYLASSMAQVMVSITRGRMQPVQPPTHELQNILTPREYAMAMERQKISLIGSENTVQQKIQDFMETYGEVNEIMAISYIYDKDMQLDSYRRFKNVINQINEKNTL

SEQ ID NO: 153487 - DNA, 1023 bp, Acinetobacter sp. ADP1
  CDS (1)..(1023): transl_table=11
atgagagtcaatatgtctgtggcaacgctcaaagatacgcacttttcaattcttgaactggcgcccgttcgtgatgatcaaacgattcaattttctttacatcatgccttagaacttgcaaaacatgcagaacaactggggtatcgacgcttgtggctggcagaacatcataatatggatggaattgcgagctccgctacggctgttttacttggatatcttgcggcaaatacccagcacctacgcttaggctctggcggagtcatgctaccaaatcatgcacctttagttgtggcagaacaatttggaacattagcaacgctctatcctcatcgaattgaacttggtttaggtcgcgcaccaggaacagatcaggtgaccatgcgagcactacgacgaggtcgacaagaaacagaggatcaatttccacaggacgtgttagaaatcttaaaatattttgatgatcctgagccacatcaaaagattgttgcaacaccaggtcatggaacacatgtgccagtgtggctcttaggttcgagtctattcagtgcacaactggctgccaaacttggacttccctattcatttgcttcacattttgcgccacgtatgctgtcccaggcagtacagctttaccgtgaaaattttcaagcttctaaatatttagagcagccttatgtatcgattggcgttcccactgtagtcgcaccaacagatgaagaagcacattttctagcgaccagcgcttatcaacgggtactggggttaatgcgtgggcaaagtctaaagttaaaaccacccgtaaaatccatggaacacatatggagtgcatctgaaaaactttcagtgaataacttttatgcgatggcgcaagttggttcacctgcgactgttaaagctggcctggaagatttacttgaacatgtaaaggttgatgaatttatttttacctgtgatatttatgatactcaaaaacgcttagaaaattttagttatttgatggatatcaagaacgcactttaa

SEQ ID NO: 153488 - protein, 340 aa, Acinetobacter sp. ADP1
MRVNMSVATLKDTHFSILELAPVRDDQTIQFSLHHALELAKHAEQLGYRRLWLAEHHNMDGIASSATAVLLGYLAANTQHLRLGSGGVMLPNHAPLVVAEQFGTLATLYPHRIELGLGRAPGTDQVTMRALRRGRQETEDQFPQDVLEILKYFDDPEPHQKIVATPGHGTHVPVWLLGSSLFSAQLAAKLGLPYSFASHFAPRMLSQAVQLYRENFQASKYLEQPYVSIGVPTVVAPTDEEAHFLATSAYQRVLGLMRGQSLKLKPPVKSMEHIWSASEKLSVNNFYAMAQVGSPATVKAGLEDLLEHVKVDEFIFTCDIYDTQKRLENFSYLMDIKNAL

SEQ ID NO: 153489 - DNA, 1056 bp, Yersinia pseudotuberculosis IP 32953
  CDS (1)..(1056): transl_table=11
atggacgattctatgattgataacaccggttctgtagtcgataaaaatactgtccccctttctgtgctcgatttatccccgatagcacagggtaaaacagcacgggatgcatttcatgcttcactggatttagcacaacatgctgaaaaatggggatatcagcgctactggctcgctgaacatcacaatatgaccggtatcgccagcgcggcgacgtcggtgctgatcggctatattgcgggtggcacgaataagatccgcgtcggcgctggtggtgtcatgctgccgaaccattcaccgctggtgattgctgagcagttcggtaccctcgcgtcgctctaccctgatcgtatcgatctcggtttgggccgtgcacccggtagcgatcaacgcactatgatggcgttacgtcgccatctctctggtgaagtggataacttcccagccgatgtgcgtgaactgcagaattactttgccgaagtacaaccggggcaagcagtacaagcagtgccaggccaggggctgcatgttccgctgtggctgctaggctccagtctgtatagcgcacaactggccgccgcgatgggcctgccgtttgcctttgcctcacatttcgccccagatatgttgttacaggcactctcgctataccgtgagaactttacaccatccgctcaatggccaaagccctatgccattgtctgcgtaaacgtggtcgcggcagatagcgagcgcgatgcacgcttcctgtttacctcaatgcagcaacaatttgtcagcctgcgccgggggacaccgggccagttaccgccgccagtggagaatatggcggcaatttgctcgccagcggaacagtttggtgtcgatcaggcgctgcgcttatccatcgtcggtgataaaagtaaagtacgccatgggcttcagtcattattacgggaaacacaggctgacgaattgatgattaatggccaaatttttgatcatcaagcacggctgtattcctttaaaaccgttgccagcttacagcaagatctgatgcatactccgcgccggtaa

SEQ ID NO: 153490 - protein, 351 aa, Yersinia pseudotuberculosis IP 32953
MDDSMIDNTGSVVDKNTVPLSVLDLSPIAQGKTARDAFHASLDLAQHAEKWGYQRYWLAEHHNMTGIASAATSVLIGYIAGGTNKIRVGAGGVMLPNHSPLVIAEQFGTLASLYPDRIDLGLGRAPGSDQRTMMALRRHLSGEVDNFPADVRELQNYFAEVQPGQAVQAVPGQGLHVPLWLLGSSLYSAQLAAAMGLPFAFASHFAPDMLLQALSLYRENFTPSAQWPKPYAIVCVNVVAADSERDARFLFTSMQQQFVSLRRGTPGQLPPPVENMAAICSPAEQFGVDQALRLSIVGDKSKVRHGLQSLLRETQADELMINGQIFDHQARLYSFKTVASLQQDLMHTPRR

SEQ ID NO: 153491 - DNA, 1014 bp, Symbiobacterium thermophilum IAM 14863
  CDS (1)..(1014): transl_table=11
atgcagggcatgaagctctcgattctggatctgtcgcccattccgtcagggtctaccgccagtcaggccctgcagaacaccctggagctcgcccagctggccgaccggctgggctacgagcgttactggctggcggagcatcacaacaccgccgccatcgccagcgtggcgccggagatcatgatcggccaggtggcccgggtcacccgtcgcatccgcgtcggcgcagggggcatcatgctgcccaaccatgcccccctgaaggtggccgaggccttcctcaccctggaggcgctgttccccggccggatcgacctgggcatcggccgggccccgggtacggaccccgtgaccgcccgcgccctgcggcggacggcctccctgggggcagaggacttccccgaacagctggccgacctgttccacttcgcccggggggacttcccggagggccaccccttccgcagcgtgcaggccacgccgccgggcgtgccgctgccgccggtctggctgctgggctccagcgattacagcgcccggctggccgcccggctggggctggctttcagctttgccgcccacttcagccccttcgacccggtgctgccgatgcggctgtaccgggcgcagttccgtccgtccgagcaccgggcggagccccacgcgattctggcggtcgcagccatctgcgccgacacccgggcggaggccgagcggctggcccgggccctggacctcttctggctgcagatccgccgcggggaacggcgaccgctgccgagcccggaggaggccgaggcctacccgtggacggcggaggagctggccgccgtgcaggagcaccggcgcttgctcttcctgggcgaacccgacgaggtcgccgccgggatccggtcgctggcgctggcgacccaggccgacgaggtcatggtggtttcccacatccacgaccaccggcagcggctgcgttcctacgaactgttggccgaggccttcgcgctggaccgtacctga

SEQ ID NO: 153492 - protein, 337 aa, Symbiobacterium thermophilum IAM 14863
MQGMKLSILDLSPIPSGSTASQALQNTLELAQLADRLGYERYWLAEHHNTAAIASVAPEIMIGQVARVTRRIRVGAGGIMLPNHAPLKVAEAFLTLEALFPGRIDLGIGRAPGTDPVTARALRRTASLGAEDFPEQLADLFHFARGDFPEGHPFRSVQATPPGVPLPPVWLLGSSDYSARLAARLGLAFSFAAHFSPFDPVLPMRLYRAQFRPSEHRAEPHAILAVAAICADTRAEAERLARALDLFWLQIRRGERRPLPSPEEAEAYPWTAEELAAVQEHRRLLFLGEPDEVAAGIRSLALATQADEVMVVSHIHDHRQRLRSYELLAEAFALDRT

SEQ ID NO: 153493 - DNA, 1038 bp, Mannheimia succiniciproducens MBEL55E
  CDS (1)..(1038): transl_table=11
atgaaactatccattctcaacttagtccccgttcgtgaagggcaaaattatcaacaggcaatggcgtcaatggtgacccttgcgcaatatgcggagcaaatcggtatcgaacgttactggattgccgaacatcacaacaccaaaaatcttgccagttccgccaccgctttactgattcagcatacgctggcgcataccgaaaccttgcgggtcggttccggcggggtgatgttgccaaatcacagcccctatattgtggcggaacagtacggcacgctggaaactctttatccgaaccgcgtagagcttggcttagggcgcgcacccggtacggatatgcgcactgcttatgcactgcgtaaagggcgtgaacattcagatttcccgacggaaattgccgaattgcgcggatactttgaaaatacgaatccggtatcagcctatcctgcggcgggcttgaaggtgccgttttatattctcggttccagcaccgaaagcgcttatttggcggccgaactgggtttgccttatgcttttgcctcgcattttgctcctagaatgatggaaatggcggtagaaatttatcgcaaacaattcaagccctcaccacatttagcggcaccttatgtgatattaggggtgaacgcgattgtcgcgcaaaccgatgagcaagctcggcaattagccacaactcaaacccaatttttcttaaatgtggtcaccaacgcccagcaaaacctgcaaccgccgttggcttccgccgatgatgtgtggaaacggcacctgagcgcacaattcccgccgcatttcggcccggtagattttcaagaaatcccgctgtataaccaagaacgcgccgtggtcgaacagatgactgcctgttctctgattggcagctctgcaagtgtgacacatcaactgaatactttacgcgatcaagtccactttgatgaaatcatggcggttagctatatttttgacgaacagctacaacggctgtcttataagatgttgaaagagattgtggataagatataa

SEQ ID NO: 153494 - protein, 345 aa, Mannheimia succiniciproducens MBEL55E
MKLSILNLVPVREGQNYQQAMASMVTLAQYAEQIGIERYWIAEHHNTKNLASSATALLIQHTLAHTETLRVGSGGVMLPNHSPYIVAEQYGTLETLYPNRVELGLGRAPGTDMRTAYALRKGREHSDFPTEIAELRGYFENTNPVSAYPAAGLKVPFYILGSSTESAYLAAELGLPYAFASHFAPRMMEMAVEIYRKQFKPSPHLAAPYVILGVNAIVAQTDEQARQLATTQTQFFLNVVTNAQQNLQPPLASADDVWKRHLSAQFPPHFGPVDFQEIPLYNQERAVVEQMTACSLIGSSASVTHQLNTLRDQVHFDEIMAVSYIFDEQLQRLSYKMLKEIVDKI

SEQ ID NO: 153495 - DNA, 1005 bp, Silicibacter pomeroyi DSS-3
  CDS (1)..(1005): transl_table=11
ttgaccccggacccgacccgcatgctctattccctgctcgaccttgccccggtgcccgagggcagcgacattcccgaggcgctggccaacagcgccgatctggccgcccatgccgaggccttgggctatcaccgctactggctggccgagcatcacaacatgcccggcatcgccagcgccgcaaccgcggtgctgatcggccatatcgccagccggaccagcaccatgcggatcggcgcgggcggcatcatgctgcccaaccatgcgccctacatggtggccgaagcctttggcactctggcgtcgctttatggcgaccgcatcgacctgggccttggccgggcgccgggcaccgacatggccaccgcgcgcgcgctgcgccggggtctgtcacaacaggacagtttcccgcaggatgtgatcgagctgatcggctttctcggccccgaggatccagaggcgcgggtgcgcgcctttcccggccagaacacccatgtgccggtctggatcctggggtccagcctctatggtgcgcaactggccgcgcagttgggcctgccttacgcctttgcctcgcatttcgcgccgcaggcgctggaggaagcgctgcaggtctatcgccgcagcttccgcccctcggtctatctgggccaacctcatgcgatgatggcaatcaatgtctttgccgccgaaaccgatgccgagggggtgcgcctgcgcaccaccatgcaacaggcctttgcccgcctcaggttggggcggcccggcaagctgccggcaccggttgacgatatcgccgcccatctggatcgcgccacgctggccggggtgaatgccgcgctcagcgtctcggcagtgggcagccccgagacggtgcgcgccgatctgacccacgtcatcgaccgttatcaacccgacgaagtgatcctgaccgggcaaatccacgatcacaccgcgcgcaaacgctcgttcgagatcgcggccgggatcctgcgctcactctga

SEQ ID NO: 153496 - protein, 334 aa, Silicibacter pomeroyi DSS-3
MTPDPTRMLYSLLDLAPVPEGSDIPEALANSADLAAHAEALGYHRYWLAEHHNMPGIASAATAVLIGHIASRTSTMRIGAGGIMLPNHAPYMVAEAFGTLASLYGDRIDLGLGRAPGTDMATARALRRGLSQQDSFPQDVIELIGFLGPEDPEARVRAFPGQNTHVPVWILGSSLYGAQLAAQLGLPYAFASHFAPQALEEALQVYRRSFRPSVYLGQPHAMMAINVFAAETDAEGVRLRTTMQQAFARLRLGRPGKLPAPVDDIAAHLDRATLAGVNAALSVSAVGSPETVRADLTHVIDRYQPDEVILTGQIHDHTARKRSFEIAAGILRSL

SEQ ID NO: 153497 - DNA, 999 bp, Bacillus clausii KSM-K16
  CDS (1)..(999): transl_table=11
atgaaaacaagtgtgacattatcggttttaaacttggctcctgtccgcgaaggattgggcgtgagcgacgcgctaaggcaatcaatcaaattagcccagaaaatagaagaattcggctaccaccggttttgggtggcagagcaccataatatgccagggattgcaagctctgctacggctgtacttattgggcaaattgcaggagccacgaaagcgattcgtgtcggttctggcgggatcatgcttccgaaccatgccccactcacgattgcagaacaatttggaacgttaaacgccctttacccagggcgcattgacttaggccttggacgtgcgccagggaccgaccagctaacggcccatgcgcttagacgccacggccaagatgcaaatgactttcctgagcttgtagaagagctgcaagcgtatttccaaccagaaagcacgacaaaacgcgtccgcgcttatccaggagaaggagaaaatattcccatttggttgcttggttccagtgggtttagtgctaggcttgcaggtgaaatggggttgccgtttgcttttgctggccacttcgcacctcaacatatgatgccagcattaatggtttataaagaatcctttaaaccttctgctgtattggctgaaccatacagcatggtggcggttaacgcgattgttgcggaaacagccaaagaggcagaagtgcttgcttcgagtctgtaccagcagtttttggcgatgatccgcaaccggccaggcaagctgaaacctgctgtagaaaatatcgatgacatatggacaccttacgaaaaacaaatggtgatggaacaattaggtggctcttttattggcacagctgctgatgtccacgaccggttgctgcgatttgccgaaaaaacagaaacaaacgagttcatgttgcatagcactatttacgatgagcagaaacaatatgaatcgtttcgtctccttgctgagcaatttgggctcctttcctaa

SEQ ID NO: 153498 - protein, 332 aa, Bacillus clausii KSM-K16
MKTSVTLSVLNLAPVREGLGVSDALRQSIKLAQKIEEFGYHRFWVAEHHNMPGIASSATAVLIGQIAGATKAIRVGSGGIMLPNHAPLTIAEQFGTLNALYPGRIDLGLGRAPGTDQLTAHALRRHGQDANDFPELVEELQAYFQPESTTKRVRAYPGEGENIPIWLLGSSGFSARLAGEMGLPFAFAGHFAPQHMMPALMVYKESFKPSAVLAEPYSMVAVNAIVAETAKEAEVLASSLYQQFLAMIRNRPGKLKPAVENIDDIWTPYEKQMVMEQLGGSFIGTAADVHDRLLRFAEKTETNEFMLHSTIYDEQKQYESFRLLAEQFGLLS

SEQ ID NO: 153499 - DNA, 1014 bp, Staphylococcus aureus subsp. aureus COL
  CDS (1)..(1014): transl_table=11
atggcgattaaatattcagcattaaaccttgtccctattcgagaaggtgaagatgaacaaacagcaattaatgatatggttaatctcgcacaacatttagacgaattatcatatgaaagatattggattgctgaacaccataacgctcccaacctagtaagttcagcaactgctttattaattcaacatacgttagaacatacgaaacacatacgtgtaggttctggaggcatcatgttacctaatcatgctccattaatcgttgcggaacaatttggcacgatggcaacattatttccaaatcgtgtcgatttaggattaggacgtgcacctggaacagatatgatgaccgcaagtgcattaagacgagatcaacatgatggtgtttataaatttccagaagaggtttcattattacaacaatatttcggccctgctcaccaacaagcatatgttcgtgcttatccagcagtaggtaaaaatgtgcctttatacattcttggttcttcaacagattctgcacatttagctgctcgcaaagggcttccatatgtgttcgctggacattttgcacctcaacaaatgaaagaagctatcgaaatttacaaaacgttatttgaaccttctgatgtattagacgaaccttatgttattgtatgtttaaatacaatcgttgctgaaaatgatgacgaagcacaatatttagcttcatctatggcacaagtaatggttagtatcactcgtggcagaatgcagcccgttcaaccgccaacacatgaactacaaaatatattaacgccgagagaatacgcgatggctatggaaagacagaaaatatcattaataggttcagaaaatactgttcaacaaaaaattcaagattttatggaaacttatggtgaagtcaacgaaattatggcaataagttatatttatgataaagatatgcaattagactcttatcgtcggttcaagaatgttataaatcagataaatgaaaaaaacactttataa

SEQ ID NO: 153500 - protein, 337 aa, Staphylococcus aureus subsp. aureus COL
MAIKYSALNLVPIREGEDEQTAINDMVNLAQHLDELSYERYWIAEHHNAPNLVSSATALLIQHTLEHTKHIRVGSGGIMLPNHAPLIVAEQFGTMATLFPNRVDLGLGRAPGTDMMTASALRRDQHDGVYKFPEEVSLLQQYFGPAHQQAYVRAYPAVGKNVPLYILGSSTDSAHLAARKGLPYVFAGHFAPQQMKEAIEIYKTLFEPSDVLDEPYVIVCLNTIVAENDDEAQYLASSMAQVMVSITRGRMQPVQPPTHELQNILTPREYAMAMERQKISLIGSENTVQQKIQDFMETYGEVNEIMAISYIYDKDMQLDSYRRFKNVINQINEKNTL

SEQ ID NO: 153501 - DNA, 996 bp, Staphylococcus epidermidis RP62A
  CDS (1)..(996): transl_table=11
atgaaaaatataaaattatctgcgttaaacttagtacctatacgtgaaggtcaagaagataaagatgcaattaacgatatggttacactcgctcaagcattagatgatttagattatgagcgctactggattgcagagcatcataatgctccaaatttagttagttcagctacttctctattaattcaacatacattagaacatactcattctatcaaagtaggttctggaggcataatgttaccgaatcatgcaccactagtcgtagcagaacaatttgggacattggaaacattattccctcaacgtgtggacttaggattaggacgtgctcctggtacagatatgatgacagcgagcgcattaagaagagatcagcataatggtgtttatcaattccctgaagaagttgaacaactgcaacaatattttggaccgagtcatcaacaagcatatgtacgtgcttatcctgcggtagataaaaatgtcccaatgtatattctaggttcatctacagattctgcacatttagctgcacgtaaagggttaccatatgtttttgcaggacattttgctccacaacaaatgaaggaagcactacaaatttatagagaattatttgaaccttcagaagtacttgataaaccttatgtaattgtttgtttaaatacaattgtgtcagattctgatgaacaagcagaatatttagcaactacgatgtctcaaataatggtaagtataacacgaggaaaaatgcaacctgtccaaccaccaacagatgatttaaaggccctattaacaccacgcgaatatgaattagcacaacaacgtttaaaagggtcacttataggatctgaagatacagttaaacaaaaacttgaatcgttcataaaagagtacggggatatcgatgaacttatggcaattagttatatctatgatcaagacaaacaaatagaatcatatcgaagattagaacgtgcaattaaatcatag

SEQ ID NO: 153502 - protein, 331 aa, Staphylococcus epidermidis RP62A
MKNIKLSALNLVPIREGQEDKDAINDMVTLAQALDDLDYERYWIAEHHNAPNLVSSATSLLIQHTLEHTHSIKVGSGGIMLPNHAPLVVAEQFGTLETLFPQRVDLGLGRAPGTDMMTASALRRDQHNGVYQFPEEVEQLQQYFGPSHQQAYVRAYPAVDKNVPMYILGSSTDSAHLAARKGLPYVFAGHFAPQQMKEALQIYRELFEPSEVLDKPYVIVCLNTIVSDSDEQAEYLATTMSQIMVSITRGKMQPVQPPTDDLKALLTPREYELAQQRLKGSLIGSEDTVKQKLESFIKEYGDIDELMAISYIYDQDKQIESYRRLERAIKS

SEQ ID NO: 153503 - DNA, 954 bp, Corynebacterium glutamicum ATCC 13032
  CDS (1)..(954): transl_table=11
ttgagcgtgcttgatctcgtcgcgctgagtgaagggatgacggccggcgaggccattgcacacagtgttcgcgctgcgcagatcgccgaagagcacaattatgcgcgtttctgggtggcggagcaccacaactcggaaggcttggcatcttccgcgacgacgctgctcatgggtcatattgcaggccacacttcacgcattcgcgttggctccggtggcatcatgatgcccaaccactccgcgctgcacgtcgccgaagaactcggcacccttgaggccatttaccccggccgcatcgaggccggcctagggcgcgcaccaggaaccgaccccatgacggcgcgggaattgggtcgggcaagttcgcttgtcgacgacgtcctctccacaatcgtctccctccagaattatttggacacccccgaagaacgcccgaacatcatcgcgcatccaggaataaattcccgtgtgccgctattcatgctgggatcttccctcaacggcgctgcgatggccgctaaattagaccttccattcgccttcgccagccacttcgcacccttccaaatggggcccgccatcgcctcctatcgcgaactagcagccaatccttatgtcatggccgcagcgaatgtcctggtgtgcgacaccgaggaagaagccgaattccagatctccacactgcaccaaatgttcgccggaatcgtgacgaactcccgcggcaaacttgccccaccagtgcggaatctgaaagacaaactcgacccgatgatctggaaacacatcgaagattcattggaaatgactttcatcggaacagccgaatcagtggtattacaactgcaggaattcgctgatcgctacaagttagatgagatcattacagtcacctactcctacgaccccgaagtcaggttccgctccatagctgcacttggcacggcatggaattag

SEQ ID NO: 153504 - protein, 317 aa, Corynebacterium glutamicum ATCC 13032
MSVLDLVALSEGMTAGEAIAHSVRAAQIAEEHNYARFWVAEHHNSEGLASSATTLLMGHIAGHTSRIRVGSGGIMMPNHSALHVAEELGTLEAIYPGRIEAGLGRAPGTDPMTARELGRASSLVDDVLSTIVSLQNYLDTPEERPNIIAHPGINSRVPLFMLGSSLNGAAMAAKLDLPFAFASHFAPFQMGPAIASYRELAANPYVMAAANVLVCDTEEEAEFQISTLHQMFAGIVTNSRGKLAPPVRNLKDKLDPMIWKHIEDSLEMTFIGTAESVVLQLQEFADRYKLDEIITVTYSYDPEVRFRSIAALGTAWN

SEQ ID NO: 153505 - DNA, 1002 bp, Pseudomonas fluorescens Pf-5
  CDS (1)..(1002): transl_table=11
atgaaaccgctgtccgctgttaaatactcgaccctcgacctggtgcccgtgcgtgaaaacggcagcccggggcagtccctgcgcaactccctggacttggcgcagcatgtggagaagctcggttacacgcgcttctgggtcgccgagcaccacaacatggacggtatcgccagttccgctacctcggtgctgatcggctacctggcgggcggtacttcgaccattcgtgtcggttccggcggggtcatgctgcccaaccacgcgcccctggtgatcgccgaacagttcggcaccctggaaagcctgtacccggggcgcatcgacctgggactgggccgcgccccgggttccgaccagatgaccgcccgcgccctgcgccgggaacgttccggcagcgccgacgatttccctgaggacgtggccgaactgatggcctacctgggcccgcgtacccccgaacaacgggtgatcgccatgccgggcaccggcaccaacgtgccggtatggctactgggctccagcctgttcagtgcacaactggccggggaacggggcttgccttacgccttcgcctcgcatttcgcaccgcgctacatgcacgaggcgattcgcgtctaccgcaaccacttcaagccttcggcggtgctcgacaagccctatgtgatgcttggcgtgccgctggtggcagccgacaccgatgaacaggccgattacctggcgacttcggtgtaccagcgcatcctggcgctgatgcgtggccagagcctggtccagcgcaaaccggtgcaaagcatggacggcctgtggctaccccatgagaaggaagcggtcgccagcttcctcggcctggcgatggtcggcagcccggcgaaaatccgcgccaagctgcaggtgctgatcgagcagaccggagccgatgagctgatcttcacctgcgatctgtacgaacacgccgatcggctgcactcctacgagctgctgtcacaggtaatgaaaggctga

SEQ ID NO: 153506 - protein, 333 aa, Pseudomonas fluorescens Pf-5
MKPLSAVKYSTLDLVPVRENGSPGQSLRNSLDLAQHVEKLGYTRFWVAEHHNMDGIASSATSVLIGYLAGGTSTIRVGSGGVMLPNHAPLVIAEQFGTLESLYPGRIDLGLGRAPGSDQMTARALRRERSGSADDFPEDVAELMAYLGPRTPEQRVIAMPGTGTNVPVWLLGSSLFSAQLAGERGLPYAFASHFAPRYMHEAIRVYRNHFKPSAVLDKPYVMLGVPLVAADTDEQADYLATSVYQRILALMRGQSLVQRKPVQSMDGLWLPHEKEAVASFLGLAMVGSPAKIRAKLQVLIEQTGADELIFTCDLYEHADRLHSYELLSQVMKG

SEQ ID NO: 153507 - DNA, 1020 bp, Psychrobacter arcticus 273-4
  CDS (1)..(1020): transl_table=11
atgagtaaccctattcccttatctttcttagatttagcccctgttcctgagggtaaaactattgctgaaggcattgcccaaacggttgaaaccgcgcagcaagctgaaaaatctggcttaaaccgttactggatggcagagcatcataatatgcccggtatcgctagtgcagcgacgtcggtactactgtcgcatattggtgctcagaccaagcgtatacgtattggcgcaggcggcgtcatgctgcccaatcatgcaccgcttgttatcgcagagcagtttggtactttgcaagcattatatggcgaccgcatagatttggggttgggtcgtgcgcccggtacagatggtgcaacttttcaagcattacgtcgtcagatgcaagatgccgatcgctttccacaagatgtgcaagagttgatgtactttttggggaatggcacagatgatagcccagtacaggcatttccgggtgcaaaatctaacattcctatttggatattaggttcgtctctttttggtgcgaccttagcagcgcacttaggattgccatatgtgtttgcctcgcactttgcaccgcaaatgcttggacaagccattacagcttatcgtgagcaatttagaccatcggcctatttagataagccttatgtcatgctagcggcaaatttattgcttgctgatgatgatgcgacggcgcagtatcactttacttcagcccagcagagttttgtgcgtttacgccgtggtgaaacaggtcaaatgccaaagcctactcatgatatggatagtatctggaacgctgctgagaaaatgatggtggatagtgcgttgtcggtatcctttatcggctctgttgaaaccgtcaaaccaaagcttgcgacgtttcttgctacctatcagccagatgagctgattgtgacagcaaacgtttatgaccaagcagcacgtatgcgctcgcttgagcttgtctctgagcttaatttgtttgatttacaaccaacagcaacgcttgcataa

SEQ ID NO: 153508 - protein, 339 aa, Psychrobacter arcticus 273-4
MSNPIPLSFLDLAPVPEGKTIAEGIAQTVETAQQAEKSGLNRYWMAEHHNMPGIASAATSVLLSHIGAQTKRIRIGAGGVMLPNHAPLVIAEQFGTLQALYGDRIDLGLGRAPGTDGATFQALRRQMQDADRFPQDVQELMYFLGNGTDDSPVQAFPGAKSNIPIWILGSSLFGATLAAHLGLPYVFASHFAPQMLGQAITAYREQFRPSAYLDKPYVMLAANLLLADDDATAQYHFTSAQQSFVRLRRGETGQMPKPTHDMDSIWNAAEKMMVDSALSVSFIGSVETVKPKLATFLATYQPDELIVTANVYDQAARMRSLELVSELNLFDLQPTATLA

SEQ ID NO: 153509 - DNA, 1002 bp, Pseudomonas syringae pv. phaseolicola 1448A
  CDS (1)..(1002): transl_table=11
atgaaacgtctggcagatgtaaaaatttccacccttgatctggtgccggtgcgccacgacaaagggcccgccgattccctgcgcaactcgctcaaccttgcccagcatgttgaaaagctgggttacaaccgcttctgggtggccgagcaccacaacatggacggcatcgccagttcagcgacctcggtgctgctcgcctacctggcaggcggcacgtcgaccattcgtgtcggggctggcggaatcatgctgcccaaccatgcaccactggtggttgccgagcagttcggcacgctggccagcctgtatcccggtcggattgatctggggctgggtcgcgcgccgggttccgatcagatgaccgctcgcgccttgcgccgcgaacgctccggcagcgccgaagattttccggatgacgtcaccgagctgatggaatatctggggccgcgtacgcctgatcaaaaagtgatcgctgttcctggctcagacaccaacgtgccgatctggctactgggctcgagcctgttcagtgctcaactggcaggcatgcgcggtttgccgtatgccttcgcgtcgcattttgcgccgcgttatatgcatgaggcgattcgcgtgtaccgcaatcacttccagccatcggccgtgctcgacaaaccctacgtgatgctcggcgttccgctatccgcagcagacaccgacgagcacgccgaatacctcgcgacatctgtttaccagcgcatcctggcgctgatgcgcgggcacagtctgatgcagcgcccaccggtcgaatccatggacggcctgtggctgccgcatgaacgtgaagcggtggcgagcttcctggggctggcgatggttggcggcccggacaagatccgcgccaaactggatgtgctgcttgaacagaccgatgccgatgaactgatcttcacgtgcgacatgtatgagcacgaggacaggctgcgttcctacgagattctggcgcaggtcgcacaaggctga

SEQ ID NO: 153510 - protein, 333 aa, Pseudomonas syringae pv. phaseolicola 1448A
MKRLADVKISTLDLVPVRHDKGPADSLRNSLNLAQHVEKLGYNRFWVAEHHNMDGIASSATSVLLAYLAGGTSTIRVGAGGIMLPNHAPLVVAEQFGTLASLYPGRIDLGLGRAPGSDQMTARALRRERSGSAEDFPDDVTELMEYLGPRTPDQKVIAVPGSDTNVPIWLLGSSLFSAQLAGMRGLPYAFASHFAPRYMHEAIRVYRNHFQPSAVLDKPYVMLGVPLSAADTDEHAEYLATSVYQRILALMRGHSLMQRPPVESMDGLWLPHEREAVASFLGLAMVGGPDKIRAKLDVLLEQTDADELIFTCDMYEHEDRLRSYEILAQVAQG

SEQ ID NO: 153511 - DNA, 1005 bp, Dechloromonas aromatica RCB
  CDS (1)..(1005): transl_table=11
atgaacccgctcgccaatctcaagctctccatgctcgatctggtcgccgtccgcgaaggcggcacggtggccgatgcgctggccatttcgctgcgcaccgcccgccatgtcgaagcgctcggctacacccgctactggctggcagaacaccacaacatgccgggcatcgccagttcagccaccgccgtgctggtcggccacatcgctggcaacacccagcgcatccgcgtcggctcgggcggcatcatgctgcccaaccacgccccgctcgtcgtcgccgaagccttcggcacgctggccgagctttaccccggccgcatcgatctcggcctcggccgcgccccaggtaccgacggcctgaccatgcgcgccctgcgccgcgaccgcatcgaaaccgaagccgacttcccgcgtgacgtcgccgaactgcagcgcctgctcggcccccgccagccagagcagcaagtcgtcgccgtgcccggcgccggtaccgaagtgccgatctggctgctcggttccagcctgttctcggcccgcctggcggccgaacgcggcctgccctacgcctttgcctcgcacttcgccccggcgctgctgctgcaggccatcgagctttatcggcacaacttcaagccgtcggacaagctcgacaagccctacgtaatcatcggcgtgccgctcatcgcggcgccgaccgacgacgaagccgaatttctcgccaccagtaccttccagcgcgtgctcggcatcctgcgtggcgaccgtcgcccgttgccgccgccggtcgaaggtttcctacagagcctccacccgcgcgaacattcaggcattgccgatttcctcggcgccgcggtcatcggcggcccgcaacgcgtccgcgacggcctacgcgatctgcacgccgccaccggtgccgatgaaatgatgttcgtcagcgatgtcttcgatcccgaattgcgcctgcgctcgttggacatcgccacccgcgcctgctggcagccctga

SEQ ID NO: 153512 - protein, 334 aa, Dechloromonas aromatica RCB
MNPLANLKLSMLDLVAVREGGTVADALAISLRTARHVEALGYTRYWLAEHHNMPGIASSATAVLVGHIAGNTQRIRVGSGGIMLPNHAPLVVAEAFGTLAELYPGRIDLGLGRAPGTDGLTMRALRRDRIETEADFPRDVAELQRLLGPRQPEQQVVAVPGAGTEVPIWLLGSSLFSARLAAERGLPYAFASHFAPALLLQAIELYRHNFKPSDKLDKPYVIIGVPLIAAPTDDEAEFLATSTFQRVLGILRGDRRPLPPPVEGFLQSLHPREHSGIADFLGAAVIGGPQRVRDGLRDLHAATGADEMMFVSDVFDPELRLRSLDIATRACWQP

SEQ ID NO: 153513 - DNA, 1014 bp, Ralstonia eutropha JMP134
  CDS (1)..(1014): transl_table=11
atgacgaccccgatcccgtattccgttctcgatctcgcgcccatcgcgcaaggcagcgatgccggccaggccatgcgcaactcgctggaccttgcgcagcacgccgagcgtcttggctaccgccgcttctggctggccgagcaccacaatatgcccggcattgccagcgccgcgactgcggtgttgatcggctatgtggccaatggcaccagcacgattcgcgtgggctccggcggcgtgatgcttcccaaccattcgccgcttgtcgtggccgagcagttcgggacgctggcttcgctgtatccaggccgcatcgacctgggcctgggccgcgcacccggaacggaccagacaacggcacgtgctctgcgccgtcaactgtcgcacgacacggccgacacgttcccgcaggatgtcgaggagctgcaggcctatttcgatgacgtgcgtcccggccagcgcctgcgcgccgtgcccggtgcgggcctgaaggtgccactgtggctgctcggctcgagcctgttcagtgcgcagctttcggcggcaatgggtttgccgtttgcgttcgcctcgcatttcgcaccgggcttcatgcggcaggcggtggacctgtaccggcgcacgttccggccttccgcgcagctcgacaggccctatgtgatgctcggcctcaatgtgttcgcggcagagaccagtgacgaagcgcggcgcctgttcagctcgttgcagcagcagttcctggctctggtgcgcggcacgccgggccagctgcgtccgcccgtggacgatatcgagtcactgtggaacgagagcgaggcggaccatatccgccgttcgctggcctgctcggtggtgggcgatccggaagccgtgcgcgccggcatgcagcgcttcgtcgatgacttgcatccggacgaactgatgctgacgggccagatctacgaccacgcggcgcgcctgcgctcgtttgaaatcgccgccgacgcggcgcgcacgctcgcgccggcagtctga

SEQ ID NO: 153514 - protein, 337 aa, Ralstonia eutropha JMP134
MTTPIPYSVLDLAPIAQGSDAGQAMRNSLDLAQHAERLGYRRFWLAEHHNMPGIASAATAVLIGYVANGTSTIRVGSGGVMLPNHSPLVVAEQFGTLASLYPGRIDLGLGRAPGTDQTTARALRRQLSHDTADTFPQDVEELQAYFDDVRPGQRLRAVPGAGLKVPLWLLGSSLFSAQLSAAMGLPFAFASHFAPGFMRQAVDLYRRTFRPSAQLDRPYVMLGLNVFAAETSDEARRLFSSLQQQFLALVRGTPGQLRPPVDDIESLWNESEADHIRRSLACSVVGDPEAVRAGMQRFVDDLHPDELMLTGQIYDHAARLRSFEIAADAARTLAPAV

SEQ ID NO: 153515 - DNA, 1002 bp, Pseudomonas fluorescens PfO-1
  CDS (1)..(1002): transl_table=11
atgaagcaactgtccgacgtaaagttttccaccctcgacctggtgccggtgcgcgagaacggcagcccggcccagtcgctgcgcaactcgctggatctggcacagcacgtcgaaaagttcggctacacccggttctgggtcgccgagcaccacaacatggatggcatcgccagttccgccacctcggtgttgctgggctatctggccggcggcacgtcgaccatccgggtcggctctggcggtgtgatgctgcccaaccatgcgccgctggtgatcgccgagcagtttggcacccttgaaagcctctatccgggtcggatcgacctcggcctgggccgtgcaccgggttccgatcagatgactgcccgtgccctgcgccgcgagcgctccggcagcgccgatgatttccctgaagacgtggctgaactggcgcgctatctcgggccgcgcacccctgatcagcgcgtgatcgcgatgccgggcaccggcaccaatgtgccgatctggctgctcggctccagcctgttcagtgcgcaactggccggcgagcgcggtttgccctacgccttcgcctcgcatttcgctccgcgcttcatgcacgaggcgattcgcgtctaccgcaatcacttcaagccgtcagcggtactcgataagccgtacgtgatgctcggcgtgccgctggtggccgcggacactgatgaacaggccgattacctggcgacctcggtgtaccaacgaatcctcgcgctgatgcgtgggcaaagtctggtgcagcgtccgccggtaaaaaccatggacggcctgtggttgccccacgagcgtgaggcggtgggggatttcctcggtctggcgatggtcggcagtccgcagaaaatccgcgcgaaactcgaagtgctgatcgaacagacccaggctgatgagctgatcttcaccagcgacctgtacgaacacgccgatcgcctgcactcctacgagctgctggcgcaggtgatgaagggctga

SEQ ID NO: 153516 - protein, 333 aa, Pseudomonas fluorescens PfO-1
MKQLSDVKFSTLDLVPVRENGSPAQSLRNSLDLAQHVEKFGYTRFWVAEHHNMDGIASSATSVLLGYLAGGTSTIRVGSGGVMLPNHAPLVIAEQFGTLESLYPGRIDLGLGRAPGSDQMTARALRRERSGSADDFPEDVAELARYLGPRTPDQRVIAMPGTGTNVPIWLLGSSLFSAQLAGERGLPYAFASHFAPRFMHEAIRVYRNHFKPSAVLDKPYVMLGVPLVAADTDEQADYLATSVYQRILALMRGQSLVQRPPVKTMDGLWLPHEREAVGDFLGLAMVGSPQKIRAKLEVLIEQTQADELIFTSDLYEHADRLHSYELLAQVMKG

SEQ ID NO: 153517 - DNA, 1008 bp, Rhodobacter sphaeroides 2.4.1
  CDS (1)..(1008): transl_table=11
atggcgagggcaaaggaacctcccatgatcccctattccgttctcgacctcgctccggtgccggaaggcgccaccacgtccgaggctctcgcccagaccgtcaccctcgcccgccatgccgaagccctgggctttcaccgctactggctggccgagcatcatgccatgccgggcatcgcctcggcggcgacggcggttctcatcggccatgtcgcggcccacacccagcgcatccgcgtggggtcgggcgggatcatgctgcccaaccacgccccgctgatggtggccgaagcgttcggcactctggccgagctgcatccgggccggatcgatctgggcctcggccgggcccccggcaccgacgggcgcaccgcgcaggcgctgcggcgcaacctcgatgtcaccgacagtttccctgccgacgtgctggaactcctgcgctacttcggcgagccggagccgggcgcgatccaggccatccccggccagggcacccgcgtgccgctgtggatcctcggctcgagcctctatggcgcgcagctcgcggcccatttcggcctgccctatgccttcgcctcgcatttcgcgccgcccgccctcgaggcggcgctggcggcctaccggcagggcttccggccctcggcccagctcgacaggccccgcgccatggtggcgatcaacgtctttgccggggccgacgatgccgagggccgctacctccgctcctccgcccagctggccttcgccaatctccgcctgggccgcccaggcaagctgccgcgcccggtcgaggatatctcggcccatgtcgatcccggcatgctccggacggtcgatcaggcgctgtccgtctcggccaccggcggccccgacaccgtgcggcgcgagctggcggcccttctcgagcggcaccggcccgacgaggtgatcctcaccgggcagatccacgaccccgcggcgcggctgcgctcgttcacgatcgcggccgaggctctggccagcctctga

SEQ ID NO: 153518 - protein, 335 aa, Rhodobacter sphaeroides 2.4.1
MARAKEPPMIPYSVLDLAPVPEGATTSEALAQTVTLARHAEALGFHRYWLAEHHAMPGIASAATAVLIGHVAAHTQRIRVGSGGIMLPNHAPLMVAEAFGTLAELHPGRIDLGLGRAPGTDGRTAQALRRNLDVTDSFPADVLELLRYFGEPEPGAIQAIPGQGTRVPLWILGSSLYGAQLAAHFGLPYAFASHFAPPALEAALAAYRQGFRPSAQLDRPRAMVAINVFAGADDAEGRYLRSSAQLAFANLRLGRPGKLPRPVEDISAHVDPGMLRTVDQALSVSATGGPDTVRRELAALLERHRPDEVILTGQIHDPAARLRSFTIAAEALASL

SEQ ID NO: 153519 - DNA, 999 bp, Burkholderia sp. 383
  CDS (1)..(999): transl_table=11
atgactccgttttccgtactcgatctcgcccccattccggccggcgctgacgcctcccaggcattccgcaacaccgtcgatctcgcgcagcatgcggaacgttggggttaccagcgctactggctcgccgagcatcacaacatgcccggcatcgcgagcgcggcaacggccgtcgtgatcggccacgtcgcgggcgccacgcagacgatccgggtcggttcgggcggcatcatgctgccgaaccacgcgccgctcgtgatcgccgaacagttcggcacgcttgcgtcgctgtacccggggcgcatcgacctcggcctcggccgtgcgcccggcaccgaccagaccacgtcgcgcgcgctgcgccgcgacctgatcggcagtgccgactcgtttccagatgatgtcgccgagctgcagcgctacttcgcggagccggtgcccggccagcgcgtgcgcgcggtgcccggcgcagggctcgacgtgcccgtgtggctgctcggctcgagcctgttcagcgcccagctcgccgcgatgctcgggttgccgttcgcgttcgcgtcgcacttcgcgccggattacctgatgcgcgcgctcgagatctatcgagcacagtaccggccgtcggccgcgtggccgaagccgcatgcgatggtcggcgtcaacgtgttcgtcgccgataccgacgacgacgcgcggcgcctgttcacgtcgctgcagcagcagttcatcaatctgcggcgcggcacgccgggcaagctgccgccgccggtcgacgtgctcgaggcgaacgagctcgaactcgcgacggttgcgcattcgctgtcgttcgcggcggtcggctcgcgcgacacggtgcgcgacaagctgcgcgaccgcatcgcgcagacgggggccgacgagctgatcgtcaccgcacagatctacgatcacgcggcacggctgcgctcgttcgaattgactgcgcagatccgcgacgagctcgcgagcgaaacgcgctga

SEQ ID NO: 153520 - protein, 332 aa, Burkholderia sp. 383
MTPFSVLDLAPIPAGADASQAFRNTVDLAQHAERWGYQRYWLAEHHNMPGIASAATAVVIGHVAGATQTIRVGSGGIMLPNHAPLVIAEQFGTLASLYPGRIDLGLGRAPGTDQTTSRALRRDLIGSADSFPDDVAELQRYFAEPVPGQRVRAVPGAGLDVPVWLLGSSLFSAQLAAMLGLPFAFASHFAPDYLMRALEIYRAQYRPSAAWPKPHAMVGVNVFVADTDDDARRLFTSLQQQFINLRRGTPGKLPPPVDVLEANELELATVAHSLSFAAVGSRDTVRDKLRDRIAQTGADELIVTAQIYDHAARLRSFELTAQIRDELASETR

SEQ ID NO: 153521 - DNA, 1002 bp, Rhodospirillum rubrum ATCC 11170
  CDS (1)..(1002): transl_table=11
atgacctcgctctcgatccttgatcttgtccgcgtcaccgaggcgaccgacgcccggggcgcgctgaacaacgcccgcgatctggccgcccatgccgaaacctggggctatcgccgcttctgggtggccgagcaccacaatatgcccggcatcgccagcgccgccaccgccgtggtcatcggccatatcctggagggaacccgcaagatccgggttggcgccggcggcgtcatgctgcccaatcacgcgcctttgatcatcgccgaacaattcggcaccctggcccggcttttccccgaccgcgtcgacctcggcctgggccgggcgccgggcaccgacccaacaacggtgcgcgccctgcgccgcccgttctcggccgtcgacagcttccccagcgacatcctggaactccagggctacttcgcccccgccgccgccaacgccctgcaggccgttcccgccgccggaaccaacgtgccgctgtggatcttgggatcaagcacctatggggcgcggctggcggccgattacggcctgccttacgccttcgcctcgcatttcgccccggccgaactggggctggcccttgatctctatcgccgcggcttcaagccgtcggcgcagttggcccggccccatgtcgccgttggcgtcaatatcatcgccgccgacagcgaggccgaggcgcggcgactggcgaccaccacccagatggccttcaccaatttgctgcgcggcacccgccagcttggccagccgccgatcgatgacatcgaccaatactggtcgccggcggaaaaggcccaggtcggccttatgctggcctgctcgatcatcggcgcccccgccaccctgcgcgagggaatcaaggccctgatcgccgagacggcggccgatgagctgatcatcgtctcggacatctacgaccacgaggcccgcctgcgctcgttcgagctgatcgccgaggtggccggtccgtccgcccacggcgccggcggctaa

SEQ ID NO: 153522 - protein, 333 aa, Rhodospirillum rubrum ATCC 11170
MTSLSILDLVRVTEATDARGALNNARDLAAHAETWGYRRFWVAEHHNMPGIASAATAVVIGHILEGTRKIRVGAGGVMLPNHAPLIIAEQFGTLARLFPDRVDLGLGRAPGTDPTTVRALRRPFSAVDSFPSDILELQGYFAPAAANALQAVPAAGTNVPLWILGSSTYGARLAADYGLPYAFASHFAPAELGLALDLYRRGFKPSAQLARPHVAVGVNIIAADSEAEARRLATTTQMAFTNLLRGTRQLGQPPIDDIDQYWSPAEKAQVGLMLACSIIGAPATLREGIKALIAETAADELIIVSDIYDHEARLRSFELIAEVAGPSAHGAGG

SEQ ID NO: 153523 - DNA, 1194 bp, Burkholderia thailandensis E264
  CDS (1)..(1194): transl_table=11
atgccgcgtcacgttgacgccctttttcgtccctgtcgccttcagggatatctttgcggcctccgacgcgatccggaacgctttggcacaatcgacgccgtctgttgcatccacgcatcatcgacgggccgcgccgcgcgtgggcccgagctccgtccccatgccactcgttccgccgtcgccatgatcccgttttccgttctcgacctcgcaccgatccccgccggcgccgacgccgcccaggcgttgcgtcactccgtcgacctcgcccggcatgccgagcgcctcggctatcgccgctattggctcgccgagcaccacaacatgccgggcatcgcgagcgccgcgaccgccgtcgtgatcggccatgtcgcgggcgcgacgcagacgatccgtgtcggttcgggcggcgtgatgctgccgaaccacgcgccgctcgtgatcgcggagcagttcggcacgctcgcgtcgctgtacccgggccgcatcgatctcggcctcgggcgcgcacccggcaccgatcagatcacggcccgcgcgctgcgccgcgacctgatcggcagcgccgattcgttcccggacgatgtcgtcgagctgcagcgctacttcgccgcgcccgccgccggccagcgcgtgcgcgcggtgccgggcgcgggcctgaacgtgccgatctggctgctcggttcgagcctcttcagcgcgcaactcgccgcgatgctcggcctgccgttcgcgttcgcatcacatttcgcgccggactacctgatgcgcgcgctcgacgcgtaccgcgcgcagttccgcccgtccgcggcgctcgcgaagccgtatgcgatggtcggcgtgaacgtgttcgccgccgataccgacgacgacgcgcggcgcctcttcacatcgcttcagcagcagttcctgaatctgcggcgcggcacgcccggacaactgccgccgcccgtcgaatcgctcgacgcgctcggcgcgaccgagcaggaactggcgagcgtcgcgcacgcgctgtcgttcgcggcggtcggctcgcgcgacaccgtgcgcgagcggctgcgacggatgatcgcgcagacgggcgcggacgagctgatcgtcgccgcgcagatcttcgatcacggcgcgagggtgcggtcgtacgagatcgccgcgcaggtgcgcgacgagcttcgcgacgaggcgggaggttga

SEQ ID NO: 153524 - protein, 397 aa, Burkholderia thailandensis E264
MPRHVDALFRPCRLQGYLCGLRRDPERFGTIDAVCCIHASSTGRAARGPELRPHATRSAVAMIPFSVLDLAPIPAGADAAQALRHSVDLARHAERLGYRRYWLAEHHNMPGIASAATAVVIGHVAGATQTIRVGSGGVMLPNHAPLVIAEQFGTLASLYPGRIDLGLGRAPGTDQITARALRRDLIGSADSFPDDVVELQRYFAAPAAGQRVRAVPGAGLNVPIWLLGSSLFSAQLAAMLGLPFAFASHFAPDYLMRALDAYRAQFRPSAALAKPYAMVGVNVFAADTDDDARRLFTSLQQQFLNLRRGTPGQLPPPVESLDALGATEQELASVAHALSFAAVGSRDTVRERLRRMIAQTGADELIVAAQIFDHGARVRSYEIAAQVRDELRDEAGG

SEQ ID NO: 153525 - DNA, 1068 bp, Frankia sp. CcI3
  CDS (1)..(1068): transl_table=11
atgagcccggcccgacctgtccccctgtccgtgttggatctcgtcccggtgggcaccggcgtccccgccaccgacgcggtccacgggacactcgaactcgcccgacatgccgaaaggctcggatacacccgatactggttggccgagcatcatggcatcccggggatcgcgagctcggcgacctcgatcctcatcggtcaggtcgccgcggccaccaccaccctcagggtggggtccggtggggtgatgctgcccaaccatgcgccactcgccatcgccgaacagttcggcacgttgggcaccctcttcccgggacggatcgatctgggtgtcggccgtgctcccggcaccgatcccgcgaccgcccgggctctacgccgcaccagcgatctgtcggccatcgacgacttccccgagcagctcgccgaactgacgacctttctggccggggggaatttccccgactcgcacccgaggcgcggcgtcaccgcgttcccgcgggccgaggtaccgcccatctggttgctgggatcgagtggctacagcgcccaggtggccggcatgctcggcctgccgttcgcgttcgcgcaccatttcagctcggtgaacacggtgccggcgttggagctctaccggaagtccttccgtccctcgcccggccgggaacgaccgtatgcgatcgtcgccgccgcggtgctctgtgccgccgacgacgagcacgcgcagtggctggccggaccgcagcggctggcgatgctgcggctgcgtagcggccgccccggggtgttcccttcgccagaggaggccgccgcctacccgtggacctcgcgggagcggtcgatcgcggaggccgccaccgcctcgcacatcgtcggctccccggtgacggttcgcgcggggatcgacgcgctgctcgacgagacgggtgccgacgaggtcatggtcgtcaccaacgtcacccggctggcggaccggatccgctcctacgagctggtggccgaactcggcggactgacatcgacgggtccggcggccgcgagcggccggggcgcagtacccgttcggtga

SEQ ID NO: 153526 - protein, 355 aa, Frankia sp. CcI3
MSPARPVPLSVLDLVPVGTGVPATDAVHGTLELARHAERLGYTRYWLAEHHGIPGIASSATSILIGQVAAATTTLRVGSGGVMLPNHAPLAIAEQFGTLGTLFPGRIDLGVGRAPGTDPATARALRRTSDLSAIDDFPEQLAELTTFLAGGNFPDSHPRRGVTAFPRAEVPPIWLLGSSGYSAQVAGMLGLPFAFAHHFSSVNTVPALELYRKSFRPSPGRERPYAIVAAAVLCAADDEHAQWLAGPQRLAMLRLRSGRPGVFPSPEEAAAYPWTSRERSIAEAATASHIVGSPVTVRAGIDALLDETGADEVMVVTNVTRLADRIRSYELVAELGGLTSTGPAAASGRGAVPVR

SEQ ID NO: 153527 - DNA, 993 bp, Novosphingobium aromaticivorans DSM 12444
  CDS (1)..(993): transl_table=11
atgaaactttcggtcctcgatctggtcagcgtggtcgagggcggaacggtgcgcgaggcgctcgacaattcggccgccgcagccagggtcgcggaggagtgcggctatcagcgctactgggtggccgaacaccacggcatggaaggcatcgccagcgcggctgtcgcggtgacgctcgcgcatatcggtcatgccacctccaccatccggatcggcgcgggcgggatcatgctgcccaaccacaatcccctcgtaatcgccgaacagttcgggacgctcgacgcgctctttccgggccggatcgacctcggcctgggccgtgcgccgggtgccgaccagcggatcgtcagggccctgcgcaaggataccaatcgcgcggccgaggattttccggccgacgtcgtcgaactccagctccagttcgcgggcgatccgcgcgtcccgctccaggcggtgccgggcaagggcgccaggccgcagatgtggattctcggctccagcctgttcggggcgcagctcgccgcgatgcttggcctgccctatgcctttgcctcgcacttcgcccctgaccacctcgatgcggcgctgaagatctaccgcgagcgcttccagccttccgacgttctcgacgctccctactgcgccgccgcgatcaacgccgtcgccgccgagaccgacgaggaggccacgcttctcgcttcctcgatggaccaggctttcgtcgcgctgcgcactggcaatccgggcaagctcaagcctcccgtacccggctaccgggacagcctgccgccccccgcgctggcgatgctggagcatgtgcgccaggtcagcgctacgggttcggtggagacggtgcggcgcggtctcaaggctttcgtggagcgcaccggcgtcgacgaagtcattgttgcggcatcgatattcgaccaggaagcgcgccgccgctcgctgcgtttggtggccgaggctgcgcgtgaaacggtaacgacctga

SEQ ID NO: 153528 - protein, 330 aa, Novosphingobium aromaticivorans DSM 12444
MKLSVLDLVSVVEGGTVREALDNSAAAARVAEECGYQRYWVAEHHGMEGIASAAVAVTLAHIGHATSTIRIGAGGIMLPNHNPLVIAEQFGTLDALFPGRIDLGLGRAPGADQRIVRALRKDTNRAAEDFPADVVELQLQFAGDPRVPLQAVPGKGARPQMWILGSSLFGAQLAAMLGLPYAFASHFAPDHLDAALKIYRERFQPSDVLDAPYCAAAINAVAAETDEEATLLASSMDQAFVALRTGNPGKLKPPVPGYRDSLPPPALAMLEHVRQVSATGSVETVRRGLKAFVERTGVDEVIVAASIFDQEARRRSLRLVAEAARETVTT

SEQ ID NO: 153529 - DNA, 1002 bp, Methylobacillus flagellatus KT
  CDS (1)..(1002): transl_table=11
atgatgattccattttccatccttgacctctgccccatcgttcaaggcagcacgcctgcgcaggcgttcagcaactccgtcgagctggcgcagctcggcgaaacgctgggttatcgtcgcttctggctggcggaacaccacaacatgcccggcatcgccagcgctgcgacggctgtcgtcattggccatgtcgccggccatacccagacaatccgcgtcggtgccggcggcatcatgctgcccaaccatgctccgctggcgattgctgagcaattcggcacgctggaatcgctctatcccggacgcattgacctcggactgggccgggcgcccggtagcgacatggccaccgcccgcgccttgcggcgcaacttgcatgcgcatggcgaagacttccccgagctagtggcagaactgcagggctactttgacttgccccagccagggcaaagcatcagggcggtgcccggggccgggctagccattcccatctgggtactgggttccagcctgtatggcgcccaatttgccgctgcacatggcttgccgttcgcctttgcctcgcattttgcgcctaccttcctgttgcaggcgctggacacctaccgccgcaacttccagccttccacctcgctggacaggccttatttcatggtgacggccaatatcctggtcgctgacaccgatgaagaagcacgctactggttcagctcccagcaacaggcgtttaccaatctccatcgcggcataccgggacaattgccgccgccggtggacgatatcgagcaatactggacgccagccgagaaaatcagcgtggagcgcatgctggcctgttcgctggtcggctcttccaccaccgtggaggccggcctgagaaaactgctcaacgatctcgcccctgatgagttgatggtgaccggccatgtgttcgaccaagacatcagattgcaatcgtaccgtgccgtcgccactatccgcgacaggctgaccgcggaatga

SEQ ID NO: 153530 - protein, 333 aa, Methylobacillus flagellatus KT
MMIPFSILDLCPIVQGSTPAQAFSNSVELAQLGETLGYRRFWLAEHHNMPGIASAATAVVIGHVAGHTQTIRVGAGGIMLPNHAPLAIAEQFGTLESLYPGRIDLGLGRAPGSDMATARALRRNLHAHGEDFPELVAELQGYFDLPQPGQSIRAVPGAGLAIPIWVLGSSLYGAQFAAAHGLPFAFASHFAPTFLLQALDTYRRNFQPSTSLDRPYFMVTANILVADTDEEARYWFSSQQQAFTNLHRGIPGQLPPPVDDIEQYWTPAEKISVERMLACSLVGSSTTVEAGLRKLLNDLAPDELMVTGHVFDQDIRLQSYRAVATIRDRLTAE

SEQ ID NO: 153531 - DNA, 996 bp, Burkholderia xenovorans LB400
  CDS (1)..(996): transl_table=11
atgatccccttttcagtcctcgacctctcgccggtcaccgcgggcgccacgccggcagacgcgttcaggaatacgctcgacctcgcccagcacgcggaaaactggaattaccggcgcttctggctggcggaacatcacaacatgacgggcattgccagcgcggcgacctcggtggtgatcggctacgtcgcgggcggcacgaaaaaaatccgcgtcggctcgggcggcatcatgctgccgaaccacgcgccgctcgtgatcgcggaacagttcggcacgctcgcctcgctttaccccgaccggatcgacctgggcctcggccgcgcgcccggcacggatcagagcaccgcccgcgcgttgcgccgcgatctgcaaaacagcgcggactcgtttcccgacgacgtggtcgaattgcagcgttatttcgccgaaccggtgccgggccagcggattcgcgcggtgccgggcgcgggtctgaacgtgccgctgtggctgctcggctcgtcgctcttcagcgcgcagctcgccgcggcgctcggcctgccgttcgcgttcgcgtcgcatttcgcgccggattacatgctcaccgcgctgcaaatgtatcgcgcgcaattccgtccgtcggccgcgctcgacaaaccgtatgcgatggtcggcgtcaacctgttcgccgcggataccaacgaagaagcgcaacgtctattcacctcgctgcaacagcagttcatcaatctgcggcgcggcacgccgggtcagctgcagccgccggttgagcggctcgaggcgtcggaaatggaattgaacaacgtggcgcactcgctcgcctgcacggcgctgggcgaccgtcacgcggtgcgcgaggcattgaagtcgatcatcgatcaaaccggcgcggacgaattgatgctcaccgcgcagatctacgatcacaaggcgcggctgcggtcgtttgagatcggtgcgcaagtgcgtgaggagttggcggcgggttgttaa

SEQ ID NO: 153532 - protein, 331 aa, Burkholderia xenovorans LB400
MIPFSVLDLSPVTAGATPADAFRNTLDLAQHAENWNYRRFWLAEHHNMTGIASAATSVVIGYVAGGTKKIRVGSGGIMLPNHAPLVIAEQFGTLASLYPDRIDLGLGRAPGTDQSTARALRRDLQNSADSFPDDVVELQRYFAEPVPGQRIRAVPGAGLNVPLWLLGSSLFSAQLAAALGLPFAFASHFAPDYMLTALQMYRAQFRPSAALDKPYAMVGVNLFAADTNEEAQRLFTSLQQQFINLRRGTPGQLQPPVERLEASEMELNNVAHSLACTALGDRHAVREALKSIIDQTGADELMLTAQIYDHKARLRSFEIGAQVREELAAGC

SEQ ID NO: 153533 - DNA, 1062 bp, Burkholderia xenovorans LB400
  CDS (1)..(1062): transl_table=11
atgcccaatggggatcagcagaaagcaatgaggccgccccgactgtctgtcctcgatacggcaatggtcggctccgggactaccacgcaccaagccctggaagcgaccgtcaagctggcccagcatgcagagaacctaggtttcacccgctattggatggccgagcatcacggtgttcccggcgttgccagttccgccccggtggtgacaatcggcgcgctagcagcggccacccgcagcattcatgtcggtgcaggcggcgtgatgttgccgaaccatgtccccttggtcgtcgcagagcagttcagcacgctggcagcgctttatccgggccgtatcgatcttggcgtcggtagggccacgcctgaccctggtactgcgatggtacttgcccgttccctggcgggatacggcagcgatcagttcaccttgcagctcgggcaactggctggcttcctgcgtggcgatttccctgacggtcatccatatcgcgacgtattcgtctcgccccgggcagaagaacctccggcgctatggattctcggtgcgagcgtccaaagcgctggtctggcagcgtcgctcggactgccgttcgccttcgcgcatcacttcggtaggggagaagcagcacccgccttcgagcattaccggcgcagcttcaagccctctgcggctctcagcgagccctatgcaattgtcacggcactggtggtctgtgcgccctccgacgaggaagccgatcaaatagcgcggtcggctgacctcatgttccggcttctgttccagggacgtccgggcaaactgccttcaccggaggaggttgcggctcacccatggacgcaagaagacctggcctttgtccgccagcgtcggcgcgggcaagcgatcggaagccccgaaaccgttcgctcggtgctgacggaactccttgaggctaccggagcagacgaactgatgatgacgacgcagatgtaccgccttgaggaccgtatccgttccctggaaatggtcagcgaaatgttcatccacgccgacatggatctcggccgcacagccccatga

SEQ ID NO: 153534 - protein, 353 aa, Burkholderia xenovorans LB400
MPNGDQQKAMRPPRLSVLDTAMVGSGTTTHQALEATVKLAQHAENLGFTRYWMAEHHGVPGVASSAPVVTIGALAAATRSIHVGAGGVMLPNHVPLVVAEQFSTLAALYPGRIDLGVGRATPDPGTAMVLARSLAGYGSDQFTLQLGQLAGFLRGDFPDGHPYRDVFVSPRAEEPPALWILGASVQSAGLAASLGLPFAFAHHFGRGEAAPAFEHYRRSFKPSAALSEPYAIVTALVVCAPSDEEADQIARSADLMFRLLFQGRPGKLPSPEEVAAHPWTQEDLAFVRQRRRGQAIGSPETVRSVLTELLEATGADELMMTTQMYRLEDRIRSLEMVSEMFIHADMDLGRTAP

SEQ ID NO: 153535 - DNA, 1020 bp, Burkholderia xenovorans LB400
  CDS (1)..(1020): transl_table=11
atgacgcgactatccgtactcgatcaaacgccggtgattgccgggcactcggtggcggacgcgattgccgccacggttgaactcgcgcaactcgccgacgacctcggctacacgcgttactggtgcgccgagcatcatggcctgcgtggcgtgtcgaatccctgccccgaggtgatgctggcgcgcctcggcagcgtgacggaccacatccggctgggctccggcggcgtgatgctgccgtactacagcccgttcaaggtcgccgagcaattcatgatgctcgaggcgctgtttcccaatcgtatcgatctgggcgtgggacgcgcgccgggcggcgacatgcgcaccgcgcaagcggtcgccgccggcgactataatcgcggcgacattttcccgcagcaggtggccgatctgctcggcctgatgcacggcacgttgcccgccgatcacattgcgggcggcgtgctgctgcagccgcaaatcgatacgcgcccgcaagtatggatgctggggtcgagtgaattcggcggattgctggccgcgcaactcggcattccgtttgcatttgcgcacttcatcaacgcgcatttcgggcatcaggtcgcgcatgcgtatcgtgagcgcttcaaggccggccaggacatacagcaagcgtatctggccgccgccgtgttcgtgatctgcgcggacaccgaacaggacgccgctgatctggaaaaagccgtcgacctgcgccgcgtgcagatggcctatggtttgaacgaaccgattccgtccatcgaacagggcattgcgcaggagtacggcgagcgcgagcaactcgtgatctcgcgcgaaaagccgcgcagtatcatcggcacgcccgcaaccgtcactgaacggcttcatgtgttgcaggagcagttcgaggcggacgagctgatcgtgctcacggttgcgggcagctatcgcgcccggttgcgctcctatgaacttcttgccgaggcgttccagctcgaacgcccggcgtccactccttaa

SEQ ID NO: 153536 - protein, 339 aa, Burkholderia xenovorans LB400
MTRLSVLDQTPVIAGHSVADAIAATVELAQLADDLGYTRYWCAEHHGLRGVSNPCPEVMLARLGSVTDHIRLGSGGVMLPYYSPFKVAEQFMMLEALFPNRIDLGVGRAPGGDMRTAQAVAAGDYNRGDIFPQQVADLLGLMHGTLPADHIAGGVLLQPQIDTRPQVWMLGSSEFGGLLAAQLGIPFAFAHFINAHFGHQVAHAYRERFKAGQDIQQAYLAAAVFVICADTEQDAADLEKAVDLRRVQMAYGLNEPIPSIEQGIAQEYGEREQLVISREKPRSIIGTPATVTERLHVLQEQFEADELIVLTVAGSYRARLRSYELLAEAFQLERPASTP

SEQ ID NO: 153537 - DNA, 1032 bp, Ralstonia metallidurans CH34
  CDS (1)..(1032): transl_table=11
atgcaagctttccccatgactccctattccctgctcgacctctcgcccatcatcgaaggcagcgacgccacccaggccatgcgcaacacgctgagcctggcgcagcacgcggaacgtcttggctatcggcgcttctggctggccgaacaccacaacatgccgggcattgccagtgccgccacggcggtgctgatcgggtacgtcgccaacggcacctcgacgatccgggtcggctccggtggcatcatgctgcccaaccattccccgctggtggtggccgaacagttcggcacgctggcctcactctatccgggccggatcgacctcgggctgggccgcgcccccggcaccgaccaggccacggcacgcgcgctgcgccgaaccctgagccacgactcggccgactcgttcccgcaggatgtggaagaactgcaagcgtactttgatgaggtgcgacccggccagcgcgtgcgcgccgtgccgggcgcggggctcaaggtgccgctgtggctcctcggttccagccttttcggcgcgcagctagcagcggcgatgggcctgcctttcgcgtttgcttcgcactttgccccgggcttcatgcggcaggcggtagacctgtatcgccgcaccttccgcccgtcggagcagctcgatcgtccgcacgtgatgcttggcctcaacgtgttcgccgccgagaccgatgccgaggcgcgtcgcctgttcagttcgctgcagcagcagtttctggcgctggttcgcggcacgccgggacagctcaagccgccggtcgacgatatcgagcgtctgtgggatgccagcgaagcggagcatatccgccggtccctcgcctgctcggtcgtgggagacccggcaacggtacgcgagggcatccagcgtttcgtggacgatctgcggccggacgagctgatgctgaccggccagatctacgaccatgccgcgcggctgcgatcgttcgagatcgcagccgatgccatgcgcgcgctacagcccgcatcatcgcagacggcgtga

SEQ ID NO: 153538 - protein, 343 aa, Ralstonia metallidurans CH34
MQAFPMTPYSLLDLSPIIEGSDATQAMRNTLSLAQHAERLGYRRFWLAEHHNMPGIASAATAVLIGYVANGTSTIRVGSGGIMLPNHSPLVVAEQFGTLASLYPGRIDLGLGRAPGTDQATARALRRTLSHDSADSFPQDVEELQAYFDEVRPGQRVRAVPGAGLKVPLWLLGSSLFGAQLAAAMGLPFAFASHFAPGFMRQAVDLYRRTFRPSEQLDRPHVMLGLNVFAAETDAEARRLFSSLQQQFLALVRGTPGQLKPPVDDIERLWDASEAEHIRRSLACSVVGDPATVREGIQRFVDDLRPDELMLTGQIYDHAARLRSFEIAADAMRALQPASSQTA

SEQ ID NO: 153539 - DNA, 987 bp, Silicibacter sp. TM1040
  CDS (1)..(987): transl_table=11
atgcgctattccgtcctcgatctcgccccggtgccagaaggcgccaccactgcagaggcgctcgccaatagcgccgacctcgcccgacacgccgaacgctggggctatcaccgctactggctggcggagcatcacaacatgcccggcattgcgagcgcggcaacggcggtgatgatcggccatattgcacaggcaacctcgaccatccgggttggcgcgggcggcatcatgctgcccaatcacgcgccctacatggtggccgaagcctttggtacccttgtagaaattcacggcgaccggatcgacctcggcgttgggcgcgcaccgggcacggatatggcggcgatgcgggcgatgcggcgcgggttgcaggactccggcgatcgcttccccgaggacgtgcaggagctcatctcccatctcggcccccgccgcacagagagcaatctgcgcgccatccccggtgagggcaccgaggttccagtctggatgctggggtcgagcctttacggggcacagctcgccgccatgctggggctgccttatgcctttgcctcgcattttgcgccccaagcgctctcgcaggcctttgaggtctatcgccgccagtttcgcccctcaaagacgctacaaaagccgcatgcgatgctggcggtcaacgtctttgccgccgccacggatgcagagggcatccggctgcgcaccaccatgcagcaagcctttgcccggttgcgccttggcaccccgggcaagctgcctgccccggtagagaatatcgcagatgtgctgacgccggacattcttgccggggtcaatcaggcgctgacgatttcggcggttggcgcaaaggacagtgtgcgcgaagatctggcacggctcattgagacctaccagcccgacgaggtgatcctgaccgggcagatccatgaccatgacgcgcggctgcgctcgtttgagatcgcggcagagatcctggggaacagctag

SEQ ID NO: 153540 - protein, 328 aa, Silicibacter sp. TM1040
MRYSVLDLAPVPEGATTAEALANSADLARHAERWGYHRYWLAEHHNMPGIASAATAVMIGHIAQATSTIRVGAGGIMLPNHAPYMVAEAFGTLVEIHGDRIDLGVGRAPGTDMAAMRAMRRGLQDSGDRFPEDVQELISHLGPRRTESNLRAIPGEGTEVPVWMLGSSLYGAQLAAMLGLPYAFASHFAPQALSQAFEVYRRQFRPSKTLQKPHAMLAVNVFAAATDAEGIRLRTTMQQAFARLRLGTPGKLPAPVENIADVLTPDILAGVNQALTISAVGAKDSVREDLARLIETYQPDEVILTGQIHDHDARLRSFEIAAEILGNS

SEQ ID NO: 153541 - DNA, 1032 bp, Myxococcus xanthus DK 1622
  CDS (1)..(1032): transl_table=11
atgaagctcagtgttctcgatcactccatcgtcgccagcgactcccagacacgtgcggccttccaaaacacggtggagctggctcgagccgccgagcagctcggttatcaccgcttctggctcgcggagcatcacggctcaggacacttcgcgggcgtggcgccggaaatcctcgtcgcgcatgtcgcggcggcgacgtctcgcatccgggtgggaacgggcggcgtcctgctgtcgaactacagccccttcaaggtcgccgaggtcttccggctgctggagacgctccaccccaaccgcatcgacctgggcatcggacggacatcgggcagcacggacctggtggcccgcgcactggcctacgggccgccgatgaacaacgagaacttccccacgaagctggaggacctcgtcgccttcctgtcgggcaccacgcccgcgacgccggagttcgagaagctgagcctgaagaccatggcgccgggcatgccgcaggtctgggccctgggctcgggcgagcagagcgccgcgctcgcggcccggctgggtctgtccttctgcttcgcgcacttcttcaaccccatccacggtggaccggtgacgcgggggtatcgcgagcgcttccagccctcgcacgtgcaggcggctcccaactccgccgtcagcgtctacgtcatctgtgccccgaccgagcaggaggcccggcgaatagcccggagcagcgacctgctgaccatcaacactcgcaggggccggcccgaagcgcccattccgtccatcgaggaggcggaggcctacgcctacacgcccgaggacctggccacgctcgagttcgaccgcaaacgcgtcgtgtgtggttcaccggaccaggtgaaggaacagctgttgcgcatggccgccgaattccaggcggacgagctgctcgtcaccaccatcgtccacgaccatcgcgcccggatgcgctcctacgagctgctcgctgacgcgttctctctctcgagcacgccgcccgccgcccaggcagccagctga

SEQ ID NO: 153542 - protein, 343 aa, Myxococcus xanthus DK 1622
MKLSVLDHSIVASDSQTRAAFQNTVELARAAEQLGYHRFWLAEHHGSGHFAGVAPEILVAHVAAATSRIRVGTGGVLLSNYSPFKVAEVFRLLETLHPNRIDLGIGRTSGSTDLVARALAYGPPMNNENFPTKLEDLVAFLSGTTPATPEFEKLSLKTMAPGMPQVWALGSGEQSAALAARLGLSFCFAHFFNPIHGGPVTRGYRERFQPSHVQAAPNSAVSVYVICAPTEQEARRIARSSDLLTINTRRGRPEAPIPSIEEAEAYAYTPEDLATLEFDRKRVVCGSPDQVKEQLLRMAAEFQADELLVTTIVHDHRARMRSYELLADAFSLSSTPPAAQAAS

SEQ ID NO: 153543 - DNA, 1017 bp, Myxococcus xanthus DK 1622
  CDS (1)..(1017): transl_table=11
atgattcctttctccgtcctcgacctctcgcccgtcacgcagggctccaccgcggccgacgcgctccggaacacgctggacctggcacggcacgcggaggactggggcttcaagcgcttctggctggccgagcaccacaacatgacgggcatcgccagcgcggcgacgtccgtggtcatcggctacgtggccggagggacgaagcgcatccgcgtgggttcgggcggcgtcatgctgccgaatcacgcgccgctgatcatcgcggagcagttcggcacgctggagacgctctacccggggcgcatcgacctggggctcggccgggcgccgggcacggacatgctgacggcgcgcgccctgcggcgggacctggcggcgagcgcggacaccttcccccaggacgtcgtggagctgaagtcgtacttcgagcccaccgagccggggcagctcatccaggcggtgccgggcgcgggtttgaaggtgcccatctggctactcggctccagcctgttcagcgcgcagctcgcggcgatgctgggcatgccgttcgccttcgcctcccacttcgcgcccgatgccctgcttcaggccctggacatctaccgggagcgcttcaagccgtccgagtcgctcgagcggccctacgccatggcctgtgtgaatgtcttcgcggcggatacggatgcggaggcacagcgcctcttcacttcggtgcagcagcagttcatccgcctgcgccgcggcacgcccggtcagctcccgcccccggtcgatgacatcgactccgtggcttcgcccttggaccgcgcgagcgccgaccacgcgttgaagtactccatcatcggcgcgcccgacaccgttcaacagggtctggcggcgttcattcgactcacgggagtcgatgagctgatggtgacgggaatggtctacgaccacgccgcacggctgcgctccttcgagctgactgcgcaggcgcaccagcggctcgccgaggcagaagcggcgcagccggcctga

SEQ ID NO: 153544 - protein, 338 aa, Myxococcus xanthus DK 1622
MIPFSVLDLSPVTQGSTAADALRNTLDLARHAEDWGFKRFWLAEHHNMTGIASAATSVVIGYVAGGTKRIRVGSGGVMLPNHAPLIIAEQFGTLETLYPGRIDLGLGRAPGTDMLTARALRRDLAASADTFPQDVVELKSYFEPTEPGQLIQAVPGAGLKVPIWLLGSSLFSAQLAAMLGMPFAFASHFAPDALLQALDIYRERFKPSESLERPYAMACVNVFAADTDAEAQRLFTSVQQQFIRLRRGTPGQLPPPVDDIDSVASPLDRASADHALKYSIIGAPDTVQQGLAAFIRLTGVDELMVTGMVYDHAARLRSFELTAQAHQRLAEAEAAQPA

SEQ ID NO: 153545 - DNA, 1050 bp, Mycobacterium sp. MCS
  CDS (1)..(1050): transl_table=11
atgcgtctttctgtcctggacctcatccccgtgcgcaccgaccagaccacgtcggatgcgctggcggcgaccacccgactcgcacagaccgccgaccggctgggttacacgcgctactggatcgccgagcaccacaacatgcccgccgtcgcggcgaccagcccaccggtcgtgatcgcccacctcgccgcgcagacgtcgcaggtgcggttcggttccggcggcgtgatgctgcccaaccacgccccgctggccgtcgccgagcagttcgccctgctcgaggccgcccatcccggccgcatcgacctcgggatcggccgggcccccggatcggatccggtgacgtcgatggccctgcgcggcgccgccggccgcgacgacaccgacatcgaacgtttccccgactacctcgacgacgtcgcggcgctgatgagccgccatggggtgcgggtctcgttgccgcgcaacctgatgcgcgagaactacatcctcaaggccacccccgcggcgaccaccgaaccgcggctgtggctgctcggttcgtcgatgtactccgcgcgtctggccgcggccaaggggctgccgtacgtgttcgcccaccacttctccgggcagggcaccgccgaggcgttggcgacctaccggtcggagttccggcccagcgacgtcgccgccgaaccggtcacgttcctgaccgtcaacgccgtcgtggccgagacgcacgacgaggcgatggcgctgatgctgccgaacctgcacatgatggcccagctgcgcaccggtcagccgctgaccgcgctcgacctcgtggaggaagcgcaggccaaggagctcagcccgcaggcccaggccgtcgtccggcacggactgcagcgcgccgtcgtcgggtcgccgaccgaggcggccgatcaggtgcgagcgttggccgccgagttcgacgtcgacgaggtgatgatcaacccggtcgcctcggcgcgccgcggcaccgacccggcgacggcgccggcccgcgacaccacgctggaactgctcgccaaggagctgttctag

SEQ ID NO: 153546 - protein, 349 aa, Mycobacterium sp. MCS
MRLSVLDLIPVRTDQTTSDALAATTRLAQTADRLGYTRYWIAEHHNMPAVAATSPPVVIAHLAAQTSQVRFGSGGVMLPNHAPLAVAEQFALLEAAHPGRIDLGIGRAPGSDPVTSMALRGAAGRDDTDIERFPDYLDDVAALMSRHGVRVSLPRNLMRENYILKATPAATTEPRLWLLGSSMYSARLAAAKGLPYVFAHHFSGQGTAEALATYRSEFRPSDVAAEPVTFLTVNAVVAETHDEAMALMLPNLHMMAQLRTGQPLTALDLVEEAQAKELSPQAQAVVRHGLQRAVVGSPTEAADQVRALAAEFDVDEVMINPVASARRGTDPATAPARDTTLELLAKELF

SEQ ID NO: 153547 - DNA, 1020 bp, Rubrobacter xylanophilus DSM 9941
  CDS (1)..(1020): transl_table=11
atggccccagcgctgtccgtactggatctctcgccggttagcgccgggtcgggctcctcccgcgccctgcgcaacaccctggagctggcgcgcctcgccgaccggctcggctacgcccgctactggctcgccgagcaccacaacctcccgagcgtcgcgagccccgcgccggaggtcatgatcgggcacgtggcgaacgcgacggcccgcatccgggtcggggccggaggcatcatgctccccaaccacgccccgctgaaggtcgtcgagaccttccggctgctcgaggccctgcaccccgggcgcatagacctcgggatagggcgcgccccgggcaccgaccccgtcaccgcggccgccctgcgcaggggccggggggcggaggccgacgacttcccagagctcttcggcgagctcctggccttcgccggcgagggcttccccgagggacaccccttcgcctccgtgaaggccgtcccggaggacgcggagctgccccccatctggctcctcggctccagcggctactccgcgaaggccgccggggagatgggcctcggctacgccttcgcctcccacttcagccccgtggaccccgccccgccgatgctcgcctaccgcgagcacttccggccctcggagcgcttccccgagccccacgccatcctcgccgcctccgtggtctgcgccaggacgcgggagagggccgaggagctcgcctcctccatgggcctcgcctgggtgaggatgcgcaccggcaagcccggcccgctgccgagccccgaggaggcgctctcctacccctacagccccgcggagcggcgcctgctcgagagctaccgctccatgcaggtcgtcggcgacccggcgtccgtccgaaagaggctcgcggagatggcggagagaaccgcggccgaggaggtcatggtcaccaccatggtctacgaccacgaggccaggctccgctcctacgagctcctggcggaggccttcgggctcggccagcgtcgggagagctag

SEQ ID NO: 153548 - protein, 339 aa, Rubrobacter xylanophilus DSM 9941
MAPALSVLDLSPVSAGSGSSRALRNTLELARLADRLGYARYWLAEHHNLPSVASPAPEVMIGHVANATARIRVGAGGIMLPNHAPLKVVETFRLLEALHPGRIDLGIGRAPGTDPVTAAALRRGRGAEADDFPELFGELLAFAGEGFPEGHPFASVKAVPEDAELPPIWLLGSSGYSAKAAGEMGLGYAFASHFSPVDPAPPMLAYREHFRPSERFPEPHAILAASVVCARTRERAEELASSMGLAWVRMRTGKPGPLPSPEEALSYPYSPAERRLLESYRSMQVVGDPASVRKRLAEMAERTAAEEVMVTTMVYDHEARLRSYELLAEAFGLGQRRES

SEQ ID NO: 153549 - DNA, 987 bp, Mesorhizobium sp. BNC1
  CDS (1)..(987): transl_table=11
atgatccccttttccgtgcttgacctcgcccccattccggagggcgcctccccggccaatgcgctgcaaaacaccgtagacatcgcgcagcatgcggagcgttggggctatcaccggtactggctggcggagcaccacaacatgccgggcattgcgagtgccgcgaccgccgtgcttatcggacaggtagcggcaaagacctccaccatccgcgtcggtgccggaggcatcatgcttcccaaccacgctcctttgatggtggcggaacagttcggcacacttgccacgctttatccggaccggatcgatttggggcttggccgtgctcccggaaccgacatggggactgcgcgggcgctgagacgcggcctcgacaacggcgaaggctttccgcaggacgtgctcgagctgatcgcctatctcgacgatcctgtgccgggacagcaggtaagagccataccggggatgagcacacgcgttccggtgtggattctcggatcaagcctttatggcgcgcagctcgccgcccatcttggcctgccctatgccttcgcctcacatttcgcgccggcagcacttgagcatgcgctctcggtctatcgcgagactttccggccttcaaagcatcttgagcagccgcatttcatgctggctctcaacgtgttcgcagccgatacggacgaagaagggcttttcctgaaaacctccatgcagctcgcctttgccaatctgcgtaccggcaggccgggcccgctgccgcggccggtgaaggatatttccgagcatgtggattcggccatcatgccgtacatcgatcaagcgcttgcctgttcggcagcaggctcgccggaaacggtgcgaggccaactcaagtgcttcatcgagcgttacagcccggacgaagtgatcatcacaggtcagattcatgatcaccgcgcacgtgtcaggtcgttccagctcgcagccgagttgctgcgcgagctgtga

SEQ ID NO: 153550 - protein, 328 aa, Mesorhizobium sp. BNC1
MIPFSVLDLAPIPEGASPANALQNTVDIAQHAERWGYHRYWLAEHHNMPGIASAATAVLIGQVAAKTSTIRVGAGGIMLPNHAPLMVAEQFGTLATLYPDRIDLGLGRAPGTDMGTARALRRGLDNGEGFPQDVLELIAYLDDPVPGQQVRAIPGMSTRVPVWILGSSLYGAQLAAHLGLPYAFASHFAPAALEHALSVYRETFRPSKHLEQPHFMLALNVFAADTDEEGLFLKTSMQLAFANLRTGRPGPLPRPVKDISEHVDSAIMPYIDQALACSAAGSPETVRGQLKCFIERYSPDEVIITGQIHDHRARVRSFQLAAELLREL

SEQ ID NO: 153551 - DNA, 1005 bp, Rhodococcus sp. RHA1
  CDS (1)..(1005): transl_table=11
atgagcgctgttctgtcgattctcgatctggcctacatccgcgagggcgacacggcgcgggacagtttcgatgcgagcgtgaagctcgcgcaactcgcggagacccgcgggtaccgccgcatctggtacgcggagcaccacaacatgccgtcgatcggctcgtccgcgacgagcgtcctcatcgcgcacgtcgccgcgcacaccgagagcatccggctcggcgcaggcggcatcatgctgccgaaccacgcgccgctgacgattgcggagcagttcggcaccctcgagacactgcaccccggtcgcatcgacctcggactcggacgcgccccgggcagtgatcagaagacgatgtatgcgctgcgccgcgacccggcgtccgcggaccgcttcccgcaggacgtgctggaactccaggcatacctccgcggtgtgtcacgggttcccggcgtcgacgcgatccccggcaagggtacgaacgttcccctctacatcctcgggtcctcgacgttcggcgcacagctcgccgcgaagctcggactcccctacgccaacgcgtcccacttctcccccgactcgctcgtcgacgccgtcacgctgtaccgggagagattcgagccctccgaggatctgtccgagccgtacgtcatcgccggcgtcaacgccatcgccgcggacaccaccgaggacgcgcaccggcagttcgaggcgtccctgcggcggcgggtggtgcagatggtcggtcgcgggcagaaattcacccccgaggaggtcgacctcatcatgacgtccccggcaggtcagcaggtcgcgcagatggtgcgctactccgccgtcggaacgccgaccgaggtcaagacgtacctcgacgagttcgccgagcacgcgcaggccgacgagctgatcgtcgcctcccatgccgagaacaccgagtcctggctgaagacgtacgacctgctcgccgacgtgtggcgcggagctcccgtgcgcccttctggtagctag

SEQ ID NO: 153552 - protein, 334 aa, Rhodococcus sp. RHA1
MSAVLSILDLAYIREGDTARDSFDASVKLAQLAETRGYRRIWYAEHHNMPSIGSSATSVLIAHVAAHTESIRLGAGGIMLPNHAPLTIAEQFGTLETLHPGRIDLGLGRAPGSDQKTMYALRRDPASADRFPQDVLELQAYLRGVSRVPGVDAIPGKGTNVPLYILGSSTFGAQLAAKLGLPYANASHFSPDSLVDAVTLYRERFEPSEDLSEPYVIAGVNAIAADTTEDAHRQFEASLRRRVVQMVGRGQKFTPEEVDLIMTSPAGQQVAQMVRYSAVGTPTEVKTYLDEFAEHAQADELIVASHAENTESWLKTYDLLADVWRGAPVRPSGS

SEQ ID NO: 153553 - DNA, 975 bp, Rhodococcus sp. RHA1
  CDS (1)..(975): transl_table=11
atgaagctgtcgattctggaccggtcccgcacgcgccggggtgcgcccgactctgccgcgttgaccggaacgatcgagcgtgcggtgcatgccgaacagtggggattccatcggttctgggtcgccgaacaccacgccgtgccgggaatcgcgagtgggtcgccgccggtgctgctcgctgccctcggtgcccgcaccgaccggatccggctgggctcgggtggtgtgatgctgccgaatcatcagcctctcgtggtggccgagcagttcctggtgctcgaggcgatgtacccgggccggatcgacctgggcgtcgggcggtcgctgggattcacgaagccggtgcgcgaggcgctgcgccgcgaccgcaacgcccccgacacgttcgccgccgatctcgacgaggtgcggagctacctcgagggcaagggggccgtgaccgcccggccccacgtgacgagtccaccgccgatgttcgttctcgctacccggcgcgggctcgacttcgccgcgcaggcgggtctgccggtggtggtcggtgggccgatcctcgacggatcgggggcccgcgttccggaactggaccggtaccgcgacagcttcgtcccgtccgcgggtaaccggtccccgtacgtgatcgtctcgctcgaggtcatgatcgccgaggacgaagaccgcgcgcgtgagctgctgcttccggaggcgtgggcgctggcacagtcgagccggaccggcgagttcccgccgctcgaatcggtcgcggacatccggggtcaggcgtggacttcgcggctgcgcgaacaggtcgacgcgtcgatcgcgaactccattcacggcaccgccgagcaggtgagagtcgcgctcggggccctggccgcgcgtaccggtgcggacgaactactggcctcgacgtcgacgttcgaccgggccgcgctgttcgaatccgatcggcagttgtcgctcctggacgtgtga

SEQ ID NO: 153554 - protein, 324 aa, Rhodococcus sp. RHA1
MKLSILDRSRTRRGAPDSAALTGTIERAVHAEQWGFHRFWVAEHHAVPGIASGSPPVLLAALGARTDRIRLGSGGVMLPNHQPLVVAEQFLVLEAMYPGRIDLGVGRSLGFTKPVREALRRDRNAPDTFAADLDEVRSYLEGKGAVTARPHVTSPPPMFVLATRRGLDFAAQAGLPVVVGGPILDGSGARVPELDRYRDSFVPSAGNRSPYVIVSLEVMIAEDEDRARELLLPEAWALAQSSRTGEFPPLESVADIRGQAWTSRLREQVDASIANSIHGTAEQVRVALGALAARTGADELLASTSTFDRAALFESDRQLSLLDV

SEQ ID NO: 153555 - DNA, 1047 bp, Shewanella sp. MR-4
  CDS (1)..(1047): transl_table=11
atgtctatatcatccacttcaacatcagcagcccccatatctcaggcaaagtctcccctggcggatattcccttttcactcttagaactcgcccccgtacgtcaaggcgccagcatcggagacacgctacgcgcaagcctgcaatacgctaaggttgccgatgagttaggttttaatcgattctggtttgccgagcaccacaatatgctcggtatcgccagcgccgcgacatcggtattaattggctatattgccgagaatactaagcgcattcgcgtcggcgcgggtgggattatgctgcccaaccatgcgcccttagtggttgccgagcagtttggtacgctcgaaagtctttatcctgggcgtatcgatttagggcttggccgcgctcctgggagcgatcaaatcaccagccgcgcccttaaccgcgatatgagccgcgcggagcaatttcccgccgaggtgagcgagttacaaactttgctcggcgactacagtggccatcatcccgtaagagcgattcccggcgaaggcacccatgtaccgatttggctactcggctctagcctgtttagcgcccagcttgcggcacagcgcggcttaccctatgtctttgcagggcattttgcgccaagattcctctacgatgcgattgagatttaccgccgcgactttaagccatctaaggtgttggataagccctatgttatgcttggcctgccgctaatcgctgccgagacggacgccgaagccgaatacctgagcaccacctccaagcaacgggtacttgcgctgatccgtggtgaggctctgtggttaaaaccgcccgtgaacagcatggatggcctgtggagcgagcaggaaaaaacctatgtcgataacttcttaggcttatccgtcactggtggccccaccgccatcaagcaccgcttagagatgatagtgaaagagctgggtgtcgatgagtttatctttaccaacgatttgtatgatcaggacaaacgtgagcgtgcactgcaaatcctgatggagataaaaggctcttaa

SEQ ID NO: 153556 - protein, 348 aa, Shewanella sp. MR-4
MSISSTSTSAAPISQAKSPLADIPFSLLELAPVRQGASIGDTLRASLQYAKVADELGFNRFWFAEHHNMLGIASAATSVLIGYIAENTKRIRVGAGGIMLPNHAPLVVAEQFGTLESLYPGRIDLGLGRAPGSDQITSRALNRDMSRAEQFPAEVSELQTLLGDYSGHHPVRAIPGEGTHVPIWLLGSSLFSAQLAAQRGLPYVFAGHFAPRFLYDAIEIYRRDFKPSKVLDKPYVMLGLPLIAAETDAEAEYLSTTSKQRVLALIRGEALWLKPPVNSMDGLWSEQEKTYVDNFLGLSVTGGPTAIKHRLEMIVKELGVDEFIFTNDLYDQDKRERALQILMEIKGS

SEQ ID NO: 153557 - DNA, 1044 bp, Shewanella sp. MR-7
  CDS (1)..(1044): transl_table=11
atgtctatatcatccacttcaacatcagcagcccccgtatctcaggcaaagtctcccctggcggatattcccttttcactcttagaactcgcccccgtacgtcaaggcgccagcatcggagacacgctacgcgccagcctgcaatacgctaaggttgccgatgacttaggttttaatcgcttctggtttgccgagcatcacaatatgcctggtattgccagcgccgcgacatcggtgttaattggatttattgccgagaatactaaacacattcgcgtcggcgctggcggtattatgctgcccaaccatgcaccgctagtggttgccgagcagtttggtacgctcgagagtctttatcccggacgtatcgatttaggacttggccgcgcaccagggagcgatcaaatcaccagccgcgcccttaaccgcgatatgagccgagcggaacaatttcccgcagaggtcagcgagctgcaaaccttgctcggtgactacaatggccatcatcccgtgagagcgattcccggcgaaggcacccatgtgcccatttggttactcggctctagcctctttagcgcccagctcgcggcacagcgtggcttaccctatgtatttgcagggcattttgcaccaaggttcctctacgatgcgattgagatttaccgccgcgactttaagccatctaaggtattggataagccctatgtgatgcttggcctgccgctaatcgccaccgagacagacgccgaggccgaatacttaagcaccacatccaaacagcgaatactcgcgcttattcgcggtgaaccgctgtggttaaagccacccgtggacagcatggatggcctgtggagcgagcaggaaaaagcctatgtcgataacttcttagggctatcagtgacgggcggccccaccactatcaagcatcagttggagatgatagtgaaggagctgggtgtcgatgagtttatctttaccaacgatttgtacgatcagcaaaaacgcgaacgagcgctacagatcttaatggatatcaaaagctaa

SEQ ID NO: 153558 - protein, 347 aa, Shewanella sp. MR-7
MSISSTSTSAAPVSQAKSPLADIPFSLLELAPVRQGASIGDTLRASLQYAKVADDLGFNRFWFAEHHNMPGIASAATSVLIGFIAENTKHIRVGAGGIMLPNHAPLVVAEQFGTLESLYPGRIDLGLGRAPGSDQITSRALNRDMSRAEQFPAEVSELQTLLGDYNGHHPVRAIPGEGTHVPIWLLGSSLFSAQLAAQRGLPYVFAGHFAPRFLYDAIEIYRRDFKPSKVLDKPYVMLGLPLIATETDAEAEYLSTTSKQRILALIRGEPLWLKPPVDSMDGLWSEQEKAYVDNFLGLSVTGGPTTIKHQLEMIVKELGVDEFIFTNDLYDQQKRERALQILMDIKS

SEQ ID NO: 153559 - DNA, 1005 bp, Hyphomonas neptunium ATCC 15444
  CDS (1)..(1005)
atggccgaactctcaattctcgaactcggccgtgtccgcgaaggcttcacccgcaccgacgccctcaacgaagcccgccgcctcgcccagcatgccgaaagccttggctacaagcgcttctgggtcgccgagcatcataacatgcccaccgttaccacggcggccacatccctcgtcatcagccatattgcggccggcacaaagaccatccgcgtcggcgccggcggcatcatgctgcccaatcacgcgccctatatcatcgccgaacagttcggcacgctcgacgcgctctatcccggacggatcgacctgggcctcggccgcgcccccggcacggaccagatgaccctgcgcgccctgcgcgtgcatcccgaggaagccgaacgcttcccgcaggatgtggtggagctgcagatgtggcttggtccggtcaatgaaggccagcgcatcgaagccgtgcccggctccaattccaacgtcccgatctggattctcggctccagcctcttcggcgcccagctcgccgcagagcttggcctgccctatggcttcgcctcccacttcgccccgcaggcgctcgatcaggccctctccacctatcgctcgcgcttcaagccgaacgagaagatggccaagccctatgccctcattggtgtgaacatcatcgccgccgaaacggacgaggaagcccgctacctcgcaacgtcccagcagatgtccttcgccaatctcgtgcgcggccagcgcaaactgacccagccgcccatagacgacatcgacacctactggaccccgcaggaacgcgcccaggcctccgccatgctgaacttcagcatcatcggcgcccacgacaccgtccgccgcggcgtcgacgcgctgctggagcggacccatgccgatgagctgatgatcgtgtcggatatgtacgaccccgagaagcgccgccgctcgatcgagatcattgcggaagttctcgggaagaaggttgcagcgcccgcttactga

SEQ ID NO: 153560 - protein, 334 aa, Hyphomonas neptunium ATCC 15444
MAELSILELGRVREGFTRTDALNEARRLAQHAESLGYKRFWVAEHHNMPTVTTAATSLVISHIAAGTKTIRVGAGGIMLPNHAPYIIAEQFGTLDALYPGRIDLGLGRAPGTDQMTLRALRVHPEEAERFPQDVVELQMWLGPVNEGQRIEAVPGSNSNVPIWILGSSLFGAQLAAELGLPYGFASHFAPQALDQALSTYRSRFKPNEKMAKPYALIGVNIIAAETDEEARYLATSQQMSFANLVRGQRKLTQPPIDDIDTYWTPQERAQASAMLNFSIIGAHDTVRRGVDALLERTHADELMIVSDMYDPEKRRRSIEIIAEVLGKKVAAPAY

SEQ ID NO: 153561 - DNA, 1002 bp, Rhizobium leguminosarum bv. viciae 3841
  CDS (1)..(1002): transl_table=11
atggttcccttctccatactcgacctttcccccgttgccgaaggcagcaccgtgcgccagtccctcgagtcctcggcgcggatggctgtaaaggccgaggaattcggttacaagcgcttctggcttgccgaacatcacggcatgccggggatcgccagcgctgccacatcagtcgtcatcggccatgtcggagctgcgacaaagcgcatccgcatcggctccggcggcatcatgctgcccaatcattcgccgctcgtcatcgccgagcagttcggcacgctggaggcgctcttccccggccgcatcgatctcggcctcgggcgcgcgccgggaacggacatgcgcacggcacaggcgctgcggcgcaatctcgaggccggtgcaaacagctttccgaacgacgtggtggaactgcagcaacttctcgatacgccggttgataaccaggcgatcctcgcggttcccggcaatggttcacatatcccgatctggctgctcggctccagcctctacagcgcccagcttgccggcatgctgggccttccctatgccttcgcttcgcatttcgcgcccgacatgctgctcgatgcaatcgcgatctaccgcgaccgcttccaaccctcggcgacgctcgacaaaccccatgtgatggtcggcgtcatgggcgcggtggcggcgacggacgaggaggctcgctaccatttcacttccgcagagcagcagttcgtcaatctgcgccgcaatgtccgcggcccgttcccacgtccggtggccgatatggcggacttctggtcgccgatggaaaagatgaatgtcgaacacacgctgcgttatgccgtggtcggctcgccgaagacggcggaggcgaaactgacggagtttctacaggaaacgcaggccgacgaggtgatcatctcgatgccgatccacgacatcgaggcacggctgacatcggtggaactattcgcggggctaggaaatttcatgcgagccgccgcttag

SEQ ID NO: 153562 - protein, 333 aa, Rhizobium leguminosarum bv. viciae 3841
MVPFSILDLSPVAEGSTVRQSLESSARMAVKAEEFGYKRFWLAEHHGMPGIASAATSVVIGHVGAATKRIRIGSGGIMLPNHSPLVIAEQFGTLEALFPGRIDLGLGRAPGTDMRTAQALRRNLEAGANSFPNDVVELQQLLDTPVDNQAILAVPGNGSHIPIWLLGSSLYSAQLAGMLGLPYAFASHFAPDMLLDAIAIYRDRFQPSATLDKPHVMVGVMGAVAATDEEARYHFTSAEQQFVNLRRNVRGPFPRPVADMADFWSPMEKMNVEHTLRYAVVGSPKTAEAKLTEFLQETQADEVIISMPIHDIEARLTSVELFAGLGNFMRAAA

SEQ ID NO: 153563 - DNA, 1002 bp, Pseudomonas aeruginosa UCBPP-PA14
  CDS (1)..(1002): transl_table=11
atgacaacgcttgctgatattcccctgtccatgctcgacctggtgccggtgcgcaccggcggcagcgtggccgaagccctgcacaactccctggacctggcgcgccatgtggagcgcctgggcttcaaccgtttctggctggccgagcaccacaacatggatggcatcgccagctccgccaccgcgctgctgatcggccatatcgccggcggcacctcgcggatccgcgtcggctcgggtggggtgatgctgccgaaccatgcgccgctggtggtggcggaaaacttcggcaccctggagacgctctacccgggccgcatcgacctcggccttggccgcgccccgggcgccgaccaggcgaccatgcgcgccttgcgtcgcgaccgcctgggcaacggcgacgacttccccgagcaggtcgccgagctggaaatgctgctcggcccgcgccgttcccagcagagcctgctggcggtgccgggcgagggtacccaggtgccgatctggctactcggttcgagcctgttcagcgcccacctggcggcgcagaaaggcttgccctatgccttcgcttcgcatttcgcaccgcgttacctgcacgaggcgctgcgcatctaccgcagcaacttccagccctcggcggtactcgacaaaccttacgcgatgatcggcgtgccgctgatcgccgcacctaccgacgaagaggccgagttcctcgccactaccgccttccagcgcgtgctggcgctgatccgcggcgagagcctgaaacagaagccgccggtggaaagcatggcgccgttgtggctgccccacgagcaggatgcggtcggcagcttcttcggcctggcggtgatcggcggtccggagaaggttcgcgcgcgcctggagatcctcctggagcagaccggcgccgacgagcttatcttcaccagcgacttctacgagcacgcccatcggctgcgctcttgcgaaatcgtcgcggggctgaaaggggcgtga

SEQ ID NO: 153564 - protein, 333 aa, Pseudomonas aeruginosa UCBPP-PA14
MTTLADIPLSMLDLVPVRTGGSVAEALHNSLDLARHVERLGFNRFWLAEHHNMDGIASSATALLIGHIAGGTSRIRVGSGGVMLPNHAPLVVAENFGTLETLYPGRIDLGLGRAPGADQATMRALRRDRLGNGDDFPEQVAELEMLLGPRRSQQSLLAVPGEGTQVPIWLLGSSLFSAHLAAQKGLPYAFASHFAPRYLHEALRIYRSNFQPSAVLDKPYAMIGVPLIAAPTDEEAEFLATTAFQRVLALIRGESLKQKPPVESMAPLWLPHEQDAVGSFFGLAVIGGPEKVRARLEILLEQTGADELIFTSDFYEHAHRLRSCEIVAGLKGA

SEQ ID NO: 153565 - DNA, 990 bp, Solibacter usitatus Ellin6076
  CDS (1)..(990): transl_table=11
atggcttccacaccctccagaacgcccttctcggtcctcgatctggcgcccgtgcgccagggcggaactcccgctgaagccttccgcaactcgctcgacctggcgcgccacgccgagcagtggggctaccggcgctactggctcgccgagcatcacaacatcaacggcatcgcgtccgccgccacctcggtcctaatcggctatgtagccgggggaacttccaccatccgcgtgggctcgggcggcgtcatgctgcccaatcacgcgccgctggtcatcgccgaacagtttggcaccctggaggcgctctatcccggccgcatcgatctcggcctcggccgcgcgcccggcggcgacatggccgcggcacgcgccctgcgccgcgatctcaacgacggcgaggatttcgccgccctgctcgccgagctccgcgcctttctcgcaccggcgcggcgcgggcagtccgttcacgcgtaccccggggaaggcgccgacctgcccatctggctgctcggctccagcggctacagcgcggagctcgccggcctgctcggcctgcccttcgccttcgccggacactttcagccggacccgatggaggccgcgctcgccctttaccgcgacagctttcagtcctccgccgacctggagcggccctatgccatggcctgcatcccggtgatcgccgccgataccgacgagcacgcacgcctcctcgcaactaccgcgcagcgcaaattcctcaatctgattcgcaaccggcccatccccgccacgccgccatcgttcgagttcgattggagccccacggagcaggccgccgtcgcctctaaacttcgtgccgccatcatcggcactccggccgcgatccgcccccgactggagtcgctcatcgccacgctacagattcaggagctcatgatcgtcaccgatacttatcatcacgccgaccgcctccgttcctacgaactgctcgccgcaatgatgtga

SEQ ID NO: 153566 - protein, 329 aa, Solibacter usitatus Ellin6076
MASTPSRTPFSVLDLAPVRQGGTPAEAFRNSLDLARHAEQWGYRRYWLAEHHNINGIASAATSVLIGYVAGGTSTIRVGSGGVMLPNHAPLVIAEQFGTLEALYPGRIDLGLGRAPGGDMAAARALRRDLNDGEDFAALLAELRAFLAPARRGQSVHAYPGEGADLPIWLLGSSGYSAELAGLLGLPFAFAGHFQPDPMEAALALYRDSFQSSADLERPYAMACIPVIAADTDEHARLLATTAQRKFLNLIRNRPIPATPPSFEFDWSPTEQAAVASKLRAAIIGTPAAIRPRLESLIATLQIQELMIVTDTYHHADRLRSYELLAAMM

SEQ ID NO: 153567 - DNA, 1050 bp, Shewanella sp. ANA-3
  CDS (1)..(1050): transl_table=11
atggctatatcatcgacttcaacatctgccaccccatcgcaggcagtgactaaatctcccctagcggatattcccttttcactcttagagctcgcccccgtacgccaaggcgcgagcatcggagacacgctacgcgccagcctacaatacgctaaggtggccgatgacttaggttttaatcgattctggtttgccgagcaccacaatatgcccggtatcgccagcgccgcgacatcggtgttaattggctatattgccgagaatactaaacgcattcgcgtcggcgcgggtgggattatgctgcccaaccatgcgcccttagtggttgccgagcagtttggtacactcgaaagcctttatcctggtcgtatcgatttaggacttggccgcgcaccgggcagcgatcaaatcaccagccgcgcccttaaccgcgatatgagccgcgcggagcaatttcccgccgaggtgagcgagttacaaaccttactcggcgactacaatggccgtcatcccgtaagagcgattcccggcgaaggcacccatgtgccgatttggctactcggctctagcctctttagcgcccagcttgcggcacagcgcggcttaccctatgtctttgcagggcattttgcgcccagattcctctacgatgcgatagagatttaccgccgcgactttaagccatctaaggtgttggataagccctatgtcatgcttggcctgccacttatcgccgccgagacagacgccgaagcagaatacttaagcaccacctccaagcaacgggtgcttgcgctgatccgtggtgaaccgctttggttaaaaccgcccgtagacagcatggatggcctgtggagcgagcaggaaaaaacctatgtcgataacttcttaggcttatccgtcaccggtggccccaccagcatcaaacaccgcttagagatgatagtgaaggagttaggtgtcgatgagtttatctttaccaacgatttgtatgatcaggacaaacgtgagcgagcgctgcaaatcctaatggagataaaaggctcttaa

SEQ ID NO: 153568 - protein, 349 aa, Shewanella sp. ANA-3
MAISSTSTSATPSQAVTKSPLADIPFSLLELAPVRQGASIGDTLRASLQYAKVADDLGFNRFWFAEHHNMPGIASAATSVLIGYIAENTKRIRVGAGGIMLPNHAPLVVAEQFGTLESLYPGRIDLGLGRAPGSDQITSRALNRDMSRAEQFPAEVSELQTLLGDYNGRHPVRAIPGEGTHVPIWLLGSSLFSAQLAAQRGLPYVFAGHFAPRFLYDAIEIYRRDFKPSKVLDKPYVMLGLPLIAAETDAEAEYLSTTSKQRVLALIRGEPLWLKPPVDSMDGLWSEQEKTYVDNFLGLSVTGGPTSIKHRLEMIVKELGVDEFIFTNDLYDQDKRERALQILMEIKGS

SEQ ID NO: 153569 - DNA, 1032 bp, Mycobacterium avium 104
  CDS (1)..(1032): transl_table=11
atgcgtctttccgtcctcgatctcgtcccggtgcgcaccgaccagaccaccggcgacgcgctggccgccaccgtggcgctggcgcaggccgccgatcggctcggtttcacccgctactgggtagccgagcaccacaacatgccgtcggtgggcgccaccagcccgccggtgctgctcgcgtacctggccccgcagaccacccggctgcggctcggctcgggcggggtgatgctgcccaaccatgcgccgctggcggtggccgagcagttcgcgctgctggaggccgccgcgccgggccggatcgacctcggcatcggccgggcgcccggctccgatccggtcacctcctacgcgctgcgcggcggccgcggcgacgaggacatccagcgcttccccgactacctcgacgacgtggcggcgttgatgagcgcgcgcggcgtggtggtgccgctgcgctcgggggactaccggctcagggccacccctgccgccgccggcgagccgcggctgtggctgctgggctcgtcgatgtactccgcgcacctggccgccgccaaggggttgccctacgtgttcgcccatcacttctccggcaagggaaccgaggaggcgctcgaggtctaccggtcgcggttccggcccagcgcgctgacgcccgagccgctcacctttttgacggtcaacgccgtagtggccgaaacccgggacgaggcaacggctttgatgctgcccaacctgcagatgatggcgaagcttcgcaccgggcagccgctcgggccggtgccgctggtcgaggatgccgaacacgccgagctcaccgccgagcagcggcgcatcgtggacagcgggctgcggcgcgcggtgttgggcggcccggccgaggccgccgagcaggttcgggcgctcgccgagcggttcggtgtcgacgaggtgatggtgaatccggtggcgtcggcccgccgcgggaccgaccccgccaccgcgccggcccgggtcgcgacgctggagctgctagccaaggagctgttctga

SEQ ID NO: 153570 - protein, 343 aa, Mycobacterium avium 104
MRLSVLDLVPVRTDQTTGDALAATVALAQAADRLGFTRYWVAEHHNMPSVGATSPPVLLAYLAPQTTRLRLGSGGVMLPNHAPLAVAEQFALLEAAAPGRIDLGIGRAPGSDPVTSYALRGGRGDEDIQRFPDYLDDVAALMSARGVVVPLRSGDYRLRATPAAAGEPRLWLLGSSMYSAHLAAAKGLPYVFAHHFSGKGTEEALEVYRSRFRPSALTPEPLTFLTVNAVVAETRDEATALMLPNLQMMAKLRTGQPLGPVPLVEDAEHAELTAEQRRIVDSGLRRAVLGGPAEAAEQVRALAERFGVDEVMVNPVASARRGTDPATAPARVATLELLAKELF

SEQ ID NO: 153571 - DNA, 1050 bp, Mycobacterium smegmatis str. MC2 155
  CDS (1)..(1050): transl_table=11
atgcggctttctgtcctcgacctcgtcccggtgcgtaccgaccagaccacagccgacgcgctggcggccaccacgcacctcgcgcagaccgctgaccggctcggataccaccgcttctgggtcgccgaacaccacaacatgcccgcggtcgcggccaccagcccgccggtcctgatcgcgcacctggccgcgcacacgtcgcagctgcggctggggtcgggcggggtgatgctgcccaatcacgcgccgctggccgtcgccgaacagttcgcgctcctggaggccgcccatcccgggcgcatcgatctgggcatcgggcgtgcccccgggtcggatcccgtcacctcgctggcactgcgcggcgccgcgggtcgcgacgaccgcgacatcgaggccttcccccagtacctcgacgacgtcgtcgcgctcatgggtgcgcgcggcgtgcgggtcccgctgccgcgagacctgctgcgggacaactacatcctcaaggccacgcccaacgcgacctcggtgccgcagctgtggctcttgggttcgtcgatgtactcggcgcatctcgcggcggccaagggcctgccgtacgtgttcgcgcaccacttctcgggtcacggcaccgccgaggcgctcgcgatctaccgcgaagagttccagcccagcgaggccgcgcctgagcccgtgacgttcctgaccgtcaacgccgtggtcgccgagaccaccgaggaggccgaggcgctgctgctgccgcaactgcagatgatggcccggttgcgcaccggtcagccgctcaacgcgctcgatctggtggaggacgcgcagaccacggtcctcacgccgcagggcgacgccgtggtcgccgacgggcgccgccgcgccgtggtcggatcacccaccgaggccgccgagcaggtgcgggcactggccgaggagttcgacgtcgacgaggtcatgatcaaccccgtcgcgtcggcgcaccgcggcgccgatccgaggaccgcgaccgcacgcgacaccacgctggaactgctcgcgaaggaactcttctag

SEQ ID NO: 153572 - protein, 349 aa, Mycobacterium smegmatis str. MC2 155
MRLSVLDLVPVRTDQTTADALAATTHLAQTADRLGYHRFWVAEHHNMPAVAATSPPVLIAHLAAHTSQLRLGSGGVMLPNHAPLAVAEQFALLEAAHPGRIDLGIGRAPGSDPVTSLALRGAAGRDDRDIEAFPQYLDDVVALMGARGVRVPLPRDLLRDNYILKATPNATSVPQLWLLGSSMYSAHLAAAKGLPYVFAHHFSGHGTAEALAIYREEFQPSEAAPEPVTFLTVNAVVAETTEEAEALLLPQLQMMARLRTGQPLNALDLVEDAQTTVLTPQGDAVVADGRRRAVVGSPTEAAEQVRALAEEFDVDEVMINPVASAHRGADPRTATARDTTLELLAKELF

SEQ ID NO: 153573 - DNA, 1098 bp, Nocardioides sp. JS614
  CDS (1)..(1098): transl_table=11
atggcccgaggccgggaccggaatggaacacccggccggccggttggcaccagggtgagcgcccgtcgtaccgccctgtccgtcctcgacctggtcccggtccgcagcgaccagacgaccgctgacgcactcgcggcgacgctctcgctcgcccgggtcgccgacgagctcgactaccggcgctactggctcgccgagcaccacaacatgcccgcggtcgccgcgaccaacccaccggtgctgatcgggctggtcgccggcgcgacccggcggcttcgggtcggctccggtggggtgatgctgcccaaccatgcgccgctcgtcgtcgccgagcagttcgcgctcctcgaggcggccttccccggccggatcgacctcggcatcggccgggcgccgggcagcgatccggtcacgtcctacgcgctgcggcacggcgccgggggagtgaacgacgaggcggtcacccggttccccgagtacgtcgacaacgtgctcgcgatgatggctcccgagggggtcggcctcggcatccagggccgcacctacccgctgcgcgccacccccgcggcgagcaccgtcccgaccgtctggctgctcgggtcctcggactactccgcccggctggccgccgagaaggggatgccctacgtcttcgcgcaccacttctccggctcgggtaccgccgaggcgctcgagctctaccgctccggcttccgcgcgtcccccgagctctcggagccgcggaccttcctcacggtgaacgcagtggtggccgacaccgaggacgaggcgcggcgcctggcgctgccccagctgctggccatggtggcgctgcgcaccggcggggagctgcgcccgcagctcagggtcgaggaggcggagaaggtcgagctgccgccgtcgcaccacgacctgctggaggcgatggcgcagcgctgggtgatcggcgcccccgaccgggcccggagccggatcgaggagctggcggcgacgtacgacgtcgacgaggtgatggtgcacccggtcgccggtgccttcacgggcacggagccgaccgcgagccccgctcgcgagcagacgctgcggctgctcagttag

SEQ ID NO: 153574 - protein, 365 aa, Nocardioides sp. JS614
MARGRDRNGTPGRPVGTRVSARRTALSVLDLVPVRSDQTTADALAATLSLARVADELDYRRYWLAEHHNMPAVAATNPPVLIGLVAGATRRLRVGSGGVMLPNHAPLVVAEQFALLEAAFPGRIDLGIGRAPGSDPVTSYALRHGAGGVNDEAVTRFPEYVDNVLAMMAPEGVGLGIQGRTYPLRATPAASTVPTVWLLGSSDYSARLAAEKGMPYVFAHHFSGSGTAEALELYRSGFRASPELSEPRTFLTVNAVVADTEDEARRLALPQLLAMVALRTGGELRPQLRVEEAEKVELPPSHHDLLEAMAQRWVIGAPDRARSRIEELAATYDVDEVMVHPVAGAFTGTEPTASPAREQTLRLLS

SEQ ID NO: 153575 - DNA, 1038 bp, Azoarcus sp. BH72
  CDS (1)..(1038): transl_table=11
atgaccgccgcgccgccgcaaccggctgtcggccgcgcggtggcgcggctgtccgtcctcgacctcgccccgatcaccgagggcagcaccgccgcgcgggcgctcgccaacacgcgcgacctcgcccgcgtcgccgagcgctgcggctatacccgctactgggtcgccgagcatcacaacatgaccggcatcgccagcgcggccaccgcggtggtaatcggccacatcgccgcggccacctcgacgatccgcgtcggcgccggcggcatcatgctgcccaatcacgcgcctctggtaattgccgagcagttcggcacgctggaatccctctttcccggccgcatcgaccttggcctgggccgcgcgcccggcaccgaccagcgcaccgcgcgcgccctgcgccgcagcctggtcggcagcgacgacagctttccgcaggacgtggtcgagttgcagggctggttcgccgacccgcagccgggccaggccatccaggcggtgcccggcgccgggctgaaggtgccgatctggctgctcggttccagcctcttcagcgccggcctcgccgcccagctcggcctgcccttcgccttcgcgtcgcacttcgcgccgcgcttcctcaagcaggcaatcgcgctctaccgccgtgaattccagccctcggcggcgcttgccgaaccctatgtgatggtcggcgccaacgccatcgcggccgacagcgacgcgcaggccgccttcctgttccgctcgctgcgcctgcgcttcgcggcgatggcgcgcggcgtgcgcggccagctgccgccgccggaacgcttcaacgaagccgactggtcacccaacgaactcgccttcgccgacgagtcgctgtcgtgctcggcggtcggcagcccacacacggtgcgccagcggctgatggagatcgtcgaggacaccggcgccgacgagctgatgctgaccgcgcagattttcgaccatggcgcgcggctgcggtcgttcgagttgatagcgcgggcttggcagctgaagcccggggactga

SEQ ID NO: 153576 - protein, 345 aa, Azoarcus sp. BH72
MTAAPPQPAVGRAVARLSVLDLAPITEGSTAARALANTRDLARVAERCGYTRYWVAEHHNMTGIASAATAVVIGHIAAATSTIRVGAGGIMLPNHAPLVIAEQFGTLESLFPGRIDLGLGRAPGTDQRTARALRRSLVGSDDSFPQDVVELQGWFADPQPGQAIQAVPGAGLKVPIWLLGSSLFSAGLAAQLGLPFAFASHFAPRFLKQAIALYRREFQPSAALAEPYVMVGANAIAADSDAQAAFLFRSLRLRFAAMARGVRGQLPPPERFNEADWSPNELAFADESLSCSAVGSPHTVRQRLMEIVEDTGADELMLTAQIFDHGARLRSFELIARAWQLKPGD

SEQ ID NO: 153577 - DNA, 1032 bp, Acidovorax sp. JS42
  CDS (1)..(1032): transl_table=11
atgaccacacattccctacctttactttccatgcttgatctcgtggccgtgcgcgagggcggcaccgtggcccaggcactgcaggtcgccgtgcagacggcgcagcatgcggaggcgctgggcttcaagcgctactggctggccgagcaccacaacatgccgggcatcgccagctctgccacggccgtgctggtcggccacgtggccggggccacgcagaccatccgcgtgggctcgggcggcatcatgctgcccaaccatgcgccgctggtggtggccgaggccttcggcacgctggccgagctctaccccggccgtatcgacctggggctgggccgcgcacccggcaccgacggcgccaccatgcgcgccctgcgccgcgaccgcgtggagaccgaggccgacttcccccgcgacgtggccgagctgcagcagctcttggcgcccgcgcagccgggccagcgcatcatcgccgtgccgggcgccggcacgcaggtgcccctctggctgctgggctccagcctgttctcggcgcagctggcggcgcagatgggcctgccctatgccttcgcctcgcactttgcgccgcgcatgctgcacgcggccatcgacatctaccgccggctgttccgcccctcgccagcctgcgccaagccctacgtggtgatcggcgtgcccgtgatcgccgcacccaccgatgacgaggcgcagtacctggccagcagcacctaccagcgcgtgctgggcattctcaccggccagcgcgggctgctgcagccgcccgtagaaggttatctgcagagcctcgcgccgcaggagcgcgccgccgtggccgacttcctcgcggtcggcgtggtcggtggcccgcagaccgtgcgcgcgggcctgcaggcgctggtggccgccacgcaggccgacgaattcatgctggtgagcgacgtgtacgacccggcgctgcgcctgcgctcgctggacatcaccgcccaggcgcacgcggcactgtcacccgcagcggctaccatggcgggctga

SEQ ID NO: 153578 - protein, 343 aa, Acidovorax sp. JS42
MTTHSLPLLSMLDLVAVREGGTVAQALQVAVQTAQHAEALGFKRYWLAEHHNMPGIASSATAVLVGHVAGATQTIRVGSGGIMLPNHAPLVVAEAFGTLAELYPGRIDLGLGRAPGTDGATMRALRRDRVETEADFPRDVAELQQLLAPAQPGQRIIAVPGAGTQVPLWLLGSSLFSAQLAAQMGLPYAFASHFAPRMLHAAIDIYRRLFRPSPACAKPYVVIGVPVIAAPTDDEAQYLASSTYQRVLGILTGQRGLLQPPVEGYLQSLAPQERAAVADFLAVGVVGGPQTVRAGLQALVAATQADEFMLVSDVYDPALRLRSLDITAQAHAALSPAAATMAG

SEQ ID NO: 153579 - DNA, 1029 bp, Croceibacter atlanticus HTCC2559
  CDS (1)..(1029): transl_table=11
atgtctaaagataaatcacaggaaactataccatattcaatattagaattagcaacagttggtaaaggagtttcggtttcagatacttttaagaatagcttaaaattagcgcaagctgcagaagatttaggctataaaagattctggttggcagaacatcataatatggtgagtattgccagttctgcaacttctgttttaatgagtcatattgctggtggcaccaaaagtatacgagttggttctggaggaattatgttaccaaatcactcttctttaattattgctgaacaatttagtacgcttgcacacttgtatccagatagaatagatttaggattaggacgcgctccaggaacagaccagaccacagcacaagccataagaccagatagaatgcaagctgtgtatcaatttcctcaagaattagagcaaatacaaaagtacttttctaaagaaaatgtaaatgctaaagtgagagtgcccattgctgaaggtattaacttgccaacctacatattgggttcaagtacagatagtgcccacttagcagccaaacttgggttaccatatgtttttgcaagtcattttgctcctacacatttgtttgaagcatttgagatatatagacgagaatttaaaccctctaaatttcttaaagaaccaaaaactattgcttgcattaatgcaatagttgcagactcaaatgaagaagcagagcgcatttctacatctatgatacgtatgcttataggagttttaactggtagattagattatatgcaaccaccaacagctatgacgccagatttaaaagctgtagtagaaaaccctgcattacagcgaatgatggcttatgcttttgctggagacaaagcaatggtgtctgaaaaaacaaaacaatttttagaagacacacaagcagatgagctaatggtagtatcacatatttacgattacgaagaccgcttaaagtctgtaactttatttgcagaattaatgaaagatcttaatgcagtaccagcttaa

SEQ ID NO: 153580 - protein, 342 aa, Croceibacter atlanticus HTCC2559
MSKDKSQETIPYSILELATVGKGVSVSDTFKNSLKLAQAAEDLGYKRFWLAEHHNMVSIASSATSVLMSHIAGGTKSIRVGSGGIMLPNHSSLIIAEQFSTLAHLYPDRIDLGLGRAPGTDQTTAQAIRPDRMQAVYQFPQELEQIQKYFSKENVNAKVRVPIAEGINLPTYILGSSTDSAHLAAKLGLPYVFASHFAPTHLFEAFEIYRREFKPSKFLKEPKTIACINAIVADSNEEAERISTSMIRMLIGVLTGRLDYMQPPTAMTPDLKAVVENPALQRMMAYAFAGDKAMVSEKTKQFLEDTQADELMVVSHIYDYEDRLKSVTLFAELMKDLNAVPA

SEQ ID NO: 153581 - DNA, 990 bp, Sulfitobacter sp. EE-36
  CDS (1)..(990): transl_table=11
atgcgatattcagtccttgatctttcccccgtacccgaagggtcagatgcccgccaagccattgcgaatacgattgatctggcaaagcggaccgaagcggcgggatatcatcgctactggatggcagagcatcacaacatgccggggatcgcctctgccgcgacatcggtgttgatcgggcatgtggcggatcacacctcccgcatccgtgtgggcgcggggggcatcatgttgccgaaccacgcgccgctggcgattgcagagcagtttggcacgcttgccacgattcatggagaccggattgatctgggccttgggcgcgcgcccggtggggatcaggccgtgtaccatgccttgcggcgcgggatccaagggggcgaccgtttccccgaagatgtggccgagctgatcggctatcttggcgaggcccctgcgggggcgcgtgtgatggcgcatccggggcagggcacgcatgtgccggtgtggatattgggctcttcgctttatggcgcgcagctggcggcgcatttcgggctgccctatgcctttgcctcgcatttcgcccccgatgcgttggaagacgccgtggcgatttaccgtcgcgatttcaaaccctcggcgcagtgggagaaaccgcatttcatgttggcggcgaatgttttcgcggcggataccgatgaagagggggcctaccttcggacctccatgcagcaggcttttgtgcggttgcgcaccggcaaaccgggcaagctgccgcgtcccgtgcgcgatattgatgccgaggttggcgttcagatgcgtcaggccgttgatcaggccctgcgggtgactgccgtgggcagccccgagcgtgtcgcgcggcaactgtcgcagatgattgagatatatcaaccggatgaattgatcctgacagggcagatccacgaccacgccgcgcgggtcaaatccttcgagatcgcggcgcaggccttggcggagatcgccgcctag

SEQ ID NO: 153582 - protein, 329 aa, Sulfitobacter sp. EE-36
MRYSVLDLSPVPEGSDARQAIANTIDLAKRTEAAGYHRYWMAEHHNMPGIASAATSVLIGHVADHTSRIRVGAGGIMLPNHAPLAIAEQFGTLATIHGDRIDLGLGRAPGGDQAVYHALRRGIQGGDRFPEDVAELIGYLGEAPAGARVMAHPGQGTHVPVWILGSSLYGAQLAAHFGLPYAFASHFAPDALEDAVAIYRRDFKPSAQWEKPHFMLAANVFAADTDEEGAYLRTSMQQAFVRLRTGKPGKLPRPVRDIDAEVGVQMRQAVDQALRVTAVGSPERVARQLSQMIEIYQPDELILTGQIHDHAARVKSFEIAAQALAEIAA

SEQ ID NO: 153583 - DNA, 1002 bp, Oceanicola batsensis HTCC2597
  CDS (1)..(1002): transl_table=11
atgcggtattccctgctcgacctggcgccgatccccgagggcggcacggcgcgcgatgcgatcgcgaactcggtgtccctggcccagcacgccgagggccagggctatcaccggctctggctggccgaacatcacaacatgcccggcatcgcctcgtccgcgacctcggtgctgatcgggcatatcgcgggggcgacctcgcggatccgggtcggctcggggggcgtcatgctgccaaaccatgcgccgctggtgatcgccgagcagttcggcacgctcgccacgatccacggcgaccgcatcgacctcggcctcggtcgggcgcccggaaccgacatggaaaccgcccgtgccctgcgccgccacatgtcgcagcaggacacctttccgcaggacgtgctggagctgctggcccatctcggtccggctgaagagggccagcgcgtgcgcgcgatcccgggcacgggcaccggggtgccgatctggatcctcgggtcgtcgctctatggagcacaactggcggcgcatctgggcctgccctatgccttcgcctcgcatttcgcgcccgagatgctggccgaggcgggcgaggtctatcgccgcagcttccagccctcggcctacctggacaagccgcattttatggtggcgatgaacgtcttcgccgccgaaaccgaggaagaggcgctctactggcaatcctcggccgtgctgggtttcgccagactgcgcgcgggtatgccggggcccttgccccggcccgtcgagcggctggaggatcaccttgagcccagctggatcgccgccgcgcagacgcggttcacggtcagcgccatcgggtcggaagagatggtcaagcgccagaccgcgacgatcctcgaaacctaccagcccgacgaggtgatggtgaatgcgcagatccacggccatgcggcccggctgaaatcggtcggcatcgccgcgcgcgtgctgcgcgacctcggggcggtggcctcggtctga

SEQ ID NO: 153584 - protein, 333 aa, Oceanicola batsensis HTCC2597
MRYSLLDLAPIPEGGTARDAIANSVSLAQHAEGQGYHRLWLAEHHNMPGIASSATSVLIGHIAGATSRIRVGSGGVMLPNHAPLVIAEQFGTLATIHGDRIDLGLGRAPGTDMETARALRRHMSQQDTFPQDVLELLAHLGPAEEGQRVRAIPGTGTGVPIWILGSSLYGAQLAAHLGLPYAFASHFAPEMLAEAGEVYRRSFQPSAYLDKPHFMVAMNVFAAETEEEALYWQSSAVLGFARLRAGMPGPLPRPVERLEDHLEPSWIAAAQTRFTVSAIGSEEMVKRQTATILETYQPDEVMVNAQIHGHAARLKSVGIAARVLRDLGAVASV

SEQ ID NO: 153585 - DNA, 993 bp, Erythrobacter sp. NAP1
  CDS (1)..(993): transl_table=11
atgaccgagttttccgtccttgacctcgtgcccgttcgcgaaggcgggagcgtaggcgaggcaatggaagcgagcacctcgctcgcccgcaaggcggaagaacttggctgcaagaggttctgggttgcagagcatcacgccatggaaggcattgctggaggcgccacctcggtagtgctcgcccatatcggcaacgcgacaagccgcatccgcatcggttctggcgggatcatgcttcccaaccacacgccgttccagatcgctgaacaattcgggacgctcgatgcgctatttcccggacggatcgacttggggctgggaagagcgccgggagcgggccctgaacttcaacgcgctcttcgcaagaatctccagcaagcctcggaatactttccgcaagacgtgttagagctgcgcgctttgttgacgggcgatgtcgaactgacagtcaaggccacgccgggccttggcgccaatgtcgaattctggatgctcggatcgagcctcttcggtgcgcaattggcggcaaagcttggcatgccctacgcttttgccgcgcacttcgcgcccgatcatctcgacgaagcgctcgacctttatcgtcgcaatttcgagccttccgatgctctcggcgagccgcatgtcatggtcgccatcaatgcctttgcagccgacagcgacgaggaagcccgcactcttgcatccagccagcaacaggctttcgttgcgttgcgcaccggtaatcctggcaaactgcagcccccgataaaggattacacctcgacattgcctgcgccccacctggcaatgctcgaccacgttggtcaggcttccgcggtcggaagtcgcgaaacggtgagggacgcaatcgaactcttcatcaagcgcaccagagcagacgaaatcatcttgtgcgggtcgacctatgatcctgcggcacgagaagcttcgctcgagataacgcttgaagcggtaagagccgtagcggcttaa

SEQ ID NO: 153586 - protein, 330 aa, Erythrobacter sp. NAP1
MTEFSVLDLVPVREGGSVGEAMEASTSLARKAEELGCKRFWVAEHHAMEGIAGGATSVVLAHIGNATSRIRIGSGGIMLPNHTPFQIAEQFGTLDALFPGRIDLGLGRAPGAGPELQRALRKNLQQASEYFPQDVLELRALLTGDVELTVKATPGLGANVEFWMLGSSLFGAQLAAKLGMPYAFAAHFAPDHLDEALDLYRRNFEPSDALGEPHVMVAINAFAADSDEEARTLASSQQQAFVALRTGNPGKLQPPIKDYTSTLPAPHLAMLDHVGQASAVGSRETVRDAIELFIKRTRADEIILCGSTYDPAAREASLEITLEAVRAVAA

SEQ ID NO: 153587 - DNA, 999 bp, marine gamma proteobacterium HTCC2143
  CDS (1)..(999): transl_table=11
atggcaacaaaattatcggttctggatctctctccgatcccccaaggcagtacccccggtgaggctctgaacaactcgctggatttagctcagcatgctgagtctcttggctataatcgttactgggttgctgaacaccatagtatgcgcggtattgccagtgcagcgacatctgtggttattggttatctagcggcaggtacttcgaccatccgtgttggtgccggtggcattatgttgccgaatcattcgcctttggtcattgcggaacaatttggcacattggcgtcgctttatcccgatcgcattgatctgggcttggggcgtgcaccaggaactgaccaagtaacatctcaagctttacgcaggacacttaacggtagttctgacgacttcccgagagatgtggttgagttgcagcaatattttaaaccggctgacaaacaccagcgcgttattgctgttcccggtgagggtacaaatgtacccctgtggattctcgggtcgagcttgtttggtgctcagttggcggcgatgttaggactgccgtttgcctttgcttctcactttgcgccgcagcaaatgatgcaggctcttgagatataccgcgatcggttcaaaccgtcagcacaattaaagcagccctatgtcatgctagggtttaatatttgcgcagctgatactgtcgaagaagcgcagtatctgcggtcttcttcactacaatcttttctcaatctgaggaaaggtaccccgggccaattacctcccccggtggctaacttcgaggagtcgatggcgccccaggacagagccgttttggcacaaatcgggtcctgctctgcggtgggtacaatcgtggaagtagaacagggaatggcggaatttatccgccaaactgacgctgacgagctgatgctggtatcgtctatttttgatcatcaaaaacggaaatatgcttttgacgtggctgcaaaagcgggtcaacagtttgccagttag

SEQ ID NO: 153588 - protein, 332 aa, marine gamma proteobacterium HTCC2143
MATKLSVLDLSPIPQGSTPGEALNNSLDLAQHAESLGYNRYWVAEHHSMRGIASAATSVVIGYLAAGTSTIRVGAGGIMLPNHSPLVIAEQFGTLASLYPDRIDLGLGRAPGTDQVTSQALRRTLNGSSDDFPRDVVELQQYFKPADKHQRVIAVPGEGTNVPLWILGSSLFGAQLAAMLGLPFAFASHFAPQQMMQALEIYRDRFKPSAQLKQPYVMLGFNICAADTVEEAQYLRSSSLQSFLNLRKGTPGQLPPPVANFEESMAPQDRAVLAQIGSCSAVGTIVEVEQGMAEFIRQTDADELMLVSSIFDHQKRKYAFDVAAKAGQQFAS

SEQ ID NO: 153589 - DNA, 1023 bp, marine gamma proteobacterium HTCC2080
  CDS (1)..(1023): transl_table=11
atgacacaccacagtattctcgatttagttccgattacccttggtagcgacgcggggtgcgctcttgagcgcagtaaacagctcgctattaaggcggaagcctggggttataagcggtattgggtcgccgagcatcacaatatgccgggcattgccagctcggccaccgcggttgtaatcggtcatcttgcttcggcgactcagaccattcgcgtgggctcggggggcatcatgctgcccaaccatgcaccactgatggtggcggaacagttcggaacgctggctacgttgtaccccaaccgaattgatttaggcataggccgcgcaccgggcaccgatggccttacaatgcaggctctgcgacgtaatctcgccgcaagtgtcgaagactttcccagagacgtggtggaactgcagcaatacctaaagcctacccaacccggacaacgcgtgagcgcaacgccaggggcgggcactgaggttccaatctggattttgggttcgagtttgtttggcgcgcagcttgcggccactttgggtatgccctttgcgtttgcctcacattttgcgcctacttacttaggcgctgcgatcgaaacctatcgcgcacagtttacgccctcagcaaccttgaaagagccatacgttatgttgggtttcaacctttgcgccgcagagacagatgcccacgctcattttctacgctcgtcctcgctacagtcctttgtcaatctgaggcgaggagcgcccgggcccttacctgaacctattgaaggttttgaagccagcctttcgcccgcggagcgacaggtggttcaggctattggtcaatgctcagccgttggcaatttggaaactgttcaagcacaaatcggtgccttcctcgatcagacgggggcagatgagctgatgctggtatcctcgatttttgacccagagcagcgtctgaagagttacgagcttggctccgttgcgatgcagaatctagccgagaccaacacaccacgtcgagccgcttgttga

SEQ ID NO: 153590 - protein, 340 aa, marine gamma proteobacterium HTCC2080
MTHHSILDLVPITLGSDAGCALERSKQLAIKAEAWGYKRYWVAEHHNMPGIASSATAVVIGHLASATQTIRVGSGGIMLPNHAPLMVAEQFGTLATLYPNRIDLGIGRAPGTDGLTMQALRRNLAASVEDFPRDVVELQQYLKPTQPGQRVSATPGAGTEVPIWILGSSLFGAQLAATLGMPFAFASHFAPTYLGAAIETYRAQFTPSATLKEPYVMLGFNLCAAETDAHAHFLRSSSLQSFVNLRRGAPGPLPEPIEGFEASLSPAERQVVQAIGQCSAVGNLETVQAQIGAFLDQTGADELMLVSSIFDPEQRLKSYELGSVAMQNLAETNTPRRAAC

SEQ ID NO: 153591 - DNA, 981 bp, Pseudomonas putida GB-1
  CDS (1)..(981): transl_table=11
atgactgcactgtccgtactggatctggtcatgatcggcgaaggcaagaccttcgccgacgcgatcgaagaatcccgccagctggcgcggcatgtcgagcaacagcactacagccgttactggatcgccgaacaccatgacatgccgggcatcggctcggctgccacttcgctggtgatcaacgaaattgccaatgccacccaacacatccgtgtcggtgccggtggcatcatgctgcccaaccatgcaccgttggtggtggccgagcagttcggcaccctcgacaccttgcacccaggccgcatcgacctgggcctgggccgtgcgccaggtacttccgggccgaccgtgcgcgccttgcgcggtgccgcgccagagcgtgatttcagccaggacatcgccgagctgcgggattacctggccgacaatggtaaacgccgagtgcgtggtgtgcccggcagccacgatgtgccggtgtggatccttggttccagcctgtttggcgccgatctggcggccaagttgggcctgccttatgccttcgcctcacactttgccccgcgttacctgctgcaggcaattgcccattaccgggccaacttccagccttccgagcagttggccaaaccctatgtgatggtgggcatgaacctgttcgccgccgccagcgatgccgaggcggactacctggccagctcgcaccgcaagtggatgctggacctgcacgtcgggcgcttgggcttgttgcccaaaccgcaggagggctatgtcgaacgcctgcctgagcatgagcgtgcggtacttgaacaggtcatggcctgtacggtggccggtgggccacagcgggtacgggaagggctgcgctcgctgatcgaacagaccgatgcggacgagctgatgatcgactgccgcatccatgacccgctggcgcggcagcgctcgcatgcctatgcagcgcaggcgctggctgaactggcctga

SEQ ID NO: 153592 - protein, 326 aa, Pseudomonas putida GB-1
MTALSVLDLVMIGEGKTFADAIEESRQLARHVEQQHYSRYWIAEHHDMPGIGSAATSLVINEIANATQHIRVGAGGIMLPNHAPLVVAEQFGTLDTLHPGRIDLGLGRAPGTSGPTVRALRGAAPERDFSQDIAELRDYLADNGKRRVRGVPGSHDVPVWILGSSLFGADLAAKLGLPYAFASHFAPRYLLQAIAHYRANFQPSEQLAKPYVMVGMNLFAAASDAEADYLASSHRKWMLDLHVGRLGLLPKPQEGYVERLPEHERAVLEQVMACTVAGGPQRVREGLRSLIEQTDADELMIDCRIHDPLARQRSHAYAAQALAELA

SEQ ID NO: 153593 - DNA, 1005 bp, Pseudomonas putida GB-1
  CDS (1)..(1005): transl_table=11
atgacgcagctgcgtgacctgaagatttccaccctcgacctggtgcccgtgcgcgcaggcgcaggcccggcgcagtcgctgcgcaactctctggacttggcgcagcacgtcgagcgctttggctacaaccgcttctgggtggccgagcaccacaacatggacggcatcgccagctcagccacatcggtgctgatcggttacctggccggggggacttcgaccattcgcgtgggctctggcggggtcatgctgcccaaccatgcgccgctggtgatcgctgagcagttcggcaccctggccagcctgtatccagggcgtatcgacctgggcctaggccgtgcgccgggttcggaccagatgacggcctatgccctgcgacgtgaccgcgcaggcggcccggacgacttcccggacgatgtcgaggagctgtcgcgctacctcgggccacgcaccgatgatcaaaaagtgatcgccgtaccggggcacgataccgacgtgcccatgtggttgctgggctccagcctgttcagcgcccagctggccggcatacgcggcatgccctacgccttctcctcgcatttcgcgccgcgctacatgcacgaggccattcgcgtgtaccgcaatcatttcaagccatcgaccacgctggacaagccctatgtgatgttgggcattcccatggtggtggcggaaaccgacgagaaggccgaattcctcgctacctcggtgtatcagcgcattctcgcgctgattcgtgggcaaagcctgatgcagaaaccgccggtggaaagcatggatgggctgtggttgccccatgaacgcgacgcggtgggcagtttcctgggcctggcgatgatcggcagcccgcagaaggtgcgggccaaggtggaggtgctgctggagcagaccggggcggacgaactgatctttacctgtgacctgtatgagcatgaggaccggattcggtcttatgaactgatggcacaggccctcaaagccgaatga

SEQ ID NO: 153594 - protein, 334 aa, Pseudomonas putida GB-1
MTQLRDLKISTLDLVPVRAGAGPAQSLRNSLDLAQHVERFGYNRFWVAEHHNMDGIASSATSVLIGYLAGGTSTIRVGSGGVMLPNHAPLVIAEQFGTLASLYPGRIDLGLGRAPGSDQMTAYALRRDRAGGPDDFPDDVEELSRYLGPRTDDQKVIAVPGHDTDVPMWLLGSSLFSAQLAGIRGMPYAFSSHFAPRYMHEAIRVYRNHFKPSTTLDKPYVMLGIPMVVAETDEKAEFLATSVYQRILALIRGQSLMQKPPVESMDGLWLPHERDAVGSFLGLAMIGSPQKVRAKVEVLLEQTGADELIFTCDLYEHEDRIRSYELMAQALKAE

SEQ ID NO: 153595 - DNA, 999 bp, Marinobacter sp. ELB17
  CDS (1)..(999): transl_table=11
atgaacatacacgacgtggcgttttcagtattggatttagcctccacaaaagacaacgatgaaggcgcagcgccggctttgcagcgctcactgacgctggccaaacatgcagaacagttaggcttcaaccgttactgggtggccgaacaccacaatatggacgccattgtcagctccgccaccgcggttgtggttggttatttggcggcgggtacgcagaaaattcgcgtgggggcagggggcgtgatgctgccaaaccacgcgcccatcgttatcgccgaacagttcggcactctggaggcgctctacccgggccgtattgacctgggcttgggccgtgcgccaggcactgacccactcacatcccgcgctttgcgcaaacacctgagcggaagtgtggatgatttccctgcggacgtggaagagctgcaggcctttctggggccgcgccaacccggccaaaaggtcgtggctatgccgggtgtggacagcaacgtgccgatctggttgttgggttccagcttgttcagcgcacaactggcggcaaaaaagggtttgccttacgcctttgcgtcgcattttgcgccgcgcatgatgatgcaggctatagacatataccgcagccagtttcagccgtcgaaattgttggacaagccctatgtaatgctgggtgtgcccttggttgcggccgacaccgatgagcaagccgagttgttggccaccaccacctatcaacgcatactgtcgttaatccgtggccagagcctgaagatgcgcccgccagtggcgagcatggatggcctgtggcatccccaggaagagcaaaccgtgcgagattttttgggcctggcaatgattggcagtggcgacaccgtcaaacaaaagctgcaaacgcttttgcagcacacccaggcggacgagcttcttttcacctgcgatctctataaccagcaagaccgcttgcgttcgtttgagattctggctgctctcaagaattag

SEQ ID NO: 153596 - protein, 332 aa, Marinobacter sp. ELB17
MNIHDVAFSVLDLASTKDNDEGAAPALQRSLTLAKHAEQLGFNRYWVAEHHNMDAIVSSATAVVVGYLAAGTQKIRVGAGGVMLPNHAPIVIAEQFGTLEALYPGRIDLGLGRAPGTDPLTSRALRKHLSGSVDDFPADVEELQAFLGPRQPGQKVVAMPGVDSNVPIWLLGSSLFSAQLAAKKGLPYAFASHFAPRMMMQAIDIYRSQFQPSKLLDKPYVMLGVPLVAADTDEQAELLATTTYQRILSLIRGQSLKMRPPVASMDGLWHPQEEQTVRDFLGLAMIGSGDTVKQKLQTLLQHTQADELLFTCDLYNQQDRLRSFEILAALKN

SEQ ID NO: 153597 - DNA, 1005 bp, Bacillus sp. SG-1
  CDS (1)..(1005): transl_table=11
atggcaaatataaatatacctgtttccgtattgaacctggcgccgatccgcgaaggtcagaactcaaaggatgccatcgattctatgatcgatttggcacaggcagcagaggaaatgggctacacccgatattggatcgctgaacatcataacactgccacacttgtgagctcagcgacttctcttttaatcaaacatacattggaacacacccagaaaatccgtgttggatccggtggtgtcatgctgccaaaccattcgccattagtagtggcggaacaatttggcacaatggcaaccatataccctgacagagtggatttagggctcggccgtgcgccgggaacagatatgatgacagccagcgcactgcgaaggtcatccacacaggaaaatgtttacacatttccagatgatgttcagcagctgctgacctatttcggccaaccggaagagcaagggtatgtaaaagcgtatccaggagtggggaccgatgtaccgatctatatccttgggtcgtccaccgactctgcctaccttgcggcgaaacttggcttaccgtatgcttttgcctcacactttgctccaaggcacatggaagaagcattatccatctaccgcagccggttccagccatcgaagtacctggataaaccacatgccatcgtctgcctgaacgtcattgcaacagagacagatgaagatgcaaaaaggcagtcaacgaccatgcagcaattcttcctcaacgtagtccggggcacccagaaaccaatgagcccgccggtagacgacatggatgaaatatggactccctctgaaaaacaagtggccgattccatgacaagcgtgaccttaatgggaagcaagcaaacggtcaaagagcaattgacccgttttcaagagaaatacaatgcagatgaaatcatggccgtttcctatatctatgataaagacaagcagaaacgctcttatgaaatctttaaagaagtcgtggatgggaagtga

SEQ ID NO: 153598 - protein, 334 aa, Bacillus sp. SG-1
MANINIPVSVLNLAPIREGQNSKDAIDSMIDLAQAAEEMGYTRYWIAEHHNTATLVSSATSLLIKHTLEHTQKIRVGSGGVMLPNHSPLVVAEQFGTMATIYPDRVDLGLGRAPGTDMMTASALRRSSTQENVYTFPDDVQQLLTYFGQPEEQGYVKAYPGVGTDVPIYILGSSTDSAYLAAKLGLPYAFASHFAPRHMEEALSIYRSRFQPSKYLDKPHAIVCLNVIATETDEDAKRQSTTMQQFFLNVVRGTQKPMSPPVDDMDEIWTPSEKQVADSMTSVTLMGSKQTVKEQLTRFQEKYNADEIMAVSYIYDKDKQKRSYEIFKEVVDGK

SEQ ID NO: 153599 - DNA, 975 bp, Erythrobacter sp. SD-21
  CDS (1)..(975): transl_table=11
atgaccgcctacaacgtcctcgatctcgttcctgtccgcgagggcaggaccctcggcgaggcgttcaaggctgcgaccgcgcttgcggtggcggccgaagacgcgggctgcaaacgctattgggtggccgaacaccacgcgatggaagggatcgccggcggcgcgacatcggtcgtgctggcccatgtcggcaacgccacaagcaccatccgcatcggttcgggcgggatcatgctgcccaaccacacgccgttccagatcgccgagcagttcggcacgctcgacgcgctcttccccggccgcgtggaccttggccttggacgggctcccggtgcggggcccgaactccagcgtgcgctcaggaaagacctccaccgcgccgccgagatgttcccgcaggacgtcgtcgaactgatggcgcatatggatgggaccagtgagataccgcccaaccccggccttggcgcgaacccggaattctggatgctcggatcgagcctcttcggcgccagcctcgctgcacggctcggcattccctacgcttttgcgagccatttcgcgcccgaccacctcgacgcggcgctcgaactctaccgccgcaatttcgaaccgtccgaggcgtgcgagaaaccgcatgtcatggcggccatgaacctcttctgcgccgaaacggaagccgaagccgagaagctcgccacctcgcagatgcaagccttcgtggcgctgcgcacgggcaagccttccaggctcaagccgccggtcgcaggctatcgcgaccagctgccacccactgcgcaagcgatgctggcgcatattgggcaggcgagcgccatcggaacgcctgatcaatgcgccgccgcggtccgcgaattcgtgtcgcggacgcaggccgacgagatcattttcgcaggccccaccttcgatccgcaggcgcggatcgacagccttgcgcgcgccatgaaggcgctctcctga

SEQ ID NO: 153600 - protein, 324 aa, Erythrobacter sp. SD-21
MTAYNVLDLVPVREGRTLGEAFKAATALAVAAEDAGCKRYWVAEHHAMEGIAGGATSVVLAHVGNATSTIRIGSGGIMLPNHTPFQIAEQFGTLDALFPGRVDLGLGRAPGAGPELQRALRKDLHRAAEMFPQDVVELMAHMDGTSEIPPNPGLGANPEFWMLGSSLFGASLAARLGIPYAFASHFAPDHLDAALELYRRNFEPSEACEKPHVMAAMNLFCAETEAEAEKLATSQMQAFVALRTGKPSRLKPPVAGYRDQLPPTAQAMLAHIGQASAIGTPDQCAAAVREFVSRTQADEIIFAGPTFDPQARIDSLARAMKALS

SEQ ID NO: 153601 - DNA, 1176 bp, Xanthomonas oryzae pv
  CDS (1)..(1176): transl_table=11
atgcgctcgcccatcagcaagctcaacaacgcagctacggctggtcgtagcccaccaacccagccgttgtccgactgctggaatgctgtaatccccctcgccaccaaccaagccgctggcaaacctgccagaccagccccatctgtggcccatcagtttctccggagtcatccgatgccccccatttccgtgctcgatctggcgccagtctgcgaaggcagcgacaccacccaggccttcgccaacatgctcgatctggcccagcacgccgagcgctggggctatcaacgctactggctggccgagcaccacaacatgccgggcatcgccagcgccgccaccgccgtactgatcggccatgtcgccggcggcaccaagaccatccgtgtgggcgccggcggcatcatgttgcccaaccacaccccgctgcatgtggccgaacaattcggcacgctggcttcgctgtatccgcagcgcatcgacctgggcttgggccgtgcacccggcaccgaccagcccaccgcacgcgccttgcgccgcgatttcgacagcgccgaccacttcccgcaggacgtggccgacttgatgcgctatttcgcgccagcggtgccagggcagctggtgcaggccgtgcccggcgccgggctggaggtgccggtgtggttgctggggtcgagcctgttcagtgcacgcgtggcggcagcgatgggtttgtcgtttgcgtttgcctcgcattttgcgcccgacgcgatggacgaagcggtggcaatctatcgccgcgaattccgcccatccacacagcttgccacgccgcacgtgatgctggctttgaacgtagtggcggccgacaccgaagcgcaggcacgccgtttgttcactagccagcagcagagcttcgtcgatctgcgtcgcggcaagccgggcaagattcccgcgcccatcgatgatatcgacagcttctggcagccgcatgagcgcgcgggtgtagagcgtgcactggcctgcacggtgcttggcgatgctgagcagatcacccaaggcgtggctgatttcatcgagcgccacacgccggacgaactgttgttcaccgccaacatctacgaccacgccgcgcgtttgcgctccttcgaaatcgccgctgcggcatgccgcgagctggatgtgactttggcgtga

SEQ ID NO: 153602 - protein, 391 aa, Xanthomonas oryzae pv
MRSPISKLNNAATAGRSPPTQPLSDCWNAVIPLATNQAAGKPARPAPSVAHQFLRSHPMPPISVLDLAPVCEGSDTTQAFANMLDLAQHAERWGYQRYWLAEHHNMPGIASAATAVLIGHVAGGTKTIRVGAGGIMLPNHTPLHVAEQFGTLASLYPQRIDLGLGRAPGTDQPTARALRRDFDSADHFPQDVADLMRYFAPAVPGQLVQAVPGAGLEVPVWLLGSSLFSARVAAAMGLSFAFASHFAPDAMDEAVAIYRREFRPSTQLATPHVMLALNVVAADTEAQARRLFTSQQQSFVDLRRGKPGKIPAPIDDIDSFWQPHERAGVERALACTVLGDAEQITQGVADFIERHTPDELLFTANIYDHAARLRSFEIAAAACRELDVTLA

SEQ ID NO: 153603 - DNA, 1035 bp, Yersinia enterocolitica
  CDS (1)..(1035): transl_table=11
atggacgattctatgactgacaaaaaaactgtaccgctttctgttctcgatttatcaccgatagctcagggcaagacgccacaagatgcatttcgcgcctcgctggacttggctcaacatgctgaaaagtggggataccatcgctactggctggctgaacatcataatatgaccggtattgccagtgctgcgacctctgtgctaattggctatattgccggtggcaccagcaccatccgcgtcggttcaggtggtattatgctgccaaaccattcgccattagtgatagctgagcagtttggtaccctcgcctcgctgtaccctggccgtatcgacctcggtctgggccgggcacctggcactgatcagcgcaccatgatggcactacgccgacacctctccggtgaggtagataacttcccgtctgacgtgcgcgaactgcaaaactactttgccgaggtgcaacctgggcaagcagtccaagcggttcccggtcaaggtttgcatattcctctgtggctgctgggttccagcctgtatagcgcgcaactggcagcggctatggggctacctttcgctttcgcttcgcattttgcgccggacatgctattccaggcgcttaaattgtatcgcgaaaacttcaaaccctccgctcaatggccgcaaccttatgcgattgtgtgtgtgaatgtcgccgccgcagacaacgagcgtgatgcccgtttcttgtttacctcgatgcagcagcagtttgtcaatttgcgccgtggcacaccggggcagcttcctccgccagtcgaagatatggcgaaaatctgctcgccagctgaacagtttggtattgatcaagcactgcgtctgtccattattggtgataagagtaaagtccgacacgggcttcagtcgttattgcgtgaaactcaggctgatgagttaatggtgaatggccagatctttgatcaccaggcgagattatattcatttgagatagttgccagcctgcaacaagacttgcaacttggcgagtatctctaa

SEQ ID NO: 153604 - protein, 344 aa, Yersinia enterocolitica
MDDSMTDKKTVPLSVLDLSPIAQGKTPQDAFRASLDLAQHAEKWGYHRYWLAEHHNMTGIASAATSVLIGYIAGGTSTIRVGSGGIMLPNHSPLVIAEQFGTLASLYPGRIDLGLGRAPGTDQRTMMALRRHLSGEVDNFPSDVRELQNYFAEVQPGQAVQAVPGQGLHIPLWLLGSSLYSAQLAAAMGLPFAFASHFAPDMLFQALKLYRENFKPSAQWPQPYAIVCVNVAAADNERDARFLFTSMQQQFVNLRRGTPGQLPPPVEDMAKICSPAEQFGIDQALRLSIIGDKSKVRHGLQSLLRETQADELMVNGQIFDHQARLYSFEIVASLQQDLQLGEYL

SEQ ID NO: 153605 - DNA, 1110 bp, Xanthomonas axonopodis pv; identical to SEQ ID NO: 153423
  CDS (1)..(1110): transl_table=11

SEQ ID NO: 153606 - protein, 369 aa, Xanthomonas axonopodis pv
MSDCWNAVIPHGTQHAAGNAAGPAPSLAYHSSRSHPMTPISVLDLAPVCEGSDTTHAFANMLDLAQHAERWGYQRYWLAEHHNMPGIASAATAVLIGHVAGGTKAIRVGAGGIMLPNHAPLQVAEQFGTLASLYPQRIDLGLGRAPGTDQPTARALRRYFDSADHFPQDVAELMRYFAPAVPGQLVQAVPGAGLEVPVWLLGSSLFSARLAAAMGLSFAFASHFAPDAMDEAVAIYRREFRPSAQLAKPHVMLALNVVAAETQAQARRLFTTQQQSFVNLRRGKPGKIPPPIDDIDSFWQPHERVGVERALACTVLGDAEQIARGVAEFIERHTPDELLFTANIYDHAARLRSFEIAAAACRELDVTLV

SEQ ID NO: 153607 - DNA, 1020 bp, Bacillus subtilis
  CDS (1)..(1020): transl_table=11
atgaaaaaatttgatatatctgttttatcagttgctccattaagacaaggagaaacaatgaaacaagggattgattctgcagtgtcattagctaaagctgtagataatatgggctataaacggatttggtttgcagagcatcataatcacgacgcttatgcaagtgcagcaaccgtatcaattgtacaacatatattagcaaatacaaaagacattcgcgtaggttcagggggtattatgttgccaaatcattccccattaatcgtagcggagcaatttggaacacttgaaacattatatccaaatcgtgtagatttggcattaggacgcgcacccggaacggatcaaaaaacggccgatgtgattcgtcgttccaaccataatggagtgtttttctttgaaagagaagtaaatgatattttgcgttttgtcggggataagagtgtacagggtgaggttcgcgcttatccgggtattggaacgcatgtgcctgtttttgtgttaggatcctcaacggattcagcggaaattgctgcaaagcttggtttaccctatgcatttggcgctcaattttcaccccattcgatggaagaagcgctctctatttatcgagaaaatttccaaccgtcttcttatttacaagaaccttatgtgatcgcttgcattaatgtgattgcagcagaatctatagacgaggcatcttttatttctgcaagtcatttgcaggtgtatattgatatttatacaaataatttaagtaagcttattccacccactgaaaacttcctagaatcgttatcacagtttgaattagaaattctccacagtcgactggggtatacaatcatgggtgatcgagaaacaattcgtcgcgaactaattgatttccaacaaatgtatcacgcagatgaattaattgtgttatctaatatttacgaattgagcaaggaaattcagtcgtacgagattttaaaacaggttgtggatgagttgtttaaaaaaagaatggagcaactttag

SEQ ID NO: 153608 - protein, 339 aa, Bacillus subtilis
MKKFDISVLSVAPLRQGETMKQGIDSAVSLAKAVDNMGYKRIWFAEHHNHDAYASAATVSIVQHILANTKDIRVGSGGIMLPNHSPLIVAEQFGTLETLYPNRVDLALGRAPGTDQKTADVIRRSNHNGVFFFEREVNDILRFVGDKSVQGEVRAYPGIGTHVPVFVLGSSTDSAEIAAKLGLPYAFGAQFSPHSMEEALSIYRENFQPSSYLQEPYVIACINVIAAESIDEASFISASHLQVYIDIYTNNLSKLIPPTENFLESLSQFELEILHSRLGYTIMGDRETIRRELIDFQQMYHADELIVLSNIYELSKEIQSYEILKQVVDELFKKRMEQL

SEQ ID NO: 153609 - DNA, 1011 bp, Bacillus subtilis
  CDS (1)..(1011): transl_table=11
atgtctaacaaccaacgcaaagataccttgctttctgtcttgaatttatctccggttgttcagggaggaacgattgcagaatcattccgaaacagcatggacttggcgcgccgggcagaggaatggggctatcaccgttactggcttgctgaacatcataatatagaaggtgttgcaagctctgccaccgcagttttgattggccatattgccggaggcacgaagaaaatccgcgtcggttccggcggcattatgctccccaaccactcttcattagtcattgctgaacaattcggcacactggaaacactgtatcccgggcggattgatctggggcttggacgtgcgccgggaacagaccaattgacagccagagcgctccgcagaaacatcaacagcggggaggattttccagaacaattagaggaactgcgcaattattttaaaccgtcaggaaatgtgcgcaatcaagttcgcgccattcccggagagggcatagatgtgccgatttggctgctgggctcaagcggcttcagcgcccgtctggctggcgaacttggtcttccgtttgcgttcgcggcccatttctcaccggcgaatacggttcccgctttggagctgtaccgcaattccttcacgccgtcagacgtgctcgacgaaccgtatgcgatggtcggtgtcaccattatcgcggcagatacaaacgagaaagcgcagcaccttgcgacttcccattatcaaaggtttcttgatcttgtccgcggtacgcctaaccagcttaaaccgcctgttgaggatatggaccaaatctggagcccgtatgaaaaagcgatggtcaatgagcagctgagctccacgattgtcggaggtccggaagaagtgaaggcgaagcttgaagatttcgtcaaaacgacacaggctgacgaaattatggttaactcagaaacctttgaacacgcagacagaatgcgttcgtttgaaatcatcgctgacgtttggaaaaacagataa

SEQ ID NO: 153610 - protein, 336 aa, Bacillus subtilis
MSNNQRKDTLLSVLNLSPVVQGGTIAESFRNSMDLARRAEEWGYHRYWLAEHHNIEGVASSATAVLIGHIAGGTKKIRVGSGGIMLPNHSSLVIAEQFGTLETLYPGRIDLGLGRAPGTDQLTARALRRNINSGEDFPEQLEELRNYFKPSGNVRNQVRAIPGEGIDVPIWLLGSSGFSARLAGELGLPFAFAAHFSPANTVPALELYRNSFTPSDVLDEPYAMVGVTIIAADTNEKAQHLATSHYQRFLDLVRGTPNQLKPPVEDMDQIWSPYEKAMVNEQLSSTIVGGPEEVKAKLEDFVKTTQADEIMVNSETFEHADRMRSFEIIADVWKNR

SEQ ID NO: 153611 - DNA, 26 bp, Artificial sequence
  primer
atgactgataaaaccattgcgttttc

SEQ ID NO: 153612 - DNA, 26 bp, Artificial sequence
  primer
ttatcccaacaactcttccttaacat

SEQ ID NO: 153613 - protein, 371 aa, Artificial sequence
  consensus sequence
  Variant (2)..(2): Xaa in position 2 is any amino acid
  Variant (6)..(10): Xaa in position 6 to 10 is any amino acid
  Variant (12)..(23): Xaa in position 12 to 23 is any amino acid
  Variant (24)..(24): Xaa in position 24 is any or no amino acid
  Variant (27)..(32): Xaa in position 27 to 32 is any amino acid
  Variant (34)..(35): Xaa in position 34 to 35 is any amino acid
  Variant (37)..(37): Xaa in position 37 is any amino acid
  Variant (39)..(39): Xaa in position 39 is any amino acid
  Variant (45)..(49): Xaa in position 45 to 49 is any amino acid
  Variant (51)..(51): Xaa in position 51 is any amino acid
  Variant (54)..(63): Xaa in position 54 to 63 is any amino acid
  Variant (65)..(66): Xaa in position 65 to 66 is any amino acid
  Variant (69)..(69): Xaa in position 69 is any amino acid
  Variant (71)..(71): Xaa in position 71 is any amino acid
  Variant (74)..(74): Xaa in position 74 is any amino acid
  Variant (80)..(80): Xaa in position 80 is any amino acid
  Variant (83)..(84): Xaa in position 83 to 84 is any amino acid
  Variant (92)..(93): Xaa in position 92 to 93 is any amino acid
  Variant (95)..(95): Xaa in position 95 is any amino acid
  Variant (97)..(97): Xaa in position 97 is any amino acid
  Variant (109)..(109): Xaa in position 109 is any amino acid
  Variant (111)..(112): Xaa in position 111 to 112 is any amino acid
  Variant (114)..(115): Xaa in position 114 to 115 is any amino acid
  Variant (116)..(116): Xaa in position 116 is any or no amino acid
  Variant (120)..(126): Xaa in position 120 to 126 is any amino acid
  Variant (127)..(132): Xaa in position 127 to 132 is any or no amino acid
  Variant (135)..(139): Xaa in position 135 to 139 is any amino acid
  Variant (141)..(151): Xaa in position 141 to 151 is any amino acid
  Variant (152)..(165): Xaa in position 152 to 165 is any or no amino acid
  Variant (167)..(167): Xaa in position 167 is any amino acid
  Variant (169)..(173): Xaa in position 169 to 173 is any amino acid
  Variant (174)..(185): Xaa in position 174 to 185 is any or no amino acid
  Variant (187)..(187): Xaa in position 187 is any amino acid
  Variant (189)..(189): Xaa in position 189 is any amino acid
  Variant (194)..(195): Xaa in position 194 to 195 is any amino acid
  Variant (196)..(196): Xaa in position 196 is any or no amino acid
  Variant (198)..(198): Xaa in position 198 is any amino acid
  Variant (202)..(203): Xaa in position 202 to 203 is any amino acid
  Variant (207)..(208): Xaa in position 207 to 208 is any amino acid
  Variant (211)..(211): Xaa in position 211 is any amino acid
  Variant (214)..(214): Xaa in position 214 is any amino acid
  Variant (215)..(216): Xaa in position 215 to 216 is any or no amino acid
  Variant (218)..(221): Xaa in position 218 to 221 is any amino acid
  Variant (222)..(222): Xaa in position 222 is any or no amino acid
  Variant (224)..(226): Xaa in position 224 to 226 is any amino acid
  Variant (229)..(230): Xaa in position 229 to 230 is any amino acid
  Variant (232)..(232): Xaa in position 232 is any amino acid
  Variant (233)..(235): Xaa in position 233 to 235 is any or no amino acid
  Variant (238)..(241): Xaa in position 238 to 241 is any amino acid
  Variant (242)..(242): Xaa in position 242 is any or no amino acid
  Variant (244)..(253): Xaa in position 244 to 253 is any amino acid
  Variant (255)..(259): Xaa in position 255 to 259 is any amino acid
  Variant (261)..(262): Xaa in position 261 to 262 is any amino acid
  Variant (264)..(274): Xaa in position 264 to 274 is any amino acid
  Variant (275)..(276): Xaa in position 275 to 276 is any or no amino acid
  Variant (278)..(281): Xaa in position 278 to 281 is any amino acid
  Variant (282)..(285): Xaa in position 282 to 285 is any or no amino acid
  Variant (287)..(305): Xaa in position 287 to 305 is any amino acid
  Variant (306)..(333): Xaa in position 306 to 333 is any or no amino acid
  Variant (335)..(352): Xaa in position 335 to 352 is any amino acid
  Variant (353)..(353): Xaa in position 353 is any or no amino acid
  Variant (356)..(367): Xaa in position 356 to 367 is any amino acid
  Variant (369)..(370): Xaa in position 369 to 370 is any amino acid
SXLDLXXXXXGXXXXXXXXXXXXXLAXXXXXXGXXRXWXAEHHNXXXXXSXATXXXXXXXXXXTXXIRXGXGGXMLPNHXPLXXAEQFGTLXXLXPXRIDLGLGRAPGXDXXTXXXALRXXXXXXXXXXXXXFPXXXXXLXXXXXXXXXXXXXXXXXXXXXXXXXAXPXXXXXXXXXXXXXXXXXPXWXLGSSXXXAXLAAXXGLPXXFAXHFXXXPXXXXXAXXXYRXXFXXXXPSXXXXXPXXXXXXXXXXAXXXXXAXXLXXXXXXXXXXXXXGXXXXXXXXPXXXXXXXXXXXXXXXXXXXXXXXXXXXXXXXXXXXXXXXXXXXXXXXGXXXXXXXXXXXXXXXXXXXDEXXXXXXXXXXXXRXXS

SEQ ID NO: 153614 - protein, 59 aa, Artificial sequence
  protein pattern
  Variant (2)..(3): Xaa in position 2 to 3 is any amino acid
  Variant (5)..(5): Xaa in position 5 is any amino acid
  Variant (7)..(7): Xaa in position 7 is any amino acid
  Variant (12)..(12): Xaa in position 12 is Ala, Asp, Gly, Asn or Ser
  Variant (13)..(14): Xaa in position 13 to 14 is any amino acid
  Variant (15)..(15): Xaa in position 15 is Ala, Gly, Asn, Ser or Thr
  Variant (16)..(16): Xaa in position 16 is any amino acid
  Variant (17)..(17): Xaa in position 17 is Ala, Gly, Ser, Thr or Val
  Variant (18)..(18): Xaa in position 18 is Ala, Gly, Ser or Thr
  Variant (19)..(19): Xaa in position 19 is any amino acid
  Variant (20)..(20): Xaa in position 20 is Ala, Asn or Ser
  Variant (21)..(21): Xaa in position 21 is Pro, Thr or Val
  Variant (22)..(24): Xaa in position 22 to 24 is any amino acid
  Variant (25)..(25): Xaa in position 25 is Ile, Leu, Met or Val
  Variant (26)..(28): Xaa in position 26 to 28 is any amino acid
  Variant (29)..(29): Xaa in position 29 is Ala, Gly or Leu
  Variant (30)..(31): Xaa in position 30 to 31 is any amino acid
  Variant (33)..(34): Xaa in position 33 to 34 is any amino acid
  Variant (35)..(35): Xaa in position 35 is Ile, Leu, Met or Val
  Variant (36)..(36): Xaa in position 36 is His or Arg
  Variant (37)..(37): Xaa in position 37 is Phe, Ile, Leu or Val
  Variant (39)..(39): Xaa in position 39 is Ala or Ser
  Variant (42)..(42): Xaa in position 42 is Ile or Val
  Variant (48)..(48): Xaa in position 48 is any amino acid
  Variant (50)..(51): Xaa in position 50 to 51 is any amino acid
  Variant (52)..(52): Xaa in position 52 is Ile or Val
  Variant (53)..(53): Xaa in position 53 is Ala or Val
  Variant (55)..(58): Xaa in position 55 to 58 is any amino acid
  Variant (59)..(59): Xaa in position 59 is Leu or Met
GXXRXWXAEHHXXXXXXXXXXXXXXXXXXXXTXXXXXGXGGXMLPNHXPXXXXEXXXXX

SEQ ID NO: 153615 - protein, 15 aa, Artificial sequence
  protein pattern
  Variant (2)..(2): Xaa in position 2 is Asp, Gly, Asn or Gln
  Variant (4)..(4): Xaa in position 4 is Ile or Val
  Variant (8)..(8): Xaa in position 8 is Ile or Leu
  Variant (14)..(14): Xaa in position 14 is Ala, Ser or Thr
  Variant (15)..(15): Xaa in position 15 is Asp, Gly or Ser
PXRXDLGXGRAPGXX

SEQ ID NO: 153616 - protein, 21 aa, Artificial sequence
  protein pattern
  Variant (2)..(3): Xaa in position 2 to 3 is any amino acid
  Variant (4)..(4): Xaa in position 4 is Gly or Ser
  Variant (6)..(6): Xaa in position 6 is any amino acid
  Variant (9)..(9): Xaa in position 9 is Ala or Gly
  Variant (10)..(11): Xaa in position 10 to 11 is any amino acid
  Variant (13)..(13): Xaa in position 13 is Ile, Leu, Met or Val
  Variant (14)..(14): Xaa in position 14 is Ala, Gly, Pro or Ser
  Variant (15)..(15): Xaa in position 15 is Phe or Tyr
  Variant (16)..(16): Xaa in position 16 is Ala, Gly, Ser or Val
  Variant (19)..(19): Xaa in position 19 is any amino acid
SXXXAXLAXXXGXXXXFAXHF

SEQ ID NO: 153617 - protein, 12 aa, Artificial sequence
  protein pattern
  Variant (2)..(2): Xaa in position 2 is Phe, Ile, Leu, Met or Val
  Variant (3)..(4): Xaa in position 3 to 4 is any amino acid
  Variant (6)..(6): Xaa in position 6 is Lys or Arg
  Variant (7)..(8): Xaa in position 7 to 8 is any amino acid
  Variant (10)..(10): Xaa in position 10 is any amino acid
AXXXYXXXFXPS

SEQ ID NO: 153618 - DNA, 1344 bp, Escherichia coli
  CDS (1)..(1344): transl_table=11
atgacgacgattctcaagcatctcccggtaggtcaacgtattggtatcgctttttctggcggtctggacaccagtgccgcactgctgtggatgcgacaaaagggagcggttccttatgcatatactgcaaacctgggccagccagacgaagaggattatgatgcgatccctcgtcgtgccatggaatacggcgcggagaacgcacgtctgatcgactgccgcaaacaactggtggccgaaggtattgccgctattcagtgtggcgcatttcataacaccaccggcggcctgacctatttcaacacgacgccgctgggccgcgccgtgactggtaccatgctggttgctgcgatgaaagaagatggcgtgaatatctggggtgacggtagcacctacaaaggaaacgatatcgaacgtttctatcgttatggtctgctgaccaatgctgaactgcagatttacaaaccgtggcttgatactgactttattgatgaactgggcggccgtcatgagatgtctgaatttatgattgcctgcggtttcgactacaaaatgtctgtcgaaaaagcctactccacagactccaacatgcttggtgcaacgcatgaagcgaaggatctggaatacctcaactccagcgtcaaaatcgtcaacccgattatgggcgtgaaattctgggatgagagcgtgaagatcccggcagaagaagtcacagtacgctttgaacaaggtcatccggtggcgctgaacggtaaaacctttagcgacgacgtagaaatgatgctggaagctaaccgcatcggcggtcgtcacggcctgggcatgagcgaccagattgaaaaccgtatcatcgaagcgaaaagccgtggtatttacgaagctccggggatggcactgctgcacattgcgtatgaacgcctgttgaccggtattcacaacgaagacaccattgagcagtatcacgcgcatggtcgtcagttgggccgtctgctgtaccaggggcgttggtttgactcccaggcgctgatgctgcgtgactctctgcaacgctgggttgccagccagatcactggtgaagttaccctggagctgcgccgtgggaacgattattcaatcctgaataccgtctcagagaacctgacctacaagccagagcgtctgacgatggaaaaaggcgactcggtgttctcgccagatgatcgtattggtcaattgaccatgcgtaacctggatatcactgatacccgcgagaaacttttcggttatgccaaaactggcctgctttcctcctctgccgcttcaggcgtgccgcaggtggagaatctggaaaacaaaggccagtaa

SEQ ID NO: 153619 - protein, 447 aa, Escherichia coli
MTTILKHLPVGQRIGIAFSGGLDTSAALLWMRQKGAVPYAYTANLGQPDEEDYDAIPRRAMEYGAENARLIDCRKQLVAEGIAAIQCGAFHNTTGGLTYFNTTPLGRAVTGTMLVAAMKEDGVNIWGDGSTYKGNDIERFYRYGLLTNAELQIYKPWLDTDFIDELGGRHEMSEFMIACGFDYKMSVEKAYSTDSNMLGATHEAKDLEYLNSSVKIVNPIMGVKFWDESVKIPAEEVTVRFEQGHPVALNGKTFSDDVEMMLEANRIGGRHGLGMSDQIENRIIEAKSRGIYEAPGMALLHIAYERLLTGIHNEDTIEQYHAHGRQLGRLLYQGRWFDSQALMLRDSLQRWVASQITGEVTLELRRGNDYSILNTVSENLTYKPERLTMEKGDSVFSPDDRIGQLTMRNLDITDTREKLFGYAKTGLLSSSAASGVPQVENLENKGQ

SEQ ID NO: 153620 - DNA, 1446 bp, Oryza sativa (japonica cultivar-group)
  CDS (1)..(1446)
atggcgcacgccctcggctgcggcgccgccaccgcccccgccggggtgggtctcctccaccaccacgagaaggctggggcgttgttcagtgccgcaggctccatcgttcgggttcagcagctcagcgggaaggggagcaaaagccaagctataagatgtgcaatgccaagtgcaagtgagcatggtggaatttcaaccgcaacagctagtagtagtgatcaaaagaaaggtggactgcgtggcaaactgaataaagttgttctagcttacagtggtggtttggatacatcagttattgttccatggctccgggagaactatggttgtgaagttgtctgtttcactgctgatgttggccagggtgacattgaattggaagggctagagaagaaggcaaaagctagtggtgcaagccagcttgttgtgaaggacttgaaagaagagttcgttagtgaatacatttacccctgcttgcgtgctggtgcagtttatgaaagaaagtatctgctggggacttcaatggctaggcctgttattgccaaggcaatggttgatgttgcaaaggaagttggtgcagatgcagttgctcatggatgcactggaaaaggcaatgatcaggttcgttttgagcttacattctatgctttaaaccctgagcttaaagtggtggcaccttggagggagtgggatatcacaggacgtgaagatgctattgagtatgcaaagaaacacaatgtgccaattcctgttacaaagaaatcaatatacagccgtgatcgaaatttgtggcaccttagccatgagggtgacattttggaagatccagcaaatgagccaaaggaagatatgtatatgatgtcagttgcaccagaaaatgcaccttcaaaacctgagtatttggagattggtattattgcaggtgttcctgtttccatcaatggaaaagatctctcaccagcatctctccttgccaagctcaatgaaatcggtggaaagcatggtattgggcgcattgatatggtggaaaaccgcctcgtaggcatgaagtcccgtggtgtatacgagacccccggtggcaccatcatggcagctgctgtccgtgagctcgagtccttgactttggacagggagacaatgcagtggaaggacatgcttgccctcaagtacgccgagctggtctacgctggccgttggttcgacccgctccgacaatccattgatgcgttcatggagaacattaccgcgacaacaaccggctccgtgactctcaagctgtacaagggctccgtaaacgtcgcgtcccggaagagcccatacagcctgtacagggaagacatctcctcatttgagaatggggagatctacaaccaggctgatgctgaagggttcatcaggctatatggtctccctaccagagtccgggcaatgctggagaagggcatctaa

SEQ ID NO: 153621 - protein, 481 aa, Oryza sativa (japonica cultivar-group)
MAHALGCGAATAPAGVGLLHHHEKAGALFSAAGSIVRVQQLSGKGSKSQAIRCAMPSASEHGGISTATASSSDQKKGGLRGKLNKVVLAYSGGLDTSVIVPWLRENYGCEVVCFTADVGQGDIELEGLEKKAKASGASQLVVKDLKEEFVSEYIYPCLRAGAVYERKYLLGTSMARPVIAKAMVDVAKEVGADAVAHGCTGKGNDQVRFELTFYALNPELKVVAPWREWDITGREDAIEYAKKHNVPIPVTKKSIYSRDRNLWHLSHEGDILEDPANEPKEDMYMMSVAPENAPSKPEYLEIGIIAGVPVSINGKDLSPASLLAKLNEIGGKHGIGRIDMVENRLVGMKSRGVYETPGGTIMAAAVRELESLTLDRETMQWKDMLALKYAELVYAGRWFDPLRQSIDAFMENITATTTGSVTLKLYKGSVNVASRKSPYSLYREDISSFENGEIYNQADAEGFIRLYGLPTRVRAMLEKGI

SEQ ID NO: 153622 - DNA, 1371 bp, Yersinia pestis KIM
  CDS (1)..(1371): transl_table=11
ttgatgacaactattcttaaacaccttcctattaatcagcgtgttggtattgctttttccggtggcctggacaccagtgcggcactgctgtggatgcaaaaaaaaggcgccattccttacgcttataccgctaatctgggtcagcctgatgaagaagattacgaggccatcccgcgtaaagcgatggaatacggcgcggaaaaagcccgtctgatcgattgccgtaagcagttggtggcagaaggtatcgccgctattcaatgtggcgcattccataacaccacggcgggtgtcacttatttcaacaccaccccactgggccgtgcggtaaccggcaccatgctggtggcagccatgaaagaagatgatgtaaatatctggggtgacggtagcacttataaaggtaacgatatcgagcgcttctatcgttacggtctgctgaccaacgctgagctgaaaatttacaaaccgtggctggatactgatttcatcgatgaattgggcggccgccatgagatgtcagaatttatgatccaatccggtttcgactacaaaatgtcaaccgagaaagcctactcgaccgactccaatatgttgggtgccacccacgaggccaaggatctggagttcctcaattccagcgttaaaatcgttaacccgattatgggcgtgaaattctgggacgaaaatgtggtggtgaaggccgaagaagtcactgtccgttttgaacgtggttacccggtcgcgctaaatggtgttgtctttgacgatagcgttgagctgatgatggaggctaaccgcatcggtggccgtcacggtctgggtatgagtgatcagattgaaaaccgtatcatcgaagccaaaagccgtggcatctatgaagcccctgggatggcgctgttgcatatcgcctatgagcgcttgctaacaggtattcacaatgaagataccattgagcaatatcatgctaatgggcgggtactgggtcgtctgctatatcaaggccgttggtttgatccacaagcgctgatgctgcgtgactccattcagcgttgggttgccagcgagataaccggtgaagtgacgctggagctgcgtcgtggcaatgattactccatcctgaataccgtgtctgacaatctgacttacaaaccagaacgtttgaccatggagaaaggtgattccgtgttctcaccagatgatcgtatcggccaactgacgatgcgtaatctggacatcaccgatacccgcgagaagttattcaactatgttgagacggggctgttaacctcttctgcggcgacggggttaccacaagtggataacaataatctgtcgtcagggcgtgggttgcaggataagcgtcagtaa

SEQ ID NO: 153623 - protein, 456 aa, Yersinia pestis KIM
MMTTILKHLPINQRVGIAFSGGLDTSAALLWMQKKGAIPYAYTANLGQPDEEDYEAIPRKAMEYGAEKARLIDCRKQLVAEGIAAIQCGAFHNTTAGVTYFNTTPLGRAVTGTMLVAAMKEDDVNIWGDGSTYKGNDIERFYRYGLLTNAELKIYKPWLDTDFIDELGGRHEMSEFMIQSGFDYKMSTEKAYSTDSNMLGATHEAKDLEFLNSSVKIVNPIMGVKFWDENVVVKAEEVTVRFERGYPVALNGVVFDDSVELMMEANRIGGRHGLGMSDQIENRIIEAKSRGIYEAPGMALLHIAYERLLTGIHNEDTIEQYHANGRVLGRLLYQGRWFDPQALMLRDSIQRWVASEITGEVTLELRRGNDYSILNTVSDNLTYKPERLTMEKGDSVFSPDDRIGQLTMRNLDITDTREKLFNYVETGLLTSSAATGLPQVDNNNLSSGRGLQDKRQ

SEQ ID NO: 153624 - DNA, 1218 bp, Vibrio vulnificus CMCP6
  CDS (1)..(1218): transl_table=11
atggaaatgagcaaattaaatgtcaataaagtggttgtcgcttactcaggcggtttggatacgtcagtgatcattccttggttaaaagagaactacgattgtgaagtggtggcctttgttgctgatgtgggtcagggcgaagaagagcttgtcggtattgaagagaaagccaaagcttctggtgcctcagaatgttatgtcgtcgatctgaaagaagaattggtcgctgactacatctacccaacactgaaaacgggcgcttactatgaaggcaaatacctcttggggacgtctatggcgcgcccggtgattgccaaagcacaagttgaaattgcccgtaaagtgggggctgatgcattgtgtcacggctgtactggtaaagggaatgaccaagtgcgttttgaaggcgccttcgccgcattggcccctgatctgaaagtgattgcgccttggcgtgaatgggatcttgtgagtcgtgagcagtgtttagactacttggctgagcgcaacattccttgtgctgcctcgttgaccaaaatctattctcgtgacgcgaatgcgtggcatatctctacggagggtggcgtactagaaagtacctggaatgcaccgaatgaagattgctgggtatggaccgtcgatccagagcaagcgccgaatgaagcggaatacgttaccctgcaagttgaaaaaggtgaagttgtggccgtggatggtgagcaaatgacgccgtacaacgcgctggtttacttgaacgaaaaaggggcgaaacacggtgttggtcgtatcgacattgtagaaaaccgtctagttggtatgaagtctcgtggttgttatgaaaccccagggggcaccattatgatggaagcgctgcgtgcggttgagcagttggtgctggacaaaacctcttttgagttccgtgaagaactgggtttaaaagcgtctcaccttgtctatgatggtcgctggttcacaccactgcgtaaatcgatcatggctgcggcagatgaattggcgcaggatgtcaatggtgaagtcgtggtgaagctgtataaaggcatggcaacagtgacacagaaacgctctgaaaacagcttgtattccgaagcgtttgcaacctttggtgaagatgaagtgtacgatcaaagccacgcaggcggctttatccgcctttactcactttctagccgaattcgcgcactcaatagccagaaataa

SEQ ID NO: 153625 - protein, 405 aa, Vibrio vulnificus CMCP6
MEMSKLNVNKVVVAYSGGLDTSVIIPWLKENYDCEVVAFVADVGQGEEELVGIEEKAKASGASECYVVDLKEELVADYIYPTLKTGAYYEGKYLLGTSMARPVIAKAQVEIARKVGADALCHGCTGKGNDQVRFEGAFAALAPDLKVIAPWREWDLVSREQCLDYLAERNIPCAASLTKIYSRDANAWHISTEGGVLESTWNAPNEDCWVWTVDPEQAPNEAEYVTLQVEKGEVVAVDGEQMTPYNALVYLNEKGAKHGVGRIDIVENRLVGMKSRGCYETPGGTIMMEALRAVEQLVLDKTSFEFREELGLKASHLVYDGRWFTPLRKSIMAAADELAQDVNGEVVVKLYKGMATVTQKRSENSLYSEAFATFGEDEVYDQSHAGGFIRLYSLSSRIRALNSQK

SEQ ID NO: 153626 - DNA, 1410 bp, Salmonella enterica subsp. enterica serovar Typhi Ty2
  CDS (1)..(1410): transl_table=11
ttgcataaaaatgcactaaagcagaaaccgatctcattatcagtcaatcaagcagggttctattctatgacgacgattcttaagcatcttccagcaggtcaacgtattggtatcgctttttccggcggtctggacactagcgccgcgctgctgtggatgcgacaaaaaggagctgtcccatatgcctatactgcgaatctgggacaaccggatgaggatgactatgacgccattcctcgtcgcgcaatggagtatggcgcagagaatgcccgcctgattgattgccgcaagcagttggttgcagaagggatcgcaacgattcagtgcggcgctttccataatacgactggcggactgacctatttcaataccacgccgctgggccgtgccgtgaccggcacgatgctggtcgccgcaatgaaagaagacggcgtgaatatctggggcgacggcagcacctataaaggcaacgatattgaacgtttctatcgttacggcctgctgaccaacgccgagctgcagatttacaaaccgtggctggataccgactttatcgatgagctgggcggccgtcatgagatgtctgaatttatgattgcctgcggtttcgactataagatgtcagtcgaaaaagcctactccaccgactccaacatgctcggcgcgacgcacgaagcgaaagatctggagtttcttaactccagcgtcaagatcgtcaacccgattatgggcgtgaagttctgggacgaaagcgtgaagatcccggcagaagaggtgaccgtccgtttcgaacagggacatccagtggcgctgaacggtaaaaccttcagcgatgatgttgagatgatgctggaagcgaaccgcatcggcggacgtcacggcctgggcatgagcgaccagatcgaaaaccgtatcattgaagcgaaaagccgcggtatttatgaagcccccggaatggcactgctgcacatcgcttacgagcgtctgttgaccggtattcacaacgaagacaccattgaacagtatcattctcatggtcgtcagttgggtaaactgctgtatcagggtcgctggttcgactctcaggcgctgatgctgcgtgacggcctgcaacgttgggtcgccagccagattaccggtgaagtgacgttggagctgcgtcgcggcaacgactactccatcctgaacaccgtgtcagacaacctgacctataaggctgagcgtctgaccatggagaaaggcgagtccgtgttctcgccagacgatcgtatcggtcagttgaccatgcgtaatctggacattactgatacccgcgagaaactgttcggctacgcgaaagcgggtctgttaaccgcctcttccgcgaccggtctgccgcaggttgagaatctggaaaacaaagcgaagtaa

SEQ ID NO: 153627 - protein, 469 aa, Salmonella enterica subsp. enterica serovar Typhi Ty2
MHKNALKQKPISLSVNQAGFYSMTTILKHLPAGQRIGIAFSGGLDTSAALLWMRQKGAVPYAYTANLGQPDEDDYDAIPRRAMEYGAENARLIDCRKQLVAEGIATIQCGAFHNTTGGLTYFNTTPLGRAVTGTMLVAAMKEDGVNIWGDGSTYKGNDIERFYRYGLLTNAELQIYKPWLDTDFIDELGGRHEMSEFMIACGFDYKMSVEKAYSTDSNMLGATHEAKDLEFLNSSVKIVNPIMGVKFWDESVKIPAEEVTVRFEQGHPVALNGKTFSDDVEMMLEANRIGGRHGLGMSDQIENRIIEAKSRGIYEAPGMALLHIAYERLLTGIHNEDTIEQYHSHGRQLGKLLYQGRWFDSQALMLRDGLQRWVASQITGEVTLELRRGNDYSILNTVSDNLTYKAERLTMEKGESVFSPDDRIGQLTMRNLDITDTREKLFGYAKAGLLTASSATGLPQVENLENKAK

SEQ ID NO: 153628 - DNA, 1455 bp, Streptomyces avermitilis MA-4680
  CDS (1)..(1455): transl_table=11
atgtctaaggtcctcacctcccttcccgccggcgagcgcgtcggtatcgccttctcgggcggcctcgacacctcggtcgcggtcgcgtggatgcgcgacaagggcgccgtcccgtgcacctacaccgccgacatcggccagtacgacgagcccgacatcgcctcggtgccgggccgcgcgaagacctacggtgccgagatcgcgcggctggtcgactgccgcgcggcgctggtcgaggagggcctggccgcgctcacctgcggggcgttccacatccgttcgggcgggcgtgcctacttcaacaccacgccgctcggtcgcgccgtcacgggcaccctcttggtccgggcgatgctcgaggacgacgtacagatctggggcgacggctcgaccttcaagggcaatgacatcgagcggttctaccggtacggcctgctcgccaacccgcacctgcggatctacaagccgtggctggacgcggacttcgtgaccgagctcggcggccgcaaggaaatgtcggagtggcttctcgcccacgacctgccctaccgcgacagcacggagaaggcgtactccaccgacgccaacatctggggcgccacccacgaggccaagaccctggagcacctggacaccggcgtggagaccgtggagccgatcatgggcgtgcggttctgggaccccgcggtcgagatcgccaccgaggacgtgacgatcggcttcgaccagggccgcccggtgacgatcaacggcaaggagctcgcctcccctgtcgacctggtcatggaggcgaacgcgatcggcggtcggcacggcatgggcatgtcggaccagatcgagaaccggatcatcgaggccaagagccgcggcatctacgaggcgcccggcatggccctgctgcacgcggcgtacgagcgcctggtcaacgcgatccacaacgaggacacgctcgcccagtaccacaacgagggacggcgcctcggccggctgatgtacgagggccgctggctggacccgcaggcgctgatggtgcgcgagtcgctgcagcgctgggtcggcgcggccgtcaccggcgaggtgacgctgcgactgcggcgcggtgaggactactcgatcctcgacaccacgggcccggcgttcagctaccacccggacaagctgtccatggagcgcaccgaggactcggcgttcggcccggtcgaccggatcggccagctcaccatgcgcaacctggacatcgcggattcacgcgtcaagctggagcagtacgccggcctcggcctgatcggcaccggcagtcccgccatcggtgccgcccaggcggccgcgaccggcctgatcggcaccatgccgcagatgccggagggcagcgccgaggccatcgcctcccgcggcgaggtctccggtgacgacgagatgctggaccgcgccgcgatggagttcggcacggactga

SEQ ID NO: 153629 - protein, 484 aa, Streptomyces avermitilis MA-4680
MSKVLTSLPAGERVGIAFSGGLDTSVAVAWMRDKGAVPCTYTADIGQYDEPDIASVPGRAKTYGAEIARLVDCRAALVEEGLAALTCGAFHIRSGGRAYFNTTPLGRAVTGTLLVRAMLEDDVQIWGDGSTFKGNDIERFYRYGLLANPHLRIYKPWLDADFVTELGGRKEMSEWLLAHDLPYRDSTEKAYSTDANIWGATHEAKTLEHLDTGVETVEPIMGVRFWDPAVEIATEDVTIGFDQGRPVTINGKELASPVDLVMEANAIGGRHGMGMSDQIENRIIEAKSRGIYEAPGMALLHAAYERLVNAIHNEDTLAQYHNEGRRLGRLMYEGRWLDPQALMVRESLQRWVGAAVTGEVTLRLRRGEDYSILDTTGPAFSYHPDKLSMERTEDSAFGPVDRIGQLTMRNLDIADSRVKLEQYAGLGLIGTGSPAIGAAQAAATGLIGTMPQMPEGSAEAIASRGEVSGDDEMLDRAAMEFGTD

SEQ ID NO: 153630 - DNA, 1335 bp, Rhodopirellula baltica SH 1
  CDS (1)..(1335): transl_table=11
gtgctgcttgactttccggccaggatccttctgaccgtccttgcgtgtttcgcaccggacaacttaaatgcgaggccttcaaacatagccgattcccccgcatttggatgcagatctgagatgaaaagttgtgtgctggcctattccggtggtctcgatacgtccgtcattctgggctggctccaggaccaaggctacgaagttcactgtgtttacgtggacctcgggcagccctgtgaggatcgcgatgccatcatggagaaggctcgtacctgcggggccaagtcctctcgtttggtggacgttcgtgaagaactgtgccgcgattttgctttccccgtgttggcgtggcaagccaagtacgaacaaatctatctgctgggcacctcgatcgctcgcccgctgatcagcaaggtttgcttggaagtggctcgcgaagtcggcgcgaccgcctacgctcacggagcaacaggcaaaggcaatgaccaatgtcgtttccaacttgctgccgaagctcttgatccaaacatcgaaatgatcgctccttggcgaatcaaatcgttccgcgatgccttccctggccgcaccgaactgatcgagtactgcgacgtgaagcgaattcctgtcaaagcctcgactgcaaagccatacagcagcgatgaaaacgtcctgcacatttcctacgaagcgggcaagcttgaagaactcgacgtcaacggcgtggagctggtcgaattcggaatgggcgtttcacctcaagatgctcccgacaaaccagaagaagtcacgatcggttttgaatccggcgtaccaaaaacgttgaatggcaaagccgtcaacgctttggaaatggtcgagcaactcaatgacatcgctggacgcaacggcgtcggtcgcatcgacatggtcgaaaatcgtttcgtcggcatgaagagccgcggtgtttacgagtcgcccggcatgactgtgttgtacgacgcattgatgtacgtcgaacaactcaccatggaccgcgacctgatgcaccttcgcgaccgcatggctcccgaagtggctgaaatggtttactacggtttctggtacacgcccaagatggacgcactgatgtcgttcatcgaaaccgctcagcgtccagtcaccggcgaagtcacgttgcaactctacaagggcaacatcatggtgtcttcacgaaccagcccaaacagcttgtacgacgaagagatcgcaaccatggaaggcggcggctcgtacaaccaagacgacgccgaaggcttcctgcgaatccaaggcttgccgtcgcgagtccaaggccgcgtgtcaccacgcaagttctaa

SEQ ID NO: 153631 - protein, 444 aa, Rhodopirellula baltica SH 1
MLLDFPARILLTVLACFAPDNLNARPSNIADSPAFGCRSEMKSCVLAYSGGLDTSVILGWLQDQGYEVHCVYVDLGQPCEDRDAIMEKARTCGAKSSRLVDVREELCRDFAFPVLAWQAKYEQIYLLGTSIARPLISKVCLEVAREVGATAYAHGATGKGNDQCRFQLAAEALDPNIEMIAPWRIKSFRDAFPGRTELIEYCDVKRIPVKASTAKPYSSDENVLHISYEAGKLEELDVNGVELVEFGMGVSPQDAPDKPEEVTIGFESGVPKTLNGKAVNALEMVEQLNDIAGRNGVGRIDMVENRFVGMKSRGVYESPGMTVLYDALMYVEQLTMDRDLMHLRDRMAPEVAEMVYYGFWYTPKMDALMSFIETAQRPVTGEVTLQLYKGNIMVSSRTSPNSLYDEEIATMEGGGSYNQDDAEGFLRIQGLPSRVQGRVSPRKF

SEQ ID NO: 153632 - DNA, 1332 bp, Haemophilus ducreyi 35000HP
  CDS (1)..(1332): transl_table=11
atgtcagcaacgattttagaatctctcccattaggtcaaaaggttggtatcgctttctcaggtggtttggatacttcagccgcgttactttggatgcgtaaaaaaggtgcaataccttatgcatatactgccaatttaggccaaccagatgaaaatgattacaatgcaattccaaacaaagcgatggaatatggtgcagaaaatgcccgcttaattgattgccgtactcaattagctcacgaagggattgccgcaattcaatgtggagcatttcatatttcaacaggtggtattccatatttcaatactacaccgcttggccgagcagtaacaggcacaatgcttgtggcagcaatgaaagaagataatgtgaatatttggggggatggttcaacgtttaaaggtaatgatattgaacgtttttaccgctatggcttattaactaatccaaaattaaaaatttataaaccttggttagatcagctttttattgatgagcttggcggtcgttttgaaatgtcacaatttttaatttcaaacggctttgattataaaatgtctgttgaaaaagcatattcgactgattcaaatatgttaggcgctacccacgaagcaaaagatttagaagaacttggcacggatatgaaaattgtcaagccaattatgggcgttgcattttgggatgaatcggttgaaattaaaccagaaattgtatcggtcacctttgaagaagggattcctgttgctttaaatggtaaacggattgatgatgcagttgaattaatcttagaagcaaaccgtatcggtggccgtcatggcttaggtatgtcagatcaaattgaaaaccgtattattgaagcaaaatcacgtggaatttatgaagcgccaggaatggcaatattacatattgcttatgagcgtttagtgacgggtattcataatgaagacacgatagaacaatatcgtatcaatggcttgcgtttagggcgtttattatatcaaggtcgttggtttgatcctcaagcgttaatgttacgagaaacggcacaacgttgggtcgcaaaagcaattgcgggcacggtaacattagaattacggcgtggtaatgatttcagcattttaaatactgaatcggttaatttaacttatcaagcagagcggttaagtatggaaaaagtcgaagatgcaccttttacccctgctgatcgtataggtcaattaactatgcgtaatttagacattgttgatacacgtgataaactagctgtttatacggacgcaggtttattatctgtgcaaaataatgttattccacaattgaataaaaaataa

SEQ ID NO: 153633 - protein, 443 aa, Haemophilus ducreyi 35000HP
MSATILESLPLGQKVGIAFSGGLDTSAALLWMRKKGAIPYAYTANLGQPDENDYNAIPNKAMEYGAENARLIDCRTQLAHEGIAAIQCGAFHISTGGIPYFNTTPLGRAVTGTMLVAAMKEDNVNIWGDGSTFKGNDIERFYRYGLLTNPKLKIYKPWLDQLFIDELGGRFEMSQFLISNGFDYKMSVEKAYSTDSNMLGATHEAKDLEELGTDMKIVKPIMGVAFWDESVEIKPEIVSVTFEEGIPVALNGKRIDDAVELILEANRIGGRHGLGMSDQIENRIIEAKSRGIYEAPGMAILHIAYERLVTGIHNEDTIEQYRINGLRLGRLLYQGRWFDPQALMLRETAQRWVAKAIAGTVTLELRRGNDFSILNTESVNLTYQAERLSMEKVEDAPFTPADRIGQLTMRNLDIVDTRDKLAVYTDAGLLSVQNNVIPQLNKK

SEQ ID NO: 153634 - DNA, 1338 bp, Rhodopseudomonas palustris CGA009
  CDS (1)..(1338): transl_table=11
atgactacgatcttgaaaagcctgcccaagggcgaaaacgtcggcatcgctttctcagggggtctcgataccagcgcggcgctgctgtggatgaagcagaagggcgccaaggtgttcgcctatacggcgaacctcggccagcccgacgaggccgactacgacgcgatcccgcgcaaggcgatggagttcggcgccgagaaagcccggctggtcgattgccgcacccagctggtgcacgaaggcatcgcggcgatccaggccggcgccttccacgtctcgaccggcggcatcgcgtatttcaacaccaccccgctcggccgcgccgtcaccggcaccatgctggtgtcggcgatgaaggaagacggcgtcaacatctggggcgacggctcgacctacaagggcaacgacatcgagcggttctaccgctacggcctgctcaccaatccggccttgcggatctacaagccctggctcgaccagcagttcatcgacgagctcggcggccgcgccgagatgtcggcgttcatgacttcgcacggcttcgcctacaagatgagcgccgaaaaggcgtactcgaccgacagcaacctgctcggcgccacccacgaggccaaggatctcgaacacctcgacagcggcatcaagatcgtcaacccgatcatgggcgtgccgttctggcgcgacgattgcgcggtgaaagccgaagccgtcacggtgcggttcgaggaaggccagccggtcgcgctcaatggccagactttcacggatccggtcgcgatgttctacgaagccaatgccatcggcggacgtcacggcctcggcatgagcgaccagatcgagaaccgcatcatcgaggccaagagccgcggcatctacgaggcgcccggcatggcgctgctgcacatcgcctatgagcggctggtcaccggcattcacaacgaagacaccatcgagcagtaccgcatcaacggcatgaagctcggccggctgctgtatcagggccgctggttcgactcgcaggctttgatgctgcgcgagaccgcgcagcgctgggtcgcccgtgccgtcaccggcgaggtgacgctcgaactgcgccgcggcaacgactactcgatcctcaacaccgtcagcccgaacctgacctacgcgccggagcggctgagcatggagaaggtcgaggacgcgccgttcactccggccgaccgcatcggccagctcaccatgcgcaacctcgacatcaccgacacccgcgccaagctcggcctctacgccaagaccggcctgctgtcctccggcgaaggcaccccgatcccgcagctggaaaacgacaagggctga

SEQ ID NO: 153635 - protein, 445 aa, Rhodopseudomonas palustris CGA009
MTTILKSLPKGENVGIAFSGGLDTSAALLWMKQKGAKVFAYTANLGQPDEADYDAIPRKAMEFGAEKARLVDCRTQLVHEGIAAIQAGAFHVSTGGIAYFNTTPLGRAVTGTMLVSAMKEDGVNIWGDGSTYKGNDIERFYRYGLLTNPALRIYKPWLDQQFIDELGGRAEMSAFMTSHGFAYKMSAEKAYSTDSNLLGATHEAKDLEHLDSGIKIVNPIMGVPFWRDDCAVKAEAVTVRFEEGQPVALNGQTFTDPVAMFYEANAIGGRHGLGMSDQIENRIIEAKSRGIYEAPGMALLHIAYERLVTGIHNEDTIEQYRINGMKLGRLLYQGRWFDSQALMLRETAQRWVARAVTGEVTLELRRGNDYSILNTVSPNLTYAPERLSMEKVEDAPFTPADRIGQLTMRNLDITDTRAKLGLYAKTGLLSSGEGTPIPQLENDKG

SEQ ID NO: 153636 - DNA, 1248 bp, Magnaporthe grisea 70-15
  CDS (1)..(1248)
atgtccaaaggtcgcgtctgcttagcctactctggaggtcttgatacctctaccatcctggtgtggctcattgagcagggctacaccgtcgtctgcttcctcgccaatgtcggccaggaggaggactgggatgaggtcaaggccaaggccaagaagcttggtgctgaggagatggtgatcctcgacctgcagaaggagtttgtcgagcagatcgtcttccgcgccatccagtgcaacgccatatacgaggacaggtacctgctgggcacctcgctggcccgccccatcatcgcccgcgcccaggtccgcgtcgccgagcagtacaactgccagtacgtcagccacggctgcaccggcaagggcaacgaccaggtccgcttcgagctcgccttcaaggcctgcaacccttccatcgaggttattgccccatggaggctgcccgagttcatctccaagttccagggtcgtcaagacctgctcaagtacgccgaggagaagaacatccccgtctcttccagccccaaggccccctggtccatggacgacaacctcgtccactgcagctacgaggccggcgtgctcgaggaccccgaccacacccctcccaaggagctgtggactcgtaccgttgaccccgtcgacgcccctgccactcctcaggagttcactgttgagttcgagaagggtatccccacaaaggttacggtcgacggtaaggagacgaccggctcggttgaggtcttcaagctgctcaacaagctgggccacgaccacggtgttggccgtatcgacattgtcgagaaccgcttcatcggcctcaagtctcgtggctgctacgacacccctggtttgaccattgcccgcctggcccacttggatctcgagggtctggtcatggactccaaggtccgtgagattcgtgaccagttctgtactctgtcgtggtctcgccagctgtacaacggcatgtacttcagcccggagcgcgagttcgtcgagaactcgatcatcttcagccaggagaacgtcaccggtcaggtcaggttggccgtctacaagggcaacacttacgtcctgggccgcaagagcgacgccagcaacctctactcggagcaggacgcttccatggactcgctcgagggcttctcgcccatggacacgactggcttcatcgagatcaatgccatccgcctgaagaaatacggtctgcaaaagatcaaggacggcaagccccttactcagtcatga

SEQ ID NO: 153637 - protein, 415 aa, Magnaporthe grisea 70-15
MSKGRVCLAYSGGLDTSTILVWLIEQGYTVVCFLANVGQEEDWDEVKAKAKKLGAEEMVILDLQKEFVEQIVFRAIQCNAIYEDRYLLGTSLARPIIARAQVRVAEQYNCQYVSHGCTGKGNDQVRFELAFKACNPSIEVIAPWRLPEFISKFQGRQDLLKYAEEKNIPVSSSPKAPWSMDDNLVHCSYEAGVLEDPDHTPPKELWTRTVDPVDAPATPQEFTVEFEKGIPTKVTVDGKETTGSVEVFKLLNKLGHDHGVGRIDIVENRFIGLKSRGCYDTPGLTIARLAHLDLEGLVMDSKVREIRDQFCTLSWSRQLYNGMYFSPEREFVENSIIFSQENVTGQVRLAVYKGNTYVLGRKSDASNLYSEQDASMDSLEGFSPMDTTGFIEINAIRLKKYGLQKIKDGKPLTQS

SEQ ID NO: 153638 - DNA, 1284 bp, Nasonia vitripennis
  CDS (1)..(1284)
atgccagttaattctacacttgtcagacaatttgtcaagtcgacaatggaggaggagagaaaaaaggttattcttgcctatagtggaggcctagatacttcctgtattctgctctggctcattgagaaaggctacgatgtcatcgcatacgtggcaaacatcggccaagatgaggatttcgaagctgcgcgtgagaaggccctcagcatcggtgccaaaaaggtaataatcgaagacctcagagaggcattcgtcacgtcgtacgtatggccagcagttcgttcaggtcttctttacgaaggcaggtaccttctgggcacgtctctggcacgaccctgcatcagcgagggtctgataagggcagctcgtagcgaaaatgcgatgaccatctcacacggagctaccggtaagggtaacgatcaggttcgattcgagctcagctgctacactcttctgccagctgttcagattctagcaccctggcgagagccggaatttttcaaccgattccaaggtcgtccagatcttctggaatacgccaagaagaacaagatccctgtctctgcaactccaaaggagccttggagcacggatgctaaccttttgcacataagctacgaatctggagttctggagaatccagccaaccaagctccaagtgacctgtgcaagatgacgaacaatccacaagatgctcctgatgaaccactggacgtcgagatttacttcggcaagggatatccgacgtttgttgaaaatttgcacacgcatcaagtgtacaaatcgccgctggccatcatagagttcctcaacaacgtgggtggagagcacggaatcggaaggattgacatcgttgagaatcgattcatcggtctgaagtcgcgaggaatttacgagtcacccggagccaaaatcgttcacgaagctcaccaagatctggaggtctacttactggacaaagaagtcttgaggctcaagtcctacttggctgataaaatgtccgattacgtttacaacggcttgtggttctcgcctgaatgtgactttgccagagaaagcatcgccttgacgcaaaaatacgtaactgggtcagttattgtgcgactttacaaaggcagtgtgtccattgtggcaaggaaaagtgacgtctctctatacaacgaagggctggtatcgatggactccaaaggcgatttccaacctgaagatgctggtggtttcatcaggatccaagctctaaggctaaaagagtatcaacggttcaaagaacaacataaaaaatga

SEQ ID NO: 153639 - protein, 427 aa, Nasonia vitripennis
MPVNSTLVRQFVKSTMEEERKKVILAYSGGLDTSCILLWLIEKGYDVIAYVANIGQDEDFEAAREKALSIGAKKVIIEDLREAFVTSYVWPAVRSGLLYEGRYLLGTSLARPCISEGLIRAARSENAMTISHGATGKGNDQVRFELSCYTLLPAVQILAPWREPEFFNRFQGRPDLLEYAKKNKIPVSATPKEPWSTDANLLHISYESGVLENPANQAPSDLCKMTNNPQDAPDEPLDVEIYFGKGYPTFVENLHTHQVYKSPLAIIEFLNNVGGEHGIGRIDIVENRFIGLKSRGIYESPGAKIVHEAHQDLEVYLLDKEVLRLKSYLADKMSDYVYNGLWFSPECDFARESIALTQKYVTGSVIVRLYKGSVSIVARKSDVSLYNEGLVSMDSKGDFQPEDAGGFIRIQALRLKEYQRFKEQHKK

SEQ ID NO: 153640 - DNA, 1275 bp, Anopheles gambiae str. PEST
  CDS (1)..(1275)
atgagcaaagaaaaggttttgctagcttattcgggtggcctggacacaagctgcatcctgaaatggctgctcgagcaggactacgaggtgatctgctttatggccgacgtgggccaaacggaggactttgcggcggcacgcgaaaaggccctcaagatcggcgccgccgatgtggtggtgaaggacatgaaggatttcttcgtggaaaagtttgtctggccggcggtacagatgggtttaatctacgaggaccggtacctgctcgggacgtcactggcgcggccctgcatctccaagggcctgatggatgtggcggtgcagcgtggctgcagctacatctcgcacggcgccaccggcaagggcaacgatcagattcgcttcgagctgagctgctacgcgctcagcccaacgatccgcgtcatcgccccgtggcgcatggaaacgttctgccagcgtttccagggccgctcggatctgctggagtacgcgaagcgctcgaatatcccggtgagtgccaccacgaaagcaccctggtcgatggatgcgaacattatgcacatcagctacgagtcgggcatcctggaggacccgtcggtggcggcaccggaagagctgtaccagctaacgcaatcgccaacccgcgccccagacacaccgaccgtggccgagatcgtgttcaaggccgggctgccggtgcgcgtcaccgagctggtcagtgggcggacgatggaaagaccggtggacatactggcgtttctgaacaaggccggcggcgagcacggcgtgggacggatcgatatcgtggagaaccggtacattgggttgaagtcgcgcggcgtctacgagacgcccggcgtaaccgtgctgcactgtgcgcaccgggatctggaaatttactgcctcgatcgggaggtgctgcgggtaaaaaagtatcttgccgatcggatggcggactacgtgtacaacggctactggtacgcgcccgaggctgaatacgtgcgcaagtgtatcctcgaatcgcagaagcacgtgtccggcaaggtggtggtggaaatgttcaagggacacgttatggtcacatcgcgagagtctatgcactccttgtacaaccaagagctggcatcgatggaggtgcatggtaacttttcaccctactcgtcgacgggattcattgagatcaatgccgttcgactgagggaacatcatcgggtttttggaacggccaatatgaccaaacacttctcacgcacggaatcagatatgaagctcatctga

SEQ ID NO: 153641 - protein, 424 aa, Anopheles gambiae str. PEST
MSKEKVLLAYSGGLDTSCILKWLLEQDYEVICFMADVGQTEDFAAAREKALKIGAADVVVKDMKDFFVEKFVWPAVQMGLIYEDRYLLGTSLARPCISKGLMDVAVQRGCSYISHGATGKGNDQIRFELSCYALSPTIRVIAPWRMETFCQRFQGRSDLLEYAKRSNIPVSATTKAPWSMDANIMHISYESGILEDPSVAAPEELYQLTQSPTRAPDTPTVAEIVFKAGLPVRVTELVSGRTMERPVDILAFLNKAGGEHGVGRIDIVENRYIGLKSRGVYETPGVTVLHCAHRDLEIYCLDREVLRVKKYLADRMADYVYNGYWYAPEAEYVRKCILESQKHVSGKVVVEMFKGHVMVTSRESMHSLYNQELASMEVHGNFSPYSSTGFIEINAVRLREHHRVFGTANMTKHFSRTESDMKLI

SEQ ID NO: 153642 - DNA, 1239 bp, Apis mellifera
  CDS (1)..(1239)
atgtccgaaacagagaagaaagttgttctagcttatagcggtggcttggacacatcgtgcatattattatggttgaaagaaaaggggtatcaagttatagcttatatggcaaacgtgggacaagaagaagattttgatgctgctagaaaaaaagcgttaaaaattggtgctacgaaggtagtaatagaagatctcagagaagtttttctatcgtcatttgtgtggccagccattgcatgcggacttatttacgaggatagataccttttgggtacggcgatcgctcggccatgcatcagcgagggtctcgtgagactcgcgaaaggtgaaaatgcgcatataatcgctcatggtgcgacagggaaaggtaacgatcaagtacgtttcgagttgaactgttacagcctttgtccagatatccagatactcgcaccttggagggaggaagaattttacacaagattttcaggaaggacggatttgttaaaatacgcacaacagaacggtattcctgtttcagtgacgccaaaagagccatggagcactgatgcgaatctgttacacgttagttacgaatcgggtattttggaaaatccaaatgcattggtcccgaaagaaatatacaaaatgacgcgtgatccattgtgttctccaacggagccggaagagattgaaatcaaatttgagcgaggatacccgtcgtccgtcgagcgattaaaaaataacgaaacgtttctcactccgcttgaaataatgcaatgtttaaatgaagttggtaatctgcatggtataggacgtatcgacattgtcgagaatcgttttatcggtttgaaatctagaggaatttacgaatcaccgggagcgacgattctatacaaagcacatcaagatttagagatctttatattagatcgcgaggttttaagaataaaatcttatttgactagcaaaatgtctgattacgtatacaatggtttctggttttctcccgaatttgatttcgtacggaatagcatattgtattctcaaaaatacgtaaatggtacggttcgattgaagttgtataagggaaatgtatctgtacttagtcgacacagcaaaacttctttgtacaaccaaagtttagtttcaatggacgtgcaaggagatttcgagcccgaggatgtgggtggttttattcgcacacaagcttacagattgaaagaatttaatcgcttcaaagagcaatgtgatatttaa

SEQ ID NO: 153643 - protein, 412 aa, Apis mellifera
MSETEKKVVLAYSGGLDTSCILLWLKEKGYQVIAYMANVGQEEDFDAARKKALKIGATKVVIEDLREVFLSSFVWPAIACGLIYEDRYLLGTAIARPCISEGLVRLAKGENAHIIAHGATGKGNDQVRFELNCYSLCPDIQILAPWREEEFYTRFSGRTDLLKYAQQNGIPVSVTPKEPWSTDANLLHVSYESGILENPNALVPKEIYKMTRDPLCSPTEPEEIEIKFERGYPSSVERLKNNETFLTPLEIMQCLNEVGNLHGIGRIDIVENRFIGLKSRGIYESPGATILYKAHQDLEIFILDREVLRIKSYLTSKMSDYVYNGFWFSPEFDFVRNSILYSQKYVNGTVRLKLYKGNVSVLSRHSKTSLYNQSLVSMDVQGDFEPEDVGGFIRTQAYRLKEFNRFKEQCDI

SEQ ID NO: 153644 - DNA, 1263 bp, Candida glabrata CBS 138
  CDS (1)..(1263)
atgtctaaaggaaaagtttgtttggcatactctggtggtctagatacctccatcatcctagcttggttgctagaacaaggctacgaagttgttgctttcatggccgatgtcggtcaggaagaagacttcgaagccgctagagctaaggctttgaagattggtgctaccaaggttgttatcagtgacgtccgtgaacaatttgttaaggatatcatcttccctgccgtccaagtcaacgctgtctacgaagatgtctatttgctaggtacttctttggctagaccagttattgctaaggctcaaatcgatgttgctgaacaagaaggttgtttcgccgtttctcacggttgtaccggtaagggtaacgatcaaatcagattcgaactatctttctacgctttgaagccagacgtccaagtgatcgctccatggagattgccagaattcttcaacagatttgccggtagaaaggatctattggactacgccgcagaaaagggtatcccagtcgcacaaaccaaggccaagccatggtccaccgatgaaaacatggcgcacatctcttacgaggctggtatcctagaagacccaaatactaccccaccaaaggatatgtggaagttgattaccgacccaatggatgctccaaacactccacaagatatcacgctagatttcgaaaagggtatccctgttaagctaacatacaaggacaacgctactggtaaggaacatgtagtcactgacgccttggagttggcccttcacgtctctaacttgggtagagccaacggtgtcggcagaatcgacattgttgaaaaccgttacattaacttgaagtccagaggttgttacgagcaagccttgctaactattttgagaaaggcccacgtcgatcttgaaggtctggtgctagacaaggaagtccgtcaattgagagaccaatttgtcactaccacttactccaagctgctgtacaacggttcttacttcaccccagaatgtgaattcatcagagccatgatcgagccatctcaaaagaccgtcaacggtacagtcagactttctctatacaagggtaacgtgatagtactaggaagatactctaacactgaatccctgtatgacgccactgaatcctcaatggatgagctaacaggtttcctacctaccgataccaccggtttcatcgccatccaagccatcagagtcaagaagttcggtgaagccaagaaggccagcggtgagaagatcactttatag

SEQ ID NO: 153645 - protein, 420 aa, Candida glabrata CBS 138
MSKGKVCLAYSGGLDTSIILAWLLEQGYEVVAFMADVGQEEDFEAARAKALKIGATKVVISDVREQFVKDIIFPAVQVNAVYEDVYLLGTSLARPVIAKAQIDVAEQEGCFAVSHGCTGKGNDQIRFELSFYALKPDVQVIAPWRLPEFFNRFAGRKDLLDYAAEKGIPVAQTKAKPWSTDENMAHISYEAGILEDPNTTPPKDMWKLITDPMDAPNTPQDITLDFEKGIPVKLTYKDNATGKEHVVTDALELALHVSNLGRANGVGRIDIVENRYINLKSRGCYEQALLTILRKAHVDLEGLVLDKEVRQLRDQFVTTTYSKLLYNGSYFTPECEFIRAMIEPSQKTVNGTVRLSLYKGNVIVLGRYSNTESLYDATESSMDELTGFLPTDTTGFIAIQAIRVKKFGEAKKASGEKITL

SEQ ID NO: 153646 - DNA, 1263 bp, Kluyveromyces lactis NRRL Y-1140
  CDS (1)..(1263)
atgtctaaaggtaaggtttgtttggcatactccggtggtttggatacctctgtgattttggcctggttgttagaacaagggtacgaagttgttgccttcatggccaatgttggtcaagaagaagatttcgaagctgctgaaaagaaggctttactaattggtgctaccaagtttgttctagttgactgcagagaagaattcgtcaaggacgttttgttcccagctgttcaagttaacgcggtatacgaagacgtttatctgttaggtacctctttggctagacctgttatcgctaaggctcaaatcgacgtcgctaagcaagaaggttgtttcgctgtttctcatggttgcaccggtaagggtaacgatcaaattagattcgaattgggtttctacgcattgaaaccagacgtcaaggtcattgccccatggagagatccaactttcttcgacagatttgctggtagaaaagatctattggcttatgctgccgaaaagaacatccctgtgttccaaaccgcttctaaaccatggtccactgatgagaacttggctcatatctcctacgaagctggtattctagaagatccaaaccaaactcctccaaacgatatgtggaagttgatcactggtccagaagatgctccagatcaaccacaagatttggatatcgttttcgaaaagggtttgccagtgaagttgacttacaaggatgccgcttctggcaaagaaactactgctacttcaccattggatatcttcttgacttctgcgaaattggctagagctaacggtgttggtagaatcgatatcgttgaaaatcgttacatcaacttgaaatctagaggttgttacgaacaagctccattgtccgtcttgagaagagctcacgttgacttggaaggtttgactttggacaaagaagtccgtgccttgagagatcaatttgtcactccaaattactccagattgttgtacaacggttcatacttcactccagaatgtgaatatatcagatctatgatccaaccttcccaatctacagttaacggtaccgttagattgagactatacaagggtaacatcattgtgctaggcagatactcagagactgagaacctatacaatcctgatgaatcttctatggatatattgactggtttccaaccaaccgacactaccggtttcatcgctattcaagcgatcagagtaaaaaagtacggtgaatccaaggctgccaagggtgaagaactaactttataa

SEQ ID NO: 153647 - protein, 420 aa, Kluyveromyces lactis NRRL Y-1140
MSKGKVCLAYSGGLDTSVILAWLLEQGYEVVAFMANVGQEEDFEAAEKKALLIGATKFVLVDCREEFVKDVLFPAVQVNAVYEDVYLLGTSLARPVIAKAQIDVAKQEGCFAVSHGCTGKGNDQIRFELGFYALKPDVKVIAPWRDPTFFDRFAGRKDLLAYAAEKNIPVFQTASKPWSTDENLAHISYEAGILEDPNQTPPNDMWKLITGPEDAPDQPQDLDIVFEKGLPVKLTYKDAASGKETTATSPLDIFLTSAKLARANGVGRIDIVENRYINLKSRGCYEQAPLSVLRRAHVDLEGLTLDKEVRALRDQFVTPNYSRLLYNGSYFTPECEYIRSMIQPSQSTVNGTVRLRLYKGNIIVLGRYSETENLYNPDESSMDILTGFQPTDTTGFIAIQAIRVKKYGESKAAKGEELTL

SEQ ID NO: 153648 - DNA, 1251 bp, Debaryomyces hansenii CBS767
  CDS (1)..(1251)
atgtctaaaggtaaggtttgtttggcatactcaggtggtttagatacctcagtcattttggcttggttattggaagaaggatatgaagttatcgcttatttggctaacattggtcaagaggaagacttcgaagaagccgaaagaaaggctttagcaattggtgccaccaagtttgttgttgttgatgtcagaaaggaattcgttgaacaagtttgtttcccagctatccaaactaacgctatttacgagaatgtctacttattaggtacttcgttagctagaccagttattgctcaagctcacatcaaggttgctgaagaaaacggatgttttgctgtttctcacggttgtactggtaagggtaacgatcaagttagatttgaattagctttttatgcattgaaaccagatgttactgttattgctccatggagagacccagactttttcaacagatttgcaggtagaaaagatttattagaatatgctggttctaagaacatcccagttgctcaaaccaaggctaagccatggtcaaccgacgaaaacttggcccatatttccttcgaagctggtattttagaagatcctgataccactccacctaaggatatgtggaaattgactgtcgacccactcgatgctccagataccccagaagatttctctgtttactttgaaaaaggtataccaaagaaattgatcttagatggtggtaagaaggtcattactgaaccagtcgaattgtttactgaagctaacgctttagccagaagaaatggtgtcggtagaattgatattgttgagaacagattcattggtatcaaatctagaggttgttatgaaactcctggtttgaccattttaagatctgcacacattgatttggaaggtttgactcttgatcgtgaagtccgtgccattagagatcaatttgttaccactacttactccaaattattgtacaatggtatgtactttacaccagaatgtgagtatgttagaaccatgattgacccatcccaaaagaccgtaaatggtgttgtcagagctagagcttacaagggatccttgtctattttaggtagatcttctgatactgaaaagttatatgacgaaaccgaatcatctatggacgaattaactggcttttccccagaagacacatccggatttattgccgttcaatccattagaatcaaaaaatatggtgaagcagttagagaaaagggtaatacattatctttataa

SEQ ID NO: 153649 - protein, 416 aa, Debaryomyces hansenii CBS767
MSKGKVCLAYSGGLDTSVILAWLLEEGYEVIAYLANIGQEEDFEEAERKALAIGATKFVVVDVRKEFVEQVCFPAIQTNAIYENVYLLGTSLARPVIAQAHIKVAEENGCFAVSHGCTGKGNDQVRFELAFYALKPDVTVIAPWRDPDFFNRFAGRKDLLEYAGSKNIPVAQTKAKPWSTDENLAHISFEAGILEDPDTTPPKDMWKLTVDPLDAPDTPEDFSVYFEKGIPKKLILDGGKKVITEPVELFTEANALARRNGVGRIDIVENRFIGIKSRGCYETPGLTILRSAHIDLEGLTLDREVRAIRDQFVTTTYSKLLYNGMYFTPECEYVRTMIDPSQKTVNGVVRARAYKGSLSILGRSSDTEKLYDETESSMDELTGFSPEDTSGFIAVQSIRIKKYGEAVREKGNTLSL

SEQ ID NO: 153650 - DNA, 1407 bp, Aspergillus nidulans FGSC A4
  CDS (1)..(1407)
atgggcaaaggaaagatctgtgtcgccttcagcggtggtctcgacaccagcgttatcttgaaatggctcatcgatgagggctacgaggttgtcgctttcactgccgatgttggccaggaagaggacttcgccgccatcaaggagaaagctctgaagctcggtgccgtcaaggccgaagttgtcgatcttcgccgcgagtttgttgaggaactctgcttccccgccattgcttgcaacgccatttacgagaacgtctacctcctcggtacctctctggctcgtcccgtcattgctcgtgctcagatcgaagttgctaagcgggaaggatgctttgctgtctcccacggttgtaccggcaagggtaacgatcaggtccgtttcgagctcgccttctacgctctccagcccgacatcaaggtcatcgctccttggcgtgacccccgtttctacgagcgcttcgccggtcgcaacgatctcctcgcctacgccgctgagaagggtatccccgtcacttccaccaaggccaagccctggagtatggacgaaaatctggcccactgctcttatgaggctggtatcctggaggaccctgacatcactcctcccaccgacatgtggaagcttactgtcgacccccttgccgctcccgacaagcccgaggatttcaccgtccacttcgagaagggtctccccgttaagctcgagtacaccgagaacggccagcagaagactgctacggacgctgttgacatcttcttgactgccaacgccatcgctcgccgtaacggtatcggccgtatcgacattgttgagaaccgtttcatcggtatcaagtctcgcggctgctacgagacccctggtctcacctgcctgcgctccgcacacgttgaccttgagggtcttgtgctcgaccgtgaggttcgtgctctgcgtgaccagttcgttactatcaactactccaagctcctttacaacggtctctacttctctccggagcgtgagttccttgagcaggccatccctgcctcccagaagtcggtcaacggcaaggttcgctgccgcgcctacaagggcaacatgatcatcctcggccgttcctctgagaccgagaagctgtacgatatgtccgagtccagcatggacgagattggtgactttgctcccaccgagactaccggattcattggcgtgtctgccatccgtctgaagaagtacggtcagatgaagcaggccgctggcgagaagctaaaagtgatatggaataacacgctcgagggatatcccgcaacttcagcccctgtttctctccgcattcagggcggccaggcatggtctgaaactcacctatctaatgcgtcctcggacgaaaatcctgccgactatgggccaaacccaatcagcgattga

SEQ ID NO: 153651 - protein, 468 aa, Aspergillus nidulans FGSC A4
MGKGKICVAFSGGLDTSVILKWLIDEGYEVVAFTADVGQEEDFAAIKEKALKLGAVKAEVVDLRREFVEELCFPAIACNAIYENVYLLGTSLARPVIARAQIEVAKREGCFAVSHGCTGKGNDQVRFELAFYALQPDIKVIAPWRDPRFYERFAGRNDLLAYAAEKGIPVTSTKAKPWSMDENLAHCSYEAGILEDPDITPPTDMWKLTVDPLAAPDKPEDFTVHFEKGLPVKLEYTENGQQKTATDAVDIFLTANAIARRNGIGRIDIVENRFIGIKSRGCYETPGLTCLRSAHVDLEGLVLDREVRALRDQFVTINYSKLLYNGLYFSPEREFLEQAIPASQKSVNGKVRCRAYKGNMIILGRSSETEKLYDMSESSMDEIGDFAPTETTGFIGVSAIRLKKYGQMKQAAGEKLKVIWNNTLEGYPATSAPVSLRIQGGQAWSETHLSNASSDENPADYGPNPISD

SEQ ID NO: 153652 - DNA, 1290 bp, Cryptococcus neoformans var. neoformans B-3501A
  CDS (1)..(1290)
atggttgctactggtgagaagaagggcaaagtcattctcgcctactctggtggtcttgacacttcttgcattcttctctggcttatcgagcaaggctatgaggttgttgcctatatggctgatgttggtcaggaggaggactttgaggctgctcgtgccaaggctatgcagtgtggtgccgttggtttccaccttgccgacttgaagcgagagtttgttgaggagctcatttaccccgccgttcaatgtaacgccatctatgagaacgtgtacctcctcggtacttcccttgcccgtcctgttatcgcccgaggcatgatcgaggctgccgtcaaggaaggttgcgactttgtctctcacggttgtaccggcaagggtaacgaccaagtccgattcgagctcgccttttacggtctcgcccccaacatcaaggtcattgctccctggcgattgcctgagttctacgagcgattcgacggtcgatccgctttgctcgagtacgccgctaagaacggtattcccgtcacccagaccgcggccaagccctggtctactgacgagaacctcttccacatctcttacgaggccggtatccttgaggaccccaaccagactccccccgatgacatgtggaagcttactgtttcccccgagaaggctcccgatgcccccgagcgagttcacatcgagttcgccaagggcctccccgtcaaggttactttccctgctgacggcaacactgtgaccgactctgttgacattttccttaccctcaacgctcttgccaggaggcacggtgtcggccgaatcgacattgtcgagaaccgattcattggtgtcaagtctcgaggatgctacgagtctccggccgccaccatcctccgagctgcccacatggacctcgaaggtttgacccttgatcgaaacgtccgagctctccgagaccaattcgttaccacccaactctctcagatcctctacaacggtttcttcttctcccccgagcgtgaattcatcactgccgccatccctgcttctcagaagactgtcaacggtgtcgtccgactcaagctctacaagggcaacgttgttgtcgagggccgagatgccgatgagggcttgtacgacgccaagttcacctctatggacgagatgggcggtttcgagcccactgcgaccagcggcttcatcgaaatttcttctatcaggatcaaggcttggggcagagccaacatcaagcgaggccaggacggtgtctcccccaaagacgtgtaccaccgtgaaaactag

SEQ ID NO: 153653 - protein, 429 aa, Cryptococcus neoformans var. neoformans B-3501A
MVATGEKKGKVILAYSGGLDTSCILLWLIEQGYEVVAYMADVGQEEDFEAARAKAMQCGAVGFHLADLKREFVEELIYPAVQCNAIYENVYLLGTSLARPVIARGMIEAAVKEGCDFVSHGCTGKGNDQVRFELAFYGLAPNIKVIAPWRLPEFYERFDGRSALLEYAAKNGIPVTQTAAKPWSTDENLFHISYEAGILEDPNQTPPDDMWKLTVSPEKAPDAPERVHIEFAKGLPVKVTFPADGNTVTDSVDIFLTLNALARRHGVGRIDIVENRFIGVKSRGCYESPAATILRAAHMDLEGLTLDRNVRALRDQFVTTQLSQILYNGFFFSPEREFITAAIPASQKTVNGVVRLKLYKGNVVVEGRDADEGLYDAKFTSMDEMGGFEPTATSGFIEISSIRIKAWGRANIKRGQDGVSPKDVYHREN

SEQ ID NO: 153654 - DNA, 1230 bp, Tribolium castaneum
  CDS (1)..(1230)
atgagtcgcggtaaagtcgttttggcctattctggcggtttggacaccagttgcatcctaagatggctattggaccaaaactacgaagtcatttgttacatggccaacattggccaagacgaagatttcgaagctgcgaggcgaaaagccgagcaaattggcgcatctcaggttgtgattgaagatttgagggagatttttgtaaaagaatacgtctggccggccattcaagccggtctcttgtacgaatcaagatacctgcttggtacttctttggcacgaccttgtatatcagtaggtttgataactgcggcaaaaaaatataacgccctgtatatttctcatggggctactggtaaaggcaacgaccaagtcaggtttgaactgtcgtgttattccctctggccggatgtgaaaataattgcgccttggaggatcaaagagtttacgtcacggtttcaaggccgtcaagaccttatcaaatatgcgtccttgaacaatatcccggtcccggtgactcccaaggctccctggagtatggatgccaacctaatgcacgttagttacgaatcaggaattttggaaaaccctaacaatgaaccacctcatgaccttttccacatgactcaagacttggccaagacgcctaacgagccctttaaactgtcaattgagttctgtcaaggtctcccagtcaaggtcataacccaagatgcgcaagttttcgataaaccgttagaaatgttcacttatttgaaccaaatcgcgggaaaacacggcattggtcgcattgacatcgtcgagaaccgtttcattggtctaaagtcacgtggtgtgtatgaaacgcccgctgggcatatcttacacgtggcacacaccgatttggaggttttttgcctcgataaggaagtgtacagagtgaagcagaatttgaaagagaagttgtccgattttgtttataacgggttttggttttcgccggaaggtgaatacgtgaggaaatgtatcgcattggctgaggaaactgtcactgggaaagtcaatatggaggtttataagggaaatgttgttgttttgggacgttggtcacccgtttcgctctataacgaggaactcgtttcaatggataaacattccgagttttcgccaagtgacgccactgggtttattaatattcaagcgattaggttgaaggaataccacaggtttcagaagcaacaaaacaaatga

SEQ ID NO: 153655 - protein, 409 aa, Tribolium castaneum
MSRGKVVLAYSGGLDTSCILRWLLDQNYEVICYMANIGQDEDFEAARRKAEQIGASQVVIEDLREIFVKEYVWPAIQAGLLYESRYLLGTSLARPCISVGLITAAKKYNALYISHGATGKGNDQVRFELSCYSLWPDVKIIAPWRIKEFTSRFQGRQDLIKYASLNNIPVPVTPKAPWSMDANLMHVSYESGILENPNNEPPHDLFHMTQDLAKTPNEPFKLSIEFCQGLPVKVITQDAQVFDKPLEMFTYLNQIAGKHGIGRIDIVENRFIGLKSRGVYETPAGHILHVAHTDLEVFCLDKEVYRVKQNLKEKLSDFVYNGFWFSPEGEYVRKCIALAEETVTGKVNMEVYKGNVVVLGRWSPVSLYNEELVSMDKHSEFSPSDATGFINIQAIRLKEYHRFQKQQNK

SEQ ID NO: 153656 - DNA, 1206 bp, Prochlorococcus marinus str. MIT 9303
  CDS (1)..(1206): transl_table=11
atggggcgtgcgaagaaggtggtgcttgcttattccggtggtgttgataccagcgtttgcatcccatatctcaagcatgaatggggggtagacgaggtgatcacctttgctgccgatttaggtcagggcgatgagcttgatcccatccgccttaaggctcttgatgctggtgctagtcagtctctggtgggagatttgatagagccttttgtagaagagtttgctttgccggcgattcgtgccaatgctctttatgaaggtcgttatccactgtctacggctttagctcgccccctgattgctcgtcggttggtagaggttgccagggaggtcggtgccgatgcggttgctcatggctgtaccggtaaaggcaacgatcaggtgcgttttgatttggctattgcagcactagcacctgatctcaaggtgctaactcccgctcgggaatggagcatgagcagagaggaggcgatcgcctatggcgaacgttgtgggatccctgcccccgtgagtaagaaatcgccttattcgattgatctgaatctgttgggtcgaagtattgaagcgggtcctcttgaagatccgatggtggctccgcccgaggaggtctttgccatgacctcctcgattgacgctgcaccctctcaggctcaggacattgagatcagatttgaagctggtaatcctgtggctattgatggggtgcgacttgattcggtgggtttgatcaaggaggcgaatcgtcttgctggacggcatggtttcggtcgccttgacatcattgagaatcgggtggttggtatcaagagtcgggagatttatgaaactccagggttacttttattgattcgtgctcatcaggaattggagagtttgacacttgctgcggatgtgttgcgcatgaagcgtcaattggagatgcaatgggctgagctggtctatcagggtctttggttttcccctttgaaggatgctctggatggattcatggatcgcactcagatttatgtgaatggcttggtgcggattcgtctccataaaggcaatgccatggtgattggccggagctctgacaccaacagcttgtatatatctgagatggctacctatggcagcgaggacaactttgaccacagggctgctgaaggatttatctacatctggggacttccaagtcgcctttgggcagcagctcggcgaggctaa

SEQ ID NO: 153657 - protein, 401 aa, Prochlorococcus marinus str. MIT 9303
MGRAKKVVLAYSGGVDTSVCIPYLKHEWGVDEVITFAADLGQGDELDPIRLKALDAGASQSLVGDLIEPFVEEFALPAIRANALYEGRYPLSTALARPLIARRLVEVAREVGADAVAHGCTGKGNDQVRFDLAIAALAPDLKVLTPAREWSMSREEAIAYGERCGIPAPVSKKSPYSIDLNLLGRSIEAGPLEDPMVAPPEEVFAMTSSIDAAPSQAQDIEIRFEAGNPVAIDGVRLDSVGLIKEANRLAGRHGFGRLDIIENRVVGIKSREIYETPGLLLLIRAHQELESLTLAADVLRMKRQLEMQWAELVYQGLWFSPLKDALDGFMDRTQIYVNGLVRIRLHKGNAMVIGRSSDTNSLYISEMATYGSEDNFDHRAAEGFIYIWGLPSRLWAAARRG

SEQ ID NO: 153658 - DNA, 1338 bp, Herminiimonas arsenicoxydans
  CDS (1)..(1338): transl_table=11
atgtcgaatattctccaatccgttcccgtcaatcaaaaagtaggcatcgccttttccggcggcctcgacaccagcgcagccttgcactggatgcgtcaaaaaggcgcgatcccttatgcatacactgcgaatctgggtcagcctgacgaaaccgactacaacgcgattccggaaaaagccaaggcctacggcgccgaactggcacgcctgatcgattgccgcgaacaactggtggcggaaggtatcgctgcattgcaaagcggcgccttccacatctcgaccgccggcgttacctatttcaacacgacgcctttgggccgcgcagtcaccggcaccatgctggtcgccgcgatgaaagaagacaacgtcgatatctggggtgacggcagcacattcaagggcaatgacatcgaacgtttctatcgctacggcttgctgatgaatccggcgctgcgcatttacaaaccctggctggacgatgccttcatcaacgaactcggcggccgcaaggaaatgtcggaattcctgatcaagtccggcttcgactacaagatgtccaccgagaaagcgtattcgaccgattccaacatcctcggtgctacgcatgaagcaaaagatctggaagagctcagcagcggcatgcagatcgtcgaacctatcatgggcgtcgcattctggcgtgacgacgtggaagtcaaacgcgaaactgtcaccgtgcgtttcgaagaaggccgtccgatcgcattgaatggcgttgtctataccgatctggtcgaactgatgctggaagccaatcgcatcggcggccgtcatggcctcggcatgagcgatcaaatcgaaaaccgcatcatcgaagcgaagagccgcggcatctacgaagccccgggcctggcgctgttattcattgcttacgaacgcctgatcaccggcatccacaacgaagacacgatcgagcaataccgcgaaagcggccgccgtctgggtcgtctgttgtaccagggccgctggttcgatccgcaagccatcatgctgcgcgaagccgcacaacgctgggttgcacgtgcgatcactggcgaagtcacgatcgaactgcgtcgcggcaacgattattccatcctcaataccgtgtcggccaacctgacctacgcgccggaacgcctgtcgatggaaaaagtggaagatgcaccgttctcgccagccgaccgtattggtcaattgacgatgcgtaatctggacatcacagacacacgtcacaagctggccatctacagcagcgccggcctgctgaccggcaactcgtctgttgctctcccaagctttgaaaaagacaagaaataa

SEQ ID NO: 153659 - protein, 445 aa, Herminiimonas arsenicoxydans
MSNILQSVPVNQKVGIAFSGGLDTSAALHWMRQKGAIPYAYTANLGQPDETDYNAIPEKAKAYGAELARLIDCREQLVAEGIAALQSGAFHISTAGVTYFNTTPLGRAVTGTMLVAAMKEDNVDIWGDGSTFKGNDIERFYRYGLLMNPALRIYKPWLDDAFINELGGRKEMSEFLIKSGFDYKMSTEKAYSTDSNILGATHEAKDLEELSSGMQIVEPIMGVAFWRDDVEVKRETVTVRFEEGRPIALNGVVYTDLVELMLEANRIGGRHGLGMSDQIENRIIEAKSRGIYEAPGLALLFIAYERLITGIHNEDTIEQYRESGRRLGRLLYQGRWFDPQAIMLREAAQRWVARAITGEVTIELRRGNDYSILNTVSANLTYAPERLSMEKVEDAPFSPADRIGQLTMRNLDITDTRHKLAIYSSAGLLTGNSSVALPSFEKDKK

SEQ ID NO: 153660 - DNA, 1338 bp, Burkholderia vietnamiensis G4
  CDS (1)..(1338): transl_table=11
atgagcacgattctcgaaagcctcccgaccggccagaaggtcggtatcgccttctccggcggcctggacaccagcgccgcgctgcactggatgaaactgaagggcgccgtcccgtacgcatacacggcgaacctcggccagcccgacgaagacgattacgatgcgatcccgaagcgcgcgatcgaatacggcgcagccggcgcccgtctgatcgactgccgcgcccagctcgtcgccgaaggcatcgcggcgctgcaaagcggcgcgttccacatcacgacggccggcgtcacctacttcaacacgacgccgatcggccgcgcggtcacgggcacgatgctggtcgccgcgatgaaggaagacggcgtcaacatctggggcgacggcagcacgtacaagggcaacgacatcgagcgtttctaccgctacggcctgctcgtcaaccccgatctgaagatctacaagccgtggctcgaccagacgttcatcgacgagctcggcggccgcgccgaaatgtccgagttcatgaaccaggcgggcttcgcgtacaggatgtcggccgagaaggcgtattcgaccgactcgaacctgctcggcgcgacgcacgaagcgaaggatctggaaagcctcgagagcggcatcaagatcgtgaacccgatcatgggcgtcgcgttctggcgcgacgacgtgaagatcgccgccgaagaagtgacggtgcgcttcgaagccggccagccggttgcgctgaacggcgtcgagttcaaggatcaggtcgagctgctgctggaagcgaaccgcatcggcggccgccatgggctcggcatgagcgaccagatcgagaaccggatcatcgaggcgaagagccgcggcatctacgaggctccggggctcgcgctgctgtacatcgcgtacgagcgtctcgtcaccggcatccacaacgaagacacgatcgagcagtaccgcgagaacggccgccgtctcggccgcctgctgtatcaaggccgctggttcgacccgcaggcgatcatgctgcgcgaaaccgcgcaacgctgggtcgcgcgcgcgatcaccggcgaagtgaagatcgaactgcgccgcggcaacgactactcgatcctgagcacgaagtcgccgaacctcacgtatcagccggaacgcctgtcgatggagaaggttgcgtcgacgttctcgccgcgcgaccggatcggccagttgacgatgcgcaacctcgacatcaccgatacgcgcgacaagctgcgtgtttatgcgcaagtcggtttgttaacgccgggtgaatcgtcggcgctgccgcagatcaagagcgacagcggcgagtaa

SEQ ID NO: 153661 - protein, 445 aa, Burkholderia vietnamiensis G4
MSTILESLPTGQKVGIAFSGGLDTSAALHWMKLKGAVPYAYTANLGQPDEDDYDAIPKRAIEYGAAGARLIDCRAQLVAEGIAALQSGAFHITTAGVTYFNTTPIGRAVTGTMLVAAMKEDGVNIWGDGSTYKGNDIERFYRYGLLVNPDLKIYKPWLDQTFIDELGGRAEMSEFMNQAGFAYRMSAEKAYSTDSNLLGATHEAKDLESLESGIKIVNPIMGVAFWRDDVKIAAEEVTVRFEAGQPVALNGVEFKDQVELLLEANRIGGRHGLGMSDQIENRIIEAKSRGIYEAPGLALLYIAYERLVTGIHNEDTIEQYRENGRRLGRLLYQGRWFDPQAIMLRETAQRWVARAITGEVKIELRRGNDYSILSTKSPNLTYQPERLSMEKVASTFSPRDRIGQLTMRNLDITDTRDKLRVYAQVGLLTPGESSALPQIKSDSGE

SEQ ID NO: 153662 - DNA, 1347 bp, Bradyrhizobium sp. ORS278
  CDS (1)..(1347): transl_table=11
atgaccacgatcctcaaaggcctgcctacgggcgagaaagtcggcatcgccttctccggcggcctcgacaccagcgcggcgctgctctggatgaagcagaagggcgcgcgctgcttcgcctacaccgccaatctcgggcagcccgacgagtccgactatgacgagatcccgcgcaaggcgatgagcttcggcgccgagaaggcgcgcctggtcgattgccgcacccagctggtgcatgagggcatcgccgcgatccagtccggcgccttccacatctcgaccggcggcgcgacctatttcaacaccacgccgctcggccgcgccgtcaccggcaccatgctggtggccgcgatgaaggaggacggcgtcaacatctggggcgacggctcgacctacaagggcaacgacatcgagcgcttctaccgctacggcctgctgaccaacccgaacctcaagatctacaagccctggctcgaccagcagttcatcgacgagctcggcggccgcgccgagatgtcggcattcctcaccgcccacggcttcaattacaagatgagcgccgaaaaggcgtattcgaccgacagcaatctgctcggcgccactcacgaggcgaaggatctcgaaagcctgtcgagcggcatccgcatcgtcaatccgatcatgggcgtgccgttctggcgtgaggactgcgcggtgaggcccgagaccgtcgtggtgcgcttcgaggaaggccagccggtcgcgctgaacggccagacattcacagatcccgtcgcgctgttcctggaggccaatgcgatcggcggccgccatggcctgggaatgtgcgaccagatcgagaaccgcatcatcgaggccaagagccgcgggatctacgaggcgcccggcatggcgctgctgcacattgcctatgagcggctcgtcaccggcatccacaacgaggatacgatcgagcagtaccgcatgagcggcatgaagcttggccgtctgctgtatcaaggccgttggttcgactcgcaggccttgatgctgcgcgagaccgcgcagcgctgggtcgccagcgccatcaccggcgaggtgactttggagctgcgccgcggcaacgactactcgctgctcaacaccgagagccccaacctgacctatcagccggagcggctgagcatggaaaaggtcgaggacgccgccttcacgcccgccgaccgtatcggccagctgaccatgcgcaacctcgacatcaccgacacccgcaccaagctgaagctctattcggacacgggcctgctgtctggcgcggagggcgctcaaattttccagctcggccatgacaagggcgacaagagctga

SEQ ID NO: 153663 - protein, 448 aa, Bradyrhizobium sp. ORS278
MTTILKGLPTGEKVGIAFSGGLDTSAALLWMKQKGARCFAYTANLGQPDESDYDEIPRKAMSFGAEKARLVDCRTQLVHEGIAAIQSGAFHISTGGATYFNTTPLGRAVTGTMLVAAMKEDGVNIWGDGSTYKGNDIERFYRYGLLTNPNLKIYKPWLDQQFIDELGGRAEMSAFLTAHGFNYKMSAEKAYSTDSNLLGATHEAKDLESLSSGIRIVNPIMGVPFWREDCAVRPETVVVRFEEGQPVALNGQTFTDPVALFLEANAIGGRHGLGMCDQIENRIIEAKSRGIYEAPGMALLHIAYERLVTGIHNEDTIEQYRMSGMKLGRLLYQGRWFDSQALMLRETAQRWVASAITGEVTLELRRGNDYSLLNTESPNLTYQPERLSMEKVEDAAFTPADRIGQLTMRNLDITDTRTKLKLYSDTGLLSGAEGAQIFQLGHDKGDKS

SEQ ID NO: 153664 - DNA, 1206 bp, Synechococcus sp. WH 7803
  CDS (1)..(1206): transl_table=11
atgggacgcgccaagaaggttgtgctcgcttattccggtggcgtggatacgagtgtttgcattccgtatctcaagcaggagtggggagtcgaggaggtgatcacgtttgccgctgacctcggccagggcgacgagctggagccgattcggcgcaaggctctggaggctggcgccagtcagtctctggtgggtgatctcatacagccgttcatcgaagagttcgcctttcctgccatccgtgccaatgccctttacgagggtcgttaccccttgtccacggccctggcccgtccgttgattgcccggcggcttgtggaagtggcgcgagaggttggcgcggatgcagtggcccatggatgcacgggcaagggcaacgaccaggtgcgttttgatgtggcgattgccgccttggctcccgatctcaaggtgctcacgccagccagggagtggggaatgagcagggaggaaacgattgcctacggcgaacgctgcggtctaccagcaccggtgagcaagaaatctccttattccatcgatctcaatctgcttggtcgcagcgttgaagccggccctctggaggatccgatgcaggctccccctgaagaagtgttcgccatgacggtgtccatcgatgcggcgccctcggaggctgaagagatcgagatcgccttcgaggctggcaaccctgtgagcatcaacggccagcgactcgatcctgttgccttgatccgagaagccaaccgtttggctggatcccatggcatcggtcgactcgacatgatcgagaaccgggtggtgggcatcaagagccgggagatctacgaaacgccgggtttgcttctcttgatccaggcccaccaggaactggagagtctcacccttgccgccgatgtgctccgcaccaagcggcagctggagatgcagtgggctgatttggtgtatcaaggactttggtttggtccgctcaaggaggccctcgatggcttcatggaccgcacccagagcgaagtgaacggcgtggtgcggctgcgcctgcacaagggcaatgccatcgttactggacgggggtccagcgacagcagcctttacgtgcctgaaatggcctcctacggcagcgaagatcagtttgatcaccgggccgctgaaggcttcatttatgtctggggtctgcccattcgtctctggtcagccgcccgtcgccgttga

SEQ ID NO: 153665 - protein, 401 aa, Synechococcus sp. WH 7803
MGRAKKVVLAYSGGVDTSVCIPYLKQEWGVEEVITFAADLGQGDELEPIRRKALEAGASQSLVGDLIQPFIEEFAFPAIRANALYEGRYPLSTALARPLIARRLVEVAREVGADAVAHGCTGKGNDQVRFDVAIAALAPDLKVLTPAREWGMSREETIAYGERCGLPAPVSKKSPYSIDLNLLGRSVEAGPLEDPMQAPPEEVFAMTVSIDAAPSEAEEIEIAFEAGNPVSINGQRLDPVALIREANRLAGSHGIGRLDMIENRVVGIKSREIYETPGLLLLIQAHQELESLTLAADVLRTKRQLEMQWADLVYQGLWFGPLKEALDGFMDRTQSEVNGVVRLRLHKGNAIVTGRGSSDSSLYVPEMASYGSEDQFDHRAAEGFIYVWGLPIRLWSAARRR

SEQ ID NO: 153666 - DNA, 1341 bp, Acinetobacter sp. ADP1
  CDS (1)..(1341): transl_table=11
atgactgataatgcaaccattttgcagcatgtaccagtaggtaaaaaagtgggtattgccttctctggtggtctggatacttcagctgctttattgtggatgaaacaaaaaggcgcagaaccttatgcatatactgcaaacttaggtcagccagatgaagacgactacgatgcgattccaaaaaaagcagaacaatacggtgcagttaaagcccgtctgatcgattgtcgtttacagcttgcgcttgaaggtattgcagcaattcagtgtggtgcattccatatcagcacaggcggtgttccttatttcaatacgacaccacttggccgtgctgttacaggcacaatgcttgtgactgccatgaaagaagatgatgtcaatatctggggcgatggttcgacctataaaggaaatgacatcgaacgtttctatcgttatggtctactcaccaatccaaacctaaaaatttataagccttggcttgaccaaacgtttattgatgaattaggcggtcgtgcggaaatgtcacaatttctaatcgacaacggttttgactataaaatgtcaaaagaaaaagcgtattcaaccgattcaaacatgctgggtgcaactcacgaagccaaagatcttgaatacctcgatgcaggtatcaagattgtagatccaatcatgggtgttgctttctggaaagatgaggttgaaattcaaccagaacaagtcagcattacctttgaagaaggtatgcctgtggcattgaacggtcaacgtattgaagatccggttgagttcattcttgaagcaaaccgtattggtggtcgtcatggtttaggcatgtcagatcagatcgaaaaccgtatcatcgaagctaaatctcgtggtatttatgaagctccaggtatggcacttctgcatattgcctacgaacgtcttgtgacaggtattcacaatgaagataccatcgaacagtaccgtatcaatggcttacgtttaggtcgtttactttaccaaggtcgctggtttgattcacagtcacttatgcttcgtgaaactgcacagcgctgggttgcaaaagccattacaggtacagtaactctagagttacgtcgcggtaatgattacaccatcatgaacactgaatctccaaacctcacgtatgaagctgagcgtttaaccatggagaaaggtgactcaatgtttagtccaatggatcgtatcggtcaattaaccatgcgtaatctggatattaccgatactcgtgcaaaattaggtatctatacaaattctggtctgctttctattggtcacggttctgctgtacctcagttagagactaagaaataa

SEQ ID NO: 153667 - protein, 446 aa, Acinetobacter sp. ADP1
MTDNATILQHVPVGKKVGIAFSGGLDTSAALLWMKQKGAEPYAYTANLGQPDEDDYDAIPKKAEQYGAVKARLIDCRLQLALEGIAAIQCGAFHISTGGVPYFNTTPLGRAVTGTMLVTAMKEDDVNIWGDGSTYKGNDIERFYRYGLLTNPNLKIYKPWLDQTFIDELGGRAEMSQFLIDNGFDYKMSKEKAYSTDSNMLGATHEAKDLEYLDAGIKIVDPIMGVAFWKDEVEIQPEQVSITFEEGMPVALNGQRIEDPVEFILEANRIGGRHGLGMSDQIENRIIEAKSRGIYEAPGMALLHIAYERLVTGIHNEDTIEQYRINGLRLGRLLYQGRWFDSQSLMLRETAQRWVAKAITGTVTLELRRGNDYTIMNTESPNLTYEAERLTMEKGDSMFSPMDRIGQLTMRNLDITDTRAKLGIYTNSGLLSIGHGSAVPQLETKK

SEQ ID NO: 153668 - DNA, 1347 bp, Erwinia carotovora subsp. atroseptica SCRI1043
  CDS (1)..(1347): transl_table=11
atgacaacgattctcaagcatcttccggttggtcagcgtattggtattgcgttctcgggtggtctggataccagcgctgcactgctttggatgcgtcaaaagggcgcggttccttatgcgtataccgcaaatctggggcaaccagacgaggatgactacgatgaaatccctcgtcgtgcaatggaatacggcgcagaaaatgctcgccttatcgattgccgtaagcaattagtcgctgaaggtatcgctgcgattcagtgtggcgcattccacaatacgacagcgggcgttacctatttcaacaccacgccgctaggccgtgcggttaccggtacgatgctggttgcggcgatgaaagaagacggcgtgaacatctggggtgacggcagcacctataaaggcaacgatattgagcgtttctatcgctacggcctgctgaccaatgctgaactgaagatttacaagccgtggctggataccgacttcattgatgagctgggcggccgtcaggagatgtctgagtttatgtcgcaggcagggttcggctataaaatgtcggccgagaaagcctattctacagattccaacattctgggtgcgacgcacgaagcgaaggatctggaattcctgaattccagcgttaaaatcgttaacccgattatgggcgtgaaattctgggacgagaacgtcaaggttccggcagaagaagtgaccattcgttttgagcgtggacacccggttgcgctgaacggcaagacctttaccgatgacattgaactgatgctggaagcaaaccgcatcggcggtcgtcacggtctgggtatgagcgaccagatcgaaaaccgcatcattgaagcgaaaagccgcggcatctatgaagcgccgggaatggcactgctgcacattgcctatgagcgtctgcttactggtatccacaacgaagacaccatcgagcaataccatgctaatggccgtcagctgggtcgtttcctgtatcagggacgctggtttgattcccaggcattgatgctgcgtgattcttcgcagcgttggatcgccagtgctatcaccggcgaggttacgctggagctgcgtcgtggcaatgattactccatcatgaatactgtgtctgacaatctgacctataagccagaacgcttgaccatggagaaaggcgactcggtcttctcgccagatgaccgtattggccagctgaccatgcgtaatctggacatcacggatacgcgtgaaaaactgtttaactatgctgaaacgggcttgctctcttcctctgccagcacgggcttgccgcaggtagggcaattgcaggataaaacagagaaataa

SEQ ID NO: 153669 - protein, 448 aa, Erwinia carotovora subsp. atroseptica SCRI1043
MTTILKHLPVGQRIGIAFSGGLDTSAALLWMRQKGAVPYAYTANLGQPDEDDYDEIPRRAMEYGAENARLIDCRKQLVAEGIAAIQCGAFHNTTAGVTYFNTTPLGRAVTGTMLVAAMKEDGVNIWGDGSTYKGNDIERFYRYGLLTNAELKIYKPWLDTDFIDELGGRQEMSEFMSQAGFGYKMSAEKAYSTDSNILGATHEAKDLEFLNSSVKIVNPIMGVKFWDENVKVPAEEVTIRFERGHPVALNGKTFTDDIELMLEANRIGGRHGLGMSDQIENRIIEAKSRGIYEAPGMALLHIAYERLLTGIHNEDTIEQYHANGRQLGRFLYQGRWFDSQALMLRDSSQRWIASAITGEVTLELRRGNDYSIMNTVSDNLTYKPERLTMEKGDSVFSPDDRIGQLTMRNLDITDTREKLFNYAETGLLSSSASTGLPQVGQLQDKTEK

SEQ ID NO: 153670 - DNA, 1425 bp, Propionibacterium acnes KPA171202
  CDS (1)..(1425): transl_table=11
gtggttgccgtgtccaaggtcatcactcagcttcccgtcggcgagcgcgtcggcatcgcattctccggaggactcgacacctccgtcgctgtcgcgtggatgcgcgaaaatggcgcggttccgtgcacctacaccgccgacattggtcagtacgacgagcccgacatcgcgtcagtgccgggtcgcgccctcgactacggcgctgagatctcccgacttgtcgactgcaaggcagcgctcgtcgaggagggactgagcgctatcgcgtgcggcgcgttcaacgttcgctccgccgggcgcccctacttcaacaccaccccaatcggtcgcgccgtcaccggcactctgttggtacgcgctatgcataccgacgacgtctccatttggggcgacggctccacctataagggcaacgacatcgagcggttctaccgctacggcttactcgccaacccgcagctgcgcatctataagccgtggctcgacgaaaacttcgtcgctgaactcggtggccgtgacgagatgagcgcctggcttaccgcccacaacctgccttatcgcgactccaaggaaaaggcctattccaccgacgccaacatctggggcgccacccacgaggccaagaaacttgaatccctgcacgtctccatcgagtccgtcaacccgatcatgggcgtcaagttctgggacccagacgtcaagatcgatactgaggaggtgacggtctccttcgagcagggcctgcccgtcgccatcaatggcaaggaatacgacgataaagtcgccctcgttctggaggccaacgccatcggcggtcgtcacggcctcggtatgagcgaccagatcgaaaatcgcattattgaggcgaaatcccgcggcatctatgaggccccgggcatggccctgctccacatcgcctacgaacgtctcgccaacgccatccacaacgaagacactctggagacttatcacaacgaggggcgtcgcctcgggcggctgctctacgagggacgttggctcgacccgcagtccctcatgatccgtgaatctctcacccactgggtcgccagcgccattactggatcggtcacgctcaagctgcgtcgtggctgggactactccatccttgacaccaccggaccgaacttctcgtaccactctgagaagttgtcgatggagcgcgttgagggggctgccttcggcccgaccgatcgcatcggccagctcacgatgcgcaacctcgatatcgccgatacccgcgaaaagcttgagctctactccgcgcaaggccagctcgccagccacgccgacctcgttgggcagcttgagaccggcggcgcatcagctatcgcgtccaacggcgacgatgacgacgacagccaaaagactctcgacgctgccgcaatggaagttggcgtcaactga

SEQ ID NO: 153671 - protein, 474 aa, Propionibacterium acnes KPA171202
MVAVSKVITQLPVGERVGIAFSGGLDTSVAVAWMRENGAVPCTYTADIGQYDEPDIASVPGRALDYGAEISRLVDCKAALVEEGLSAIACGAFNVRSAGRPYFNTTPIGRAVTGTLLVRAMHTDDVSIWGDGSTYKGNDIERFYRYGLLANPQLRIYKPWLDENFVAELGGRDEMSAWLTAHNLPYRDSKEKAYSTDANIWGATHEAKKLESLHVSIESVNPIMGVKFWDPDVKIDTEEVTVSFEQGLPVAINGKEYDDKVALVLEANAIGGRHGLGMSDQIENRIIEAKSRGIYEAPGMALLHIAYERLANAIHNEDTLETYHNEGRRLGRLLYEGRWLDPQSLMIRESLTHWVASAITGSVTLKLRRGWDYSILDTTGPNFSYHSEKLSMERVEGAAFGPTDRIGQLTMRNLDIADTREKLELYSAQGQLASHADLVGQLETGGASAIASNGDDDDDSQKTLDAAAMEVGVN

SEQ ID NO: 153672 - DNA, 1437 bp, Leifsonia xyli subsp. xyli str. CTCB07
  CDS (1)..(1437): transl_table=11
gtgtccaaagtcttgagcagtcttccggtcggtgagcgagtcggcatcgcgttctcgggaggtctcgacacctcctgcgcggtcgcctggatgcgcgagaagggcgccgtgccctgcgcctacacggcagacatcggccagtacgacgagccgaacatcgaggaggtccccggtcgcgccaccgagtacggcgcggagatcgcccggctcgtggacgccaagcgcgcactcgtggaggagggcctgatcgcgttgcagtgcggcgccttccacatccgttccggcgggaagacctacttcaacaccaccccgctcggccgggcggtcaccggcgtcatgctggtgcgcgcgatgagggacgacgatgtcgagatctggggcgacggctccacctacaagggcaacgacatcgagcgcttctaccgctacggcctcatcgccaacccgcgcctgcgcatctacaagccgtggctcgacaccgcgttcgtggaggagctcggcggccgcacggagataagcgaatggctcgtcgcgcgcggcttcccctaccgcgacgcgaccgagaaggcatactcgaccgacgcgaacatctggggcgcgacgcacgaggcgaagcgtctggaggagctggacgcgggcctggacatcgtggagccgatcatgggcgtcgccgcctggcgcgaggatatcgaggtcgcccccgagacggtgagcgtgtccttcgagtacggtcgcccggtcgccctcaacgggatcgagttcgccgacccggtcgccctggtgccggaagcgaacgctatcggcggacgccacggcctcggcgcgtccgaccagatcgagaaccgcatcatcgaggcgaagagccgcggcatctacgaagcgccgggcatggctctgctgcacatcgcctacgagcgactcctcaacgccatccacaacgaggataccgtcgccaactaccacaccgaaggccggcgcctcggccgcctgatgtacgagggccgctggctcgatccgcagtcgctcatgctccgcgagtccctgcaacgctgggtcggctccgccatcaccggcgaagtcaccctgcgcctgcgccgcggcgacgactacacgatcctcgacaccaccggcccggcgctcagctaccacccggacaagctctcgatggagcgggtgggcaacgccgccttcggcccggccgaccgcatcggccagctgacgatgcgcaatctcgacatcgcggactcgcgctcgcgtctcgaacagtacgcggccaccggcctcatcggcggcccgaccgccgagctggtgggcgagctacaggagggcagcgcccgcagcatcctggagctggacgtctcccccgaagatgacgccctctcgcgcgagatcgacgcttcctccgagggagccgccttcgacgccgggaccgactga

SEQ ID NO: 153673 - protein, 478 aa, Leifsonia xyli subsp. xyli str. CTCB07
MSKVLSSLPVGERVGIAFSGGLDTSCAVAWMREKGAVPCAYTADIGQYDEPNIEEVPGRATEYGAEIARLVDAKRALVEEGLIALQCGAFHIRSGGKTYFNTTPLGRAVTGVMLVRAMRDDDVEIWGDGSTYKGNDIERFYRYGLIANPRLRIYKPWLDTAFVEELGGRTEISEWLVARGFPYRDATEKAYSTDANIWGATHEAKRLEELDAGLDIVEPIMGVAAWREDIEVAPETVSVSFEYGRPVALNGIEFADPVALVPEANAIGGRHGLGASDQIENRIIEAKSRGIYEAPGMALLHIAYERLLNAIHNEDTVANYHTEGRRLGRLMYEGRWLDPQSLMLRESLQRWVGSAITGEVTLRLRRGDDYTILDTTGPALSYHPDKLSMERVGNAAFGPADRIGQLTMRNLDIADSRSRLEQYAATGLIGGPTAELVGELQEGSARSILELDVSPEDDALSREIDASSEGAAFDAGTD

SEQ ID NO: 153674 - DNA, 1335 bp, Mannheimia succiniciproducens MBEL55E
  CDS (1)..(1335): transl_table=11
atgtcaaacacaattctacaaaacctacctctaggtcaaaaagtggggatcgcattctccggcggtttggatacctctgcagccttattatggatgcgtcaaaaaggtgcggtgccttatgcttatacggctaacttaggccaaccggacgaagacgattataatgccattcctaaaaaagccatggcttacggtgcggaaaacgcccgtttaatcgattgccgtaaacaattggcgcaagaaggtatcgcggccatccaatgcggtgcattccatatttcaaccggcggcgttacttattttaatacaaccccgcttggccgtgccgtaaccggtaccatgctggttgccgccatgaaagaagatgacgtaaatatctggggtgacggttcaacattcaaaggtaacgatatcgagcgtttctatcgttacggtttattgaccaacccgaatcttaaaatctacaaaccttggttagacgatcaatttattgatgaattgggcggccgtttcgaaatgtcgcaattcttaattgccaacggttttgattacaaaatgtcggtggaaaaagcctattcgacagactccaatatgttgggtgcaacacacgaagcgaaagacttggaagatttaagcaccggcattaaaatcgtcaaacctattatgggcgttgcgttctgggacgaaagcgttgaaatcaaacctgaagtggttaccgttcgtttcgaagaaggcgtgccggtagaattaaacggtaaacgttttgacgatgtggtcgagttgtttatggaagccaaccgaatcggcggtcgtcacggtttaggaatgtcagaccaaattgaaaaccgtattatcgaagcaaaatcccgcggtatctatgaagcgccgggaatggcattgttccatatcgcttacgaacgtttggttaccggtattcacaacgaagataccatcgaacaataccgtatcaacggtttgcgtttaggccgcttattataccaaggacgttggtttgacccgcaagcgttaatgttgcgcgaaagttcgcaacgctgggtagccaaagcgattaccggcgaagtgaaacttgaattgcgccgcggtaacgattattcgattttggataccgtatcgccgaacttaacttacgaagcggaacgtctaagtatggagaaagtggaagatgcgccgtttgacccgatcgatcgtatcggtcagttaactatgcgtaacttagacgttacggatacgcgtaataagctcggtatctattcggaagcaggccttctcaccgccggtaaagatgccgtcgtaccgcaattaggtagtaaatag

SEQ ID NO: 153675 - protein, 444 aa, Mannheimia succiniciproducens MBEL55E
MSNTILQNLPLGQKVGIAFSGGLDTSAALLWMRQKGAVPYAYTANLGQPDEDDYNAIPKKAMAYGAENARLIDCRKQLAQEGIAAIQCGAFHISTGGVTYFNTTPLGRAVTGTMLVAAMKEDDVNIWGDGSTFKGNDIERFYRYGLLTNPNLKIYKPWLDDQFIDELGGRFEMSQFLIANGFDYKMSVEKAYSTDSNMLGATHEAKDLEDLSTGIKIVKPIMGVAFWDESVEIKPEVVTVRFEEGVPVELNGKRFDDVVELFMEANRIGGRHGLGMSDQIENRIIEAKSRGIYEAPGMALFHIAYERLVTGIHNEDTIEQYRINGLRLGRLLYQGRWFDPQALMLRESSQRWVAKAITGEVKLELRRGNDYSILDTVSPNLTYEAERLSMEKVEDAPFDPIDRIGQLTMRNLDVTDTRNKLGIYSEAGLLTAGKDAVVPQLGSK

SEQ ID NO: 153676 - DNA, 1344 bp, Neisseria gonorrhoeae FA 1090
  CDS (1)..(1344): transl_table=11
atgaaccaaaaccatactattttacaaaacctccccgtcggtcagaaagtcggcatcgccttctccggcggtcttgatacctctgccgcgctgttgtggatgaaactcaaaggcgcgctgccttatgcctacactgccaaccttggccagcccgacgaagacgattacaacgccattcccaaaaaagcaatggaatacggtgcggaaaacgcccgcctgatcgactgccgcgcacaactggcacacgaaggcatcgccgccatccaatgcggcgcgttccacgtttccaccggcggcatcgcctatttcaacaccacgcctctgggccgcgccgtgaccggcaccatgctcgtttccgccatgaaagaagacgatgtgaatatctggggcgacggcagcacctacaaaggcaacgacatcgagcgtttctaccgctacggcttgctcaccaatcccgcgctgaaaatctacaaaccctggctcgaccagcaatttatcgacgaactcggcggccgtcacgaaatgagcgaatttctgattgccaacggcttcaactacaaaatgtcggttgaaaaagcctactccaccgattccaatatgctcggcgcgacccacgaagccaaagacttggaatttttgaactcgggcatcaaaatcgttaagcccatcatgggcgttgccttctgggacgaaaacgtcgaaattgaacccgaagaagtcagcgtgcgctttgaagaaggcgtgccggttgcattgaacggcaaagaatacgccgaccccgtcgaactcttcctcgaagccaaccgcatcggcggccgccacggcttgggtatgagcgaccaaatcgaaaaccgcatcatcgaagccaaatcgcgcggcatctacgaagccccgggcatggcattgttccacatcgcctacgaacgcttggttaccggcatccacaacgaagacaccatcgaacaataccgcatcaacggcctgcgcctcggacgtttgctctaccaaggccgctggttcgacagccaagccttgatgttgcgcgaaaccgcccaacgctgggtcgccaaagccgttaccggcgaagttaccctcgaactgcggcgcggcaacgactactcgattctgaacaccgaatcgcccaacctgacctaccaacccgaacgcctgagtatggaaaaagtcgaaggtgcggcgttcacaccgctcgaccgcatcggacagctcacgatgcgcaacctcgacatcaccgacacccgcgccaaactgggtatttattcgcaaagcggtttgctctcgctgggcgaaggctcggtattgccgcagttgggcaataagcaataa

SEQ ID NO: 153677 - protein, 447 aa, Neisseria gonorrhoeae FA 1090
MNQNHTILQNLPVGQKVGIAFSGGLDTSAALLWMKLKGALPYAYTANLGQPDEDDYNAIPKKAMEYGAENARLIDCRAQLAHEGIAAIQCGAFHVSTGGIAYFNTTPLGRAVTGTMLVSAMKEDDVNIWGDGSTYKGNDIERFYRYGLLTNPALKIYKPWLDQQFIDELGGRHEMSEFLIANGFNYKMSVEKAYSTDSNMLGATHEAKDLEFLNSGIKIVKPIMGVAFWDENVEIEPEEVSVRFEEGVPVALNGKEYADPVELFLEANRIGGRHGLGMSDQIENRIIEAKSRGIYEAPGMALFHIAYERLVTGIHNEDTIEQYRINGLRLGRLLYQGRWFDSQALMLRETAQRWVAKAVTGEVTLELRRGNDYSILNTESPNLTYQPERLSMEKVEGAAFTPLDRIGQLTMRNLDITDTRAKLGIYSQSGLLSLGEGSVLPQLGNKQ

SEQ ID NO: 153678 - DNA, 1326 bp, Ralstonia eutropha JMP134
  CDS (1)..(1326): transl_table=11
atgactaccatccttcagcacattcccaccggcgagcgcgtcggcattgcgttctctggcggcctggacaccagcgcggcgcttctctggatgcgccagaagggcgccatcccttacgcctacacggccaatctgggccagcccgacgagcctgactacgacgacatcccgcgccgcgccaaggcctacggcgccgaggaagcccgcctggtggactgccgcacgcagctcgtggccgagggcatcgctgcattgcagtgcggtgcgttccacatttccaccgccggcgtcacgtacttcaacaccaccccgatcggccgcgccgtcactggcaccatgttggttgccgcgatgaaggaagatggcgtcaatatctggggtgatggcagcacgttcaaaggcaatgatatcgagcgtttctaccgctacggcctcctgaccaacccgggcctgcagatctacaagccgtggctggaccagcagttcatcgacgaacttggcggccgcgccgagatgtccgagttcatgcgccagaacggcttcgactacaagatgtcggctgaaaaggcgtactcgacggattcgaacatgctgggcgccacccacgaggccaaggatctggagcacctggattcgggcatccgcatcgtgcagccgatcatgggcgtgcagttctggcgtgacgaagtcgaagtcaagcgcgaggaagtcaccgtgcgcttcgagcagggccagcccgttgcgctgaacggcaagaccttcgccaacagcgtcgagctgttcgccgaagccaacgtcatcggcggccgccatggcctgggcatgagcgaccagatcgagaaccgtatcatcgaagccaagagccgcggcatctacgaagccccgggcctggcactgctgttcatcgcgtacgagcgcctgattaccggcatccataacgaagacaccatcgagcagtaccgcgacaacggccgccgccttggccgccttctgtaccagggccgctggttcgacccgcaagccatcatgctgcgcgaaaccgcccagcgctgggtggcgggtgccgtgaccggcgaagtgaccattgaactgcgccgcggcaatgattactcgatcctgaacaccacctcgccgaacctgacctacaagccggaacggctgaccatggagaagggcgagtcgatgttcacgccgctggaccgtattggccagctgaccatgcgtacgctggatatcgtggatactcgcgagaagctgcagacgtatgcgaagacggggctgctgtcgtcggcggttagtgcttcgttgccgaagctggaagactga

SEQ ID NO: 153679 - protein, 441 aa, Ralstonia eutropha JMP134
MTTILQHIPTGERVGIAFSGGLDTSAALLWMRQKGAIPYAYTANLGQPDEPDYDDIPRRAKAYGAEEARLVDCRTQLVAEGIAALQCGAFHISTAGVTYFNTTPIGRAVTGTMLVAAMKEDGVNIWGDGSTFKGNDIERFYRYGLLTNPGLQIYKPWLDQQFIDELGGRAEMSEFMRQNGFDYKMSAEKAYSTDSNMLGATHEAKDLEHLDSGIRIVQPIMGVQFWRDEVEVKREEVTVRFEQGQPVALNGKTFANSVELFAEANVIGGRHGLGMSDQIENRIIEAKSRGIYEAPGLALLFIAYERLITGIHNEDTIEQYRDNGRRLGRLLYQGRWFDPQAIMLRETAQRWVAGAVTGEVTIELRRGNDYSILNTTSPNLTYKPERLTMEKGESMFTPLDRIGQLTMRTLDIVDTREKLQTYAKTGLLSSAVSASLPKLED

SEQ ID NO: 153680 - DNA, 1341 bp, Burkholderia thailandensis E264
  CDS (1)..(1341): transl_table=11
atgaccacgattcttgaaaatctcccggccggccagaaagtcggcatcgcgttctccggcgggctcgacacgagcgccgcgctgcactggatgcgcatcaagggggccgttccttacgcgtacacggccaatctcggccagcccgacgaagacgactacgatgcgatcccgaagcgcgcgatccagtacggcgccgagggcgcacgcctgattgactgccgcgcgcagctcgtggccgaagggatcgcggcgctccagtgcggcgcgttccacatctcgacggccggcgtcacgtatttcaatacgaccccgattggccgcgccgtgacgggcacgatgctcgtcgccgcgatgaaggaggacggcgtcaacatctggggcgacggcagcacgtacaagggcaacgacatcgagcgcttctaccgctacggcctgctcgtcaatccggatctgaagatctacaagccgtggctcgatcagcagttcatcgacgagctgggcggccgcgcggaaatgtccgaattcatgcgccaggccggcttcgagtacaagatgtcggcggagaaggcgtattcgaccgattcgaacctgctgggcgcgacgcacgaggcgaaggatctcgagagcctcgagagcggcatcaagatcgtcaatccgatcatgggcgtcgcgttctggcgcgacgacgtgaagatcgacaaggaagcggtgacggtccgcttcgaagagggccgccccgtcgcgctgaacggcgtcgagtacaaggatgcggtcgagctgctgctcgaggcgaaccggatcggcggccgccacggcctcgggatgagcgaccagatcgagaaccggatcatcgaggcgaagagccgcggcatctatgaagccccggggcttgcactgctgtacatcgcgtacgagcgcctcgtcaccggcatccacaacgaagacacgatcgagcagtaccgcgagaacggccgccgcctcggccgcctgctgtaccagggccgctggttcgatccgcaggcgatcatgctgcgcgagaccgcgcagcgctgggtcgcgcgcgcggtcacgggcgaggtgacggtcgagctgcgccgcggcaacgactattcgattctcgccacgcgctcgccgaacctgacgtaccagccggagcgcctgtcgatggagaaggtgcagtcgacgttctcgccgcgcgaccggatcggccagttgacgatgcgcaacctcgacatcaccgacacccgcgacaagctgcgcatctactcggaagtcggcctgctcacgccgggcgaatcgtcggcgctgccgaagctgaaggaagacgagagcggcaactga

SEQ ID NO: 153681 - protein, 446 aa, Burkholderia thailandensis E264
MTTILENLPAGQKVGIAFSGGLDTSAALHWMRIKGAVPYAYTANLGQPDEDDYDAIPKRAIQYGAEGARLIDCRAQLVAEGIAALQCGAFHISTAGVTYFNTTPIGRAVTGTMLVAAMKEDGVNIWGDGSTYKGNDIERFYRYGLLVNPDLKIYKPWLDQQFIDELGGRAEMSEFMRQAGFEYKMSAEKAYSTDSNLLGATHEAKDLESLESGIKIVNPIMGVAFWRDDVKIDKEAVTVRFEEGRPVALNGVEYKDAVELLLEANRIGGRHGLGMSDQIENRIIEAKSRGIYEAPGLALLYIAYERLVTGIHNEDTIEQYRENGRRLGRLLYQGRWFDPQAIMLRETAQRWVARAVTGEVTVELRRGNDYSILATRSPNLTYQPERLSMEKVQSTFSPRDRIGQLTMRNLDITDTRDKLRIYSEVGLLTPGESSALPKLKEDESGN

SEQ ID NO: 153682 - DNA, 1326 bp, Ralstonia metallidurans CH34
  CDS (1)..(1326): transl_table=11
atgactaccatcctgcagcacattccttccggccagcgcgtcggaatcgccttctcgggcggactcgataccagcgccgcgctcctctggatgcgccagaagggcgccattccctacgcctacacggcgaacctgggccagcccgacgaaccggattacgacgacatcccccgccgcgccatggcgtacggcgccgaggccgcccgtctggtggattgccgcacccaactggtggccgaaggtatcgccgcgctgcaatgcggcgcgttccatatctcgaccgccggcgtgacctacttcaacacgaccccgatcggccgtgccgtgaccggcacgatgctggtggcggccatgaaggaagacggcgtcaacatctggggcgacggcagcacgttcaagggcaacgacatcgagcgcttctaccgctacggcctgctgaccaacccgggtctgcagatctacaagccgtggctggaccagcagttcatcgacgaactgggtggccgcgccgaaatgtccgagttcatgcgccagcacggccatgcctacaagatgtcggcggaaaaggcgtactcgaccgattcgaacatgctcggcgccacgcacgaggccaaggatctggagcacctggattccggcatccgcatcgtccagccgatcatgggcgtgcagttctggcgcgatgacgtcgaagtgaagcgcgaggaagtgaccgtgcgcttcgaggaaggccagccggtggcgctgaatggcaagacgttcgccaatgccgtcgacctgctcatggaagccaatgtcatcggtggccgtcatggcctgggcatgagcgaccagatcgagaaccgcatcatcgaagccaagagccgcggcatctacgaagccccgggcctggcgctgctgttcatcgcttacgagcgcctgatcaccggtatccacaacgaagacaccatcgagcagtaccgcgacaacggccgccgtctgggccgcctgctgtaccagggccgctggttcgatccgcaagccatcatgctgcgcgaaaccgcccagcgctgggtggctggcgccgtgaccggcgaggtgacgatcgaactgcgtcgcggtaacgactactcgatcctgaacacgacgtcgccgaacctgacgtacaagcccgagcgcctgacgatggaaaagggcgagtcgatgttcacgccgctggaccgtattggccaactcacgatgcgtacgctcgacatcgtcgacacgcgcgagaagctgcagacgtacgccaagtccggcctgctgtcgaaccagaccagcgcggcgctgccaaagctcgaagactga

SEQ ID NO: 153683 - protein, 441 aa, Ralstonia metallidurans CH34
MTTILQHIPSGQRVGIAFSGGLDTSAALLWMRQKGAIPYAYTANLGQPDEPDYDDIPRRAMAYGAEAARLVDCRTQLVAEGIAALQCGAFHISTAGVTYFNTTPIGRAVTGTMLVAAMKEDGVNIWGDGSTFKGNDIERFYRYGLLTNPGLQIYKPWLDQQFIDELGGRAEMSEFMRQHGHAYKMSAEKAYSTDSNMLGATHEAKDLEHLDSGIRIVQPIMGVQFWRDDVEVKREEVTVRFEEGQPVALNGKTFANAVDLLMEANVIGGRHGLGMSDQIENRIIEAKSRGIYEAPGLALLFIAYERLITGIHNEDTIEQYRDNGRRLGRLLYQGRWFDPQAIMLRETAQRWVAGAVTGEVTIELRRGNDYSILNTTSPNLTYKPERLTMEKGESMFTPLDRIGQLTMRTLDIVDTREKLQTYAKSGLLSNQTSAALPKLED

SEQ ID NO: 153684 - DNA, 1227 bp, Leuconostoc mesenteroides subsp. mesenteroides ATCC 8293
  CDS (1)..(1227): transl_table=11
atgacagacacattagtattagcatactccggcggtttagatacttcagtagccattccttggttaaaggataaagggtacgatgttatcgcagttgttttggacgttgggcaacatggcaagaatttaaatgaaattcaagcaaaagccttaaaagttggtgccaaacaatcaatcgttatcgatgcaaaagctgaatttgcagataaatatgttgcaccagttattaaagctaacatgatgtatgaaggcgaatatccaatggtatcagccttgtctcgtccattaatcatcaaaaagttagttgatatcgcacatgaaaatgatgccgttgcgattgcgcatggctcaacgggtcatggtaacgatcaagtacgtttcgaggccgcaattcatgcattggaccctgacatgaagattgaagcacccattcgtgatttccagtggtcacgtgaagaagagattcaatatgcacaagaacatgatgttccggtacctattgatttagattcaccatactcaatcgatgagaacttatggggacgtgccaatgaagctggtatcttagaaaacccatggaaccaagcgccagaagatgcatttgcattaacaactgccattgaagatgcaccagatacaccagaatttatcgatgttactttcgaagctggtgtgccagttgcgcttaatggtgaagtattgtcattagaaaagctcattgtggcggttaatgagattgctggaaagcatggtattggccgtatcgatcatattgaaaatcgtttggttggcattaagtcacgtgagatttatgaagcaccagctgcagctgtactgatgacagcacataaggatttggaagatttaacactagagcgtgatgttgctcatttcaagccaattgtggaacaacagttagctaatttggtttatgaagcgaagtgggtatcaccattgtttgatagtttaatggcatttattgatagcacacaacaaaatgtcaatggtgtggttaagatgaagttgtttaaggggaatgccactgcggttgcccgtcaatctgaacacaactcactatacgatgaagatttggcaacatatacatcatcatcatcatttgaccaagcatctgcggtaggctttatcaaattgtggacactaagtaatacggtttatgaacaagtcaaccatgtccattcacaagcgaaaaagaacacagtgaaataa

SEQ ID NO: 153685 - protein, 408 aa, Leuconostoc mesenteroides subsp. mesenteroides ATCC 8293
MTDTLVLAYSGGLDTSVAIPWLKDKGYDVIAVVLDVGQHGKNLNEIQAKALKVGAKQSIVIDAKAEFADKYVAPVIKANMMYEGEYPMVSALSRPLIIKKLVDIAHENDAVAIAHGSTGHGNDQVRFEAAIHALDPDMKIEAPIRDFQWSREEEIQYAQEHDVPVPIDLDSPYSIDENLWGRANEAGILENPWNQAPEDAFALTTAIEDAPDTPEFIDVTFEAGVPVALNGEVLSLEKLIVAVNEIAGKHGIGRIDHIENRLVGIKSREIYEAPAAAVLMTAHKDLEDLTLERDVAHFKPIVEQQLANLVYEAKWVSPLFDSLMAFIDSTQQNVNGVVKMKLFKGNATAVARQSEHNSLYDEDLATYTSSSSFDQASAVGFIKLWTLSNTVYEQVNHVHSQAKKNTVK

SEQ ID NO: 153686 - DNA, 1362 bp, Solibacter usitatus Ellin6076
  CDS (1)..(1362): transl_table=11
atgggaaacattctgcagaacctgcccgccggcgaaaaggtcggtctggccttctccggcggcctcgataccagcgccgcgattcattggatgcgcgctaaaggcgcgatcccgtattcgtacaccgccaatctcggacagcccgacgagccggattacgacgagatcccccgccgcgcgctgctctacggcgccgagaaagcgcggctcatcgattgccgcaagcagcttgtggccgaaggcatcgccgccctgcaatccggcgctttccacatctcgaccgccggagtccactacttcaatacgacacccattggccgcgcggtcacgggcaccatgctggtgatcgcgatgaaggaggacgacgtccacatctggggcgatggcagcaccttcaagggcaacgatatcgagcgtttctaccgctacggcctgctggccaatcccgcgctgcgcatctacaagccgtggcttgaccagaccttcatcgacgaactcggcggccgcaaggaaatgtcggagtacatgatctcgcacgggctcacctataagatgagcgtggagaaggcttactcgaccgattccaacatctggggcgcaactcacgaagccaaggatctcgagcacctcgataagggcgtcaagatcgtggagcccatcatgggcgtcgcctcgtggcgcgaagacgtcgcgattaaacccgaaactgtcactatccgtttcgaagagggccagcccgtggcgctcaaccacgtgacgtatgacgacccggtgcaactcgtgctcgaagccaacgcgatcggcggccgccacggcctcggagtatccgaccagatcgagaatcgcatcatcgaagccaagagccggggcatatacgaagctcccggccttgcgctgcttttcattgcctacgagcgcctggtctccggcattcacaatgaggacacgatcgagcagtaccgcatcaacggccttcgcctggggcgcctgctgtatcagggccgctggttcgattcgcaatccatgatgctgcgggaaaccgcacagcgctgggtcgcgcgcgcgatcacgggcgaggtcacggtcgaactccgccgcggcaacgactactccatcctcgacaccaccagccccaacctcacctacaagcccgagcgcctcacgatggagaaaggcgaatcgactttctctccccaggaccgcatcggccagctcacaatgcgccacctggacatcaccgacacgcgcgacaagctcctgctgtatataaagaccggcctgctcggtccatccagcggcaattcgacgacgctgctccccgagcccgccgacagtgggacagagaagccgccgagccgttga

SEQ ID NO: 153687 - protein, 453 aa, Solibacter usitatus Ellin6076
MGNILQNLPAGEKVGLAFSGGLDTSAAIHWMRAKGAIPYSYTANLGQPDEPDYDEIPRRALLYGAEKARLIDCRKQLVAEGIAALQSGAFHISTAGVHYFNTTPIGRAVTGTMLVIAMKEDDVHIWGDGSTFKGNDIERFYRYGLLANPALRIYKPWLDQTFIDELGGRKEMSEYMISHGLTYKMSVEKAYSTDSNIWGATHEAKDLEHLDKGVKIVEPIMGVASWREDVAIKPETVTIRFEEGQPVALNHVTYDDPVQLVLEANAIGGRHGLGVSDQIENRIIEAKSRGIYEAPGLALLFIAYERLVSGIHNEDTIEQYRINGLRLGRLLYQGRWFDSQSMMLRETAQRWVARAITGEVTVELRRGNDYSILDTTSPNLTYKPERLTMEKGESTFSPQDRIGQLTMRHLDITDTRDKLLLYIKTGLLGPSSGNSTTLLPEPADSGTEKPPSR

SEQ ID NO: 153688 - DNA, 1434 bp, Nocardioides sp. JS614
  CDS (1)..(1434): transl_table=11
gtgagcaaggtcctgacgtccctcccggtcggccagcgggtcggcatcgcgttctcgggaggcctggacacctcggtggcggtggcctggatgcgcgacaagggcgcgatcccgtgcacctacaccgccgacatcggccagtacgacgagcccgacgtctcgggcgtgcccgcccgggcccgcgagtacggcgccgagatcgcccgcgtggtcgactgccgggcgcagctggtcgaggaggggctggcggctctcgcctgcggcgccttccacatccgctcgggcggccggatctacttcaacaccacgccactcggccgcgccgtgaccggcaccatcctggtccgggcgatgcacgaggacggcgtcgacatctggggcgacgggtccaccttcaagggcaacgacatcgagcggttctaccgctacggcctgctggccaacccgcagctgcgcatctacaagccctggctggaccccgacttcgtccacgagctcggtggccgcaccgagatgagccagtggctgaccagccacggcctgccctaccgcgactcccaggagaaggcgtactccaccgacgcgaacatctggggcgccacccacgaggcgaagaccctcgagcacctggacacctcgctggaggtggtcacgccgatcatgggggtccgcttctgggacccggcggtcgacatcgccaccgaggacgtcaccgtcgcgttcgagcagggccgcccggtggcgctcaacggccgtcggttcgacgacccggtcgagctggtcgaggaggccaacgcgatcgggggccggcacggcctcgggatgtcggaccagatcgagaaccggatcatcgaggcgaagtcgcgcggcgtctacgaggcgcccggcatggccctgctgtggctcacctacgagcggctgatgaacgcgatccacaacgaggacacgctggcgaactaccagatcagcgggcgtcgcctcggccgcctgctgtacgaaggacggtggctcgacccgcaggcgctgatgctgcgcgagtcgatccagcgctgggtcgcgtcggtggtgaccggcgaggtgaccgtccggctgcgtcggggggaggactacacgatcgtgcggaccgagggcccggcgctgtcctaccaccccgagaagctctcgatggagcgcacctcgaactcggcgttcgggccgaccgaccggatcggccagctcacgatgcgcaacctcgacatcgccgactcgcgcgcgatgctcgagatgtacgccgggcagccactcgaccagggccaggtgctggtcgagaacggcacgctgttcggtgagctgccgtccggcgggttcgaccagatcaccgagaacccggaggtgcaggccgagccggaggaggaggccctcgacgcggccgcgatggaggccgggaccgactga

SEQ ID NO: 153689 - protein, 477 aa, Nocardioides sp. JS614
MSKVLTSLPVGQRVGIAFSGGLDTSVAVAWMRDKGAIPCTYTADIGQYDEPDVSGVPARAREYGAEIARVVDCRAQLVEEGLAALACGAFHIRSGGRIYFNTTPLGRAVTGTILVRAMHEDGVDIWGDGSTFKGNDIERFYRYGLLANPQLRIYKPWLDPDFVHELGGRTEMSQWLTSHGLPYRDSQEKAYSTDANIWGATHEAKTLEHLDTSLEVVTPIMGVRFWDPAVDIATEDVTVAFEQGRPVALNGRRFDDPVELVEEANAIGGRHGLGMSDQIENRIIEAKSRGVYEAPGMALLWLTYERLMNAIHNEDTLANYQISGRRLGRLLYEGRWLDPQALMLRESIQRWVASVVTGEVTVRLRRGEDYTIVRTEGPALSYHPEKLSMERTSNSAFGPTDRIGQLTMRNLDIADSRAMLEMYAGQPLDQGQVLVENGTLFGELPSGGFDQITENPEVQAEPEEEALDAAAMEAGTD

SEQ ID NO: 153690 - DNA, 1347 bp, Acidovorax sp. JS42
  CDS (1)..(1347): transl_table=11
atggcaaccatcctgcaacacctccccgtcggccagaaggtcggcatcgccttctcgggcggcctcgacaccagcgccgcgctgcgctggatgaagaacaagggcgccctgccctacgcctacaccgccaacctgggccagcctgacgaagccgactacgatgagattccccgcaaggccatggaatacggcgccgagaaggcccgcctgatcgactgccgcacgcagctggcgcacgagggcattgccgccatccaggccggagcgttccacatcagcaccggtggcatcacctacttcaacaccacgccgctgggccgcgccgtgacgggcaccatgctggtggccgcgatgaaggaggacgacgtccacatctggggcgacggctccaccttcaagggcaacgacatcgagcgcttctaccgctacggcctgctcaccaaccccgcgctgaagatctacaagccctggctggaccagaagttcattgacgagctgggcgggcgcgccgagatgtcggccttcatgaccaaggaaggcttcggctacaagatgagcgccgaaaaggcgtacagcaccgacagcaacatgctgggcgccacgcacgaagcgaaggacctggagttcctcagcagcggcatccgcatcgtcaaccccatcatgggcgtggcgttctggaagcccgaagtcgacgtgccggccgaagaagtgtcggtcaccttcgacgaggggcaacccgtggccgtgaacggcaaggagatcgccgaccctgtggagctgttcctggaattgaaccgcatcggcggccgccacggcttagggatgagcgaccagatcgagaaccgcatcatcgaagccaagagccgcggcatctacgaagcccccggcatggcgctgctgcacatcgcctacgagcgcctggtcaccggcatccacaacgaagacaccatcgagcagtaccgcctgaacggcctgaagctcggccgcctgctgtaccagggccgctggttcgacccgcaggccatcatgctgcgcgagaccgcccagcgctgggtggcgcgcgccgtgaccggcaccgtgacgctcgagctgcgccgcggcaacgactactccatcctgaacaccgagtcgcccaacctgacctacgcgcccgagcgcctgtcgatggaaaaggtggaagacgcgccgttcagcccgctggaccgcatcggccagttgaccatgcgcaacctggacatctccgacacgcgcggcaagctgggcgtgtatgcacgcgccggcctgctgtcgctgggcggcaatgccgcgctggcgcagctggaagacggcggcgcgaagaaaaaataa

SEQ ID NO: 153691 - protein, 448 aa, Acidovorax sp. JS42
MATILQHLPVGQKVGIAFSGGLDTSAALRWMKNKGALPYAYTANLGQPDEADYDEIPRKAMEYGAEKARLIDCRTQLAHEGIAAIQAGAFHISTGGITYFNTTPLGRAVTGTMLVAAMKEDDVHIWGDGSTFKGNDIERFYRYGLLTNPALKIYKPWLDQKFIDELGGRAEMSAFMTKEGFGYKMSAEKAYSTDSNMLGATHEAKDLEFLSSGIRIVNPIMGVAFWKPEVDVPAEEVSVTFDEGQPVAVNGKEIADPVELFLELNRIGGRHGLGMSDQIENRIIEAKSRGIYEAPGMALLHIAYERLVTGIHNEDTIEQYRLNGLKLGRLLYQGRWFDPQAIMLRETAQRWVARAVTGTVTLELRRGNDYSILNTESPNLTYAPERLSMEKVEDAPFSPLDRIGQLTMRNLDISDTRGKLGVYARAGLLSLGGNAALAQLEDGGAKKK

SEQ ID NO: 153692 - DNA, 1335 bp, Haemophilus somnus 2336
  CDS (1)..(1335): transl_table=11
atgtcaaatacaattttacaacatcttccaattggtcaaaaagtaggcattgctttttccggtggtttggataccagtgcagcattactttggatgcgtcaaaaaggtgcagtaccttatgcttataccgctaatttaggtcaacctgacgaagaagattataatgctattcctcgtaaagcgatggaatatggtgcagaaaaagctcgtttaattgattgccgcaatcagcttgctcatgaaggtattgccgctattcaatgcggagcctttcatatttccacaggcggtgtaacgtattttaatactacgcctttaggtcgtgcggtaacaggtaccatgcttgtttcagctatgaaagaagatgatgttaatatttggggcgatggttccactttcaaaggcaatgatattgagcgtttttatcgctacgggttattaactaatccgagtttacgtatttataaaccttggttggataatcaatttattgatgagctgggtggccgtcaagaaatgtccgagtttttaatcgcaaacgggtttgattacaaaatgtctgctgaaaaagcttactcgacggattccaatatgttaggtgccactcatgaagcaaaagatttagaatatctcaatagcggtattcgtattgttaagcctattatgggtgttgccttttggcgtgatgatgtaactgtgaaagcggaagaagtgacggtcggatttgaagacggtgttcctgtcacattaaacggtcagtctttttcaagtgcggtcgaactctttttagaagccaatcgcatcggcggtcgtcatggtctgggaatgtccgatcaaattgaaaatcgtatcattgaagcgaaaagtcgtggcatctacgaagctccgggtatggcgttattgcatatcgcctatgagcgtttggttacggcgatccataatgaagatactattgaacaatatcgtatcaatgggttgcgtttagggcgtttattataccaaggacgttggtttgatccgcaagcattgatgttacgtgaaacagctcaacgttgggtagcccgtgcggtaaccggtgaagttacattagaattacgccgtggtaacgattattctattttaaatacagtgtcaccgaatatgacttatcatcctgaacgtttaagtatggaaaaagtggaaaatgcaccgtttgatccgtccgatcgtataggtcaacttaccatgcgtaatcttgatattacggatacgcgtgataaattgggtatttatacacataccggattactgactgtaggtaaagattcaatgttaccgcaattggataaaaaatag

SEQ ID NO: 153693 - protein, 444 aa, Haemophilus somnus 2336
MSNTILQHLPIGQKVGIAFSGGLDTSAALLWMRQKGAVPYAYTANLGQPDEEDYNAIPRKAMEYGAEKARLIDCRNQLAHEGIAAIQCGAFHISTGGVTYFNTTPLGRAVTGTMLVSAMKEDDVNIWGDGSTFKGNDIERFYRYGLLTNPSLRIYKPWLDNQFIDELGGRQEMSEFLIANGFDYKMSAEKAYSTDSNMLGATHEAKDLEYLNSGIRIVKPIMGVAFWRDDVTVKAEEVTVGFEDGVPVTLNGQSFSSAVELFLEANRIGGRHGLGMSDQIENRIIEAKSRGIYEAPGMALLHIAYERLVTAIHNEDTIEQYRINGLRLGRLLYQGRWFDPQALMLRETAQRWVARAVTGEVTLELRRGNDYSILNTVSPNMTYHPERLSMEKVENAPFDPSDRIGQLTMRNLDITDTRDKLGIYTHTGLLTVGKDSMLPQLDKK

SEQ ID NO: 153694 - DNA, 1335 bp, Haemophilus influenzae R2846
  CDS (1)..(1335): transl_table=11
atgtcaaatactattctacagaatttacctaaaggacaaaaagtggggatcgctttctctggtggtttagacactagcgcagcattactttggatgcgtcaaaaaggcgcagtgccttatgcctacaccgctaatttagggcaacccgatgaagatgattacaatgcaatccctaaaaaagccatggcgtatggtgcagaaaacgcgcgattaattgattgtcgtgctcagcttgctcatgaaggcattgccgcaattcaatgtggtgcattccatatttctacaggcggcattccttacttcaatacaacgcctcttggtcgcgcagtaacaggcacaatgctcgttgcagcaatgaaagaagatgatgtaaacatttggggcgacggctccactttcaaagggaatgatattgagcgtttctatcgttatggtttattaacaaacccaaatttaaaaatctataaaccttggttagatgcacaatttattgaagaacttggcggtcgtttagaaatgtctcaattccttatcgaaaatggttttgactataaaatgtccgttgaaaaagcctattccactgattccaatatgctcggcgcaacccatgaagcaaaagacttagaacaattaagcacaggaatgaaaattgttaagccgattatgggtgtcgcattttgggatgaaaaggttgaaattaaacctgaaacagtcaccgtcacttttgaagaaggtgtccctgtggcattaaatggtaaacgttttgataatgcagttgatattattctggaagccaatcgtatcggtggtcgtcatggtttaggaatgtcagaccaaatcgaaaatcgtattattgaagccaaatctcgtggtatttatgaagcaccagggatggcattattacatatcgcttacgaacgtttagtcacaggtattcacaatgaagacaccatcgaacaatatcgtattaatggcattcgtttaggtcgtttgttatatcaaggtcgttggtttgatccgcaagcattaatgttgcgtgaaacagcacaacgttgggtggcaaaagcaattacaggcacagtaacccttgaacttcgtcgtggtaacgacttcacaattttaaataccgaatcgccaaacttaacctacgaagcagagcgtttaagtatggaaaaagtggaagatgcgccatttgatccaattgatcgtatcggtcaattaacaatgcgtaatttagatgtatcagacacccgcggtaaacttagcatctatgcacaaacaggtttattaagcgcaattaaagattccgtattgccacaattaggcaaaaaataa

SEQ ID NO: 153695 - protein, 444 aa, Haemophilus influenzae R2846
MSNTILQNLPKGQKVGIAFSGGLDTSAALLWMRQKGAVPYAYTANLGQPDEDDYNAIPKKAMAYGAENARLIDCRAQLAHEGIAAIQCGAFHISTGGIPYFNTTPLGRAVTGTMLVAAMKEDDVNIWGDGSTFKGNDIERFYRYGLLTNPNLKIYKPWLDAQFIEELGGRLEMSQFLIENGFDYKMSVEKAYSTDSNMLGATHEAKDLEQLSTGMKIVKPIMGVAFWDEKVEIKPETVTVTFEEGVPVALNGKRFDNAVDIILEANRIGGRHGLGMSDQIENRIIEAKSRGIYEAPGMALLHIAYERLVTGIHNEDTIEQYRINGIRLGRLLYQGRWFDPQALMLRETAQRWVAKAITGTVTLELRRGNDFTILNTESPNLTYEAERLSMEKVEDAPFDPIDRIGQLTMRNLDVSDTRGKLSIYAQTGLLSAIKDSVLPQLGKK

SEQ ID NO: 153696 - DNA, 1686 bp, Kineococcus radiotolerans SRS30216
  CDS (1)..(1686): transl_table=11
gtgggaggcggcctgcgcggtgttcgacctcgccctggccctgggcgggacgctgaccggcgagcacggcgtcgggctgctcaagcgcacctggctgcaccgcgagctcggcgaggactccctggcgctgcagcgcgggatcaaggcggtgttcgacccgctggggatcctcaacccgggcaaggggatctgagaccccggccgccgcccggaccgctcgcgcgacccggaccctgtttgcatgttcatgcagtgcggtgcatgattcaccgcatgtccaaggtgctcacgtccctgcccgccggcgaacgcgtcggcatcgccttctccggcggtctcgacacctccgtcgccgtggcgtggatgcgggagaagggcgcggtgccctgcacctacaccgccgacatcgggcagtacgacgaacccgacatcgactccgtgcccggccgcgccggggcctacggcgcggaactggcccggctggtggactgccgcgcggcgctcgtcgaggagggcctggccgccctgaccaccggcgcgttccacatccgctccgcggggcgcagctacttcaacaccacgcccctgggccgcgccgtcaccggcaccctgctggtgcgcgcgatgctggaggacgacgtccagatctggggcgacgggtccacctacaagggcaacgacatcgagcggttctaccgctacggcctgctcgccaacccctccctgcggatctacaagccgtggctggacgccgggttcgtcgccgagctcggcgggcgcaaggagatgtcggagtggctgcaggcgcgcgacctgccctaccgcgcgagcaccgagaaggcgtactccaccgacgcgaacatctggggcgccacccacgaggccaagcggctggagcacctcgacgtcggcgtcgagctcgtcgagcccatcatgggcgtgcggttctgggaccccgaggtcgagatcgcccccgaggacgtgagcatcgggttcgagcagggccggccggtctcgatcaacggcgcgaccttcgagagcgccgtcgacctcgtcctggaggccaacgccatcggcggccggcacgggctcggcatgtccgaccagatcgagaaccgcatcatcgaggccaagagccgcggcatctacgaggccccgggcatggcgctgctgcacgccgcctacgagcgcctcgtcaacgccatccacaacgaggacaccgtcgccagctaccacaacgagggccgtcgcctcgggcgcctcatgtacgagggccgctggctggacccgcaggccctcatgctccgggagtccctgcagcgctgggtcggcaacgccgtcaccggcaccgtcaccctgcgcctgcgccgcggggaggactactcgatcctcgacacgcagggcccggcgttcagctaccaccccgacaagctgtccatggagcgcaccgaggactccgccttcggccccgtggaccgcatcggccagctgacgatgcgcaacctcgacatcgccgactcccgcgccaagctggagcagtacgccgggatgggcatggtcggcagttcccaggtcagcctcatcggcgccctggagtccgggggcgcggaggcgatcgcctcgcgcggggagagcagcggggacgaactgctggaccgcgccgcgatggagtccggcaccgactga

SEQ ID NO: 153697 - protein, 561 aa, Kineococcus radiotolerans SRS30216
MGGGLRGVRPRPGPGRDADRRARRRAAQAHLAAPRARRGLPGAAARDQGGVRPAGDPQPGQGDLRPRPPPGPLARPGPCLHVHAVRCMIHRMSKVLTSLPAGERVGIAFSGGLDTSVAVAWMREKGAVPCTYTADIGQYDEPDIDSVPGRAGAYGAELARLVDCRAALVEEGLAALTTGAFHIRSAGRSYFNTTPLGRAVTGTLLVRAMLEDDVQIWGDGSTYKGNDIERFYRYGLLANPSLRIYKPWLDAGFVAELGGRKEMSEWLQARDLPYRASTEKAYSTDANIWGATHEAKRLEHLDVGVELVEPIMGVRFWDPEVEIAPEDVSIGFEQGRPVSINGATFESAVDLVLEANAIGGRHGLGMSDQIENRIIEAKSRGIYEAPGMALLHAAYERLVNAIHNEDTVASYHNEGRRLGRLMYEGRWLDPQALMLRESLQRWVGNAVTGTVTLRLRRGEDYSILDTQGPAFSYHPDKLSMERTEDSAFGPVDRIGQLTMRNLDIADSRAKLEQYAGMGMVGSSQVSLIGALESGGAEAIASRGESSGDELLDRAAMESGTD

SEQ ID NO: 153698 - DNA, 1224 bp, Synechococcus sp. WH 5701
  CDS (1)..(1224): transl_table=11
atggcacaggagcagggcgccagggcaaagcgggtggtgctcgcctactccggcggggtggataccagtgtctgcattccctacctcaagcaggaatggggcgtggaggaggtgatcaccttcgccgccgatctcggccagggcgacgagttggagccgatccgccagaaggcgctcgactccggcgccagccagtcgatcgtgggggatctgatcgatcccttcatccgcgagttcgcgttccccgccatccgcgccaatgctctctacgaggggcgctatcccctctccacagccctggcccgtcccctgatcgcccgccggttggtggaggtggcgcgggagcagggcgccgatgccgttgcccatggctgcacgggcaaaggcaatgatcaggtgcgtttcgatgtggcgatcggtgccctggctcccgatctgaaggtgctcaccccggcgagggaatgggccatgagccgtgaggaaacgattgcctacggcgagcgctgcggcatcccggcgccggtgagcaagaagaatccctattcgatcgatctgaacctgctgggccgcagcatcgaggcgggtccgctggaggatccgatggtggagcctcccgaagaggtgtttgccatgacccgctcgatccgcgacaccccggatgagccccaggtggtggagatcagcttcgagcagggcaatccggtggcgattgatggcgtcagcctcgatccggtcggtgtgatccgccgcgcgaatgagcttgctggcctccatggcttcggccgcctcgacatcatcgagaacagggtggtggggatcaagtcaagagagatctatgaaacgccaggcctgctgctgctgatccgtgcccaccaggagctggagagcctcaccctggctgctgacgtggtgcgttacaagcgccagatcgaatccagctgggctgatctcgtctatcagggtctctggttcggtccactcaagcaggcccttgatggtttcctggattgcacccaggccacggtcaacggcgtggtgcgtctgcgcctgcacaagggcaatgcggtggtgatcggtcgtgccagcagcagcgacagcttgtatgtgcccgccatggccacctatggcagtgacgatcgcttcgatcaccgggccgccaagggattcatctatgtgtgggggatgcccacgcgcctctgggcggccagtcggcgtcaggcttga

SEQ ID NO: 153699 - protein, 407 aa, Synechococcus sp. WH 5701
MAQEQGARAKRVVLAYSGGVDTSVCIPYLKQEWGVEEVITFAADLGQGDELEPIRQKALDSGASQSIVGDLIDPFIREFAFPAIRANALYEGRYPLSTALARPLIARRLVEVAREQGADAVAHGCTGKGNDQVRFDVAIGALAPDLKVLTPAREWAMSREETIAYGERCGIPAPVSKKNPYSIDLNLLGRSIEAGPLEDPMVEPPEEVFAMTRSIRDTPDEPQVVEISFEQGNPVAIDGVSLDPVGVIRRANELAGLHGFGRLDIIENRVVGIKSREIYETPGLLLLIRAHQELESLTLAADVVRYKRQIESSWADLVYQGLWFGPLKQALDGFLDCTQATVNGVVRLRLHKGNAVVIGRASSSDSLYVPAMATYGSDDRFDHRAAKGFIYVWGMPTRLWAASRRQA

SEQ ID NO: 153700 - DNA, 1212 bp, delta proteobacterium MLMS-1
  CDS (1)..(1212): transl_table=11
atgctacctaaagtcaacaaaatcgtcctggcctactccggtggtctggatacctcggttattctgcgctggctcaaggagacctgccagtgcccggtgatcgcctacgccgccgatatcggccagaccgaagactgggaggcggtgcgggccaaggggttggccaccggcgccgacgaggtggtgatcgccgatctcaaggaagagtttgtccgcgattatgtcttcccggccttccgggccaacgccatctatgaaggttcctacctgctgggcacctccctggcccggccggtgatcgccaaggagcaggtgcggttggccgaagtccatggggccgatgcggtcagccacggcgccaccggcaagggcaacgaccaggtccgcttcgagcttggctacatggctttgaaccccgatttgcagatcatcgccccctggcgcgtctgggatctcaattcccgccgcaagttgatggcctatgccgaaaagcatggtatcccggtgccggtgagccacgaaaaaccttacagttccgatgaaaatctgctgcatatcagctttgaaggcggggtattggaagatccctggcaggagccggaagagaggatgtttcagctctcggtttccccggagcaggccccggataagcccacctatatcgagctggagtttgccggcggcaacccggtggccatcgacggggaaagactggcgccggccgccatgctggcccggctcaaccaattgggggggcaaaacggcatcggccggctggatatggtggagaatcgctttgtcggcatgaagtcccgtggcgtttatgaaaccccgggcgggaccatcctgcgctgcgcccatcgcgatctcgagaccatcaccctggatcgcgaggtgatgcggatccgtgattccctggtgccccgctattcggagttgatctacaacggcttctggttcgccccggagatgcaactgctgcaaagcaccatggaccagacccaggccacggtcaacggggtggtacggctcaagctctacaagggcaactgcctgccggtgggtcgcaagtccgacaactccctgtatcaggagagcttcgccacctttgaagaggacagcgtctatcaccaggccgacgccgaaggttttatccgcctgcaggggctacgcctcaggatgcaggccctgcggggggagattaacaggtga

SEQ ID NO: 153701 - protein, 403 aa, delta proteobacterium MLMS-1
MLPKVNKIVLAYSGGLDTSVILRWLKETCQCPVIAYAADIGQTEDWEAVRAKGLATGADEVVIADLKEEFVRDYVFPAFRANAIYEGSYLLGTSLARPVIAKEQVRLAEVHGADAVSHGATGKGNDQVRFELGYMALNPDLQIIAPWRVWDLNSRRKLMAYAEKHGIPVPVSHEKPYSSDENLLHISFEGGVLEDPWQEPEERMFQLSVSPEQAPDKPTYIELEFAGGNPVAIDGERLAPAAMLARLNQLGGQNGIGRLDMVENRFVGMKSRGVYETPGGTILRCAHRDLETITLDREVMRIRDSLVPRYSELIYNGFWFAPEMQLLQSTMDQTQATVNGVVRLKLYKGNCLPVGRKSDNSLYQESFATFEEDSVYHQADAEGFIRLQGLRLRMQALRGEINR

SEQ ID NO: 153702 - DNA, 1218 bp, marine gamma proteobacterium HTCC2080
  CDS (1)..(1218): transl_table=11
atgtctgtcaataaagtcgtacttgcctactctggcggtctcgatacctcggttattgttcgttggctacaagagacctacgactgtgaggtcgttacttttacagctgatattggtcaaggcgaggaggtcgagcctgctcgggcaaaggcgcaggcattgggaattgaggagatttatattgatgatcttcgagaagaatttgtccgtgattttgtctatcccatgtttcgtgcaaataccatctacgaaggggaatacctgcttggaacgtctatcgcgcgcccccttattgccaaacgcctcgttgagattgccaatgagactggtgcagatgctatttcccacggtgccaccggtaagggcaatgaccagattcgattcgaattgggcgcctatgctttaaagccaggtatcaagattatcgctccttggcgggagtgggatttaggctcacgagaatcattaatggcctactgtgagcaaagggcgataccggttgatttttcaggagcctcaaaaaagtcgccctattctatggacgccaatctcctgcacatttcctatgagggcggtgtacttgaagatccttgggctgatgctgaagaatcgatgtggcgctggaccgttagccccgagtcggcacctgatcagggtgaggagattattcttagctttagttgtggtgatattacggctattgacggtgtggcgcacacacccgcggaggttcttgaaatcctcaatcaacgcggcggcgcacacggcatcggacgtgcagatatcgttgagaaccgttacgtgggcatgaagtccaggggctgctacgagaccccgggcggcacaattatgctgcgcgctcaccgggcgatggagtcgattacgctcgatcgcgaggcaatgcaccttaaagacgaactgatgcctcgatacgctaaacttatttacaacggttactggtggtcaccagaacgacttatgttgcagtcagcgatcaatgacagccagcgctgggtcaacggcgaagtacggctacgcctgtacaaaggtaacgttactgtcttagggcggcgctctgacgattcgctatttgatgagagtattgccacctttgaggacgatgctggggcgtataatcaacaggacgccgaaggatttataaaactgaatgcactccggatgcggattgcagcgcagaggggccgatcacagcactag

SEQ ID NO: 153703 - protein, 405 aa, marine gamma proteobacterium HTCC2080
MSVNKVVLAYSGGLDTSVIVRWLQETYDCEVVTFTADIGQGEEVEPARAKAQALGIEEIYIDDLREEFVRDFVYPMFRANTIYEGEYLLGTSIARPLIAKRLVEIANETGADAISHGATGKGNDQIRFELGAYALKPGIKIIAPWREWDLGSRESLMAYCEQRAIPVDFSGASKKSPYSMDANLLHISYEGGVLEDPWADAEESMWRWTVSPESAPDQGEEIILSFSCGDITAIDGVAHTPAEVLEILNQRGGAHGIGRADIVENRYVGMKSRGCYETPGGTIMLRAHRAMESITLDREAMHLKDELMPRYAKLIYNGYWWSPERLMLQSAINDSQRWVNGEVRLRLYKGNVTVLGRRSDDSLFDESIATFEDDAGAYNQQDAEGFIKLNALRMRIAAQRGRSQH

SEQ ID NO: 153704 - DNA, 1335 bp, Herbaspirillum seropedicae
  CDS (1)..(1335): transl_table=11
atgtccaacatcctgcaatccgtcccggtcaatcaaaaagtcggcatcgccttctccggcggcctcgataccagcgccgcgctgacctggatgcgccagaagggcgccatcccctacgcctacaccgccaacctgggccagccggatgagccggactacgacgccatccccaagaaggccatgcaatacggcgcccagcaggcgcgcctgatcgactgccgcgaacagctggccaatgaaggcatcgccgcgctgcaaagcggcgccttccacatctccaccgccggcatcacctacttcaacaccaccccgctgggccgcgccgtgaccggcaccatgctggtgtcggccatgcgtgaagacaacgtcgacatctggggcgacggcagcacctacaagggcaacgacatcgagcgcttctaccgctatggcctgctggtgaaccccaacctgaagatctacaagccctggctggacagcaccttcatcgacgaactgggcggccgcaaggaaatgtccgagttcatgatcaagtccggcttcgactacaagatgtcggtggaaaaggcctactcgaccgactccaacatgctgggcgcgacccacgaagccaaggacctggaattcctcaacagcggcatcaagatcgtgcagcccatcatgggcgtggcgttctggcgcgatgacgtggaagtcaaggccgagaccgtcaccgtgcgcttcgaagaaggccgtccggtggccctgaacggcaagaccttcgccagcatgaccgagctgatcctggaagccaaccgcatcggtggccgccatggcctgggcatgagcgaccagatcgagaaccgcatcatcgaagccaagagccgcggcatctacgaagctccgggcctggccctgctgttcatcgcctacgagcgcctggtcactggcatccacaacgaagacaccatcgaacagtatcgcgacaatggccgcaagctgggccgcctgctgtaccaaggccgctggttcgattcgcaggccatcatgctgcgcgagaccgcccagcgctgggtggcgcgcgccatcaccggcgaagtcacggtggaactgcgtcgcggcaatgactactcgatcctcaacaccgagtcgcccaacctgacctaccacccggaacgcctgaccatggaaaagggcgaaggcagcttctccgccatcgaccgtatcggccagctgaccatgcgcaacctggacatcgccgacacccgccagaagctggcgatctatcagaacaccggcctgctggagtccagcactgcggtgtcgctgccgctgctgggcaaggacgagaagtaa

SEQ ID NO: 153705 - protein, 444 aa, Herbaspirillum seropedicae
MSNILQSVPVNQKVGIAFSGGLDTSAALTWMRQKGAIPYAYTANLGQPDEPDYDAIPKKAMQYGAQQARLIDCREQLANEGIAALQSGAFHISTAGITYFNTTPLGRAVTGTMLVSAMREDNVDIWGDGSTYKGNDIERFYRYGLLVNPNLKIYKPWLDSTFIDELGGRKEMSEFMIKSGFDYKMSVEKAYSTDSNMLGATHEAKDLEFLNSGIKIVQPIMGVAFWRDDVEVKAETVTVRFEEGRPVALNGKTFASMTELILEANRIGGRHGLGMSDQIENRIIEAKSRGIYEAPGLALLFIAYERLVTGIHNEDTIEQYRDNGRKLGRLLYQGRWFDSQAIMLRETAQRWVARAITGEVTVELRRGNDYSILNTESPNLTYHPERLTMEKGEGSFSAIDRIGQLTMRNLDIADTRQKLAIYQNTGLLESSTAVSLPLLGKDEK

SEQ ID NO: 153706 - DNA, 1446 bp, Oryza sativa subsp
  CDS (1)..(1446)
atggcgcacgccctcggctgcggcgccgccactgcccccgccggggtgggtctcctccaccaccacgagaaggctggggcgttgttcagtgccgcaggctccatcgttcgggttcagcagctcagcgggaaggggagcaaaagccaagctataagatgtgcaatgccaagtgcaagtgagcatggtggaatttcaaccgcaacagctaatagtagtgatcaaaagaaaggtggactgcgtggcaaactgaataaagttgttctagcttacagtggtggtttggatacatcagttattgttccatggctccgggagaactatggttgtgaagttgtctgtttcactgctgatgttggccagggtgacattgaattggaagggctagagaagaaggcaaaagctagtggtgcaagccagcttgttgtgaaggacttgaaagaagagttcgttagtgaatacatatacccctgcttgcgtgctggtgcagtttatgaaagaaagtatctgctggggacttcaatggctaggcctgttattgccaaggcaatggttgatgttgcaaaggaagttggtgcagatgcagttgctcatggatgcactggaaaaggcaatgatcaggttcgttttgagcttacattctatgctttaaaccctgagcttaaagtggtggcaccttggagggagtgggatatcacaggacgtgaagatgctattgagtatgcaaagaaacacaatgtgccaattcctgttacaaagaaatcaatatacagccgtgatcgaaatttgtggcaccttagccatgagggtgacattttggaagatccagcaaatgagccaaaggaagatatgtatatgatgtcagttgcaccagaaaatgcaccttcaaaacctgagtatttggagattggtattattgcaggtgttcctgtttccatcaatggaaaagatctctcaccagcatctctccttgccaagctcaatgaaatcggtggaaagcatggtattgggcgcattgatatggtggaaaaccgcctcgtaggcatgaagtcccgtggtgtatacgagacccccggtggcaccatcatggcagctgctgtccgtgagctcgagtccttgactttggacagggagacaatgcagtggaaggacatgcttgctctcaagtacgccgagctggtctacgctggccgttggttcgacccgctccgacaatccattgatgcgttcatggagaacattaccgcgacaacaaccggctccgtgactctcaagctgtacaagggctccgtaaacgtcgcgtcccggaagagcccgtacagcctgtacagggaagacatctcctcatttgagaatggggagatctacaaccaggctgatgctgaagggttcatcaggctatatggtctccctaccagagtccgggcaatgctggagaagggcatctaa

SEQ ID NO: 153707 - protein, 481 aa, Oryza sativa subsp
MAHALGCGAATAPAGVGLLHHHEKAGALFSAAGSIVRVQQLSGKGSKSQAIRCAMPSASEHGGISTATANSSDQKKGGLRGKLNKVVLAYSGGLDTSVIVPWLRENYGCEVVCFTADVGQGDIELEGLEKKAKASGASQLVVKDLKEEFVSEYIYPCLRAGAVYERKYLLGTSMARPVIAKAMVDVAKEVGADAVAHGCTGKGNDQVRFELTFYALNPELKVVAPWREWDITGREDAIEYAKKHNVPIPVTKKSIYSRDRNLWHLSHEGDILEDPANEPKEDMYMMSVAPENAPSKPEYLEIGIIAGVPVSINGKDLSPASLLAKLNEIGGKHGIGRIDMVENRLVGMKSRGVYETPGGTIMAAAVRELESLTLDRETMQWKDMLALKYAELVYAGRWFDPLRQSIDAFMENITATTTGSVTLKLYKGSVNVASRKSPYSLYREDISSFENGEIYNQADAEGFIRLYGLPTRVRAMLEKGI

SEQ ID NO: 153708 - DNA, 1356 bp, Ostreococcus tauri
  CDS (1)..(1356)
atgatcaccatgaacaaactctcgtgctccgctcgatcgagcgtcgcgcaccgacgctcgaccgcgtccaagacgaccaaagcggtcgcccgcgtcacccatcgaaacaccgctcggtcctccgtcaaggctcgcgcggggccgtccggggacgtgaagaaggttgtcctggcgtactccggcggtttggacacctccatcatcttgaagtggctccaagacacgtacgggtgcgaggtggtgacgttcacggcggacttagggcagggtgaggagctcgagccggcgcgagcgaaggcgcaacaaatgggagtgaaggaaattttcatcgatgatttgcgcgaggagttcgtccgggattacgtgttcccgatgttccgtgcgaacgccgtgtacgagggcaagtacctgctcgggacgtccatcgcgcgaccgctcatctccaagcgacagattgaaatcgcgaagatggtcggcgccgatgccgtgtgccacggcgccacgggtaagggtaacgaccaggttcgatttgaactcggttactacggcctcaagccggacgtcaaggtgatcgcgccgtggagagagtgggatttgaactcgcgcacgaagttgttggcgtacgcggatgcgaacggcatcccggttgcgcagtccaagcgtcaagacgcgccgtattccaccgacgccaacttgttgcacatctcttacgaaggtaacgcgttggaagatccgtgggtcgagtattccgaggacatgttcacgcgctcggtgagcccggagaacgccccggatacgccgacgtacatcgaggtcgagtttgaaaagggtgacccggtggcgatcaacggtaagcggtactccccggccgaaatgctcaccgagctcaaccgacttggtggcgaaaacggcatcggacgtctggatatcgtcgagtctcgcttcgtcggcatgaagtcccgcggtgtgtacgagacaccgggcggtaccattttgctcgaaatccgacgcgcactcgaaaccgtgtgccttgaccgcggtgaaatgcactacaaggatgaaatgatgccgcgatacgctgagctcatttacaacggtttctggttctccccggagcgcgaaatgatgcaaagcgccattgacttgtgctcgcagaacgtcacaggtacggtgcgtgccaagctctacaagggtaacgtcatggtcgttgggcgcaaggctgacaactctctctacaacgacagactgtccacgttcgaagacgacggcggtgcgtacgaccaaaaagatgccgcgggcttcatcaagcttcaagcactccgcttgcgtacgctcaagactgctcgaggcgagtaa

SEQ ID NO: 153709 - protein, 451 aa, Ostreococcus tauri
MITMNKLSCSARSSVAHRRSTASKTTKAVARVTHRNTARSSVKARAGPSGDVKKVVLAYSGGLDTSIILKWLQDTYGCEVVTFTADLGQGEELEPARAKAQQMGVKEIFIDDLREEFVRDYVFPMFRANAVYEGKYLLGTSIARPLISKRQIEIAKMVGADAVCHGATGKGNDQVRFELGYYGLKPDVKVIAPWREWDLNSRTKLLAYADANGIPVAQSKRQDAPYSTDANLLHISYEGNALEDPWVEYSEDMFTRSVSPENAPDTPTYIEVEFEKGDPVAINGKRYSPAEMLTELNRLGGENGIGRLDIVESRFVGMKSRGVYETPGGTILLEIRRALETVCLDRGEMHYKDEMMPRYAELIYNGFWFSPEREMMQSAIDLCSQNVTGTVRAKLYKGNVMVVGRKADNSLYNDRLSTFEDDGGAYDQKDAAGFIKLQALRLRTLKTARGE

SEQ ID NO: 153710 - DNA, 1239 bp, Aedes aegypti
  CDS (1)..(1239)
atgtctggaaaggagaaaattctactggcctattccggtggcttggacaccagttgcattttgaaatggttgctcgagaaaggatacgaggtgatctgctttatggccgacgttggccaggaggaagattttgtcgcagcacgggagaaagctcttcgtgttggtgcaaaggatgtgatcatcaaggacatgaagcgaatctttgtggagaagtttgtttggcccgctattcagatgggtctcgtctatgaggatcggtatctgttgggaacatcattggctagaccatgcatttcgatcggactgatggagtctgcagccgaacattcttgtagcataatctctcacggagcaaccggtaagggaaacgatcagattaggtttgaactgagctgctatgctttggatccgaagatcaaggttattgctccatggcgtttgcccgaattttgcgaacgtttccaaggtaggaaggatttgttggattacgcgcagaagcacggtattccagttagtgctactcccaaagcaccgtggtcaatggatgcgaatattatgcatatcagttacgagtctggaattttggagaatcctgctaaagctgccccagaagaactctatcagatgacacagtccgtgatgaagagttccaatactccaatcaaggtagacatcactttcaaagaaggcttgccagtgactgttctggagcattccggcggaaagacgttggaaacacctttggaagttctaacgttcctcaataagataggcggcgagcagggagtaggcagagtggatttggtcgagaatcggttccttggcttgaaatcgagaggagtgtacgagacaccgggtgcaactattttgcacgttgcccacaaagatatggaagtttactgtctggatcgggaaatcttccgagtcaaatcatttttggcactgaagatggcggactacgtttacaatggattctggtactcaccagaggcggaatacgtgagaacctgcttggttggggcacagaaaaatgtttccggaaaggtaaccctggaaattttcaagggacacgtaatagccattgcaagagagtctaccaaaactatctacaatcaggaactggcatcaatggatgtgcatggaactctttcgccgtatgctgctactggattcatcgaggttaatgcaatgcgtttgaaggagcactatcgagtatttggaagtgctaatatggaataa

SEQ ID NO: 153711 - protein, 412 aa, Aedes aegypti
MSGKEKILLAYSGGLDTSCILKWLLEKGYEVICFMADVGQEEDFVAAREKALRVGAKDVIIKDMKRIFVEKFVWPAIQMGLVYEDRYLLGTSLARPCISIGLMESAAEHSCSIISHGATGKGNDQIRFELSCYALDPKIKVIAPWRLPEFCERFQGRKDLLDYAQKHGIPVSATPKAPWSMDANIMHISYESGILENPAKAAPEELYQMTQSVMKSSNTPIKVDITFKEGLPVTVLEHSGGKTLETPLEVLTFLNKIGGEQGVGRVDLVENRFLGLKSRGVYETPGATILHVAHKDMEVYCLDREIFRVKSFLALKMADYVYNGFWYSPEAEYVRTCLVGAQKNVSGKVTLEIFKGHVIAIARESTKTIYNQELASMDVHGTLSPYAATGFIEVNAMRLKEHYRVFGSANME

SEQ ID NO: 153712 - DNA, 1248 bp, Phaeosphaeria nodorum
  CDS (1)..(1248)
atgagcaagggacgcgtctgtttggcctactctggcggtcttgatacctccacgatcctgaaatggctcatcgaggaaggttatgaggtcgtgtgcttccttgccaacgttggccaggaagagccttgggatgaggtcgagaagaaggcgctcaagattggtgcgctgaagatggtcattctcgacctgcagaaggaattcgtcgaggagctctgcttccgcgctgtacaatgcaatgcctcatacgagggcagatacctgctcggaaccagcttggctcgtccagtcatcgcccgcgcacagatccgcgttgcccaacaagaaggctgcggcttcgtctcccacggctgcaccggcaagggcaacgaccaggttcgcttcgagcttgcattctacacacttcagcctaccatcaaggtcattgcgccatggaggctgccagagttctgcgaccgcttcaagggcaggcaggatctgttggactatgccgagaagcatggcatcccagtcacatccaccaaggcgaagccatggtccatggacgccaacctggctcactgcagttatgaggctggcatcctcgaggaccccgacgtgtctcctccagacgacatgtggaccatgaccgactcgcccctcaacgctcccaacgagcccaccgacatcaccgtacacttcgacaagggcattcccgtcaaagtcgtgaccccagagaagacctacaccgactcagtcgagctcttcgtcgcgctcaacaagctcggcttcacccacggcattgggcgcatcgacattgtcgagaaccgcttcatcggcctcaaatcccgcggctgctacgactcgcccgccatgaccatcctgcgcctcgcacatctcgacctcgagggcctcgtcatggacgcccaagtgcgcaacctgcgcgaccaattcgtctcgcataactggagctaccagctgtacaacggcatgtacttcagccccgagcgcgagttcatcgagaacagcctggtgttcagccagcgccgcgtcaacggcgaggtgcgcatgaagctgtacaagggcaatgcgtatgtgctgggccgctcgagtcagacggagaagctgtactcggaggaggaggcgagtatggacacgctggataacttcagcccaatggataccacgggcttcattgcgatccagagcattaggctcaagaagtatgggctgcagaaggccgaggagggtgcgaatatgagccgtgcttag

SEQ ID NO: 153713 - protein, 415 aa, Phaeosphaeria nodorum
MSKGRVCLAYSGGLDTSTILKWLIEEGYEVVCFLANVGQEEPWDEVEKKALKIGALKMVILDLQKEFVEELCFRAVQCNASYEGRYLLGTSLARPVIARAQIRVAQQEGCGFVSHGCTGKGNDQVRFELAFYTLQPTIKVIAPWRLPEFCDRFKGRQDLLDYAEKHGIPVTSTKAKPWSMDANLAHCSYEAGILEDPDVSPPDDMWTMTDSPLNAPNEPTDITVHFDKGIPVKVVTPEKTYTDSVELFVALNKLGFTHGIGRIDIVENRFIGLKSRGCYDSPAMTILRLAHLDLEGLVMDAQVRNLRDQFVSHNWSYQLYNGMYFSPEREFIENSLVFSQRRVNGEVRMKLYKGNAYVLGRSSQTEKLYSEEEASMDTLDNFSPMDTTGFIAIQSIRLKKYGLQKAEEGANMSRA

SEQ ID NO: 153714 - DNA, 1398 bp, Medicago truncatula
  CDS (1)..(1398)
atggcgcagttgaatgcaattcttacatactcatccccagctattgctcctaccaaacatgcaaaagagcacctgctgcatcaccggttctgccaggcaaagccttcttcattaagagagttgagtccaagaagaagttttggtgctgcaagtaaacctcaagttataaaagctgtgctatataaagacgtagaaatttctgagaccaagaaggttgctggactaaaaggtaaattgaataaggttgttctggcttatagtggtggcttagacacatcggttgttgtcccctggctgagagagaactatggctgtgatgttgtttgcttcactgctgatctaggccaaggggcaagtgaattggaaggtttagaagagaaggcaaaagccagcggagcttctcagttagtcgtgaaggatttgaaggaggaatttgttagggattatgtattcccttgcctgcgtgccggtgcaatttatgagaggaagtatttgcttggaactgcaatagctcgccctgtaattgcaaaggctatggtggatattgccaatgaagttggagctgatgctgttcgatttgaactctccttttttgctctgaatcccaagttaaatgtcgtggctccatggagggagtgggatattacagggagagaagatgctattgagtatgctaagaagcatgatgtaccggttcctgtaaccaaaaaatccatatatagcagggataggaacctttggcacataactcatgagggtgatgttttggaagatccagcaaatgaacctaaaaaggatatgtacatgttgactgtagacccagaggatgctccaaacgagccagaatatgtggagattggatttgagttaggcattccagtatcgctgaacgggaagaggctttctccaggaaatttggttgctgagctgaatgagataggtggaaggcatggaataggccgtgtcgacttggttgaagaccgcattgtaggcatgaagagccgaggagtttacgaaactccaggtggcaccattctcttcactgcagcaagagacttagagactttgactcttgatcgtgaaacacttcagcttaaagactcattagcacttaaatatgcagagttagtgtatgctggaagatggtttgatccacttcgcgaatcgatggattcattcatggagaagatctcacagactacaacaggttcagtgagtttgaaactgtataaaggtagtgcttctgtgacgggtcggaagagtccttatagtttatatagggaagatatttcttcatttgagagtggggagatatataatcatgctgatgctgttgggtttataaagctttatggtcttccaatgaggatcagagccatgatggaacaaggcatttaa

SEQ ID NO: 153715 - protein, 465 aa, Medicago truncatula
MAQLNAILTYSSPAIAPTKHAKEHLLHHRFCQAKPSSLRELSPRRSFGAASKPQVIKAVLYKDVEISETKKVAGLKGKLNKVVLAYSGGLDTSVVVPWLRENYGCDVVCFTADLGQGASELEGLEEKAKASGASQLVVKDLKEEFVRDYVFPCLRAGAIYERKYLLGTAIARPVIAKAMVDIANEVGADAVRFELSFFALNPKLNVVAPWREWDITGREDAIEYAKKHDVPVPVTKKSIYSRDRNLWHITHEGDVLEDPANEPKKDMYMLTVDPEDAPNEPEYVEIGFELGIPVSLNGKRLSPGNLVAELNEIGGRHGIGRVDLVEDRIVGMKSRGVYETPGGTILFTAARDLETLTLDRETLQLKDSLALKYAELVYAGRWFDPLRESMDSFMEKISQTTTGSVSLKLYKGSASVTGRKSPYSLYREDISSFESGEIYNHADAVGFIKLYGLPMRIRAMMEQGI

SEQ ID NO: 153716 - DNA, 1254 bp, Aspergillus oryzae
  CDS (1)..(1254)
atggctaccgagaagccccgtgtctgtcttgcctactctggcggtctggataccagctgcattcttcgctggttgatcgaggagggctacgaggttgtctgcttcctcggcaatgtcggccaggaggaagactgggccgctgttgaggagaaggccctcaagatcggtgccaagaagatggtgattgaggatctgcgccgggagttcgtcgaggagctctgcttccctgccatccagtgcaatgccatctatgagggtcgctacctcctgggaaccagcttggctcgtcccgttatcgcccgcgcccagatgcgtgtcgctcagcgtgaaggctgccagtttgtcagccacggtgctaccggcaagggtaacgaccaggtccgtttcgaactggctttctatgccatccagccctccatcaagatcatcgccccttggcgtgatcccaagttcttcaagcgtttcgctggccgtaacgatctcctcgactatgccgcccagaccggcatccctgttacctccactaaggccaagccctggtccatggacgccaactccgcccactgcagttacgaggccggtgttctggaggaccccaaccacacccctcccgctgacatgtggaccatgaccgccgaccctctgaacgcccctaacgagcctgccgacatcaccatccagttcgagcagggtatccccactaagctcgtcactcccgagaagacatacaccgactccgttgagctcttcaacgctctcaacaagctcggctacacccacggtgttggccgtattgatattgtcgagaaccgcttcatcggtctcaagagccgtggctgctatgactcccctgctatgaccatcctccgcgccgcccatctcgacctcgagggtctcgtcctggacggccaggtccgctctctccgtgatcagttcgtcacccacaactggtccatcctcctctacaatggctactacttcagccccgagcgtgagttcatcgagaacagtctgaagttcagtcagaagcgcgtcaacggtgaggtccgtgtgcgcctctacaagggtagcccttacatccttggtcgctccagcagcaccgagaagctgtacgatgccgaggaggcttccatggactccctcgaggacttcgagcctaccgacaccaccggtttcattgccatcagctccatccgtctcaagaagtacggtctgcagaaggctgaggagggcgagaacctcagccgggcttag

SEQ ID NO: 153717 - protein, 417 aa, Aspergillus oryzae
MATEKPRVCLAYSGGLDTSCILRWLIEEGYEVVCFLGNVGQEEDWAAVEEKALKIGAKKMVIEDLRREFVEELCFPAIQCNAIYEGRYLLGTSLARPVIARAQMRVAQREGCQFVSHGATGKGNDQVRFELAFYAIQPSIKIIAPWRDPKFFKRFAGRNDLLDYAAQTGIPVTSTKAKPWSMDANSAHCSYEAGVLEDPNHTPPADMWTMTADPLNAPNEPADITIQFEQGIPTKLVTPEKTYTDSVELFNALNKLGYTHGVGRIDIVENRFIGLKSRGCYDSPAMTILRAAHLDLEGLVLDGQVRSLRDQFVTHNWSILLYNGYYFSPEREFIENSLKFSQKRVNGEVRVRLYKGSPYILGRSSSTEKLYDAEEASMDSLEDFEPTDTTGFIAISSIRLKKYGLQKAEEGENLSRA

SEQ ID NO: 153718 - DNA, 1437 bp, Agaricus bisporus
  CDS (19)..(1296)
ctcaacttactcttaagaatgcctgaaaacaaaggtcgtgttcttttagcctactctggtggtctagatacctcttgtatccttgcatggttgattgaagaaggatatgaagtctatgcattcatggcagatgtaggccaagaagaagactatgcagctgcagaacagaaagctttgaaagtcggagcaaagaaattcttcttggccgatctcaaacgagaattcgttactgaactcatttatcctgcagttcaagctaactgtatctacgaaaatgtttatctccttggtacatcacttgctcgacctgttattgcccgtggaatgattgaagttgcagacaaagagggttgcgattacgtctctcacggttgcactggaaaaggcaacgaccaagtccgatttgaactcgctttctacggtctcaaacctgatatcaaagttatcgctccttggcgaattcccgaattctacaaccgcttcgccggacgacaagcccttcttcaatatgccgccgaacaaaatattcctgtccaacaaactgttgcaaaaccatggtcaacagatgaaaatctcttccacatctcatacgaagctggtatcctcgaagatcccaacgtcactcctcccgacgacatgtggaaactcaccaccgctcccgaagatgcccccacctcacccgaacgtatcatcctcgaattccaaaacggtttacccaccaaagtcatcgttcctgaacaacaaaaagaatatacagatgctgtagaaattttcactgctctaaacactctcgcaaggaaacatggtataggtcgtatcgatatcgtcgaaaatcggtttataggagtcaaatctcgtggttgttacgaatcacctggagctactatccttcgtgtcgcccatatggatcttgaaggtcttaccctcgatcgtaatgtgcgagctcttcgagaccaatttacaactatcgctctgagtcgaatcttgtataacggtcattacttctcgcctgaacgcgagttcgttactagctctattccttcgagtcaacgaactgtgaatggcatcgttagactgaaactttacaagggtaacactattgttgaaggccgtgaatccagtgaaggtctgtatgatgctgctcagtcctccatggacgaacttggtggtttcgagcctacagatactaccggattcatttctatcgagtctatcagactcaaaaaatgggctcaatcaaaggcagccaaaggtcagtctggcgtcacggccaaggatgtctatggtagctcttagggagacacgatttcattcgtgcttctatgaaatgtaaaacgtggggcatcattaatgttgtagatctgtagtcatacttgttttccttgaatcgatcaaaaatacgatgagataacagttttcaaaaaaaaaaaaaaaaaa

SEQ ID NO: 153719 - protein, 425 aa, Agaricus bisporus
MPENKGRVLLAYSGGLDTSCILAWLIEEGYEVYAFMADVGQEEDYAAAEQKALKVGAKKFFLADLKREFVTELIYPAVQANCIYENVYLLGTSLARPVIARGMIEVADKEGCDYVSHGCTGKGNDQVRFELAFYGLKPDIKVIAPWRIPEFYNRFAGRQALLQYAAEQNIPVQQTVAKPWSTDENLFHISYEAGILEDPNVTPPDDMWKLTTAPEDAPTSPERIILEFQNGLPTKVIVPEQQKEYTDAVEIFTALNTLARKHGIGRIDIVENRFIGVKSRGCYESPGATILRVAHMDLEGLTLDRNVRALRDQFTTIALSRILYNGHYFSPEREFVTSSIPSSQRTVNGIVRLKLYKGNTIVEGRESSEGLYDAAQSSMDELGGFEPTDTTGFISIESIRLKKWAQSKAAKGQSGVTAKDVYGSS

SEQ ID NO: 153720 - DNA, 1248 bp, Pichia pastoris
  CDS (1)..(1248)
atgtctaaaggaaaagtttgtttggcctactccggtggtttggatacctccatcatcctagcttggttgttggagcagggatacgaagtcgttgcctttttagccaacattggtcaagaggaagactttgaggctgctagagagaaagctctgaagatcggtgctaccaagtttatcgtcagtgacgttaggaaggaatttgttgaggaagttttgttcccagcagtccaagttaacgctatctacgagaacgtctacttactgggtacctctttggccagaccagtcattgccaaggcccaaatagaggttgctgaacaagaaggttgttttgctgttgcccacggttgtaccggaaagggtaacgatcaggttagatttgagctttccttttatgctctgaagcctgacgttgtctgtatcgccccatggagagacccagaattcttcgaaagattcgctggtagaaatgacttgctgaattacgctgctgagaaggatattccagttgctcagactaaagccaagccatggtctactgatgagaacatggctcacatctccttcgaggctggtattctagaagatccaaacactactcctccaaaggacatgtggaagctcactgttgacccagaagatgcaccagacaagccagagttctttgacgtccactttgagaagggtaagccagttaaattagttctcgagaacaaaactgaggtcaccgatccggttgagatctttttgactgctaacgccattgctagaagaaacggtgttggtagaattgacattgtcgagaacagattcatcggaatcaagtccagaggttgttatgaaactccaggtttgactctactgagaaccactcacatcgacttggaaggtcttaccgttgaccgtgaagttagatcgatcagagacacttttgttaccccaacctactctaagttgttatacaacgggttgtactttaccccagaaggtgagtacgtcagaactatgattcagccttctcaaaacaccgtcaacggtgttgttagagccaaggcctacaaaggtaatgtgtataacctaggaagatactctgaaaccgagaaattgtacgatgctaccgaatcttccatggatgagttgaccggattccaccctcaagaagctggaggatttatcacaacacaagccatcagaatcaagaagtacggagaaagtgtcagagagaagggaaagtttttgggactttaa

SEQ ID NO: 153721 - protein, 415 aa, Pichia pastoris
MSKGKVCLAYSGGLDTSIILAWLLEQGYEVVAFLANIGQEEDFEAAREKALKIGATKFIVSDVRKEFVEEVLFPAVQVNAIYENVYLLGTSLARPVIAKAQIEVAEQEGCFAVAHGCTGKGNDQVRFELSFYALKPDVVCIAPWRDPEFFERFAGRNDLLNYAAEKDIPVAQTKAKPWSTDENMAHISFEAGILEDPNTTPPKDMWKLTVDPEDAPDKPEFFDVHFEKGKPVKLVLENKTEVTDPVEIFLTANAIARRNGVGRIDIVENRFIGIKSRGCYETPGLTLLRTTHIDLEGLTVDREVRSIRDTFVTPTYSKLLYNGLYFTPEGEYVRTMIQPSQNTVNGVVRAKAYKGNVYNLGRYSETEKLYDATESSMDELTGFHPQEAGGFITTQAIRIKKYGESVREKGKFLGL

SEQ ID NO: 153722 - DNA, 1212 bp, Rhizobium leguminosarum bv
  CDS (1)..(1212): transl_table=11
atgacgaagatagagaaaattgtgctttcttattcgggtgggctggatacctcgatcatcctcaaatggttgcaggaaacctacggatgcgaggtggtgacgttcaccgccgatctcggccagggcgaggagctcgagccggcgcgcgccaaggcggagatgtcaggggtcaaggacatccgtatcgtcgatctgcgcgaggagttcgtcagcgacttcgtctttccgatgctgcgggcgaacgcgctctatgaggggcagtacctgctgggcagttccatcgcacggccgctgattgccaagcatctggtcggcatagcccgggaggttggcgccgacgccgttgcccacggcgcgaccggcaagggcaatgatcagatccggttcgagctggccgtcaatgcgctcgacccgtcgattaaggtcattgctccctggcgccaatggaacatccgctcccgcttacagctttcggaatatgccgaaaagcatcggatcccggtgcccagcgacaagcgcggcgaggcgccgttctcgatcgatgccaacctgctgcacacctcgaccgaaggcaagagtctcgaaaatccggcggaggtcgcgcccgatcatgtctatcagcgcacggtcgatcccgtcgacgctcccgacacgcctgagatcatcaccgttggtttcgagaggggcgatccggtttcggtgaacggcaaggccatgacgccagccgcattgctgaccgagctcaatggactgggcggccggcacggcgtcgggcggctcgatctggttgaaaaccgcttcatcggcatgaagtcgaggggaatatacgaaacgccgggaggcacgatcctgctcgcggcccatcgcggcattgaatcgatcacgctcgaccgcgccgccgcccatctgaaggatgagatcatgccccgctacgccgagctgatctacaacggtttctggttcgctcccgagcgggaaatgctgcaagccctgatcgaccacagccaggctttcgtcagcggcgaagtgacgctcaggctctacaagggaagcgcctcggttatctcccgcgcctccccctgctccctctactccgccgacctcgtcaccttcgaagaaagcaccatcgccttcgatcatcacgacgcggaaggtttcatcaggctcaacggattgcggctcaggagctgggccgcccgcaacggcagatga

SEQ ID NO: 153723 - protein, 403 aa, Rhizobium leguminosarum bv
MTKIEKIVLSYSGGLDTSIILKWLQETYGCEVVTFTADLGQGEELEPARAKAEMSGVKDIRIVDLREEFVSDFVFPMLRANALYEGQYLLGSSIARPLIAKHLVGIAREVGADAVAHGATGKGNDQIRFELAVNALDPSIKVIAPWRQWNIRSRLQLSEYAEKHRIPVPSDKRGEAPFSIDANLLHTSTEGKSLENPAEVAPDHVYQRTVDPVDAPDTPEIITVGFERGDPVSVNGKAMTPAALLTELNGLGGRHGVGRLDLVENRFIGMKSRGIYETPGGTILLAAHRGIESITLDRAAAHLKDEIMPRYAELIYNGFWFAPEREMLQALIDHSQAFVSGEVTLRLYKGSASVISRASPCSLYSADLVTFEESTIAFDHHDAEGFIRLNGLRLRSWAARNGR

SEQ ID NO: 153724 - DNA, 1206 bp, Aquifex aeolicus
  CDS (1)..(1206): transl_table=11
atgaagaaaaagagggtaattctcgcatactcgggcggactcgacacatccataatagtgagatggctcacggaaaaagggtacgaggtaataacatacaccgcggacgtgggacagggagaagaactctctgaaattcccgaaaaggcaaggagagcgggagcgattgaagccatagtagaggatttaaaagaaacctttgcggaaaattactgccttccaactttgagggcattagccctttacgaagggaagtaccccctcaccgcagccctctcaagacctctcatagcagagaggctcgtttactatgccgaaaagttcaacgcggactacgtagcacacggctcaactgggaagggaaacgatcaggtgaggtttgaactctcagtctgggccctaaaccccgatatagaggttctcgctcccgtgagagaatgggagttcaaatcaagggaagaacaagttgagtacgctcagaggttcaacatccccgttaaagctacgaaagaaaagccatactccatagacaggaacctctggggcgtttccatagagtgcggacccttagaagacccgtggcaagaaccaccgcaagacgcttaccagatcacccaatcccctgaagaggctccggatgaaccagaatacgttaccgtgggttttgaaaaaggaaaacccgtttacctgaacggtgagcgctacgaagagcagtggaaattgatagccaacctaaatgaaatagcgggaagacacggtgtgggaaggatagacatggttgaaaacagactcgtagggataaagagcagggagatatacgaagctcccggagccatggttctctacgaagcatacagggatttactctctttagttcttgacaggtttaccttccactacttcctcacccatattccccacgagtacgcaaagctcgtttacgaaggtctctggttcacccccttgagggaagcgcttgacgcctttacgaataaaatcgccgagttcgcaacgggagaagtaagattaaaactctacaaaggaagtgtaagcgttgttgggagacgttcacccaactccctttacgttgaagagctcgcaacttactcggaaaaggaccaatttgaccaaatagcaggtaagcacttcacaaaggtatggggacttccactgaaggttctgggaagggtgagaaaaggtaaatag

SEQ ID NO: 153725 - protein, 401 aa, Aquifex aeolicus
MKKKRVILAYSGGLDTSIIVRWLTEKGYEVITYTADVGQGEELSEIPEKARRAGAIEAIVEDLKETFAENYCLPTLRALALYEGKYPLTAALSRPLIAERLVYYAEKFNADYVAHGSTGKGNDQVRFELSVWALNPDIEVLAPVREWEFKSREEQVEYAQRFNIPVKATKEKPYSIDRNLWGVSIECGPLEDPWQEPPQDAYQITQSPEEAPDEPEYVTVGFEKGKPVYLNGERYEEQWKLIANLNEIAGRHGVGRIDMVENRLVGIKSREIYEAPGAMVLYEAYRDLLSLVLDRFTFHYFLTHIPHEYAKLVYEGLWFTPLREALDAFTNKIAEFATGEVRLKLYKGSVSVVGRRSPNSLYVEELATYSEKDQFDQIAGKHFTKVWGLPLKVLGRVRKGK

SEQ ID NO: 153726 - DNA, 1516 bp, Arabidopsis thaliana
  CDS (1)..(1485)
atggctgaaatctcggcgacttcgtttccttcttcttcttcctctgctctcgtcatccgtagctcccacaatggtagcttaaaatgtcagaatgtagctgttccaaaaactacttcccagttccaagagttatctctgaaacgaagccagcttgttggcaatgccgttgttaccggtcatgttaccggatcccgcagctgcaagaatcaagctattcgagctgttctatccggtgatggaaccgccttgactactgattcaaaggaggctggacttcgtggaaaactgaaaaaggtcgttctagcttacagtggaggcttagacacctctgtcattgtgccatggcttaaggagaactatggttgtgaagttgtgtgcttcactgctgatgttggtcagggcataaaagagttagagggtttagaacaaaaggctaaggctagtggtgcttctcagttggtcgttaaggatctcacagaggagtttgtgaaagatttcatcttcccttgtcttagagctggtgccatctatgaacgaaaatacttgcttggtacctccatggctcgacctgtcattgctaaggccatggttgatgtagcagcagaggttggagctgatgccgttgcacatgggtgtactggaaaaggaaatgaccaggttcggtttgagctcaccttcttttcattaaaccctgaacttaaagttgtggcaccatggagagaatgggaaatccaaggccgagaagatgctattgagtatgcaaagaagcataatgttcccgtcccagtgacaaagaagtccatttacagccgggacagaaacctgtggcaccttagtcatgagggtgatctattggaagatccagcaaacgagccaaagaaagatatgtacatgatgagtgtggatcctgaagatgctcctgatcagcctgaatacatcgagatcgggatagaatctggacttccagtggcgctgaacgggaaggctctgagtccagccacacttctggccgagctaaacacaataggaggaaagcacgggattgggcggattgacatggttgagaaccgtctggttgggatgaaatcacgaggtgtgtatgaaactcctggaggcactatcctctttgcagctgtacaggaactagaatccctcactctagacagagagagtattcaggtaaaagacacattagcactgaaatatgcagagatggtctacgcaggaagatggtttgatccgcttagggagtccatggacgctttcatggagaagataaccgagacaaccacgggatctgtgacactgaagctgtacaaaggatctgtgtcggttacagggcgtcagagtcctaacagtctgtatagacaggacatatcttcgtttgaagggagtgagatctacaaccaagcggatgcagccgggtttattcgtctttacgggcttccaatgaaaattagagctatgcttaagaaaattagctagaaatggttttcattcatgtcttacttggaat

SEQ ID NO: 153727 - protein, 494 aa, Arabidopsis thaliana
MAEISATSFPSSSSSALVIRSSHNGSLKCQNVAVPKTTSQFQELSLKRSQLVGNAVVTGHVTGSRSCKNQAIRAVLSGDGTALTTDSKEAGLRGKLKKVVLAYSGGLDTSVIVPWLKENYGCEVVCFTADVGQGIKELEGLEQKAKASGASQLVVKDLTEEFVKDFIFPCLRAGAIYERKYLLGTSMARPVIAKAMVDVAAEVGADAVAHGCTGKGNDQVRFELTFFSLNPELKVVAPWREWEIQGREDAIEYAKKHNVPVPVTKKSIYSRDRNLWHLSHEGDLLEDPANEPKKDMYMMSVDPEDAPDQPEYIEIGIESGLPVALNGKALSPATLLAELNTIGGKHGIGRIDMVENRLVGMKSRGVYETPGGTILFAAVQELESLTLDRESIQVKDTLALKYAEMVYAGRWFDPLRESMDAFMEKITETTTGSVTLKLYKGSVSVTGRQSPNSLYRQDISSFEGSEIYNQADAAGFIRLYGLPMKIRAMLKKIS

SEQ ID NO: 153728 - DNA, 1338 bp, Bordetella bronchiseptica
  CDS (1)..(1338): transl_table=11
atgactactattctcccgaaccttcctaccggccagaaggtcggcatcgccttttccggcggcctcgataccagcgccgcgctgctgtggatgcgccagaaaggcgccgtgccctacgcgtacaccgccaacctgggccagcccgacgagccggactacgatgaaatcccccgccgcgccatgcaatacggcgccgaagccgcccgcctggtcgactgtcgcgcgcaactggtcgccgaagggatcgccgcgctgcaggccggcgccttccatatctcgaccgccggcctgacctacttcaacaccacgcctatcgggcgcgccgtcaccggcaccatgctggtggccgccatgaaggaagacggcgtcaacatctggggcgacggcagcacgttcaagggcaacgacatcgagcgcttctaccgctacggcctgctgaccaacccggacctgaagatctacaagccctggctggaccagaccttcatcgacgagctgggcggccgcgcggaaatgtccgagtacatgcgccaggccggtttcgactacaagatgtcggccgagaaagcctactcgaccgactccaacatgctcggcgccacccacgaggccaaggacctggagctcctgaactccggcatccgtatcgtgcagcccatcatgggcgtggccttctggcaggacagcgtgcagatcaaggccgaggaagtgacggtgcgcttcgaggaaggccagccggtcgccctcaacggcgtcgagtacgccgacccggtcgaactgctgctggaagccaaccgcatcggcggccgccacggcctgggcatgagcgaccagatcgagaaccgcatcatcgaagccaagagccgcggcatctacgaagccccgggcctggcgctgctgttcatcgcctacgagcgcctggtcaccggcatccataacgaagacaccatcgagcagtaccgcgagaacggccgcaagctgggccgcctgctgtaccagggccgctggttcgacccgcaggccatcatgctgcgcgaaaccgcacagcgctgggtcgcgcgcgccatcaccggcgaagtcacgctcgaactgcgccgcggcaacgactactcgctgctgaacaccgaatcggccaacctgacgtacgcgcccgagcggctgtccatggagaaggtggaaaacgcccccttcacgccggccgaccgcatcggccagctcaccatgcgcaacctcgacatcgtcgatacccgcgaaaagctgttcacctacgtcaagaccggcttgctggccccgtcggccggctcggcgctgccgcagatcaaggacggcaagaaatag

SEQ ID NO: 153729 - protein, 445 aa, Bordetella bronchiseptica
MTTILPNLPTGQKVGIAFSGGLDTSAALLWMRQKGAVPYAYTANLGQPDEPDYDEIPRRAMQYGAEAARLVDCRAQLVAEGIAALQAGAFHISTAGLTYFNTTPIGRAVTGTMLVAAMKEDGVNIWGDGSTFKGNDIERFYRYGLLTNPDLKIYKPWLDQTFIDELGGRAEMSEYMRQAGFDYKMSAEKAYSTDSNMLGATHEAKDLELLNSGIRIVQPIMGVAFWQDSVQIKAEEVTVRFEEGQPVALNGVEYADPVELLLEANRIGGRHGLGMSDQIENRIIEAKSRGIYEAPGLALLFIAYERLVTGIHNEDTIEQYRENGRKLGRLLYQGRWFDPQAIMLRETAQRWVARAITGEVTLELRRGNDYSLLNTESANLTYAPERLSMEKVENAPFTPADRIGQLTMRNLDIVDTREKLFTYVKTGLLAPSAGSALPQIKDGKK

SEQ ID NO: 153730 - DNA, 1338 bp, Bordetella pertussis
  CDS (1)..(1338): transl_table=11
atgactactattctcccgaaccttcctaccggccagaaggtcggcatcgccttttccggcggcctcgataccagcgccgcgctgctgtggatgcgccagaaaggcgccgtgccctacgcgtacaccgccaacctgggccagcccgacgagccggactacgatgaaatcccccgccgcgccatgcaatacggcgccgaagccgcccgcctggtcgactgtcgcgcgcaactggtcgccgaagggatcgccgcgctgcaagccggcgccttccatatctcgaccgccggcctgacctacttcaacaccacgcctatcgggcgcgccgtcaccggcaccatgctggtggccgccatgaaggaagacggcgtcaacatctggggcgacggcagcacgttcaagggcaacgacatcgagcgcttctaccgctacggcctgctgaccaacccggacctgaagatctacaagccctggctggaccagaccttcatcgacgagctgggcggccgcgcggaaatgtccgagtacatgcgccaggccggtttcgactacaagatgtcggccgagaaagcctactcgaccgactccaacatgctcggcgccacccacgaggccaaggacctggagctcctgagcgccggcatccgtatcgtgcagcccatcatgggcgtggccttctggcaggacagcgtgcagatcaaggccgaggaagtgacggtgcgcttcgaggaaggccagccggtcgccctcaacggcgtcgagtacgccgacccggtcgaactgctgctggaagccaaccgcatcggcggccgccacggcctgggcatgagcgaccagatcgagaaccgcatcatcgaagccaagagccgcggcatctacgaagccccgggcctggcgctgctgttcatcgcctacgagcgcctggtcaccggcatccataacgaagacaccatcgagcagtaccgcgagaacggccgcaagctgggccgtctgctgtaccagggccgctggttcgacccgcaggccatcatgctgcgcgaaaccgcacagcgctgggtcgcgcgcgccatcaccggcgaagtcacgctcgaactgcgccgcggcaacgactactcgctgctgaacaccgaatcggccaacctgacgtacgcgcccgagcggctgtccatggagaaggtggaaaacgcccccttcacgccggccgaccgcatcggccagctcaccatgcgcaacctcgacatcgtcgatacccgcgaaaagctgttcacctacgtcaagaccggcttgctggccccgtcggccggctcggcgctgccgcagatcaaggacggcaagaaatag

SEQ ID NO: 153731 - protein, 445 aa, Bordetella pertussis
MTTILPNLPTGQKVGIAFSGGLDTSAALLWMRQKGAVPYAYTANLGQPDEPDYDEIPRRAMQYGAEAARLVDCRAQLVAEGIAALQAGAFHISTAGLTYFNTTPIGRAVTGTMLVAAMKEDGVNIWGDGSTFKGNDIERFYRYGLLTNPDLKIYKPWLDQTFIDELGGRAEMSEYMRQAGFDYKMSAEKAYSTDSNMLGATHEAKDLELLSAGIRIVQPIMGVAFWQDSVQIKAEEVTVRFEEGQPVALNGVEYADPVELLLEANRIGGRHGLGMSDQIENRIIEAKSRGIYEAPGLALLFIAYERLVTGIHNEDTIEQYRENGRKLGRLLYQGRWFDPQAIMLRETAQRWVARAITGEVTLELRRGNDYSLLNTESANLTYAPERLSMEKVENAPFTPADRIGQLTMRNLDIVDTREKLFTYVKTGLLAPSAGSALPQIKDGKK

SEQ ID NO: 153732 - DNA, 1338 bp, Bradyrhizobium japonicum
  CDS (1)..(1338): transl_table=11
atgaccacgatcctgaaaagcctgcccaagggcgagaaagtcggcatcgcgttttcgggcggcctcgacaccagcgcggcgctgctctggatgaagcagaagggcgcgcgctgctacgcctataccgccaatctcggccagcccgatgaagccgactacaacgagatcccgcgcaaggcgcaggaattcggtgccgagaaggccgtgctggtcgattgccgcacgcagctcgtccacgaaggcatcgccgcgatccagtccggcgccttccacatctcgaccggcggcatcacctatttcaacaccacgccgctcggccgtgccgtcaccggcacgatgctggtcgcggcgatgaaggaggacggcgtcaacatctggggcgacggctcgaccttcaagggcaacgacatcgagcgcttctatcgctacggcctgctcaccaatccgagcctgcgcatctacaagccctggctcgaccagcagttcatcgacgaactcggcggccgcgccgagatgtcggcgttcatgaccgcccagggcttcgcctacaagatgagcgccgagaaggcgtactcgaccgacagcaacctgctcggcgccacgcatgaagccaaggatctcgagagcctcgacagcggcatcaagatcgtcaacccgatcatgggcgtgccgttctggcgcgaggactgcaacgtcaaggccgagaaggtcgtcgtgcgtttcgaagaaggccagcccaccgcgctgaacggccagaccttcaccgatcccgtcgcgctgttcctcgaagccaatgcgatcggcggccgccacggcctcggcatgagcgaccagatcgagaaccgcatcatcgaggccaagagccgcggcatctatgaggcgcccggcatggcgctgttgcacatcgcctatgagcgcctcgtcaccggcatccacaacgaggacaccatcgagcagtaccgcatcagcggcatgcgtctcggccgcctgctctatcagggccgctggttcgattcgcaggccctgatgctgcgcgagaccgcgcagcgctgggtcgcgcgcgccgtcaccggcgaggtgacgctcgagctgcgccgcggcaacgattattcgatcctaaacaccgagagccccaacctcacctatgcgccggagcggctcagcatggagaaggtcgaggatgccgccttcacgccggccgaccgcatcggccagctcaccatgcgcaacctcgacatcgccgacacgcgcaccaagctgaagctctatacggacaccggcctgctttcaggcagcgaaggctcgcagatcttccggctggagaacgacaagggctga

SEQ ID NO: 153733 - protein, 445 aa, Bradyrhizobium japonicum
MTTILKSLPKGEKVGIAFSGGLDTSAALLWMKQKGARCYAYTANLGQPDEADYNEIPRKAQEFGAEKAVLVDCRTQLVHEGIAAIQSGAFHISTGGITYFNTTPLGRAVTGTMLVAAMKEDGVNIWGDGSTFKGNDIERFYRYGLLTNPSLRIYKPWLDQQFIDELGGRAEMSAFMTAQGFAYKMSAEKAYSTDSNLLGATHEAKDLESLDSGIKIVNPIMGVPFWREDCNVKAEKVVVRFEEGQPTALNGQTFTDPVALFLEANAIGGRHGLGMSDQIENRIIEAKSRGIYEAPGMALLHIAYERLVTGIHNEDTIEQYRISGMRLGRLLYQGRWFDSQALMLRETAQRWVARAVTGEVTLELRRGNDYSILNTESPNLTYAPERLSMEKVEDAAFTPADRIGQLTMRNLDIADTRTKLKLYTDTGLLSGSEGSQIFRLENDKG

SEQ ID NO: 153734 - DNA, 1230 bp, Buchnera aphidicola subsp
  CDS (1)..(1230): transl_table=11
atgcgaaataaaaacatcaaaaaagttgtactagcttattccggtggattagatacatcagctattattccttggataaaagaaaattactcttcagaagtaatagcgtttgtagcaaatgtaggacaaaatcaagcggatttaaaagacattgaatacaaagctctaaaatctggagcatctcaatgtattattaaagatttaagagaagagtttatacgagattatgtatatcctgttttaaaatctggagcattgtatgaggaaaattatttattaggtactgctttagctcgtcctattattgctaaatcacaagtagatctagctctaaaattaaaagctgatggtgtttgtcatggcgctactggaaaaggtaatgatcaagttcgatttgaaactgcatatgtaggattagctccagaattaaaaattattgcaccatggcgagaatggagttttaaatctcgaggagaattattatcttatctaaaagaaaaaaatgttaaaactactgcttctattgaaaaaatttatagcaaagatgaaaatgcttggcatgtttctactgaaggaggtgttttagaagatttatggaataaaccgaatcaggattgttggacttggactaatgatccaaaagatgctcctaatgttccagaaataatttctattaagataaaaaacggtagcgttattgctgttaataatgaatttttgagtccgtttaagtgtttagaaaaattaaatttagttggaattaaacacggtataggacgtattgatgttgttgaaaatcgtttagtaggtatgaagtcgcgagcgtgttatgaaactccaggtggaactattttagtaaatgcgttacgttcacttgaacagttagtattagatagagatagttataaatggaggcaacaaatagctttagaaatgtcttatgttatttataatggaaattggtttagtccttttcggaaatcattgcaagctgcggctacagagttagcgactgaaatagatggagaagttattttagaattatataaaggtacagtaacagctattaggaagttttctcctaattctttatattctaaggaatttgcaacatttgatcaagacgaggtatatcgtcaatctgatgctgatggatttattaagttatattctttgccttcgaagataagagctataaataagtgtatgaataaggcgttaatgaagtag

SEQ ID NO: 153735 - protein, 409 aa, Buchnera aphidicola subsp
MRNKNIKKVVLAYSGGLDTSAIIPWIKENYSSEVIAFVANVGQNQADLKDIEYKALKSGASQCIIKDLREEFIRDYVYPVLKSGALYEENYLLGTALARPIIAKSQVDLALKLKADGVCHGATGKGNDQVRFETAYVGLAPELKIIAPWREWSFKSRGELLSYLKEKNVKTTASIEKIYSKDENAWHVSTEGGVLEDLWNKPNQDCWTWTNDPKDAPNVPEIISIKIKNGSVIAVNNEFLSPFKCLEKLNLVGIKHGIGRIDVVENRLVGMKSRACYETPGGTILVNALRSLEQLVLDRDSYKWRQQIALEMSYVIYNGNWFSPFRKSLQAAATELATEIDGEVILELYKGTVTAIRKFSPNSLYSKEFATFDQDEVYRQSDADGFIKLYSLPSKIRAINKCMNKALMK

SEQ ID NO: 153736 - DNA, 1338 bp, Burkholderia cepacia
  CDS (1)..(1338): transl_table=11
atgagcacgattctcgaaagcctcccgaccggccagaaggtcggtatcgccttctccggcggcctggacaccagcgccgcgctgcactggatgaaactgaagggcgccgtcccgtacgcgtacacggcaaacctcggccagcccgacgaagacgattacgatgcgatcccgaaacgtgcgctcgaatacggtgcggccggtgcccgcctgatcgactgccgcgcgcaactcgtcgccgaaggcatcgccgcgctgcaaagcggcgcgttccacatcacgaccgccggcgtcacgtacttcaacacgacgccgatcggccgcgccgtgacgggcacgatgctcgtcgccgcgatgaaggaagacggcgtgaacatctggggcgacggcagcacgtacaagggcaacgacatcgagcgcttctaccgctacggtctgctcgtgaacccggatctgaagatctacaagccgtggctcgaccagacgttcatcgacgaactcggcggccgcgcggaaatgtccgaattcatgcgtcagtcgggcttcgcgtacaagatgtcggccgagaaggcgtattcgaccgactcgaacctgctcggcgcgacgcacgaggcgaaggatctggaaagcctcgaaagcgggatcaagatcgtgaacccgatcatgggcgtcgcgttctggcgcgacgacgtgaagatcgccgccgaagaagtgacggtgcgcttcgaagccggccagccggtcgcgctgaacggcgtcgagttcaaggatcaggtcgagttgctgctcgaggcgaaccgcatcggcggccgtcacggcctcgggatgagcgaccagatcgagaaccgcatcatcgaggcgaagagccgcggcatctatgaagcgccggggctcgcgctgctgtatatcgcttacgagcgtctcgtgacgggcatccacaacgaagacacgatcgagcagtaccgcgagaacggtcgccgtctcggtcgcctgctgtatcagggccgctggttcgacccgcaggcgatcatgctgcgcgaaacggcccagcgctgggtcgcgcgcgcgatcaccggcgaagtgaagatcgagctgcgccgcggcaacgactattcgattctcagcacgaagtcgccgaacctcacgtatcagccggagcgtctgtcgatggagaaggtcgcgtcgacgttctcgccgcgcgaccggatcggtcagctgacgatgcgcaatctcgacatcaccgatacgcgcgacaagctgcgcgtgtacacgcaggtcgggctgctgacgccgggtgaagcgtcggcgctgccgcaaatcaagggcgatagcggggagtaa

SEQ ID NO: 153737 - protein, 445 aa, Burkholderia cepacia
MSTILESLPTGQKVGIAFSGGLDTSAALHWMKLKGAVPYAYTANLGQPDEDDYDAIPKRALEYGAAGARLIDCRAQLVAEGIAALQSGAFHITTAGVTYFNTTPIGRAVTGTMLVAAMKEDGVNIWGDGSTYKGNDIERFYRYGLLVNPDLKIYKPWLDQTFIDELGGRAEMSEFMRQSGFAYKMSAEKAYSTDSNLLGATHEAKDLESLESGIKIVNPIMGVAFWRDDVKIAAEEVTVRFEAGQPVALNGVEFKDQVELLLEANRIGGRHGLGMSDQIENRIIEAKSRGIYEAPGLALLYIAYERLVTGIHNEDTIEQYRENGRRLGRLLYQGRWFDPQAIMLRETAQRWVARAITGEVKIELRRGNDYSILSTKSPNLTYQPERLSMEKVASTFSPRDRIGQLTMRNLDITDTRDKLRVYTQVGLLTPGEASALPQIKGDSGE

SEQ ID NO: 153738 - DNA, 1221 bp, Campylobacter jejuni
  CDS (1)..(1221): transl_table=11
atgaaaaatgaagtaaaaaaagtagttttagcgtattctggggggcttgatacgagcattattttaaaatggcttcaagatgagtataattgtgaagttgtaacttttacagcagatattggtcaaggtgaagaactcgaacctgcaagaaaaaaagccctttctttaggcataaaagaagaaaatattttcattaaagatttaagagatgaatttgttaaagattatgtatttcctatgtttagagccaatgcgatttatgaaggagaatatcttttaggaacaagtatagcaagaccacttatagcaaaaactcaagcacaaatcgccctgcaaacaggtgctgatgcagtaagtcatggtgccacaggtaaaggaaatgatcaagtgcgttttgaacttggttatcttgcttttaatcccgatttaaaaatcatcgctccatggcgtgagtgggatttaaacagtcgtgaaaaactccttgcttatgcacaaaaacacggtattgatatttctaagaaaaaaggaaaatctccttattctatggacgcaaatttacttcatatttcttacgaaggacttgtcttagaagatcctgcacacgcacctgaagaagatatgtggagatggagtaaaagcccaaaagatgctccaaatgaaagtgaaattatagaacttgatttccaaaaaggagatttagtagcgataaatggagaaaaactaagtcctgcaggacttttaaccaaacttaacgaactaggctgcaaacacggtataggacgccttgatatagtagaaaatcgctatgtaggtatgaaaagccgtggttgttacgaaacaccaggtggtaccatacttttaaaagcacacagagcgcttgaaagcatcacgcttgatagagaagcagcacacttaaaagatgaactcatgccaaaatacgcgagtttaatttataatggctattggttctcgcctgaaagaatgatgcttcaagccttaatcgatgagtctcaaattcacgccaatggcagagtaaaactcgagctttataaaggcaatgtgatagttataggacgcgaaagttcgaacgatagcttgtttaacgcagcttattgtacttttgaagaagatgaagtgtataatcaaaaagacgcagcaggctttatcaagcttaatgctttgcgttttatcatcgcaggaaaaaatggaagaaaattttaa

SEQ ID NO: 153739 - protein, 406 aa, Campylobacter jejuni
MKNEVKKVVLAYSGGLDTSIILKWLQDEYNCEVVTFTADIGQGEELEPARKKALSLGIKEENIFIKDLRDEFVKDYVFPMFRANAIYEGEYLLGTSIARPLIAKTQAQIALQTGADAVSHGATGKGNDQVRFELGYLAFNPDLKIIAPWREWDLNSREKLLAYAQKHGIDISKKKGKSPYSMDANLLHISYEGLVLEDPAHAPEEDMWRWSKSPKDAPNESEIIELDFQKGDLVAINGEKLSPAGLLTKLNELGCKHGIGRLDIVENRYVGMKSRGCYETPGGTILLKAHRALESITLDREAAHLKDELMPKYASLIYNGYWFSPERMMLQALIDESQIHANGRVKLELYKGNVIVIGRESSNDSLFNAAYCTFEEDEVYNQKDAAGFIKLNALRFIIAGKNGRKF

SEQ ID NO: 153740 - DNA, 1218 bp, Clostridium perfringens
  CDS (1)..(1218): transl_table=11
atgtatatgaaaaaatttaataaagtaattttagcctattcaggaggattagatacttcaataataatcccttggttaaaagaaaattatggatgtgaagttattgcagtggtaggaaatgttggacaatctgatgaattagttggattaaaagaaaaagctataaaaactggggcgtctaaaatatatattgaggatctaactaaagaatttgtagaagattacatctttcctaccatacaagctggggcaaaatatgaaggaaagtatctactaggcacttcttttgctagacctataatagcaaaaagattagtagaaattgcaaaacttgaaggtgcagatgctatttgtcatggatgtactggaaaaggaaatgaccaagttcgttttgaattagcaattaaaacttttaatccagaaatgcaaattattgctccatggagaacttgggaaattaaatctagagaagaagaaatacaatatgctatagacaatgaagttcctataaatattacttatgaaacaaattatagtaaagataaaaatctatggcatttaagccatgaaggtttagatttagagtttcctgaaaatgaacctaaatatgataaaattcttgaattatgtaataccttagaaaaggctcctaatgaagctgaatatattactttaggttttgaaaaaggaattgcaacctcattaaatggtgaaaaactagatggagtcactcttttacaagaacttaataaaattggtggaaaacatggtattggagttatagatatggttgaaaatagattggttggtatgaaatcaagaggagtatatgaaactccaggaggatctattttatataaagctcataaagatttagaagaattatgtttagataaggaaacttcccattataaagaaatagtttccttaaaattcgctgatttagtttataatggtcaatggtttaccccattgagagaagccttatctgcctttatatcaaaaactcaagaaactgtaactggcgaaataaaattaaaactatataaaggaaatataataaatgctggaatgacatctccatattctttatacagcgaagaatatgctacctttggtgaagatggaatatataatcaaaaggacgctgaaggctttattaatctttttagcttaccatctatagtacaagctaaaatggctcaaaagttaaattaa

SEQ ID NO: 153741 - protein, 405 aa, Clostridium perfringens
MYMKKFNKVILAYSGGLDTSIIIPWLKENYGCEVIAVVGNVGQSDELVGLKEKAIKTGASKIYIEDLTKEFVEDYIFPTIQAGAKYEGKYLLGTSFARPIIAKRLVEIAKLEGADAICHGCTGKGNDQVRFELAIKTFNPEMQIIAPWRTWEIKSREEEIQYAIDNEVPINITYETNYSKDKNLWHLSHEGLDLEFPENEPKYDKILELCNTLEKAPNEAEYITLGFEKGIATSLNGEKLDGVTLLQELNKIGGKHGIGVIDMVENRLVGMKSRGVYETPGGSILYKAHKDLEELCLDKETSHYKEIVSLKFADLVYNGQWFTPLREALSAFISKTQETVTGEIKLKLYKGNIINAGMTSPYSLYSEEYATFGEDGIYNQKDAEGFINLFSLPSIVQAKMAQKLN

SEQ ID NO: 153742 - DNA, 1221 bp, Dehalococcoides ethenogenes
  CDS (1)..(1221): transl_table=11
atgtctgaaaaagttgtactggcatattccggcgggctggatacatcggccgccgtcaaatggcttcaggaaaaatacggcatggacgttattgccgttaccatagacgtgggtaatgagaaagactttaccctgataaaagaaaaagccctgaaggtaggggctaaaaaggcctacgtacgggatgtacgcaaggaatttgccgaggattatatctggaaggctatcaaggccaattccatgtacgagggtgtctatccgctggctaccgcccttgcccgccccctgattgccaaggttatggtagacatagccatggaagaaggggctaccgccattgcccacggctgcaccggcaaaggcaatgaccaggtacgttttgacgtgggcataaacacccttgccccccatttgaagattattgctcccgcccgccagtggggcatgacccgtgagcaaactatggaatacgcccagaaatggggcattcccgtacctatttcagtcaaaaaccctttctccatagatgaaaatctgtgggggcggagtatagagtgcggtctgctggaagacccctggaacgagcctattcccgaagtatttgcctggacccgcccggtggaagcaaccccggacgcacctgagtacctggaagtagagtttgaacagggcgtgccggtagctgtaaacggggaaaaactgtctcctttagcccttatacagaaagtgcatgatattgccggactgcatggggtaggccgtattgaccacgtggaaaaccgtctggtaggcattaaatcccgcgagatttatgaagccccggcggcggtggtgctgattgccgcccaccaggctctggaagccatgaccctttccaagagccagttacgctttaagcagatggtggaagccacctattcggatattatttataacgggctgtggttctctgccctgcggcaggatttggacgcttttatagaatccagccagcgctttgtcagcggcacagtccgcttaaagctttccaagggcagcttccgggtagtgggacgcaaatccccctattccctgtaccacaagggtatggccacctatgataagggagaccagtttgacccgtcttcggcagtgggtttcataaccctgtggggacttcaggccaaactgcaggcccagctccagcctattctggaagaagaaaaggggaataaatcctag

SEQ ID NO: 153743 - protein, 406 aa, Dehalococcoides ethenogenes
MSEKVVLAYSGGLDTSAAVKWLQEKYGMDVIAVTIDVGNEKDFTLIKEKALKVGAKKAYVRDVRKEFAEDYIWKAIKANSMYEGVYPLATALARPLIAKVMVDIAMEEGATAIAHGCTGKGNDQVRFDVGINTLAPHLKIIAPARQWGMTREQTMEYAQKWGIPVPISVKNPFSIDENLWGRSIECGLLEDPWNEPIPEVFAWTRPVEATPDAPEYLEVEFEQGVPVAVNGEKLSPLALIQKVHDIAGLHGVGRIDHVENRLVGIKSREIYEAPAAVVLIAAHQALEAMTLSKSQLRFKQMVEATYSDIIYNGLWFSALRQDLDAFIESSQRFVSGTVRLKLSKGSFRVVGRKSPYSLYHKGMATYDKGDQFDPSSAVGFITLWGLQAKLQAQLQPILEEEKGNKS

SEQ ID NO: 153744 - DNA, 1203 bp, Desulfovibrio desulfuricans
  CDS (1)..(1203): transl_table=11
atgggtaaagaaatcaaaaaggtagtgcttgcctattccggcgggctggatacgtcggtcatcctgaagtggattgccaagacatatgattgcgaagtggtgacgctgactgccgatctggggcaggaggaagatctggacggcgtggatgaaaaagcgctgcgcacaggggccaccagagcctatgtggaagacctgcgcgaagagttcgcccgcgatttcatttttcccatgatgcgtgcctgcgccatttacgaaggccgctatctgctgggcacttccatcgcccgtccgctcattacccgccgtctggtggaaatagcccacgcggaaggagcacaggcagtggcccacggtgctaccggcaaaggcaacgatcaggtgcggttcgagctggcttccgccgcacttgacccgtcgctcaaggtcattgctccgtggcgcgaatgggatttccgctcccgtaccgacctgctcaactttgctgcagaaaatgatattcccgttatttctgccggtaaccgcaaactgtacagtatggacagaaacatgctgcactgcagctttgaaggcggcgaactggaagacccgtggaacgagccgggaccgggcagttatatcatggcagtaccggtagagcaggctcctgacgagccggaatacatcaccatcgattttgaaaaaggcaacgccgtggcaatcaacggtcaggccatgtcgcctgccgccatcatcaaaacgctgaacacacttggcggcaagcacggtgtaggacgtctggacatggtggaaaaccgttttgtgggcatgaagtcgcgcggtgtgtatgaaacccccggcggcaccgtgctgcatgcggcacaccgcgacctcgaaggcatatgccttgaccgtgaagccctgcatctgcgcgacagcctgataccccgctacgccgcggccgtgtacaacggtttctggtactcgccggagcgcgaagccctgcaggctctggtagacaagacacaggaaaacgtgaccggaacagtgcgcgtgaagctgtataaaggcaatgtcgtgcccgtgggccgcaagtcgccgtattcactgtaccgtatggatcttgcgacctttgaggaagatgaagtttacaatcaggcagacgccgccggctttatccgcctgaacagtctgcgcattcagggttacggcaggagaagctga

SEQ ID NO: 153745 - protein, 400 aa, Desulfovibrio desulfuricans
MGKEIKKVVLAYSGGLDTSVILKWIAKTYDCEVVTLTADLGQEEDLDGVDEKALRTGATRAYVEDLREEFARDFIFPMMRACAIYEGRYLLGTSIARPLITRRLVEIAHAEGAQAVAHGATGKGNDQVRFELASAALDPSLKVIAPWREWDFRSRTDLLNFAAENDIPVISAGNRKLYSMDRNMLHCSFEGGELEDPWNEPGPGSYIMAVPVEQAPDEPEYITIDFEKGNAVAINGQAMSPAAIIKTLNTLGGKHGVGRLDMVENRFVGMKSRGVYETPGGTVLHAAHRDLEGICLDREALHLRDSLIPRYAAAVYNGFWYSPEREALQALVDKTQENVTGTVRVKLYKGNVVPVGRKSPYSLYRMDLATFEEDEVYNQADAAGFIRLNSLRIQGYGRRS

SEQ ID NO: 153746 - DNA, 1191 bp, Desulfovibrio vulgaris
  CDS (1)..(1191): transl_table=11
atgtccggtatcaagaaggtcgttctcgcctactctggcggtctcgatacgtccgtcatcctgaagtggctcgccgtcacctataactgcgaagtggtgaccctcaccgccgacctcggtcaggaagaggacctcgacggcgtggacgacaaggccatgcgcacgggagcctcccgcgcctacgtcgaagacctgcaggaagagttcgcccgcgacttcatcttccccatgatgcgcgccggggcggtctatgaaggccgctacctgctgggcacctccatcgcgcgcccgctcatcgccaagcgccttgtcgagatcgctcgcgccgaaggcgcgcaggccgtggcccacggcgccaccggcaagggcaacgaccaggtgcgcttcgaactggcagtgaacgccctcgcacccgacctgcgcgtcatcgcgccgtggcgagaatgggacctgcgctcgcgcacgcagctcaacgccttcgccgaagagcacggcatccccatctccagttcggccaagcagtacagcatggaccgcaacatgctccactgcagcttcgagggcggcgaacttgaagacccgtggaacgaacccggccccaacagctacgtcatggccgttcccatggaacaggcccccgacgaggccgagtacatcagcatcgacttcgaacacggcaaccccgtggccgtgaacggcgaacgcctctcgcccgccgcgctggtcaagaagctcaacagcatcggcggacgtcacggcatcggccgtctcgacatggtcgagaaccgcttcgtgggcatcaagtcgcgcggcgtgtacgagacccccggcggtacgctcatccacatcgcccaccgagacctcgaaggcatctgcatcgaccgcgagaccatgcacctgcgcgacgccatgctgccccgctacgccgcagccatctacaacggcttctggttcgcccccgaacgcgaggccatgcaggcgatgatcgacgtctcgcagcagcgcgtcaccggcaccgtgcgcctgaagctgtacaagggcaatgcgtggcccgtgggtcgccagtcgcccaacaccctctactgccacgacctcgccaccttcgaagactgcgccacctacgaccacaaggacgcggcaggcttcatcaaactgcagggtctgcgcatccgcggttacaagaagggatag

SEQ ID NO: 153747 - protein, 396 aa, Desulfovibrio vulgaris
MSGIKKVVLAYSGGLDTSVILKWLAVTYNCEVVTLTADLGQEEDLDGVDDKAMRTGASRAYVEDLQEEFARDFIFPMMRAGAVYEGRYLLGTSIARPLIAKRLVEIARAEGAQAVAHGATGKGNDQVRFELAVNALAPDLRVIAPWREWDLRSRTQLNAFAEEHGIPISSSAKQYSMDRNMLHCSFEGGELEDPWNEPGPNSYVMAVPMEQAPDEAEYISIDFEHGNPVAVNGERLSPAALVKKLNSIGGRHGIGRLDMVENRFVGIKSRGVYETPGGTLIHIAHRDLEGICIDRETMHLRDAMLPRYAAAIYNGFWFAPEREAMQAMIDVSQQRVTGTVRLKLYKGNAWPVGRQSPNTLYCHDLATFEDCATYDHKDAAGFIKLQGLRIRGYKKG

SEQ ID NO: 153748 - DNA, 1260 bp, Drosophila melanogaster
  CDS (1)..(1260)
atgcctaaggaaaccgtaattttggcttactccggtggcctggacactagttgcgtcctcaagtggttgctggacaagcagtatgaggtcatttgcgtcctggccgatgtaggccagaaggaagatttcaccgccgccgagaagaaggctcttaagattggcgcaaaaaaggttatcgtggccgatgtcaagcagtccttcgtcgaggactatatctggccggccgtacaaatgggtctggtgtacgaggagcgctatctactgggcacttctctggccaggccctgcatcagtgtagccctgatggaggtcgcccgcgagtatggagccaagtatctggcccacggagccaccggaaagggaaacgaccaggtgcgcttcgagttgtgcgcctacgccctgaaaccggatctgaagatcatcgctccctggagggatgtagaattctgctgccagtttcaaggtcgacaggacctcattgcctatgcccagcaacacggaatcgaggtaagcgccaagccagccacaccctggagcaccgatgccaacatcctgcacatcagctacgagtccggaatactcgaagatcccaacacagtggctccggaaaatctctacgagatgacagtcgatcccctgacaagggctccacgggatccggttcacttggtcattcaatttgatcggggactgccctccagtgtggaggatttgcccggcggtcgggtctacactaaacccctggagatgctagatttcctcaataagcttggcggatcatatggcattgggcggattgacatcgtggaaaatcgctttgtgggactgaagtcccggggggtgtacgagacgcctggaggcaccatcctctttgctgcccaccaggacctcgaggtgtttgctttggaccgcgaagtactccgcaccaagcaggttctccgggatcgcatggccgactacgtgtacaatggcttctggttcagtcccgaggcaatttatgcccgtaaatgtatcgagttggccgagcagcgggtctccgggaaggtcaccgtggaactggccccaggctattgccgtgccatcgcccgaaaggcggcgaaggatgtgggagctctttacaacgaacagctcgtatctatggacgtccatggtggctatgtgccgcaggatgccggtggatttatcgccatcaatgcggtccgaatcagggaacatgtccgagcgttcggtgcctacgatgtgccaacgaagaaaaactga

SEQ ID NO: 153749 - protein, 419 aa, Drosophila melanogaster
MPKETVILAYSGGLDTSCVLKWLLDKQYEVICVLADVGQKEDFTAAEKKALKIGAKKVIVADVKQSFVEDYIWPAVQMGLVYEERYLLGTSLARPCISVALMEVAREYGAKYLAHGATGKGNDQVRFELCAYALKPDLKIIAPWRDVEFCCQFQGRQDLIAYAQQHGIEVSAKPATPWSTDANILHISYESGILEDPNTVAPENLYEMTVDPLTRAPRDPVHLVIQFDRGLPSSVEDLPGGRVYTKPLEMLDFLNKLGGSYGIGRIDIVENRFVGLKSRGVYETPGGTILFAAHQDLEVFALDREVLRTKQVLRDRMADYVYNGFWFSPEAIYARKCIELAEQRVSGKVTVELAPGYCRAIARKAAKDVGALYNEQLVSMDVHGGYVPQDAGGFIAINAVRIREHVRAFGAYDVPTKKN

SEQ ID NO: 153750 - DNA, 1203 bp, Frankia sp
  CDS (1)..(1203): transl_table=11
gtgaccgaacgcgtcgtgcttgcctactcgggcggcctcgacacgtccgtggccatcggttggatcggcgccgagaccggcgccgacgtcgtcgcgctggcggttgacgtcggccagggcggcgaggacctcgaggccatccggcagcgcgccctcacctgtggcgcggtcgagtcgatcgtcgtcgacgcccgtgaggagttcgccgagtccttcgtcgctccggcgattaagagcaatgcgctctacatggaccggtatccgttgatctcgtccctgtcgcgacccgtcatcgtcaggcatctggtcgccgcggcccgcgagcacggggcggacgccatcgcgcacggctgcaccggcaagggcaacgaccaggtgcgcttcgaggtcggggtggcggcgctcgcccccgggctgagcgtgctcgccccggtgcgcgactcggggatgacccgggacaaggcgatcgccttcgcggaggaacgcggcctgccgatcgacgtgtcgaagaaatcgccgtattccatcgaccagaacctgtggggccgcaccgccgagtgcggcgtcctcgaggacccgtgggcccagccgccggaggatgtcttcgtctactccgcggaccccaccgtcgcgcggatccccgacgaggtgaccatctcgttcatcgacggtgtcccggtggggttggacgggcgctccctcccgctcgccgatctcgtcgccgagctcaacgtccgggcgggcgcccacggcgtgggccggatcgacctgatcgaggaccggctcgtcggcatcaagagccgggagatctacgagtgcccggcggcgatcacgctgctaacggcccaccgggacctcgaggacctcacgcttgagcgggacgtcgcccggttcaagcggggcatcgaccagcggtggggtgagatcgtctacgacggtctgtggtactcgccgctgaagagcgcgttggacgccttcgtcgactccgccagcgccggagtgtccggggaggtgcggatccggctcgtgggtggcgtcgcccaggtcgtcggccggcgcagcccggccagtctgtacgaccacgcactggccacctacgacgccggcgaccagttcgaccagcgcgacgcccgcgggttcatcgagctctggggtctgccgacgaaggtctgggcggcgcgcgagcagcggctgaacccgtga

SEQ ID NO: 153751 - protein, 400 aa, Frankia sp
MTERVVLAYSGGLDTSVAIGWIGAETGADVVALAVDVGQGGEDLEAIRQRALTCGAVESIVVDAREEFAESFVAPAIKSNALYMDRYPLISSLSRPVIVRHLVAAAREHGADAIAHGCTGKGNDQVRFEVGVAALAPGLSVLAPVRDSGMTRDKAIAFAEERGLPIDVSKKSPYSIDQNLWGRTAECGVLEDPWAQPPEDVFVYSADPTVARIPDEVTISFIDGVPVGLDGRSLPLADLVAELNVRAGAHGVGRIDLIEDRLVGIKSREIYECPAAITLLTAHRDLEDLTLERDVARFKRGIDQRWGEIVYDGLWYSPLKSALDAFVDSASAGVSGEVRIRLVGGVAQVVGRRSPASLYDHALATYDAGDQFDQRDARGFIELWGLPTKVWAAREQRLNP

SEQ ID NO: 153752 - DNA, 1335 bp, Haemophilus influenzae
  CDS (1)..(1335): transl_table=11
atgtcaaatactattctacagaatttacctaaaggacaaaaagtagggatcgctttctctggtggtttagacactagtgcagcattactttggatgcgtcaaaaaggcgcagtgccttatgcttacaccgctaatttagggcaacccgatgaagatgattacaacgcaatccctaaaaaagccatggcgtatggtgctgaaaatgctcgcttaattgattgtcgtgctcagcttgctcacgagggaattgccgcaattcaatgtggtgcattccatatttctacaggcggaattccttatttcaacacgactccacttggtcgcgcagtaacaggcacaatgctcgttgcagcaatgaaagaagatgatgtaaacatttggggcgacggctccactttcaaagggaatgatattgaacgtttctatcgttatggtttattaacgaacccgaatttaaaaatctataaaccttggttagatgtacaatttattgaagaacttggcggtcgtttagaaatgtctcaatttcttattgaaaatggttttgactataaaatgtccgttgaaaaagcctattccactgattccaatatgctcggcgcaacccatgaagcaaaagacttagaacaattaagcacaggaatgaaaattgttaagccgattatgggtgtcgcattttgggatgaaaaggttgaaattaaacctgaaacagtcacagtcacttttgaagatggcgtacctgtggcattaaatggcaaacattttgataatgctgttgatcttattctagaagccaatcgtattggtgggcgtcatggtttaggaatgtcagaccaaatcgaaaatcgtattattgaagccaaatctcgtggtatttatgaagcaccaggaatggcattattgcatatcgcttacgaacgtttagtcacaggtattcacaatgaagataccatcgaacaatatcgtattaatggcattcgcttaggtcgtttgttatatcaaggtcgttggtttgatccgcaagcattaatgttgcgtgaaacagcacaacgttgggtggcaaaagcaattacaggcacagtaacgcttgaacttcgtcgtggtaacgacttcacaattttaaataccgaatcgccaaacttaacctacgaagcagagcgtttaagtatggaaaaagtggaagatgcaccatttgatcctattgatcgtatcggtcaattaacaatgcgtaatttagatgtatcagacacccgaggtaaacttggcatctatgcacaaacaggtttattaagcgcaattaaagattccgtattgccacaattaggcaaaaaataa

SEQ ID NO: 153753 - protein, 444 aa, Haemophilus influenzae
MSNTILQNLPKGQKVGIAFSGGLDTSAALLWMRQKGAVPYAYTANLGQPDEDDYNAIPKKAMAYGAENARLIDCRAQLAHEGIAAIQCGAFHISTGGIPYFNTTPLGRAVTGTMLVAAMKEDDVNIWGDGSTFKGNDIERFYRYGLLTNPNLKIYKPWLDVQFIEELGGRLEMSQFLIENGFDYKMSVEKAYSTDSNMLGATHEAKDLEQLSTGMKIVKPIMGVAFWDEKVEIKPETVTVTFEDGVPVALNGKHFDNAVDLILEANRIGGRHGLGMSDQIENRIIEAKSRGIYEAPGMALLHIAYERLVTGIHNEDTIEQYRINGIRLGRLLYQGRWFDPQALMLRETAQRWVAKAITGTVTLELRRGNDFTILNTESPNLTYEAERLSMEKVEDAPFDPIDRIGQLTMRNLDVSDTRGKLGIYAQTGLLSAIKDSVLPQLGKK

SEQ ID NO: 153754 - DNA, 1242 bp, Hyphomonas neptunium
  CDS (1)..(1242): transl_table=11
atgtccaacgctgcttccgccccgaaaaaggtcgttctcgcctattccggaggtctcgacacctcgatcatcctcaaatggctgcaggttgagtttggctgtgaggttgtcaccttcaccgccgaccttggccagggcgaggaactggaaccggcccgcaagaaggcgctggccgccggggtgaagccggaaaacatcttcatcgaggatgtgcgcgaggaattcgtgcgcgatttcgtcttcccgatgttccgcgccaacgccgtgtatgaaggcgtctatctgctgggcacctcgattgcccggccgctgatcgccaagcgccagatcgagattgccgacatggtcggcgcggacgcagtctgtcatggcgccaccggcaaggggaatgatcaggtccggtttgagctgggctattatggccttaatccggacatcaaggtgatcgcgccgtggcgcgactgggcgttcaaatcccggaccgaccttttgaagttcgccgaggaacacggcatcgagatcgccaaggacaagcgcggcgaagcgccgttctcggtggacgctaacctgctgcactcttcctccgagggcaaagtgctggaaaacccggccgagcctgcgccggaattcgtgcacatgcgcacggtcagcccggaagatgcgcctgaccaggccgaggtgatcaccatcagctttgaaaaaggcgacgcggtggcgatcaatggcgaggcgatgagcccggcgacgctgctcaccgcgctcaacgcttacggcaagaagcacggcattggccggctcgacttgttggaaaaccgcttcgtcggcatgaagtcgcgcggtatttacgagacgccgggcgggacgatcctgctggtggcccaccggggcatcgagcaggcgacgctcgaccggggcgcggcccaccttaaagacgagctgatgccgaaatatgccgagctgatctataacggcttctggtggagcccggagcgcgagatgctgcaggcggccatcgaccattcgcagcgctgggtgaccggcgatgtgacgatgaagctctacaagggcaacgcctatctgatcggccgttcgtctccctacagtctgtactcggagaagatcgtgaccttcgaggacgaccacggcgcttacgaccagaaggatgcggccggcttcatcaagctcaacgcgctgcgtttgcgccttctggcgggccgcgaccggaagttcggcaagaactga

SEQ ID NO: 153755 - protein, 413 aa, Hyphomonas neptunium
MSNAASAPKKVVLAYSGGLDTSIILKWLQVEFGCEVVTFTADLGQGEELEPARKKALAAGVKPENIFIEDVREEFVRDFVFPMFRANAVYEGVYLLGTSIARPLIAKRQIEIADMVGADAVCHGATGKGNDQVRFELGYYGLNPDIKVIAPWRDWAFKSRTDLLKFAEEHGIEIAKDKRGEAPFSVDANLLHSSSEGKVLENPAEPAPEFVHMRTVSPEDAPDQAEVITISFEKGDAVAINGEAMSPATLLTALNAYGKKHGIGRLDLLENRFVGMKSRGIYETPGGTILLVAHRGIEQATLDRGAAHLKDELMPKYAELIYNGFWWSPEREMLQAAIDHSQRWVTGDVTMKLYKGNAYLIGRSSPYSLYSEKIVTFEDDHGAYDQKDAAGFIKLNALRLRLLAGRDRKFGKN

SEQ ID NO: 153756 - DNA, 1218 bp, Legionella pneumophila subsp
  CDS (1)..(1218): transl_table=11
atgaaaaaggttattaaaaaaatcgcattagcttattcaggtggcttggatacctccatcatgatcccttggcttaaagagcattatgagcatgctgaagtaatcgctgtgatttgtgatttagggcaacaggaagatctcgatgccataaaaaataaagcgctaaaaagcggtgcttccaaagcgtatgtagtcgatgtgaagaatgagtttgccactcaatatctttggcctttggtaaaatcaggtgctttatatgaagatcaatacattctgggcactatttcaaggccactaattgctcaaaagcttgttgaaattgctttgacggagcaagtaaatgccgttgcacatggagccaccggtaaagggaatgatcaagtgcgttttgaatattcgattaaggcacttgcacctcagcttgaaattattgctccctggagaacttgggatattaaatcaagacaggaagcaattgtgtatgctaaagcgcatggcattgaggtaccagtgactcccaaagcgccttattctagagatcataacatttggtatatttctcatgaaggtggtgtgctcgaagatccttctcaggaaatgccgaatgacgtgttattaatgactgctcctgtatcacagactcctgatgaagaggaagtggttgttcttgatttcaaaaagggggttccagtcgccttaaatggacaagaactttctccagtggatctcttaaattcattaaatcaaaaagcagggcagcatggtattggagtggcggacattgttgaaaatcgattagttggaatgaaaattcgagggatttatgaagcacctgctgctgccgtgctttataaggcacataaactactggagagtttatgtctcactcgttctacgttacatctgaagcaatctttacagcaaacttatgccaatttggtttatgaaggaagatggttttctcaaaccaaacaggctttggatgcattcattgatgtgacgcagcagcatgtcacaggctgtgttaagttaaagttattcaaaggaaacattatccctgccggtatgcattctccctatagcttgcatcatcccgaattggctacttttgaagaggataatgtatacaaccaaaaagatgcggaaggattcattaacctcttttctttatccgctaaaatttatagccaggtacatcagggggggaattatgactaa

SEQ ID NO: 153757 - protein, 405 aa, Legionella pneumophila subsp
MKKVIKKIALAYSGGLDTSIMIPWLKEHYEHAEVIAVICDLGQQEDLDAIKNKALKSGASKAYVVDVKNEFATQYLWPLVKSGALYEDQYILGTISRPLIAQKLVEIALTEQVNAVAHGATGKGNDQVRFEYSIKALAPQLEIIAPWRTWDIKSRQEAIVYAKAHGIEVPVTPKAPYSRDHNIWYISHEGGVLEDPSQEMPNDVLLMTAPVSQTPDEEEVVVLDFKKGVPVALNGQELSPVDLLNSLNQKAGQHGIGVADIVENRLVGMKIRGIYEAPAAAVLYKAHKLLESLCLTRSTLHLKQSLQQTYANLVYEGRWFSQTKQALDAFIDVTQQHVTGCVKLKLFKGNIIPAGMHSPYSLHHPELATFEEDNVYNQKDAEGFINLFSLSAKIYSQVHQGGNYD

SEQ ID NO: 153758 - DNA, 1212 bp, Leptospira interrogans
  CDS (1)..(1212): transl_table=11
atggcgcaaaacaaacctgttaagaaaatcgttctcgcttattccggtggattggatacgtccgtaattcttacctggttgaaagatacatacggttgcgaagtaatcgcttttactgcggatataggtcaaaaggaagaactttccggactagaagaaaaaggaattaaaacaggagcttctaaggtttatatccaagatttgcgtttagagtttgctagagattttattttcccagccattcaaggaaatgcaatttatgaaatgaggtatcttcttggaacctctttggctcggcctttaattgccaaggcaatggtagaagtggccgaaaaagaaggtgcagacgcatttgcacacggggccactggcaaaggaaatgaccaagttcgctttgaattaggagtcaaatccttagctcctgaaaaaacaatcatcgctccttggagaatctggagttttggcggtagatcagatctaattgaatacgcaaaatccaaaggaattccagttccagtaactgcggaaaaaccgtattcgatggaccgcaatctaatgcatatatcttatgaaggtggaatattagaagatccttataaagaaccagatgagaaaatgtttttattaacaacctctcccgaaaaagctcccgatgctcctgaatatttggaactcgatttcgaagaaggaaattgtgtagcaatcaacggtaagaaaatgaatcctcttgaaatcatggaaacgctcaatacgattgcgggcaaacatggagtgggaagagttgacatcgttgaaaaccgactcgtaggaatcaaatctagaggagtttacgaaactcccggcgggactatattatttttagctcatagagacttagaatcgattacgatcgatcgagacacacaacatcataaagataaactttccatcgaatttgcagaactcatttataacggacattggttttcttccagaatgaaagcagttcgagcttttattacagaaacacaaagatatgttagtggaaccgtaagaataaaactttacaaaggggtttgttctgttgtaggaagaaaatcccaagtatctctttacaacccagaaatggcgactttcgaaaaagaagaattatacaatcagaaagacgccgaaggttttataaacatctacggcttacccgctcaagaaacggcaaggcttcgcaaaaaatga

SEQ ID NO: 153759 - protein, 403 aa, Leptospira interrogans
MAQNKPVKKIVLAYSGGLDTSVILTWLKDTYGCEVIAFTADIGQKEELSGLEEKGIKTGASKVYIQDLRLEFARDFIFPAIQGNAIYEMRYLLGTSLARPLIAKAMVEVAEKEGADAFAHGATGKGNDQVRFELGVKSLAPEKTIIAPWRIWSFGGRSDLIEYAKSKGIPVPVTAEKPYSMDRNLMHISYEGGILEDPYKEPDEKMFLLTTSPEKAPDAPEYLELDFEEGNCVAINGKKMNPLEIMETLNTIAGKHGVGRVDIVENRLVGIKSRGVYETPGGTILFLAHRDLESITIDRDTQHHKDKLSIEFAELIYNGHWFSSRMKAVRAFITETQRYVSGTVRIKLYKGVCSVVGRKSQVSLYNPEMATFEKEELYNQKDAEGFINIYGLPAQETARLRKK

SEQ ID NO: 153760 - DNA, 1200 bp, Methanobacterium thermoautotrophicum
  CDS (1)..(1200): transl_table=11
ttgaaggtgattgctgtggataaagtggttcttgctttcagtggaggccttgacacatcagtatgtatcaaactcctcgaggaaaagtataacatggaggtaataacggcctgtgtggatgttggtcagccgcgggatgaaattgaaagaccggccatggttgccaaggaactcggaaactacagacactacacagtagatgcaaggcgggagttcgcagaggactacatatttccagccataaaggccaatgcggtttacgagggttaccccctcagcaccgcccttgcaaggcccttgatagctaaaaagatagttgaagtggccgagaaggagggtgcatctgccatagcccatggatgcaccggtaagggtaacgaccagttccgtttcgaggccgttataaggtcaacgacggacctggatgtcatcgcccccataagggacctcaacctcacaaggacagaggagatggagtacgccaggtcctgtgggataccgctcccctcagacaagctctacagtatcgatgagaacctctggggacgtgcaatagagggggacatccttgaagaccccatggttgagccccctgaggatgcctttgaatggacaaagcccatccacgagacccctgaggatcctgaggtcattgaaatcggtttccacggcggggtcccggttgcattgaatggtgaggaactggagccagttgaactcataggccttgcaaatgaggtggcaggaaaacacggtatcggtagggttgacataatggaggaccgtataataggtatgaaaagccgcgaaatctatgagacacctgcagccttcctgctcctggaggcccacaggggcctggagcagctcacactcacaaggagtgagctcaggtttgctgacataataagcagcacctatgctgaactggtgtacagtgggctgtggcatgaccccctccgtgaggaccttgacatggcagtaaaccacatgcagaggcgtgtcaccggtacagtcagggttaaactccacaggggcagcatgcgcgtcattggaagggagtcaccctacagcctgtacagtgaggagatagtttcatttgaggataaaaccctcgatcagagggagatggccgggatggtcaaaaactatgccctccaggctgcgatatacagcagggtgtgcaggaaggagaactga

SEQ ID NO: 153761 - protein, 399 aa, Methanobacterium thermoautotrophicum
MKVIAVDKVVLAFSGGLDTSVCIKLLEEKYNMEVITACVDVGQPRDEIERPAMVAKELGNYRHYTVDARREFAEDYIFPAIKANAVYEGYPLSTALARPLIAKKIVEVAEKEGASAIAHGCTGKGNDQFRFEAVIRSTTDLDVIAPIRDLNLTRTEEMEYARSCGIPLPSDKLYSIDENLWGRAIEGDILEDPMVEPPEDAFEWTKPIHETPEDPEVIEIGFHGGVPVALNGEELEPVELIGLANEVAGKHGIGRVDIMEDRIIGMKSREIYETPAAFLLLEAHRGLEQLTLTRSELRFADIISSTYAELVYSGLWHDPLREDLDMAVNHMQRRVTGTVRVKLHRGSMRVIGRESPYSLYSEEIVSFEDKTLDQREMAGMVKNYALQAAIYSRVCRKEN

SEQ ID NO: 153762 - DNA, 1344 bp, Neisseria meningitidis serogroup A
  CDS (1)..(1344): transl_table=11
atgaaccaaaaccatactattttacaaaaccttcccgtcggtcagaaagtcggcatcgccttctccggcggacttgatacctccgccgcgctgttgtggatgaaactcaaaggcgcgctgccttatgcctacactgccaacctcggtcagcccgatgaagacgactacaacgccattcccaaaaaagcgatggaatacggtgcggaaaacgcccgcctgattgactgccgcgcacagctggcacacgaaggcatcgccgccatccaatgcggcgcgttccacgtttccaccggcggcatcgcctacttcaacaccacgcctctgggtcgcgccgtaaccggcactatgcttgtttccgccatgaaagaagacgatgtgaatatttggggcgacggcagcacctacaaaggcaacgacatcgagcgtttctaccgctacggtttgctcaccaatcccgcgctgaaaatctacaaaccctggctcgaccagcaatttatcgacgaactcggcggccgtcatgaaatgagcgaatttttgattgccaacggtttcaactacaaaatgtcggtggaaaaagcctattccaccgattccaatatgctcggcgcgacccacgaagccaaagatttggaatttttgaactcgggcatcaaaatcgtcaaacctattatgggcattgccttctgggacgaaaacgtcgaaatcaaacccgaagaagtcagcgtgcgctttgaagaaggcgtgccggttgcactgaacggcaaagaatacgctgatcccgtcgaactcttcctcgaagccaaccgcatcggcggccgccacggtctgggtatgagcgaccaaatcgaaaaccgcatcatcgaagccaaatcgcgcggcatctacgaagccccgggaatggcgttgttccacatcgcctacgagcgtttggtgaccggtatccacaacgaagacaccatcgaacaataccgcatcaacggcctgcgcctcggacgtttgctctaccaaggccgctggttcgacagccaagccctgatgttgcgcgaaaccgcccaacgctgggttgccaaagccattaccggcgaagtaaccctcgaattgcgtcgcggcaacgactactcgattctgaacaccgaatcgcccaacctgacctaccaacccgaacgcctgagtatggaaaaagtcgaagacgcagcgttcacaccgctcgaccgtatcggacaactgactatgcgcaacctcgacattaccgacacccgcgccaaactgggcatttactcgcaaagcggtttgttggcattgggcgaaggttcggtattgccgcagttgggtaataagcaataa

SEQ ID NO: 153763 - protein, 447 aa, Neisseria meningitidis serogroup A
MNQNHTILQNLPVGQKVGIAFSGGLDTSAALLWMKLKGALPYAYTANLGQPDEDDYNAIPKKAMEYGAENARLIDCRAQLAHEGIAAIQCGAFHVSTGGIAYFNTTPLGRAVTGTMLVSAMKEDDVNIWGDGSTYKGNDIERFYRYGLLTNPALKIYKPWLDQQFIDELGGRHEMSEFLIANGFNYKMSVEKAYSTDSNMLGATHEAKDLEFLNSGIKIVKPIMGIAFWDENVEIKPEEVSVRFEEGVPVALNGKEYADPVELFLEANRIGGRHGLGMSDQIENRIIEAKSRGIYEAPGMALFHIAYERLVTGIHNEDTIEQYRINGLRLGRLLYQGRWFDSQALMLRETAQRWVAKAITGEVTLELRRGNDYSILNTESPNLTYQPERLSMEKVEDAAFTPLDRIGQLTMRNLDITDTRAKLGIYSQSGLLALGEGSVLPQLGNKQ

SEQ ID NO: 153764 - DNA, 1338 bp, Pasteurella multocida
  CDS (1)..(1338): transl_table=11
atgtcaaacacaattttacagcagcttccaaaaggtcaaaaagtcggtatcgcgttttcaggtggtttagataccagtgcagcattgttatggatgcgtcaaaaaggggctgttccttatgcctataccgcgaacttaggtcaaccagatgaagaggattacaatgcaattccgcgtaaggcgatggaatatggcgcggaaaatgcccgcttaattgattgccgtgcacagcttgctcacgaagggattgcggctattcaaagcggtgccttccatatttcaacaggtggcgtaacgtattttaataccaccccattgggtcgtgcagtaacgggaacgatgttagtgtcggcgatgcgtgaagatgatgtgaatatctggggtgatggcagtaccttcaaaggtaatgatattgagcgtttctatcgttatggtttattaactaatcccaatcttaaaatttataagccatggttagataatcaatttatcgaagaattaggcggtcgtcatgaaatgtcagagttcttgattgcgaatggctttgaatacaaaatgtcagtggaaaaagcctattcaacagattcaaatatgctaggtgccacccatgaagccaaagatcttgaatttttaaatacgggtattcgtattgtaaaaccgattatgggcgtggcattctggcgtgatgatgttgaagtgaaagctgaagaagtcactgtgcgctttgaagaggggattcctgtggcgttaaatggtaaaacattcagcgatcatgttgaattattcctcgaagcaaaccgtattggtgggcgccatggtttaggtatgtcagaccaaattgaaaaccgaattattgaagccaaatcgcgtggtatttatgaggcaccggggatggcgttgttacatattgcctatgagcgcttagtgagtggtatccataatgaagatacgattgaacaataccgtattaacggcttacgtttaggtcgtttactctaccaaggtcgttggtttgatccacaagccttaatgttacgtgaaacggcacaacgctgggttgcgcgtgcgattaccggtgaggtgactttcgaattacgccgtggtaatgattattccattttgaatacggaatcaccaaatttaacttatatgccagagcgtttaagtatggaaaaagtggaaaatgcgccatttgatcctgttgatcgtattggtcaattaacgatgcgcaacttagatatcgtagatacgcgggataagttaggtatttacacgcaaacaggcttactcagtatttcaaaagattctttcttgccacaactaaataagaaaggttaa

SEQ ID NO: 153765 - protein, 445 aa, Pasteurella multocida
MSNTILQQLPKGQKVGIAFSGGLDTSAALLWMRQKGAVPYAYTANLGQPDEEDYNAIPRKAMEYGAENARLIDCRAQLAHEGIAAIQSGAFHISTGGVTYFNTTPLGRAVTGTMLVSAMREDDVNIWGDGSTFKGNDIERFYRYGLLTNPNLKIYKPWLDNQFIEELGGRHEMSEFLIANGFEYKMSVEKAYSTDSNMLGATHEAKDLEFLNTGIRIVKPIMGVAFWRDDVEVKAEEVTVRFEEGIPVALNGKTFSDHVELFLEANRIGGRHGLGMSDQIENRIIEAKSRGIYEAPGMALLHIAYERLVSGIHNEDTIEQYRINGLRLGRLLYQGRWFDPQALMLRETAQRWVARAITGEVTFELRRGNDYSILNTESPNLTYMPERLSMEKVENAPFDPVDRIGQLTMRNLDIVDTRDKLGIYTQTGLLSISKDSFLPQLNKKG

SEQ ID NO: 153766 - DNA, 1233 bp, Pyrococcus furiosus
  CDS (1)..(1233): transl_table=11
gtgagaatagtgttggcttattcaggtggattggatacttcggtgatactaaaactaatgcaggaaaagctgggagctgaagtaataactgttactgttgatgttgggcagaaggatgacttcgaaaaaatagaagagaaggcctacaagtttggtgccgtgaagcactactacatagatgccaaggaggaattcgccgagaactatgtttgtaaagctataaaagcaaatgctctttacgaaaatgcgtatcctctttcaacggccctagctaggcctcttatagtagaaaagttagttgaggttgcaaagaaggagggggctggaataatagctcatggttgtacaggaaagggaaatgatcaggtgcgctttaacctaggaattaaggccttgatgcctgaggctgaaattctccagccagtagctgagtggaaccttacaagggattgggaaatggagtatgcaaagaagcatggaattcctgtaagtgacaagatatatagcatagatgaaaacatctggggaaggagcattgaaggtggggtacttgaagatccatcaatagaacctccagaagaggtctttgaatggacagtatctatagaaaaagctccagacaaaccagaatatgtgactattggctttgaaaatggagttccagtttcacttaatggggaaaaaatgaagcttctcgagctaattctaaagctcaacgaaatcgctggtaagcatggggttggaaggattgaccatattgaggataggagtgttgggattaagagcagggaggtttatgaagcccctgcggctgttactctaataaaggctcatcaggacttagaaaagttaactttaacaaagtgggttatagaattcaagagtatagtggactctaagtggtcttggcttgtatataatggcctatggtatgaaccacttaggttagccttagaagggttcatagatgaagctgaaaaggctgtcaacggcgaagttacagtcaagctgtggaaaggaaatgcaattgtcgttggaaggaaatcggacaatgccctctacgatgtaaagatggcaacttatgaaaagttcagcacatttgatcagaagcttgcaaagggattcatagagctctttggaatgcagagtgttctagcttataatatgcttcatggagtccactccacctcaaatatttcggaaattaaagaggcaataaagactttggagtga

SEQ ID NO: 153767 - protein, 410 aa, Pyrococcus furiosus
MRIVLAYSGGLDTSVILKLMQEKLGAEVITVTVDVGQKDDFEKIEEKAYKFGAVKHYYIDAKEEFAENYVCKAIKANALYENAYPLSTALARPLIVEKLVEVAKKEGAGIIAHGCTGKGNDQVRFNLGIKALMPEAEILQPVAEWNLTRDWEMEYAKKHGIPVSDKIYSIDENIWGRSIEGGVLEDPSIEPPEEVFEWTVSIEKAPDKPEYVTIGFENGVPVSLNGEKMKLLELILKLNEIAGKHGVGRIDHIEDRSVGIKSREVYEAPAAVTLIKAHQDLEKLTLTKWVIEFKSIVDSKWSWLVYNGLWYEPLRLALEGFIDEAEKAVNGEVTVKLWKGNAIVVGRKSDNALYDVKMATYEKFSTFDQKLAKGFIELFGMQSVLAYNMLHGVHSTSNISEIKEAIKTLE

SEQ ID NO: 153768 - DNA, 1338 bp, Ralstonia solanacearum
  CDS (1)..(1338): transl_table=11
atggaaaccatcctgcaacacgttcccgtcggccagaaggtcggcatcgccttctccggcggcctggacaccagcgcggccctgcgctggatgaagaacaagggcgccctgccctatgcctacaccgccaatctcggccagcccgacgaggaagactacgatgccatcccccgcaaggccctggaatacggtgcagagaaggctcgcctgatcgactgccgcccgcaactggccaatgaaggcattgccgccatccaggccggcgccttccacatcagcaccggcggcatcacctacttcaacaccacgccgttgggccgcgccgtgaccggcaccatgctggtggccgccatgaaggaagacgacgtccacatctggggcgacggctccaccttcaagggcaatgacatcgagcgcttctaccgctacggcctgctgaccaacccggccctgaagatctacaagccgtggcttgaccagaccttcatcgacgagctgggcggccgcgccgaaatgtcggccttcatgacgaaggaaggtttcggctacaagatgagcgccgaaaaggcctactccaccgactccaacatgctgggcgccacccacgaggccaaggacctggagcatctgaacagcggcatccgcatcgtcaacccgatcatgggcgtggcgttctggaagcctgaagtcgaagtcaaggccgaagaggtttcgatcaccttcgacgaaggccgccccgtggccgtcaacggccgcgaaattgccgacccggtggagatgttcctggagctgaaccgcatcggcggccgccacggcctgggcatgagcgaccagatcgaaaaccgcatcatcgaagccaagagccgcggcatctacgaagccccgggcatggcgttgctgcacatcgcctacgagcgcctggtcaccggcatccacaacgaggacaccatcgagcagtaccgcatcaatggcctgcgcctaggccgcctgctgtaccagggccgctggttcgacccgcaggccatcatgctgcgcgaaaccgcccaacgctgggtggcccgcgccgtgaccggtaccgtgacgctggagctgcgccgcggcaacgattactccatcctgaacaccgagtcgcccaacctgacctacgcgcccgagcgcctgtcgatggaaaaggtcgaagacgcaccgttcagcccggccgaccgcatcggccagctgaccatgcgcaacctggacctgatggacacccgcgacaagctggccatctactccaaggccggcctgctgtccctgggcaccagcagcgcgctgccccagctcggcggcgacaagaagtaa

SEQ ID NO: 153769 - protein, 445 aa, Ralstonia solanacearum
METILQHVPVGQKVGIAFSGGLDTSAALRWMKNKGALPYAYTANLGQPDEEDYDAIPRKALEYGAEKARLIDCRPQLANEGIAAIQAGAFHISTGGITYFNTTPLGRAVTGTMLVAAMKEDDVHIWGDGSTFKGNDIERFYRYGLLTNPALKIYKPWLDQTFIDELGGRAEMSAFMTKEGFGYKMSAEKAYSTDSNMLGATHEAKDLEHLNSGIRIVNPIMGVAFWKPEVEVKAEEVSITFDEGRPVAVNGREIADPVEMFLELNRIGGRHGLGMSDQIENRIIEAKSRGIYEAPGMALLHIAYERLVTGIHNEDTIEQYRINGLRLGRLLYQGRWFDPQAIMLRETAQRWVARAVTGTVTLELRRGNDYSILNTESPNLTYAPERLSMEKVEDAPFSPADRIGQLTMRNLDLMDTRDKLAIYSKAGLLSLGTSSALPQLGGDKK

SEQ ID NO: 153770 - DNA, 1224 bp, Rhizobium loti
  CDS (1)..(1224): transl_table=11
atgtccaagaccaaagacgtcaagaaagtcgtgctcgcctattccggcggcctcgacacatccatcatcctgaaatggctgcagaccgaactcggcgccgaagtcgtcaccttcaccgccgatctcggccagggtggcgagttggagccggcacgcaagaaggccgagatgatgggcatcaaggacatccgcatcgtcgatgtgcgggaggaattcgtcgccgacttcgtcttcccgatgttccgtgccaacaccgtctatgaaggcacctatctgctcggcacctcgatcgcgcggccgctgatctccaagcaccttgtcgacatcgccagggagaccggcgccgatgcgatcgcccatggcgccaccggcaagggcaacgaccaggtccgcttcgagctgtcggcctatgcgctgaaccccgatatcaaagtcatcgcgccctggcgcgactggtcgttcaagtcgcgcaccgacctgatcaacttcgccgagcagcaccagatcccggtggccaaggacaaaaggggcgaggcgccgttctcggtcgacgccaacctgctgcactcctcttccgagggcaaggtgctggaagatccgtggagcgagccgccggaattcgtccaccagcgcacggtctcgccgatggacgcgccggacaaggtaaccgagatcgagatcgagttcctgaagggcgacccgatcgcgctcaacggcaagaagctgtcgccggcgaccatgctggccgccctcaacgatcttggccgcgacaacggcatcggccggctcgacctggtcgagaaccgtttcgtcggcatgaaatcgcgcggcgtctacgagacgccaggcggcgccatcctgatcgtggcccaccgcgccatcgaatcgatcacgctcgaccgcggcgccgcgcacctcaaggacgagttcatgccgcgctacgccgagctcatctacaacggcttctggttctcgcccgagcgcctgatgctgcaggcgatgatcgacaagagccaggaagacgtcgaaggcacggtacggttgaagctctacaagggcaatgtcatggtcaccggccgcaagtcgaagaagacgctctattccgacgcgctggtcaccttcgaggacgatcgcggcgcctacgaccagaaggacgccgccggcttcatccgcctcaatgcgctgaggctgcgcacgctggctgcgcgcaaccgcaagggctga

SEQ ID NO: 153771 - protein, 407 aa, Rhizobium loti
MSKTKDVKKVVLAYSGGLDTSIILKWLQTELGAEVVTFTADLGQGGELEPARKKAEMMGIKDIRIVDVREEFVADFVFPMFRANTVYEGTYLLGTSIARPLISKHLVDIARETGADAIAHGATGKGNDQVRFELSAYALNPDIKVIAPWRDWSFKSRTDLINFAEQHQIPVAKDKRGEAPFSVDANLLHSSSEGKVLEDPWSEPPEFVHQRTVSPMDAPDKVTEIEIEFLKGDPIALNGKKLSPATMLAALNDLGRDNGIGRLDLVENRFVGMKSRGVYETPGGAILIVAHRAIESITLDRGAAHLKDEFMPRYAELIYNGFWFSPERLMLQAMIDKSQEDVEGTVRLKLYKGNVMVTGRKSKKTLYSDALVTFEDDRGAYDQKDAAGFIRLNALRLRTLAARNRKG

SEQ ID NO: 153772 - DNA, 1335 bp, Rhodopirellula baltica; identical to SEQ ID NO: 153630
  CDS (121)..(1335): transl_table=11

SEQ ID NO: 153773 - protein, 404 aa, Rhodopirellula baltica
MKSCVLAYSGGLDTSVILGWLQDQGYEVHCVYVDLGQPCEDRDAIMEKARTCGAKSSRLVDVREELCRDFAFPVLAWQAKYEQIYLLGTSIARPLISKVCLEVAREVGATAYAHGATGKGNDQCRFQLAAEALDPNIEMIAPWRIKSFRDAFPGRTELIEYCDVKRIPVKASTAKPYSSDENVLHISYEAGKLEELDVNGVELVEFGMGVSPQDAPDKPEEVTIGFESGVPKTLNGKAVNALEMVEQLNDIAGRNGVGRIDMVENRFVGMKSRGVYESPGMTVLYDALMYVEQLTMDRDLMHLRDRMAPEVAEMVYYGFWYTPKMDALMSFIETAQRPVTGEVTLQLYKGNIMVSSRTSPNSLYDEEIATMEGGGSYNQDDAEGFLRIQGLPSRVQGRVSPRKF

SEQ ID NO: 153774 - DNA, 1410 bp, Salmonella typhimurium
  CDS (67)..(1410): transl_table=11
ttgcataaaaatgcactaaagcagaaaccgatctcattatcagtcaatcaagcagggttctattctatgacgacgattcttaagcatcttccagcaggtcaacgtattggtatcgctttttccggcggtctggacaccagcgccgcgctgctgtggatgcgacaaaaaggagctgtcccatatgcctatactgcgaatctgggacaaccggatgaggatgactatgacgccattcctcgtcgcgcaatggagtatggcgcagagaatgctcgcctgattgattgccgcaagcagttggttgcagaagggatcgcagcgattcagtgcggcgctttccataatacgactggcggactgacctatttcaataccacgccgctgggccgtgccgtaaccggcacgatgctggtcgccgcgatgaaagaagacggcgtgaatatctggggcgacggcagtacctataaaggcaacgatattgaacgtttctatcgttacggcctgctgacgaatgctgaattacagatttacaaaccgtggctggataccgactttatcgatgagctgggtggtcgccatgagatgtctgaatttatgattgcctgcggtttcgactataagatgtcagtcgaaaaagcctactccaccgactccaacatgctcggcgccacgcatgaagcgaaagatctggagtttcttaactccagcgtcaagatcgtcaacccgattatgggcgtgaagttctgggacgagagcgtgaagatcccggcagaagttgtgaccgtccgcttcgagcagggtcaccctgttgccctgaacggtaaaaccttcagcgatgatgttgagatgatgctggaagcgaaccgcatcggcggccgtcacggcctgggtatgagcgaccaaattgaaaaccgcatcattgaagcaaaaagccgcggtatttatgaagcccctgggatggcgctgctgcacatcgcttacgagcgtctgttgaccggtattcacaacgaagacaccattgaacagtatcattctcatggtcgtcagctgggtaaactgctgtatcagggccgctggttcgactcgcaggcgttgatgctgcgtgacggcctgcaacgttgggtcgccagccagattaccggtgaagtgacgctggaactgcgtcgcggcaacgactactccatcctgaacaccgtgtcagacaacctgacctataaggctgagcgtctgaccatggagaaaggcgagtccgtattctcaccggacgatcgtattggccagttgaccatgcgtaatctggacattaccgatacccgcgagaaactgttcggctacgcgaaagcgggtctgttaaccgcctcttccgcgaccggtctgccgcaggttgagaatctggaaaacaaaggcaaataa

SEQ ID NO: 153775 - protein, 447 aa, Salmonella typhimurium
MTTILKHLPAGQRIGIAFSGGLDTSAALLWMRQKGAVPYAYTANLGQPDEDDYDAIPRRAMEYGAENARLIDCRKQLVAEGIAAIQCGAFHNTTGGLTYFNTTPLGRAVTGTMLVAAMKEDGVNIWGDGSTYKGNDIERFYRYGLLTNAELQIYKPWLDTDFIDELGGRHEMSEFMIACGFDYKMSVEKAYSTDSNMLGATHEAKDLEFLNSSVKIVNPIMGVKFWDESVKIPAEVVTVRFEQGHPVALNGKTFSDDVEMMLEANRIGGRHGLGMSDQIENRIIEAKSRGIYEAPGMALLHIAYERLLTGIHNEDTIEQYHSHGRQLGKLLYQGRWFDSQALMLRDGLQRWVASQITGEVTLELRRGNDYSILNTVSDNLTYKAERLTMEKGESVFSPDDRIGQLTMRNLDITDTREKLFGYAKAGLLTASSATGLPQVENLENKGK

SEQ ID NO: 153776 - DNA, 1233 bp, Schizosaccharomyces pombe
  CDS (1)..(1233)
atgccccaagaagtaaaacgttgcgttctcgcctattcaggtggtcttgacacctcctgtatcctcgcctggcttattgaagaaggttgggaggtcatctgctatatggctaatgttggtcaagaggaagattgggatgcagcccgtgaaaaggccttgaaggtgggtgctaagaaggtttacgttgaggacttgcgtgaagagttcatcaatgacaccgtcattcctgctgctcaagctaacgccatttacgaaaatgtttatctcttgggcacttctcttgctcgtcctatcattgctcgccgtcagatccaaatcgccgagaaggaaaactgtatcgctgtctctcacggttgcactggtaagggcaacgatcaagttcgtttcgaattggcatattacgctttgaagccagacgttcaagtcattgctccttggcgtttgcctgtatttttcgagcgcttcgccggtcgtaaggatttgctcgaatatgctgctgctaagggcattcccgttactcaaaccaccaaaaagccttggtctatggatgaaaacattgtacattgctcgtatgaagctggaatcctcgaggatcccagtatgactcctcccaaggacatgtggaagctcaccgttgatcccaaagacgctcctgatgaggttgaagagctcagcattcactttgaaaagggtgctcccaccaaattagagtgcaaggatggtacctttagcggagtcgtttccatcttctaccaattgaacgctatcgctcgtcgtaacggtgttggtcgtatcgatattgttgaaaaccgtttctctggtttgaagagtcgtggttgttacgaaactcctggcttaaccattttgcgtactgctcatatggacttggaaggtttaacaatggaacgtgaagttcgtgctctccgtgaccaattcgttactttcaatctcgctaaaattttgtacaatggacaatttttctctccctgcactcgtatgcttttagcagctaacaacgtttctcaagaggtagtaaacggtgtagttaaactttctgtctacaagggcaatgtcactgtcctcggtcgtaaatctgatactgctcatctttatgacgagaaattgtcatctatggatgagcttggtggatttgaccctacatggacctctggtttcatccaaatcgagtctatgcgtttgcgtaactctgatgaaggaaaacattggatgtaa

SEQ ID NO: 153777 - protein, 410 aa, Schizosaccharomyces pombe
MPQEVKRCVLAYSGGLDTSCILAWLIEEGWEVICYMANVGQEEDWDAAREKALKVGAKKVYVEDLREEFINDTVIPAAQANAIYENVYLLGTSLARPIIARRQIQIAEKENCIAVSHGCTGKGNDQVRFELAYYALKPDVQVIAPWRLPVFFERFAGRKDLLEYAAAKGIPVTQTTKKPWSMDENIVHCSYEAGILEDPSMTPPKDMWKLTVDPKDAPDEVEELSIHFEKGAPTKLECKDGTFSGVVSIFYQLNAIARRNGVGRIDIVENRFSGLKSRGCYETPGLTILRTAHMDLEGLTMEREVRALRDQFVTFNLAKILYNGQFFSPCTRMLLAANNVSQEVVNGVVKLSVYKGNVTVLGRKSDTAHLYDEKLSSMDELGGFDPTWTSGFIQIESMRLRNSDEGKHWM

SEQ ID NO: 153778 - DNA, 1344 bp, Shigella flexneri
  CDS (1)..(1344): transl_table=11
atgacgacgattctcaagcatctcccggtaggtcaacgtattggtatcgctttttccggcggtctggacaccagtgccgcactgctgtggatgcgacaaaagggagcggttccttatgcatatactgcaaacctgggccagccagacgaagaggattatgatgcgatccctcgtcgtgccatggaatacggcgcggagaacgcacgtctgatcgactgccgcaaacaactggtggccgaaggtattgccgctattcagtgtggcgcatttcataacaccaccggcggcctgacctatttcaacacgacgccgctgggccgcgccgtgactggtaccatgctggttgctgcgatgaaagaagatggcgtgaatatctggggtgacggtagcacctataaaggaaacgatatcgaacgtttctatcgttatggtctgctgaccaatgctgaactgcagatttacaaaccgtggcttgatactgactttattgatgaactgggcggccgtcatgagatgtctgaatttatgattgcctgcggtttcgactacaaaatgtctgtcgaaaaagcctactccacagactccaacatgcttggtgcaacgcatgaagcgaaggatctggaatacctcaactccagcgtcaaaatcgtcaacccgattatgggcgtgaaattctgggatgagagcgtgaagatcccggcagaagaagtcacagtacgctttgagcaaggtcatccggtggcgctgaacggtaaaacctttagcgacgacgtagaaatgatgctggaagctaaccgcatcggcggtcgtcacggcctgggcatgagcgaccagattgagaaccgtatcatcgaagcgaaaagccgtggtatttacgaagctccggggatggcactgctgcacattgcgtatgaacgtctgttgaccggtattcacaacgaagacaccattgagcagtatcacgcgcatggtcgtcagttgggccgtctgctgtaccaggggcgttggtttgactcccaggcgctgatgctgcgtgactctctgcaacgctgggttgccagccagatcactggtgaagttaccctggagctgcgccgtgggaacgattattcaatcctgaataccgtctcagagaacctgacctacaagccagagcgtctgacgatggaaaaaggcgactcggtgttctcgccagatgatcgtattggtcaattgaccatgcgtaatctggatatcactgatacccgagagaaactttttggttatgccaaaactggcctgctttcctcctctgccacttcaggcctgccgcaggtggagaatatggaaaacaaaggccagtaa

SEQ ID NO: 153779 - protein, 447 aa, Shigella flexneri
MTTILKHLPVGQRIGIAFSGGLDTSAALLWMRQKGAVPYAYTANLGQPDEEDYDAIPRRAMEYGAENARLIDCRKQLVAEGIAAIQCGAFHNTTGGLTYFNTTPLGRAVTGTMLVAAMKEDGVNIWGDGSTYKGNDIERFYRYGLLTNAELQIYKPWLDTDFIDELGGRHEMSEFMIACGFDYKMSVEKAYSTDSNMLGATHEAKDLEYLNSSVKIVNPIMGVKFWDESVKIPAEEVTVRFEQGHPVALNGKTFSDDVEMMLEANRIGGRHGLGMSDQIENRIIEAKSRGIYEAPGMALLHIAYERLLTGIHNEDTIEQYHAHGRQLGRLLYQGRWFDSQALMLRDSLQRWVASQITGEVTLELRRGNDYSILNTVSENLTYKPERLTMEKGDSVFSPDDRIGQLTMRNLDITDTREKLFGYAKTGLLSSSATSGLPQVENMENKGQ

SEQ ID NO: 153780 - DNA, 1230 bp, Silicibacter pomeroyi
  CDS (1)..(1230): transl_table=11
atgtccgcgcccaagaaagttgtcctggcctattccggtggcctcgatacctcgatcatcctgaaatggttgcagaccgaatatggctgcgaggttgtcacctttaccgccgatctcggccagggagaggagctggaacccgcccgcaaaaaggccgagctgctgggcatcaagcccgagaacatccatatcgaggatgtccgcgaagagttcgtgcgcgactttgtctttccgatgttccgcgccaatgcggtgtacgaggggctgtatttgctgggcacttcgatcgcgcggccgctgatctcgaaacgtctggtcgagatcgccgccgaacacggcgctgacgcggtggcccatggcgccaccggcaagggcaacgaccaggtgcggttcgagctttccgcctatgcgctgaaccccgagatcagggtgatcgcgccctggcgcctgtgggatctgaccagccgcacccgtctgctggaattcgccgaagcgcatcagattccgatttcgaaggacaagcgcggcgaggcgccgttctcggtcgacgcgaacctgctgcacacctcgtccgagggcaaggtgctggaggatccgggcgtcgaggcgcccgattacgtcgcccaacgcatcgtcgcggtcgaagacgcccccgacacgcccgagttcatcgaagttacctttgaaaagggtgacgcggtggcgatcaacggcgaggcgatgtcgcccgcaaccatcctgacccgtctgaacgagttgggtggcaagcacggtatcggcctcttggatttcgtcgaaaaccgctttgtcgggatgaaatcgcgcggcgtctacgagacccccggcgggaccatcctgctcgaggcacatcgcggcatcgaacagatcacgctggacagcggcgcgggccacctgaaggattcgatcatgccccgctatgccgagctgatctataacggcttctggttcagccccgagcgcgagatgctgcaggccctgatcgacaagagccaggagcacgtcaccggcaccgtccggctgaaactctacaagggttcggcgcgcaccgtcgcccgctggtcggatcactcgctctattccgaggcccacgtgaccttcgaagaggacgccggcgcctatgaccagcaggatgccaagggcttcatccagctgaacgcgctgcggctgaaactgcttgcgacccgcaaccgtcgcgttgctggcaagtga

SEQ ID NO: 153781 - protein, 409 aa, Silicibacter pomeroyi
MSAPKKVVLAYSGGLDTSIILKWLQTEYGCEVVTFTADLGQGEELEPARKKAELLGIKPENIHIEDVREEFVRDFVFPMFRANAVYEGLYLLGTSIARPLISKRLVEIAAEHGADAVAHGATGKGNDQVRFELSAYALNPEIRVIAPWRLWDLTSRTRLLEFAEAHQIPISKDKRGEAPFSVDANLLHTSSEGKVLEDPGVEAPDYVAQRIVAVEDAPDTPEFIEVTFEKGDAVAINGEAMSPATILTRLNELGGKHGIGLLDFVENRFVGMKSRGVYETPGGTILLEAHRGIEQITLDSGAGHLKDSIMPRYAELIYNGFWFSPEREMLQALIDKSQEHVTGTVRLKLYKGSARTVARWSDHSLYSEAHVTFEEDAGAYDQQDAKGFIQLNALRLKLLATRNRRVAGK

SEQ ID NO: 153782 - DNA, 1218 bp, Sphingopyxis alaskensis
  CDS (1)..(1218): transl_table=11
atgtccgattccatcaagcgcgtcgtccttgcctattcgggtggtctcgacaccagcgtcatcctgaaatggctgcaggtgacctatggctgcgaggtcgtgacctttaccgccgatctggggcagggcgaggagctggaacccgcgcgcgccaaggccgagctgatggggatcaagcccgaacatatctatatcgacgatttgcgcgaggagttcgtgcgtgacttcgttttcccgatgatgcgcgccaatgcgcgctacgagggcgattacctgctcggcacgtcgatcgcgcggccgctgatttcgaagcggctggtcgagatcgccagggaaacgggcgccgatgcggtggcgcatggcgcgacgggcaagggcaatgaccaggtgcgcttcgagctgtcggcctatgcgctcaatcccgacatcaaggtgatcgcgccctggcgcgaatgggatctgaccagccgcaccgcgctgatcgcgtgggccgaacagcatcagattcctgtgcccaaggacaagcgcggcgaaagcccgttcagcaccgacgcgaacctcctccacacatcgtccgaaggcaaggtgctcgaggatccatgggaagaaacccccgactatgtctattcgcgcacggtgaacccggaggatgcgcccgatacgcccgaatatatcacgatcgatttcgagcgcggtgacggcgtcgcgctgaacgggcaggcgatgtcgcccgcgaccctgctcgcggcactcaacgacctgggccgcaagcatggcatcggccgcctcgacctcgtcgaaaaccgcttcgtcggcatgaagtcgcgcggcatgtacgaaacgccgggcggcgaaatctatgcgcgggcgcatcgcggcatcgaaagcatcacgctcgaccgcggcgcggcgcacctcaaagatgaactgatgcccaaatatgccgagctgatctataacggattctggttcgcccccgagcgcgagatgttgcaggcggcgatcgaccacagccaggcgaatgtcaccggcacggttcgattgaagctttacaagggcaatgccagcgtcgtcggccgcaagtcgccgttcagcctgtacagcgaacgccatgtgacgttcgaggatgatgccggcgcctatgaccagaaggacgcggccggcttcatcaggctcaacgcgctgcggctcaaactgcttgcccgacaggggcgctga

SEQ ID NO: 153783 - protein, 405 aa, Sphingopyxis alaskensis
MSDSIKRVVLAYSGGLDTSVILKWLQVTYGCEVVTFTADLGQGEELEPARAKAELMGIKPEHIYIDDLREEFVRDFVFPMMRANARYEGDYLLGTSIARPLISKRLVEIARETGADAVAHGATGKGNDQVRFELSAYALNPDIKVIAPWREWDLTSRTALIAWAEQHQIPVPKDKRGESPFSTDANLLHTSSEGKVLEDPWEETPDYVYSRTVNPEDAPDTPEYITIDFERGDGVALNGQAMSPATLLAALNDLGRKHGIGRLDLVENRFVGMKSRGMYETPGGEIYARAHRGIESITLDRGAAHLKDELMPKYAELIYNGFWFAPEREMLQAAIDHSQANVTGTVRLKLYKGNASVVGRKSPFSLYSERHVTFEDDAGAYDQKDAAGFIRLNALRLKLLARQGR

SEQ ID NO: 153784 - DNA, 1206 bp, Staphylococcus aureus
  CDS (1)..(1206): transl_table=11
atgaaagagaaaattgttttagcatattcaggaggactagatacaagtgtggccgttcaatggcttatcgacaaaggatacgacgttgtagcttgttgcctagatgttggtgaaggtaaagatttagacatcgtttataaaaaagctttagatatgggagcagttgaatgtcatattattgatgcaacaaaagaatttagtgatgagtatgtaagttatgcaatcaaaggaaatttaatgtatgaaaatgcatatccattagtttcagctttatcaagaccattaatcgctaaaaaattagtagagattgctgagaaaacaaattcagtaggtattgcacatggttgtactggtaaagggaatgaccaagtacgtttcgaagttgccattaaagcattaaacccatcattgaaagcattcgcacctgtacgtgagtgggcatggagtcgtgaagaagaaatcgattatgcaattaaacataatatccctgtatcaatcaaccatgattcaccttattctatcgatcaaaatctatggggcagagcgaatgaatgtggtattttagaagatccttatgctgcgccaccagaggatgcgttcgatctaacaaatgctttagaagaaacaccagatgctgctgatgaaatcattttaacgtttgataaaggcatcccagttcaaattgatggcaaaacatatgaattagacgatttaattttaacgttgaatgcattagctggtaagcatggtatcggaagaattgaccatgtagaaaatagacttgtaggtatcaaatcaagagaaatttatgaggcacctgctgcagaagttattttaaaagcgcataaagcattagaaacgattacgttaacgaaagatgtcgcacactttaaaccaatcatcgagaagcaatttgctgaacaactatacaatggactttggttctcacctttaactgatagcttaaaattatttattgatagtactcagcaatacgtaagtggtgatgtcagaattaaattattcaaaggtaatgccatcgtaaatggtagaaaatcaccttacacattatatgatgaaaaattagcaacttatacaaaagaagatgcatttaatcaagacgctgctgtcggctttatcgatatctatggtttacctactcaagtaaattcgatgctacatggaggctatagcaatgagcaataa

SEQ ID NO: 153785 - protein, 401 aa, Staphylococcus aureus
MKEKIVLAYSGGLDTSVAVQWLIDKGYDVVACCLDVGEGKDLDIVYKKALDMGAVECHIIDATKEFSDEYVSYAIKGNLMYENAYPLVSALSRPLIAKKLVEIAEKTNSVGIAHGCTGKGNDQVRFEVAIKALNPSLKAFAPVREWAWSREEEIDYAIKHNIPVSINHDSPYSIDQNLWGRANECGILEDPYAAPPEDAFDLTNALEETPDAADEIILTFDKGIPVQIDGKTYELDDLILTLNALAGKHGIGRIDHVENRLVGIKSREIYEAPAAEVILKAHKALETITLTKDVAHFKPIIEKQFAEQLYNGLWFSPLTDSLKLFIDSTQQYVSGDVRIKLFKGNAIVNGRKSPYTLYDEKLATYTKEDAFNQDAAVGFIDIYGLPTQVNSMLHGGYSNEQ

SEQ ID NO: 153786 - DNA, 1446 bp, Streptomyces coelicolor
  CDS (1)..(1446): transl_table=11
atgtccaaggtcctcacctccctccccaccggcgagcgcgtcggtatcgccttctcgggcggcctcgacacctcggtcgcggtcgcgtggatgcgtgacaagggcgccgtcccctgcacgtacaccgccgacatcggccagtacgacgagcccgacatcgcctcggtgcccgaccgtgccaagacgtacggcgccgaggtcgcgcgcctggtcgactgccgcgcggcgctggtcgaggaggggctggccgcgctcacctgcggggcgttccacatccgctcgggcgggcgggcgtacttcaacaccacgccgctgggccgcgccgtcacgggcaccctcctcgtccgggccatgctcgaggacgacgtccagatctggggcgacggctccacgttcaagggcaacgacatcgagcggttctaccggtacggcctgctcgccaacccgcagctgaggatctacaagccctggctggacgcggacttcgtgacggagctcggcgggcgcaaggagatgtcggagtggctggtcgcccacgaccttccctaccgggactccacggagaaggcgtactccaccgacgccaacatctggggcgccactcacgaggccaagacgctggagcacctcgacaccggcgtggagaccgtggagcccatcatgggcgtgcggttctgggacccgtcggtcgagatcgcgcccgaggacgtgaccatcggcttcgaccagggccgcccggtgacgatcaacggcaaggagttcgcctccgcggtcgacctggtcatggaggccaacgccgtcggcggccggcacggcatgggcatgtccgaccagatcgagaaccggatcatcgaggccaagagccgcggcatctacgaggcgcccggcatggccctgctgcacgccgcctacgagcgcctggtcaacgccatccacaacgaggacaccctcgcccagtaccacaccgaggggcggcgcctgggccggctgatgtacgagggccgctggctggacccgcagtccctgatgatccgcgagtcgctgcagcgctgggtcggctccgcggtcaccggcgaggtcaccctccggctgcggcgcggcgaggactactcgatcctcgacaccaccggcccggccttcagctaccacccggacaagctctccatggagcgcaccgaggactccgcgttcggcccggtggaccggatcggccagctgaccatgcgcaacctggacatcgccgactcccgcgccaagctggagcagtacgccggtctcggtctcatcggcaccgccaaccccgccatcggcgccgcccaggccgccgcgaccgggctgatcggcgccatgccggagggtggcgcgcaggccatcgcctcccgcggcgaggtctccgccgacgacgagctgctggaccgcgccgcgatggagtccggcacggactga

SEQ ID NO: 153787 - protein, 481 aa, Streptomyces coelicolor
MSKVLTSLPTGERVGIAFSGGLDTSVAVAWMRDKGAVPCTYTADIGQYDEPDIASVPDRAKTYGAEVARLVDCRAALVEEGLAALTCGAFHIRSGGRAYFNTTPLGRAVTGTLLVRAMLEDDVQIWGDGSTFKGNDIERFYRYGLLANPQLRIYKPWLDADFVTELGGRKEMSEWLVAHDLPYRDSTEKAYSTDANIWGATHEAKTLEHLDTGVETVEPIMGVRFWDPSVEIAPEDVTIGFDQGRPVTINGKEFASAVDLVMEANAVGGRHGMGMSDQIENRIIEAKSRGIYEAPGMALLHAAYERLVNAIHNEDTLAQYHTEGRRLGRLMYEGRWLDPQSLMIRESLQRWVGSAVTGEVTLRLRRGEDYSILDTTGPAFSYHPDKLSMERTEDSAFGPVDRIGQLTMRNLDIADSRAKLEQYAGLGLIGTANPAIGAAQAAATGLIGAMPEGGAQAIASRGEVSADDELLDRAAMESGTD

SEQ ID NO: 153788 - DNA, 1449 bp, Streptomyces lavendulae
  CDS (1)..(1449): transl_table=11
atgtctaaagtcctcacgtcccttcccgccggcgagcgcgtcggcatcgccttctccggcgggctcgacacctcggtcgccgtcgcctggatgcgcgacaagggcgccgtcccctgcacgtacaccgccgacatcggccagtacgacgagcccgacatcgcctccgtgcccagccgcgcctccgcgtacggcgccgagatcacccggctcgtcgactgccgtgccgccctcgtcgaggagggcctggcggcgctcgcgtgcggtgcgttccacatccggtcgggcgggcgcccgtacttcaacaccacgccgctgggacgtgccgtgaccggcacgctgctggtgcgcgcgatgcttgaggacggggtgcagatctggggcgacggctccaccttcaagggcaacgacatcgagcggttctaccggtacgggctgctcgccaacccgcacctgcggatctacaagccctggctggacgccgacttcgtcaccgagctcggcggccgcaaggagatgtccgagtggctgctcgcgcacgggctgccgtaccgggactcgacggagaaggcgtactccacggacgccaacatctggggcgccacgcacgaggccaagacgctggagcacctcgacaccggcatcgagaccgtcgacccgatcatgggcgtgcggttctgggacccgtcggtggagatcgccacggaggacgtgacggtcggcttcgagcagggccgcccggtctccatcaacggcaaggagttcgcctccgccgtcgacctcgtgatggaggccaacgcgatcggcggccggcacggtctgggcatgtccgaccagatcgagaaccggatcatcgaggccaagagccgcggcatctacgaggcgcccggcatggcgctgctgcacatcgtctacgagcgcctcgtcaacgcgatccacaacgaggacaccctggccgcgtaccacaacgagggccggcgcctcggccggctcatgtacgagggccgctggctggacccgcaggcgctgatgatccgcgagtcgctgcagcgctgggtcggcacggccgtcaccggcgaggtgacgctgcggctgcggcgcggcgaggactactcgatcctcgacaccacgggcccggcgttcagctaccacccggacaagctctccatggagcggaccgaggactcggcgttcggcccggtggaccggatcggccagctcaccatgcgcaacctggacatcgccgactcccgcgcccgcctggagcagtacgtggggctcggcctggtcggcactccccacccgacaccgatcggcgccgcacaggcggccgcgaccgggctgatcggcgccatggacgagggcggtgccgaggcgatcgcctcccgtggcgaggccaccgacgaggagacgatgctggaccgcgccgcgatggagtccggcacggactga

SEQ ID NO: 153789 - protein, 482 aa, Streptomyces lavendulae
MSKVLTSLPAGERVGIAFSGGLDTSVAVAWMRDKGAVPCTYTADIGQYDEPDIASVPSRASAYGAEITRLVDCRAALVEEGLAALACGAFHIRSGGRPYFNTTPLGRAVTGTLLVRAMLEDGVQIWGDGSTFKGNDIERFYRYGLLANPHLRIYKPWLDADFVTELGGRKEMSEWLLAHGLPYRDSTEKAYSTDANIWGATHEAKTLEHLDTGIETVDPIMGVRFWDPSVEIATEDVTVGFEQGRPVSINGKEFASAVDLVMEANAIGGRHGLGMSDQIENRIIEAKSRGIYEAPGMALLHIVYERLVNAIHNEDTLAAYHNEGRRLGRLMYEGRWLDPQALMIRESLQRWVGTAVTGEVTLRLRRGEDYSILDTTGPAFSYHPDKLSMERTEDSAFGPVDRIGQLTMRNLDIADSRARLEQYVGLGLVGTPHPTPIGAAQAAATGLIGAMDEGGAEAIASRGEATDEETMLDRAAMESGTD

SEQ ID NO: 153790 - DNA, 1206 bp, Syntrophus aciditrophicus
  CDS (1)..(1206): transl_table=11
gtggataccggtgtaaaaaaagtagttcttgcttattctggcggactggatacgtcagtcatcgtccaatggttgatcgaaacatacggatgcgaagtcattgcctttgccgctgacgtcggtcagaaggaagaactggaaggattaagggaaaaagccataaaaaccggggccagtaaaatctatatcgaggatctccgcgaagaattcgcccgggattttgtttttccggcactgcgggcaaacgccatctacgaggggacctatctgctgggaacatcgctggcaagacctttgattgccaaacgccaggtggaaattgcccgggcggaaggggcggatgcggtttgtcatggggcaacgggtaaagggaatgatcaggtgcggttcgaattgacctacatggccttggagccgaacatccggatcatttcggcctggaaggatccaaactggcatttcaaatcccgggaagacatgtttgattacgcggaaaagcacaatatcccgcttcctctcacgcgggaaaagccttacagcagcgaccgcaatctgttgcatatctcacatgagggcgccatcctggaagatccctgggcggaaccgcctgaagacatttttacgatatccttatctcctgaagcagcaccggataagccgacttacgtggaaatcgatttcgaacagggaaatcccgttgctctcgacggtgcacgtctgagtccggcagccctgatggagaagatgaatgacatagcgggggccaacggcatcggccgtgtcgatatggtggaaaaccggttcgtcggaatgaaatcccgaggggtttatgagacgccgggagggaccgtgctctgggcggcacaccgcgccctggagtctctcaccatggacagggaggtgatgctgatgcgcgattctctcattcccaaatacgcccagctggcttacaatggattctggtatgccccggaaatggaagccctgcaggccttgatcgatgaaacccagaaaaaggcaacgggcacggtccggatgaaactctacaagggcaactctattgtcgtcggcagaaagtccccatattccctgtatagtgaagactttgcaacctttgaaaaagatcaggtttacaatcagatggatgcaacggggttcattcggctcaatgcattgagactgcgaatcgcggccatgaagaaataa

SEQ ID NO: 153791 - protein, 401 aa, Syntrophus aciditrophicus
MDTGVKKVVLAYSGGLDTSVIVQWLIETYGCEVIAFAADVGQKEELEGLREKAIKTGASKIYIEDLREEFARDFVFPALRANAIYEGTYLLGTSLARPLIAKRQVEIARAEGADAVCHGATGKGNDQVRFELTYMALEPNIRIISAWKDPNWHFKSREDMFDYAEKHNIPLPLTREKPYSSDRNLLHISHEGAILEDPWAEPPEDIFTISLSPEAAPDKPTYVEIDFEQGNPVALDGARLSPAALMEKMNDIAGANGIGRVDMVENRFVGMKSRGVYETPGGTVLWAAHRALESLTMDREVMLMRDSLIPKYAQLAYNGFWYAPEMEALQALIDETQKKATGTVRMKLYKGNSIVVGRKSPYSLYSEDFATFEKDQVYNQMDATGFIRLNALRLRIAAMKK

SEQ ID NO: 153792 - DNA, 1203 bp, Synechocystis sp
  CDS (1)..(1203): transl_table=11
atgggtcgcgccaagaaagtcgttctcgcctattccggtggggtagatacatcggtttgtattccctatttgatgcacgaatggggcgttgaggaagttattaccctcgcggcggatttgggccagggggatgaactggggccgatccaggaaaaagccctgcggtgtggtgcggtagaatccttggttattgacggcaaggaagaattcgttaaggagtatgcttttcgttctatccaggccaatgctctctacgaaaaccgttatcccctctccacagccctagcccggcccttaattgccaaaatgctggtggaagcggcggaaaaatacggtgccgatgcggtggcccatggttgtactggtaagggcaatgaccaagtgcggttcgatatcagcattatggccctaaaccccaatttgaaggtgttggccccagcccgggaatggaaaatgagccgggaagaaaccatcgcctatggggaacggtatggcgtagaatcccccgtgaaaaagtcttccccctacagcattgaccgcaacattctcggccgtagcattgaagcggggcctctggaagaccccatgaccgagcccacggaagaaatttatctgatgaccaaggcgatcgccgacaccccagatgaaccggaatatgtggacatcggctttgaaaaaggtattcccgttagtttgaatggggtgatgctagaccccgttaccctggtggaacgcctgaacgaaattgcggggaaccacggggtaggccgtttggatatggtggagaaccgggtggtggggattaaatcccgcgagatttacgaagctccggctttgctagttttaattgatgcccaccgggatctggaaagtttgacccaaaccgccgatgttacccactataaaaacaccgtcgaagaaatttatagtcagttaatttaccggggattatggtacagccccctcaaagaagccctggatgcttttattgtcaaaacccaggaacgggttacgggcatggtgcgggtgaaattcttcaagggcaatgccaacgttgccggtcgtaaatccgattactccatctatgatgcggaattggccacctacggcatggaagaccaattcgaccataaggcggcggaaggctttatctatatttggggcttacccaccaaagtttgggcccagaaaatgcgcggttaa

SEQ ID NO: 153793 - protein, 400 aa, Synechocystis sp
MGRAKKVVLAYSGGVDTSVCIPYLMHEWGVEEVITLAADLGQGDELGPIQEKALRCGAVESLVIDGKEEFVKEYAFRSIQANALYENRYPLSTALARPLIAKMLVEAAEKYGADAVAHGCTGKGNDQVRFDISIMALNPNLKVLAPAREWKMSREETIAYGERYGVESPVKKSSPYSIDRNILGRSIEAGPLEDPMTEPTEEIYLMTKAIADTPDEPEYVDIGFEKGIPVSLNGVMLDPVTLVERLNEIAGNHGVGRLDMVENRVVGIKSREIYEAPALLVLIDAHRDLESLTQTADVTHYKNTVEEIYSQLIYRGLWYSPLKEALDAFIVKTQERVTGMVRVKFFKGNANVAGRKSDYSIYDAELATYGMEDQFDHKAAEGFIYIWGLPTKVWAQKMRG

SEQ ID NO: 153794 - DNA, 1218 bp, Vibrio vulnificus; identical to SEQ ID NO: 153624
  CDS (7)..(1218): transl_table=11

SEQ ID NO: 153795 - protein, 403 aa, Vibrio vulnificus
MSKLNVNKVVVAYSGGLDTSVIIPWLKENYDCEVVAFVADVGQGEEELVGIEEKAKASGASECYVVDLKEELVADYIYPTLKTGAYYEGKYLLGTSMARPVIAKAQVEIARKVGADALCHGCTGKGNDQVRFEGAFAALAPDLKVIAPWREWDLVSREQCLDYLAERNIPCAASLTKIYSRDANAWHISTEGGVLESTWNAPNEDCWVWTVDPEQAPNEAEYVTLQVEKGEVVAVDGEQMTPYNALVYLNEKGAKHGVGRIDIVENRLVGMKSRGCYETPGGTIMMEALRAVEQLVLDKTSFEFREELGLKASHLVYDGRWFTPLRKSIMAAADELAQDVNGEVVVKLYKGMATVTQKRSENSLYSEAFATFGEDEVYDQSHAGGFIRLYSLSSRIRALNSQK

SEQ ID NO: 153796 - DNA, 1215 bp, Wolinella succinogenes
  CDS (1)..(1215): transl_table=11
atgtccaaaaaaatcaacaaaatcgtccttgcctattcgggaggtcttgacaccagcgtcatcttgaaatggcttcaagagcagtatcagtgtgaagtggtcaccttcacggcggatatcggtcaaggcgaagaggtcgagcctgcacgcgccaaagcgaaacttcttggaatcaaagaggagaacattttcatcaaagatctcaaagaggaatttgtccgcgactatgtttttcccatgtttcgagccaataccctttatgaaggcgaataccttctaggtacctctatcgctagaccccttatcgccaagcacctcgtggagatcgccaaagaggtcggagcggatgccatctctcatggcgccacaggcaaaggaaacgaccaagtgcgatttgagcttggaggctatgcgctcatgcccgatgtcaaagtggtcgccccctggagagagtgggatctaaactctcgtgaaaaactcctcgcctacgccgaaaaacatgggattcccatcgagaaaaagggcaaaaaatctccctactctatggacgccaacctcctgcatatctcctatgaagggggaatcctcgaagatcccgccagcgaacctgaggaggatatgtggagatggagcgtctctcctttggacgcacccgatgctccagagaggatcaccattgagtttgaaaggggcgatgccgtagggattaatggcgtgaaaatgtctcccgccaccctcctagccgagctcaatcgcctaggaggcaaacatggaatcgggcggcttgatcttgtggagaatcgctatgtcggaatgaaatctcgcggatgctatgaaactcccggaggcacgattcttctcaaagctcaccgcgccatcgaatcgctaaccctagatcgagaagagactcacctcaaagatgagatgatgccacgctacgctagcctcatctacaatggctactggttctctcctgagcgccgcgccctccaagccctcatcgatgagacacaaaaaaatgtcacgggcagcgttgggctcaaactctataagggcaatgtcatccttgcgggccgcacctccgagcgatcgctcttcaacaccgcctactccacctttgaagaggatagcgtctataaccaaaaagatgccgaaggcttcatcaagctcaacgctctacgcttcatcatcgcaggcaaggcgaatccatcatga

SEQ ID NO: 153797 - protein, 404 aa, Wolinella succinogenes
MSKKINKIVLAYSGGLDTSVILKWLQEQYQCEVVTFTADIGQGEEVEPARAKAKLLGIKEENIFIKDLKEEFVRDYVFPMFRANTLYEGEYLLGTSIARPLIAKHLVEIAKEVGADAISHGATGKGNDQVRFELGGYALMPDVKVVAPWREWDLNSREKLLAYAEKHGIPIEKKGKKSPYSMDANLLHISYEGGILEDPASEPEEDMWRWSVSPLDAPDAPERITIEFERGDAVGINGVKMSPATLLAELNRLGGKHGIGRLDLVENRYVGMKSRGCYETPGGTILLKAHRAIESLTLDREETHLKDEMMPRYASLIYNGYWFSPERRALQALIDETQKNVTGSVGLKLYKGNVILAGRTSERSLFNTAYSTFEEDSVYNQKDAEGFIKLNALRFIIAGKANPS

SEQ ID NO: 153798 - DNA, 1368 bp, Yersinia pestis
  CDS (1)..(1368): transl_table=11
atgacaactattcttaaacaccttcctattaatcagcgtgttggtattgctttttccggtggcctggacaccagtgcggcactgctgtggatgcaaaaaaaaggcgccattccttacgcttataccgctaatctgggtcagcctgatgaagaagattacgaggccatcccgcgtaaagcgatggaatacggcgcggaaaaagcccgtctgatcgattgccgtaagcagttggtggcagaaggtatcgccgctattcaatgtggcgcattccataacaccacggcgggtgtcacttatttcaacaccaccccactgggccgtgcggtaaccggcaccatgctggtggcagccatgaaagaagatgatgtaaatatctggggtgacggtagcacttataaaggtaacgatatcgagcgcttctatcgttacggtctgctgaccaacgctgagctgaaaatttacaaaccgtggctggatactgatttcatcgatgaattgggcggccgccatgagatgtcagaatttatgatccaatccggtttcgactacaaaatgtcaaccgagaaagcctactcgaccgactccaatatgttgggtgccacccacgaggccaaggatctggagttcctcaattccagcgttaaaatcgttaacccgattatgggcgtgaaattctgggacgaaaatgtggtggtgaaggccgaagaagtcactgtccgttttgaacgtggttacccggtcgcgctaaatggtgttgtctttgacgatagcgttgagctgatgatggaggctaaccgcatcggtggccgtcacggtctgggtatgagtgatcagattgaaaaccgtatcatcgaagccaaaagccgtggcatctatgaagcccctgggatggcgctgttgcatatcgcctatgagcgcttgctaacaggtattcacaatgaagataccattgagcaatatcatgctaatgggcgggtactgggtcgtctgctatatcaaggccgttggtttgatccacaagcgctgatgctgcgtgactccattcagcgttgggttgccagcgagataaccggtgaagtgacgctggagctgcgtcgtggcaatgattactccatcctgaataccgtgtctgacaatctgacttacaaaccagaacgtttgaccatggagaaaggtgattccgtgttctcaccagatgatcgtatcggccaactgacgatgcgtaatctggacatcaccgatacccgcgagaagttattcaactatgttgagacggggctgttaacctcttctgcggcgacggggttaccacaagtggataacaataatctgtcgtcagggcgtgggttgcaggataagcgtcagtaa

SEQ ID NO: 153799 - protein, 455 aa, Yersinia pestis
MTTILKHLPINQRVGIAFSGGLDTSAALLWMQKKGAIPYAYTANLGQPDEEDYEAIPRKAMEYGAEKARLIDCRKQLVAEGIAAIQCGAFHNTTAGVTYFNTTPLGRAVTGTMLVAAMKEDDVNIWGDGSTYKGNDIERFYRYGLLTNAELKIYKPWLDTDFIDELGGRHEMSEFMIQSGFDYKMSTEKAYSTDSNMLGATHEAKDLEFLNSSVKIVNPIMGVKFWDENVVVKAEEVTVRFERGYPVALNGVVFDDSVELMMEANRIGGRHGLGMSDQIENRIIEAKSRGIYEAPGMALLHIAYERLLTGIHNEDTIEQYHANGRVLGRLLYQGRWFDPQALMLRDSIQRWVASEITGEVTLELRRGNDYSILNTVSDNLTYKPERLTMEKGDSVFSPDDRIGQLTMRNLDITDTREKLFNYVETGLLTSSAATGLPQVDNNNLSSGRGLQDKRQ

SEQ ID NO: 153800 - DNA, 1434 bp, Glycine max
  CDS (1)..(1434)
atggctcaattgaaagcttctcctttgtgttcaacccctgccactgctccttcccttcatacaacagggcaccttctgtaccatcagttctggaaggcaaagccttcgtcattcaaagagttggggctaagaacaagcattggtgccactaaacttaaagttattaaagcagctgcacgcagtgatacagaggtagtttctgaatccacaaaaggtggtggcctacgtggaaaattgaataaggtggtgttggcttacagtggtggcttagacacatcagtcattgttccatggctcagagaaaattatggttgtgaagttgtttgcttcactgctgatgttgaccaaagtataaaggaattggaaggtttagaacagaaagccaaagccagtggggcctgtcaattagtggtaaaagatttgaaggaggaatttgttaaagattatatatttccttgcctgcgtgctggtgcaatttatgagaggaagtatttgcttgggacctcaatggcccgccctgtaattgcgaaggccatggttgatgttgccaaagaagttggagctgatgctgtttcccatgggtgtacagggaaaggaaatgatcaggttcgatttgagctcactttctttgctctaaaccccaagctcaatgttgtggctccatggagggagtgggatattacagggagagaagatgctattgagtatgctaaaaagcataatatacctgttcctgtgacaaagaaatccatatatagcagggataggaatctttggcaccttagccatgagggagatattttagaagaccctgctaatgaacctaaaaaggacatgtacatgatgtctgtagacccagaggatgctcctgatcaagcagaatatgtggaaattggattagagtcggggcttcctgtttcagtcaatgggaagaggctttcaccagcatctttacttgctgagctcaatgagattggtggaaagcatggaattggcaggattgacatggttgagaatcggcttgtaggtatgaagagccgaggagtgtacgaaactcctggtggaaccatactgtttgctgcagcacgagagttggagtctttgacacttgatcgtgaaacaatacaagtcaaagattcattagcccttaaatatgcagagttagtgtatgctggcagatggtttgatcctcttcgggagtccatggattcctttatgcagaagatcacagagaccacaacaggttctgtgactttgaaattgtacaaaggttctgttattgtaactagtcgaatgagtccctttagcctgtatagggaagacatttcatcatttgagagtgggcagatatatgatcaagctgatgctgctgggttcattcggctttatggtcttccaatgaaggttcgagcaatgcttgagcagggcatctaa

SEQ ID NO: 153801 - protein, 477 aa, Glycine max
MAQLKASPLCSTPATAPSLHTTGHLLYHQFWKAKPSSFKELGLRTSIGATKLKVIKAAARSDTEVVSESTKGGGLRGKLNKVVLAYSGGLDTSVIVPWLRENYGCEVVCFTADVDQSIKELEGLEQKAKASGACQLVVKDLKEEFVKDYIFPCLRAGAIYERKYLLGTSMARPVIAKAMVDVAKEVGADAVSHGCTGKGNDQVRFELTFFALNPKLNVVAPWREWDITGREDAIEYAKKHNIPVPVTKKSIYSRDRNLWHLSHEGDILEDPANEPKKDMYMMSVDPEDAPDQAEYVEIGLESGLPVSVNGKRLSPASLLAELNEIGGKHGIGRIDMVENRLVGMKSRGVYETPGGTILFAAARELESLTLDRETIQVKDSLALKYAELVYAGRWFDPLRESMDSFMQKITETTTGSVTLKLYKGSVIVTSRMSPFSLYREDISSFESGQIYDQADAAGFIRLYGLPMKVRAMLEQGI

SEQ ID NO: 153802 - DNA, 1434 bp, Glycine max
  CDS (1)..(1434)
atggctcaattgaaagcttctcctttgtgttcaacccctgccactgctccttcccttcatacaacagggcaccttctgtaccatcagttctggaaggcaaagccttcgtcattcaaagagttggggctaagaacaagcattggtgccactaaacttaaagttattaaagcagctgcacgcagtgatacagaggtagtttctgaatccacaaaaggtggtggcctacgtggaaaattgaataaggtggtgttggcttacagtggtggcttagacacatcagtcattgttccatggctcagagaaaattatggttgtgaagttgtttgcttcactgctgatgttgaccaaagtataaaggaattggaaggtttagaacagaaagccaaagccagtggggcctgtcaattagtggtaaaagatttgaaggaggaatttgttaaagattatatatttccttgcctgcgtgctggtgcaatttatgagaggaagtatttgcttgggacctcaatggcccgccctgtaattgcgaaggccatggttgatgttgccaaagaagttggagctgatgccgtttcccatgggtgtacagggaaaggaaatgatcaggttcgatttgagctcactttctttgctctaaaccccaagctcaatgttgtggctccatggagggagtgggatattacagggagagaagatgctattgagtatgctaaaaagcataatatacctgttcctgtgacaaagaaatccatatatagcagggataggaatctttggcaccttagccatgagggagatattttagaagaccctgctaatgaacctaaaaaggacatgtacatgatgtctgtagacccagaggatgctcctgatcaagcagaatatgtggaaattggattagagtcggggcttcctgtttcagtcaatgggaagaggctttcaccagcatctttacttgctgagctcaatgagattggtggaaagcatggaattggcaggattgacatggttgagaatcggcttgtaggtatgaagagccgaggagtgtacgaaactcctggtggaaccatactgtttgctgcagcacgagagttggagtctttgacacttgatcgtgaaacaatacaagtcaaagattcattagcccttaaatatgcagagttagtgtatgctggcagatggtttgatcctcttcgggagtccatggatgcctttatgcagaagatcacggagaccacaacaggttctgtgactttgaaattgtacaaaggttctgttactgtaaccagtcgaacgagtccctttagcctgtatagggaagacatttcatcatttgaaagtgggcagatatatgatcaagctgatgctgctgggttcattcggctttatggtcttccaatgagggttcgagcaatgcttgagcagggcatctaa

SEQ ID NO: 153803 - protein, 477 aa, Glycine max
MAQLKASPLCSTPATAPSLHTTGHLLYHQFWKAKPSSFKELGLRTSIGATKLKVIKAAARSDTEVVSESTKGGGLRGKLNKVVLAYSGGLDTSVIVPWLRENYGCEVVCFTADVDQSIKELEGLEQKAKASGACQLVVKDLKEEFVKDYIFPCLRAGAIYERKYLLGTSMARPVIAKAMVDVAKEVGADAVSHGCTGKGNDQVRFELTFFALNPKLNVVAPWREWDITGREDAIEYAKKHNIPVPVTKKSIYSRDRNLWHLSHEGDILEDPANEPKKDMYMMSVDPEDAPDQAEYVEIGLESGLPVSVNGKRLSPASLLAELNEIGGKHGIGRIDMVENRLVGMKSRGVYETPGGTILFAAARELESLTLDRETIQVKDSLALKYAELVYAGRWFDPLRESMDAFMQKITETTTGSVTLKLYKGSVTVTSRTSPFSLYREDISSFESGQIYDQADAAGFIRLYGLPMRVRAMLEQGI

SEQ ID NO: 153804 - DNA, 1446 bp, Zea mays
  CDS (1)..(1446)
atggcgtcggcgcgaggaccttgcggaattagtgtccgttctgacttcagttcagcctgccttattcacaaggctggagccccatcgaattctgtttctggcgtgatggctgttcaggttcaccgccaccgtaacaaggtccgcaatggccaagctatcaggtgtgcaatggcaactggaaaagagcagggtgcaatttccactgccagtagcggtgatcaaaccaagggcggtttgcgtggaaaattaaacaaagttgttttagcttatagtggtggtttggatacatccgttattgttccatggctcagggagaactatggttgtgaagtcgtttgtttcactgctgatgttggccagggtgccattgaattggaagggttggagaagaaggcaaaagccagtggtgcatgtcagcttgttgtgaaggacctcaaagaagaatttgttagtgaatatatatacccctgcctgcgtgcaggtgcagtttatgaaagaaagtatctgcttgggacttcgatggctaggcctgttattgctaaggcaatggttgatgttgccaaggaagttggtgcggatgcagttgcccatggttgcactggaaaaggcaatgatcaggttcgctttgagcttacattctatgctttaaatcctgaacttaaagtggtggcaccttggagggagtgggatatcacaggacgtgaagatgctattgaatatgcaaagaaacataatgtacctgttccagtttcaaagaaatcaatatacagccgagaccgaaacttgtggcaccttagccatgagggtgacatcctggaggacccagcaaatgagccaaaggaagatatgtatatgatgtcgattgctccagaaaatgcgccctcgaaacctgagtatttggagattggtatcattgctggtgttcctgtttcaatcaatggccgagacctctcaccagcatccctcctcgcggagctcaatgaaatcggtggaaagcatgggattgggcgtatcgacatggtggaaaacaggctggtcggcatgaagtcacgtggggtctatgagacccccggtggcaccatcatggcagccgcggtacgcgagttggagtccctgaccctggacagggagaccatgcagtggaaggacatcattgccctcaagtacgccgagctggtctatgctggccgctggtttgacccgctccggcagtcctttgatgccttcatggagaaggttaccgcgacgaccactggttcagtgaccctgaagctgtacaagggttccgtgaacgtcgcgtcccggaagagcccctacagcctgtacagggaagatatctcctcgtttgagaacggggagatctacaaccaagctgacgccgaggggttcatcaggctgtacggcctaccgacacgggtccgggcgatgctggagaagggtatctga

SEQ ID NO: 153805 - protein, 481 aa, Zea mays
MASARGPCGISVRSDFSSACLIHKAGAPSNSVSGVMAVQVHRHRNKVRNGQAIRCAMATGKEQGAISTASSGDQTKGGLRGKLNKVVLAYSGGLDTSVIVPWLRENYGCEVVCFTADVGQGAIELEGLEKKAKASGACQLVVKDLKEEFVSEYIYPCLRAGAVYERKYLLGTSMARPVIAKAMVDVAKEVGADAVAHGCTGKGNDQVRFELTFYALNPELKVVAPWREWDITGREDAIEYAKKHNVPVPVSKKSIYSRDRNLWHLSHEGDILEDPANEPKEDMYMMSIAPENAPSKPEYLEIGIIAGVPVSINGRDLSPASLLAELNEIGGKHGIGRIDMVENRLVGMKSRGVYETPGGTIMAAAVRELESLTLDRETMQWKDIIALKYAELVYAGRWFDPLRQSFDAFMEKVTATTTGSVTLKLYKGSVNVASRKSPYSLYREDISSFENGEIYNQADAEGFIRLYGLPTRVRAMLEKGI

SEQ ID NO: 153806 - DNA, 24 bp, Artificial sequence
  primer
atgacgacgattctcaagcatctc

SEQ ID NO: 153807 - DNA, 25 bp, Artificial sequence
  primer
ttactggcctttgttttccagattc

SEQ ID NO: 153808 - protein, 414 aa, Artificial sequence
  consensus sequence
  Variant (2)..(3): Xaa in position 2 to 3 is any amino acid
  Variant (5)..(5): Xaa in position 5 is any amino acid
  Variant (13)..(16): Xaa in position 13 to 16 is any amino acid
  Variant (18)..(29): Xaa in position 18 to 29 is any amino acid
  Variant (30)..(31): Xaa in position 30 to 31 is any or no amino acid
  Variant (33)..(34): Xaa in position 33 to 34 is any amino acid
  Variant (37)..(46): Xaa in position 37 to 46 is any amino acid
  Variant (47)..(48): Xaa in position 47 to 48 is any or no amino acid
  Variant (50)..(52): Xaa in position 50 to 52 is any amino acid
  Variant (55)..(60): Xaa in position 55 to 60 is any amino acid
  Variant (61)..(62): Xaa in position 61 to 62 is any or no amino acid
  Variant (64)..(85): Xaa in position 64 to 85 is any amino acid
  Variant (86)..(89): Xaa in position 86 to 89 is any or no amino acid
  Variant (91)..(93): Xaa in position 91 to 93 is any amino acid
  Variant (95)..(96): Xaa in position 95 to 96 is any amino acid
  Variant (97)..(97): Xaa in position 97 is any or no amino acid
  Variant (99)..(117): Xaa in position 99 to 117 is any amino acid
  Variant (118)..(119): Xaa in position 118 to 119 is any or no amino acid
  Variant (121)..(121): Xaa in position 121 is any amino acid
  Variant (123)..(123): Xaa in position 123 is any amino acid
  Variant (128)..(129): Xaa in position 128 to 129 is any amino acid
  Variant (132)..(139): Xaa in position 132 to 139 is any amino acid
  Variant (141)..(146): Xaa in position 141 to 146 is any amino acid
  Variant (149)..(154): Xaa in position 149 to 154 is any amino acid
  Variant (155)..(159): Xaa in position 155 to 159 is any or no amino acid
  Variant (161)..(179): Xaa in position 161 to 179 is any amino acid
  Variant (180)..(185): Xaa in position 180 to 185 is any or no amino acid
  Variant (187)..(187): Xaa in position 187 is any amino acid
  Variant (189)..(189): Xaa in position 189 is any amino acid
  Variant (191)..(196): Xaa in position 191 to 196 is any amino acid
  Variant (198)..(200): Xaa in position 198 to 200 is any amino acid
  Variant (203)..(225): Xaa in position 203 to 225 is any amino acid
  Variant (226)..(228): Xaa in position 226 to 228 is any or no amino acid
  Variant (230)..(234): Xaa in position 230 to 234 is any amino acid
  Variant (236)..(237): Xaa in position 236 to 237 is any amino acid
  Variant (239)..(239): Xaa in position 239 is any amino acid
  Variant (242)..(257): Xaa in position 242 to 257 is any amino acid
  Variant (258)..(266): Xaa in position 258 to 266 is any or no amino acid
  Variant (268)..(272): Xaa in position 268 to 272 is any amino acid
  Variant (275)..(275): Xaa in position 275 is any amino acid
  Variant (277)..(278): Xaa in position 277 to 278 is any amino acid
  Variant (280)..(281): Xaa in position 280 to 281 is any amino acid
  Variant (285)..(288): Xaa in position 285 to 288 is any amino acid
  Variant (293)..(293): Xaa in position 293 is any amino acid
  Variant (296)..(296): Xaa in position 296 is any amino acid
  Variant (299)..(301): Xaa in position 299 to 301 is any amino acid
  Variant (303)..(304): Xaa in position 303 to 304 is any amino acid
  Variant (306)..(308): Xaa in position 306 to 308 is any amino acid
  Variant (310)..(333): Xaa in position 310 to 333 is any amino acid
  Variant (334)..(334): Xaa in position 334 is any or no amino acid
  Variant (336)..(336): Xaa in position 336 is any amino acid
  Variant (338)..(338): Xaa in position 338 is any amino acid
  Variant (340)..(341): Xaa in position 340 to 341 is any amino acid
  Variant (343)..(359): Xaa in position 343 to 359 is any amino acid
  Variant (360)..(360): Xaa in position 360 is any or no amino acid
  Variant (362)..(362): Xaa in position 362 is any amino acid
  Variant (364)..(366): Xaa in position 364 to 366 is any amino acid
  Variant (368)..(369): Xaa in position 368 to 369 is any amino acid
  Variant (371)..(399): Xaa in position 371 to 399 is any amino acid
  Variant (400)..(403): Xaa in position 400 to 403 is any or no amino acid
  Variant (405)..(406): Xaa in position 405 to 406 is any amino acid
  Variant (408)..(413): Xaa in position 408 to 413 is any amino acid
VXXAXSGGLDTSXXXXWXXXXXXXXXXXXXXAXXGQXXXXXXXXXXXXAXXXGAXXXXXXXXDXXXXXXXXXXXXXXXXXXXXXXXXXXYXXXTXXXRXXXXXXXXXXXXXXXXXXXXXGXTXKGNDXXRFXXXXXXXXPXXXXXXPWXXXXXXXXXXXRXXXXXXXXXXXXXXXXXXXXXXXXXSXDXNXXXXXXEXXXLEXXXXXXXXXXXXXXXXXXXXXXXXXXEXXXXXFXXGXPVXXXXXXXXXXXXXXXXXXXXXXXXXNXXXXXHGXGXXDXXENRXXXXKSRGXYEXPGXXXLXXAXXXLXXXXXXXXXXXXXXXXXXXXXXXXXYXGXWXXPXXXXXXXXXXXXXXXXXXGXVXXXLXXGXXXXXXXXXXXXXXXXXXXXXXXXXXXXXXXXXDXXGXXXXXXL

SEQ ID NO: 153809 - protein, 36 aa, Artificial sequence
  protein pattern
  Variant (2)..(3): Xaa in position 2 to 3 is any amino acid
  Variant (4)..(4): Xaa in position 4 is any or no amino acid
  Variant (6)..(6): Xaa in position 6 is Phe, Ile, Leu, Met or Val
  Variant (8)..(9): Xaa in position 8 to 9 is any amino acid
  Variant (11)..(11): Xaa in position 11 is any amino acid
  Variant (12)..(12): Xaa in position 12 is Ile or Val
  Variant (16)..(16): Xaa in position 16 is any amino acid
  Variant (17)..(17): Xaa in position 17 is Ile, Leu or Val
  Variant (18)..(18): Xaa in position 18 is Glu or Gly
  Variant (19)..(19): Xaa in position 19 is any amino acid
  Variant (23)..(23): Xaa in position 23 is Ala, Glu or Gly
  Variant (24)..(24): Xaa in position 24 is any amino acid
  Variant (27)..(27): Xaa in position 27 is Ala, Ser or Thr
  Variant (29)..(29): Xaa in position 29 is Ala or Gly
  Variant (30)..(31): Xaa in position 30 to 31 is any amino acid
  Variant (32)..(32): Xaa in position 32 is Ile, Leu or Val
  Variant (33)..(35): Xaa in position 33 to 35 is any amino acid
  Variant (36)..(36): Xaa in position 36 is Ala, Thr or Val
GXXXGXGXXDXXENRXXXXKSRXXYEXPXXXXXXXX

SEQ ID NO: 153810 - protein, 12 aa, Artificial sequence
  protein pattern
  Variant (2)..(2): Xaa in position 2 is any amino acid
  Variant (4)..(4): Xaa in position 4 is any amino acid
  Variant (9)..(10): Xaa in position 9 to 10 is any amino acid
GXTXKGNDXXRF

SEQ ID NO: 153811 - protein, 19 aa, Artificial sequence
  protein pattern
  Variant (2)..(4): Xaa in position 2 to 4 is any or no amino acid
  Variant (6)..(6): Xaa in position 6 is Ile, Leu or Met
  Variant (7)..(9): Xaa in position 7 to 9 is any amino acid
  Variant (10)..(10): Xaa in position 10 is Ser or Thr
  Variant (11)..(11): Xaa in position 11 is any amino acid
  Variant (13)..(13): Xaa in position 13 is Ala or Gly
  Variant (14)..(15): Xaa in position 14 to 15 is any amino acid
  Variant (18)..(18): Xaa in position 18 is any amino acid
  Variant (19)..(19): Xaa in position 19 is Leu or Pro
SXXXNXXXXXXEXXXLEXX

SEQ ID NO: 153812 - protein, 10 aa, Artificial sequence
  protein pattern
  Variant (2)..(2): Xaa in position 2 is Phe or Leu
  Variant (3)..(3): Xaa in position 3 is any amino acid
  Variant (4)..(4): Xaa in position 4 is Gly or Thr
  Variant (6)..(6): Xaa in position 6 is Pro or Ser
  Variant (7)..(7): Xaa in position 7 is Ile, Leu or Met
  Variant (8)..(8): Xaa in position 8 is Ala or Gly
  Variant (10)..(10): Xaa in position 10 is Ala or Pro
YXXXTXXXRX

SEQ ID NO: 153813 - DNA, 813 bp, Escherichia coli
  CDS (1)..(813): transl_table=11
atgaaatcactgtttaaagtaacgctgctggcgaccacaatggccgttgccctgcatgcaccaatcacttttgctgctgaagctgcaaaacctgctacagctgctgacagcaaagcagcgttcaaaaatgacgatcagaaatcagcttatgcactgggtgcctcgctgggtcgttacatggaaaactctctaaaagaacaagaaaaactgggcatcaaactggataaagatcagctgatcgctggtgttcaggatgcatttgctgataagagcaaactctccgaccaagagatcgaacagactctacaagcattcgaagctcgcgtgaagtcttctgctcaggcgaagatggaaaaagacgcggctgataacgaagcaaaaggtaaagagtaccgcgagaaatttgccaaagagaaaggtgtgaaaacctcttcaactggtctggtttatcaggtagtagaagccggtaaaggcgaagcaccgaaagacagcgatactgttgtagtgaactacaaaggtacgctgatcgacggtaaagagttcgacaactcttacacccgtggtgaaccgctttctttccgtctggacggtgttatcccgggttggacagaaggtctgaagaacatcaagaaaggcggtaagatcaaactggttattccaccagaactggcttacggcaaagcgggtgttccggggatcccaccgaattctaccctggtgtttgacgtagagctgctggatgtgaaaccagcgccgaaggctgatgcaaagccggaagctgatgcgaaagccgcagattctgctaaaaaataa

SEQ ID NO: 153814 - protein, 270 aa, Escherichia coli
MKSLFKVTLLATTMAVALHAPITFAAEAAKPATAADSKAAFKNDDQKSAYALGASLGRYMENSLKEQEKLGIKLDKDQLIAGVQDAFADKSKLSDQEIEQTLQAFEARVKSSAQAKMEKDAADNEAKGKEYREKFAKEKGVKTSSTGLVYQVVEAGKGEAPKDSDTVVVNYKGTLIDGKEFDNSYTRGEPLSFRLDGVIPGWTEGLKNIKKGGKIKLVIPPELAYGKAGVPGIPPNSTLVFDVELLDVKPAPKADAKPEADAKAADSAKK

SEQ ID NO: 153815 - DNA, 795 bp, Treponema pallidum subsp. pallidum str. Nichols
  CDS (1)..(795): transl_table=11
atgattttgaaaaaagaagctgcaggggtgtgttctttcgcgcttctgctccttgcgggtatgagtattttttcctgtcggaagggtgctgagggggtgtcctctgccggggaggctgcggataagaaggcgctgactgctgatcagctcgatccgcgaaaggtgcaggagcaggagcggcagaagacgccgctttcaaagaagagtgtggggtatgcctttggggttctcatgggggtgacgctgcaggattcgaagttagacgttgacctgggtcaggtgtggaagggtctaaagaagacagtcagtgcagacaaggataagcaggcacttgcggatgcgcaggacgtgctacagcgtgcgttcgaggcatatcggcaaaaagaggtagagaagaattcgcaggaggcaaaggcctttcttgaagagaatgcgaagaagccaggtgtgcaggtaacttcctctgggttgcagtacgaggtggtaaaggctgcagatggtccaaagccgcagggcggtcagagggtgcgcactcagtacaaggggacgctgcttgatggaacggtgtttgatgcctctcgagataagcctgcggagtttccggtggatggtatggtgcctggggtatctgagggcttaaagctgatgccggtgggttctacctatcggttttatgtgccttcttccttggggtatggggagcgtggtatcgagggggttatccctccaggtgcgctcctagtttttgagatagagttacaggaaatactcccagattcagcttcgaaaaagtga

SEQ ID NO: 153816 - protein, 264 aa, Treponema pallidum subsp. pallidum str. Nichols
MILKKEAAGVCSFALLLLAGMSIFSCRKGAEGVSSAGEAADKKALTADQLDPRKVQEQERQKTPLSKKSVGYAFGVLMGVTLQDSKLDVDLGQVWKGLKKTVSADKDKQALADAQDVLQRAFEAYRQKEVEKNSQEAKAFLEENAKKPGVQVTSSGLQYEVVKAADGPKPQGGQRVRTQYKGTLLDGTVFDASRDKPAEFPVDGMVPGVSEGLKLMPVGSTYRFYVPSSLGYGERGIEGVIPPGALLVFEIELQEILPDSASKK

SEQ ID NO: 153817 - DNA, 630 bp, Vibrio cholerae O1 biovar eltor str. N16961
  CDS (1)..(630): transl_table=11
atgacttttatgtctgaagtaaaatttgaaaccgtagaacagaaagcaagctacggcattggcctacaaatgggtcaacagttggcaggtagtggccttgaaggcttaaacgtagcggcaattgctgcgggtatcgccaccgctcttgttggcgagcagccagcgatttctattgatgagatcaaccaagctctacatgcgattcatatgcgtgctgaagaagcccgccaagaagccgctaaagtggccgcttctgaaggtgaagctttcctgaaagataatgctctacgtccagaagtgacggttcttgagtcaggcctgcagtacgaagtactggttgaaggtaatggcgcaatcccaacatccgataagtcagttcgcgtacactaccacggccaactggttgatggcactgtgtttgatagctcagtatcacgcggccaacctgctgaattcccggtgactggcgtgatccgcggttgggttgaagctctgcaactgatgcctgttggttctaagtggaaactctacattccacacaaccttgcttatggcgagcgtggcgcaggcgcagcgattcctccgtttgcagcgttagtatttgaagtcgaactgctggatatcctgtaa

SEQ ID NO: 153818 - protein, 209 aa, Vibrio cholerae O1 biovar eltor str. N16961
MTFMSEVKFETVEQKASYGIGLQMGQQLAGSGLEGLNVAAIAAGIATALVGEQPAISIDEINQALHAIHMRAEEARQEAAKVAASEGEAFLKDNALRPEVTVLESGLQYEVLVEGNGAIPTSDKSVRVHYHGQLVDGTVFDSSVSRGQPAEFPVTGVIRGWVEALQLMPVGSKWKLYIPHNLAYGERGAGAAIPPFAALVFEVELLDIL

SEQ ID NO: 153819 - DNA, 717 bp, Pasteurella multocida subsp. multocida str. Pm70
  CDS (1)..(717): transl_table=11
atgtttaaaattcaaaagctttctcttattacccttgtggtgagtgcggttatttctggcaatgcgttagcgaatacggatgctaaatttaacgatgaagcatcttacgcagtaggggtgttattaggatcaaatgttaaacaaattgtagaatcgcaaaaaggcattattgaatatgacaatacgcgtttattggcaggggtgcaagatgtattaaatggtaaggtagatcttgattcaaatgaacaaattgcacaaacattacaacgcgtacaagagaaaatgcaacaagcgcaagctcagttactcgccgatattgcaaaacaagcaaaacaagatggcgaccaatatcgccaaacatttgagaaaaaagcgggagcgaagaaaacccaatctggtctgttatatcgcattgaacaagcagggacaggaaatacgattaagccaactgacactgttaccgttaattataccggcaaactccctaatggcgaggtatttgacagttcgcgtggtaaaccggtgtcctttaaattgaaccaagtggtaccgggttggacagaaggtttacaacttgttaaaaaaggtggaaaaatcgaactcgttctcccaccagaattggcgtatggggagcaaggggctggacagattccaccaaatgcgactttacactttgatgttgaagtcatcgatgtgaaagcggatacacaaaaataa

SEQ ID NO: 153820 - protein, 238 aa, Pasteurella multocida subsp. multocida str. Pm70
MFKIQKLSLITLVVSAVISGNALANTDAKFNDEASYAVGVLLGSNVKQIVESQKGIIEYDNTRLLAGVQDVLNGKVDLDSNEQIAQTLQRVQEKMQQAQAQLLADIAKQAKQDGDQYRQTFEKKAGAKKTQSGLLYRIEQAGTGNTIKPTDTVTVNYTGKLPNGEVFDSSRGKPVSFKLNQVVPGWTEGLQLVKKGGKIELVLPPELAYGEQGAGQIPPNATLHFDVEVIDVKADTQK

SEQ ID NO: 153821 - DNA, 633 bp, Pasteurella multocida subsp. multocida str. Pm70
  CDS (1)..(633): transl_table=11
atgagtcaacaatttttcgaccaagtatcattagaaagcctttcagcgaaaggaagctacggtatcggtttacaaatcggtcaacaattattagaaagccaacttgaagtgagcgccgaagccgtcgcgaaagggatctttgatgtgttaaatcaaaatccaccagcacttgagttaaatgaagtgagtcatgccctacagactttgcaacaacaagccactgaagcacaacaagcgaaattcaaagaaattgaagccgttggtgcacaattcttagctgaaaacgcgcaaaaagcgggggtaaatactacggaatctggtttacagtatgaagtgttagtggctggcgaagggcaaattccggcacgcgaagacaaagtgcgtgtgcattacactgggacattaatcgacggtaccgtctttgacagctcagtaaaacgtggtcaacctgcagaattcccagtgaatggtgtgatcgctggttggattgaagccttgtccatgatgccagtgggttcaaaatggcgtttaaccattcctcacaacctcgcttatggcgaacgtggtgccggtgcatccattccgccattcagtaccttagtgtttgaagtcgaattattagccattctttaa

SEQ ID NO: 153822 - protein, 210 aa, Pasteurella multocida subsp. multocida str. Pm70
MSQQFFDQVSLESLSAKGSYGIGLQIGQQLLESQLEVSAEAVAKGIFDVLNQNPPALELNEVSHALQTLQQQATEAQQAKFKEIEAVGAQFLAENAQKAGVNTTESGLQYEVLVAGEGQIPAREDKVRVHYTGTLIDGTVFDSSVKRGQPAEFPVNGVIAGWIEALSMMPVGSKWRLTIPHNLAYGERGAGASIPPFSTLVFEVELLAIL

SEQ ID NO: 153823 - DNA, 819 bp, Neisseria meningitidis MC58
  CDS (1)..(819): transl_table=11
atgaacaccattttcaaaatcagcgcactgaccctttccgccgctttggcactttccgcctgcggcaaaaaagaagccgcccccgcatctgcatccgaacctgccgccgcttcttccgcgcagggcgacacctcttcgatcggcagcacgatgcagcaggcaagctatgcgatgggcgtggacatcggacgctccctgaagcaaatgaaggaacagggcgcggaaatcgatttgaaagtctttaccgaagccatgcaggcagtgtatgacggcaaagaaatcaaaatgaccgaagagcaggctcaggaagtcatgatgaaattccttcaggaacaacaggctaaagccgtagaaaaacacaaggcggacgcgaaggccaataaagaaaaaggcgaagcctttctgaaagaaaatgccgccaaagacggcgtgaagaccactgcttccggcctgcaatacaaaatcaccaaacagggcgaaggcaaacagccgaccaaagacgacatcgttaccgtggaatacgaaggccgcctgattgacggtacggtattcgacagcagcaaagccaacggcggcccggtcaccttccctttgagccaagtgattccgggttggaccgaaggcgtacagcttctgaaagaaggcggcgaagccacgttctacatcccgtccaaccttgcctaccgcgaacagggtgcgggcgacaaaatcggtccgaacgccactttggtatttgatgtgaaactggtcaaaatcggcgcacccgaaaacgcgcccgccaagcagccggctcaagtcgacatcaaaaaagtaaattaa

SEQ ID NO: 153824 - protein, 272 aa, Neisseria meningitidis MC58
MNTIFKISALTLSAALALSACGKKEAAPASASEPAAASSAQGDTSSIGSTMQQASYAMGVDIGRSLKQMKEQGAEIDLKVFTEAMQAVYDGKEIKMTEEQAQEVMMKFLQEQQAKAVEKHKADAKANKEKGEAFLKENAAKDGVKTTASGLQYKITKQGEGKQPTKDDIVTVEYEGRLIDGTVFDSSKANGGPVTFPLSQVIPGWTEGVQLLKEGGEATFYIPSNLAYREQGAGDKIGPNATLVFDVKLVKIGAPENAPAKQPAQVDIKKVN

SEQ ID NO: 153825 - DNA, 819 bp, Neisseria meningitidis Z2491
  CDS (1)..(819): transl_table=11
atgaacaccattttcaaaatcagcgcactgaccctttccgccgctttggcactttccgcctgcggcaaaaaagaagccgcccccgcatctgcatccgaacctgccgccgcttcttccgcgcagggcgacacctcttcgatcggcagcacgatgcagcaggcaagctatgcgatgggcgtggacatcggacgctccctgaagcaaatgaaggaacagggcgcggaaatcgatttgaaagtctttaccgaagccatgcaggcagtgtatgacggcaaagaaatcaaaatgaccgaagagcaggctcaggaagtcatgatgaaattccttcaggaacaacaggctaaagccgtagaaaaacacaaggcggacgcgaaggccaataaagaaaaaggcgaagcctttctgaaagaaaatgccgccaaagacggcgtgaagaccactgcttccggcctgcaatacaaaatcaccaaacagggcgaaggcaaacagccgaccaaagacgacatcgttaccgtggaatacgaaggccgcctgattgacggtacggtattcgacagcagcaaagccaacggcggcccggtcaccttccctttgagccaagtgattctgggttggaccgaaggcgtacagcttctgaaagaaggcggcgaagccacgttctacatcccgtccaaccttgcctaccgcgaacagggtgcgggcgacaaaatcggcccgaacgccactttggtatttgatgtgaaactggtcaaaatcggcgcacccgaaaacgcgcccgccaagcagccggctcaagtcgacatcaaaaaagtaaattaa

SEQ ID NO: 153826 - protein, 272 aa, Neisseria meningitidis Z2491
MNTIFKISALTLSAALALSACGKKEAAPASASEPAAASSAQGDTSSIGSTMQQASYAMGVDIGRSLKQMKEQGAEIDLKVFTEAMQAVYDGKEIKMTEEQAQEVMMKFLQEQQAKAVEKHKADAKANKEKGEAFLKENAAKDGVKTTASGLQYKITKQGEGKQPTKDDIVTVEYEGRLIDGTVFDSSKANGGPVTFPLSQVILGWTEGVQLLKEGGEATFYIPSNLAYREQGAGDKIGPNATLVFDVKLVKIGAPENAPAKQPAQVDIKKVN

SEQ ID NO: 153827 - DNA, 813 bp, Escherichia coli O157:H7 EDL933
  CDS (1)..(813): transl_table=11
  misc_feature (715)..(715): m is a or c
atgaaatcactgtttaaagtaacgctgctggcgaccacaatggccgttgccttgcatgcaccaatcacttttgctgctgaagctgcaaaacctgctacaactgctgacagcaaagcagcgttcaaaaatgacgatcagaaatcagcttatgcactgggtgcctcgctgggtcgttacatggaaaactctctaaaagaacaagaaaaactgggcatcaaactggataaagatcagctgatcgctggtgttcaggatgcatttgctgataagagcaaactctccgaccaagagatcgaacagactctgcaagcattcgaagctcgcgtgaagtcttctgctcaggcgaagatggaaaaagacgcggctgataacgaagcaaaaggtaaagagtaccgcgagaaatttgccaaagagaaaggtgtgaaaacctcttccactggtctggtttatcaggtagtagaagccggtaaaggcgaagcaccgaaagacagcgatactgttgtcgtgaactacaaaggtacgctgatcgacggtaaagagttcgacaactcttacacccgtggtgaaccgctctctttccgtctggacggtgttatcccgggttggacagaaggtctgaagaacatcaagaaaggcggtaagatcaaactggttattccaccagaactggcttacggcaaagcgggtgttccggggatcccaccgaattctaccmtggtgtttgacgtagagctgctggatgtgaaaccagcgccgaaggctgatgcaaagccggaagctgatgcgaaagccgcagattctgctaaaaaataa

SEQ ID NO: 153828 - protein, 270 aa, Escherichia coli O157:H7 EDL933
  misc_feature (239)..(239): The Xaa at location 239 stands for Leu, or Met.
MKSLFKVTLLATTMAVALHAPITFAAEAAKPATTADSKAAFKNDDQKSAYALGASLGRYMENSLKEQEKLGIKLDKDQLIAGVQDAFADKSKLSDQEIEQTLQAFEARVKSSAQAKMEKDAADNEAKGKEYREKFAKEKGVKTSSTGLVYQVVEAGKGEAPKDSDTVVVNYKGTLIDGKEFDNSYTRGEPLSFRLDGVIPGWTEGLKNIKKGGKIKLVIPPELAYGKAGVPGIPPNSTXVFDVELLDVKPAPKADAKPEADAKAADSAKK

SEQ ID NO: 153829 - DNA, 780 bp, Escherichia coli O157:H7 EDL933
  CDS (1)..(780): transl_table=11
  misc_feature (731)..(731): y is t or c
atgatgtccgtggtaaacccgcctttattatattcatacgggatattgctattgtttctttttccctgggatttgtcatcattcccgcgacaaagttttacccaaagaagtgtggctgatatgctgcccgctactttataccctaagaaaggaaatacgatgaccaccccaacttttgacaccatcgaagcgcaagcaagctacggcattggtttgcaggtagggcaacaactgagtgaatctggcctggaagggctgctgccagaagcactggttgcaggtattgccgatgcgctggaaggcaaacatccggctgttccggttgatgtggtgcatcgcgcgctgcgtgaaatccacgagcgcgccgatgccgttcgtcgtcagcgtttccaggcgatggctgctgaaggtgtgaaatacctggaagaaaacgccaaaaaagaaggtgtgaatagcaccgaatctggcctgcaattccgcgtgatcaaccagggtgaaggcgcaattccggcacgtaccgaccgcgttcgtgttcattacaccggtaaactgatcgacggcaccgtgtttgacagctccgttgctcgtggtgaacccgctgaatttccggttaatggcgtgatccctggctggattgaagcactgactctgatgccggtaggttctaaatgggaactgactatcccgcaggaactggcatatggcgagcgcggcgcaggcgcatccatccytccgttcagcaccctggtgtttgaagtcgaactgctggaaatcctctaa

SEQ ID NO: 153830 - protein, 259 aa, Escherichia coli O157:H7 EDL933
  misc_feature (244)..(244): The Xaa at location 244 stands for Leu, or Pro.
MMSVVNPPLLYSYGILLLFLFPWDLSSFPRQSFTQRSVADMLPATLYPKKGNTMTTPTFDTIEAQASYGIGLQVGQQLSESGLEGLLPEALVAGIADALEGKHPAVPVDVVHRALREIHERADAVRRQRFQAMAAEGVKYLEENAKKEGVNSTESGLQFRVINQGEGAIPARTDRVRVHYTGKLIDGTVFDSSVARGEPAEFPVNGVIPGWIEALTLMPVGSKWELTIPQELAYGERGAGASIXPFSTLVFEVELLEIL

SEQ ID NO: 153831 - DNA, 888 bp, Xylella fastidiosa 9a5c
  CDS (1)..(888): transl_table=11
atgtccaaacaatcggtttccgttgtgaataatgaagagaaaacggtgttgagcaccgaaaaagagaaagtcagttatgccattggtttggacattgcgcgatcgcatgtgttcgagctgattgctcaagacattgatgttgctgcactacagcgtgcgatcgaaaatgtcttcaagggtgggccgcctttgatctctgaggaggttgctcagacaaccgataccgcgctgcgtgccatgttggcagcccgttccgggcaacaggaagcttcggggactgcgccgcctgctgtatccaaagagaacattggtctcatgcttgggagctatatggtcggcccgtcgctgctggcgatcaaggatgatattgatcttccggtgcttctacaggcactgcgtaccagcttcgcaaagcgcacaccgttgatggatgaacaagaaatgaccacaaggatgcaagcatttgtggcctctaaaaatgctgcggttgcaggaaaaaatcgtgatgagggcagtgcttttctctctaagaacaagaacgagaagggcgtgatcaccaccgcttcaggtcttcagtacatggtgttgcggcagggaagcggctcacgtccgaccccaagtaataatgtgcgtgtcaactacgagggcaagctgctcagcggtcaagtatttgatagctcttaccagcgtggtcagccggccgagttcggtcttggtcaggtgattaaagggtggtctgaggggctgtcgttgatgcctgtcggttctaagtaccgtttttggattcctgctgatcttgcttacgggcagcaggggactccgggtggtccgattggccctgatgcaacgttgacctttgacgtggagctgctcagtatcctcccttaa

SEQ ID NO: 153832 - protein, 295 aa, Xylella fastidiosa 9a5c
MSKQSVSVVNNEEKTVLSTEKEKVSYAIGLDIARSHVFELIAQDIDVAALQRAIENVFKGGPPLISEEVAQTTDTALRAMLAARSGQQEASGTAPPAVSKENIGLMLGSYMVGPSLLAIKDDIDLPVLLQALRTSFAKRTPLMDEQEMTTRMQAFVASKNAAVAGKNRDEGSAFLSKNKNEKGVITTASGLQYMVLRQGSGSRPTPSNNVRVNYEGKLLSGQVFDSSYQRGQPAEFGLGQVIKGWSEGLSLMPVGSKYRFWIPADLAYGQQGTPGGPIGPDATLTFDVELLSILP

SEQ ID NO: 153833 - DNA, 819 bp, Salmonella enterica subsp. enterica serovar Typhi str. CT18
  CDS (1)..(819): transl_table=11
atgaaatcactgtttaaagccacgctgctggcaacgacgatggccgttgctatgcacgtaccgatcacttttgctgctgatgcggcgaaaccggcagctaccgctgatagcaaagcagcatttaaaaacgacgatcaaaaagcggcttatgcgctgggcgcctcgctgggtcgttacatggaaaattcgcttaaagagcaggaaaagttgggcatcaaactggataaagatcagttgattgccggcgttcaggatgcctttgccgataagagcaaactgtccgatcaggaaattgagcaaacgctgcagacgtttgaagcacgtgtgaagagcgctgctcaggcgaagatggaaaaagacgctgccgataacgaagcaaaaggtaaaacgttccgtgacgcttttgctaaagagaaaggcgtgaaaacctcctctaccggtctgctttacaaagtagagaaagaaggcacaggcgaggcgccgaaagatagcgataccgttgtggtgaactacaaaggtacgctgatcgacggtaaagagtttgataactcttacacgcgcggcgaaccgctctccttccgtctggacggcgttatccctggctggactgaaggcctgaaaaatattaagaaaagcggcaagatcaagctggttatcccaccggcgctggcctacggtaaaacgggcgttccgggtatccctgcgaactccaccctggtattcgacgtagagctgctggatatcaaaccagcgccgaaagcggatgctaaacctgccgatgcggctgacgctaaagccgcagatgctgctaaaaaataa

SEQ ID NO: 153834 - protein, 272 aa, Salmonella enterica subsp. enterica serovar Typhi str. CT18
MKSLFKATLLATTMAVAMHVPITFAADAAKPAATADSKAAFKNDDQKAAYALGASLGRYMENSLKEQEKLGIKLDKDQLIAGVQDAFADKSKLSDQEIEQTLQTFEARVKSAAQAKMEKDAADNEAKGKTFRDAFAKEKGVKTSSTGLLYKVEKEGTGEAPKDSDTVVVNYKGTLIDGKEFDNSYTRGEPLSFRLDGVIPGWTEGLKNIKKSGKIKLVIPPALAYGKTGVPGIPANSTLVFDVELLDIKPAPKADAKPADAADAKAADAAKK

SEQ ID NO: 153835 - DNA, 819 bp, Salmonella typhimurium LT2
  CDS (1)..(819): transl_table=11
atgaaatcactgtttaaagccacgctgctggcaactacgatggccgttgctatgcacgcaccgatcacttttgctgctgatgcggcgaaaccggcagctaccgctgatagcaaagcagcatttaaaaacgacgatcaaaaagcggcttatgcgctgggcgcctcgctgggtcgttacatggaaaattcgcttaaagagcaggaaaagttaggcatcaaactggataaagatcagttgattgccggcgttcaggatgcctttgccgataagagcaaactgtccgatcaggaaattgagcaaacgctgcagacgtttgaagcacgcgtgaagagcgctgctcaggcgaagatggaaaaagacgctgccgataacgaagcaaaaggtaaaacgttccgcgacgcttttgctaaagagaaaggtgtgaaaacctcctctaccggcctgctttacaaagtagagaaagaaggcacaggcgaggcgccgaaagatagcgataccgttgtggtgaactacaaaggtactctgatcgacggtaaagagtttgataactcttacacgcgcggcgaaccgctctccttccgtctggacggcgttatccctggctggactgaaggtctgaaaaatattaagaaaggcggcaagatcaagctggttatcccacctgagctggcctacggtaaaacgggcgttccggggatcccggcaaactcaaccctggtattcgacgtagagctgctggatatcaaaccagcgccgaaagcggatgctaaacctgccgatgcggctgacgctaaagccgcagatgctgctaaaaaataa

SEQ ID NO: 153836 - protein, 272 aa, Salmonella typhimurium LT2
MKSLFKATLLATTMAVAMHAPITFAADAAKPAATADSKAAFKNDDQKAAYALGASLGRYMENSLKEQEKLGIKLDKDQLIAGVQDAFADKSKLSDQEIEQTLQTFEARVKSAAQAKMEKDAADNEAKGKTFRDAFAKEKGVKTSSTGLLYKVEKEGTGEAPKDSDTVVVNYKGTLIDGKEFDNSYTRGEPLSFRLDGVIPGWTEGLKNIKKGGKIKLVIPPELAYGKTGVPGIPANSTLVFDVELLDIKPAPKADAKPADAADAKAADAAKK

SEQ ID NO: 153837 - DNA, 663 bp, Salmonella typhimurium LT2
  CDS (1)..(663): transl_table=11
atgctgcccgctacttttttgatatccgatgaaggaaaaataatggccaccccgacttttgacactattgaagcgcaagcgagctacggcattggtttgcaggtagggcagcagctcagcgaatccggtcttgaagggctgttgcctgaagcgctggttgcaggcattgctgatgcgctggaaggtaaacacccggcggttcctgttgatgtggtgcatcgtgcgctgcgtgaaattcatgagcgtgcggacgcggtgcgtcgtgagcgtttcaaagcgatggcggccgaaggcgtgaaatacctggaagaaaaccgcgaaaaagacggtgtgaacagtactgagtctggtttacagttccgcgttctgacgcagggcgaaggcgcgattccggcgcgtaccgaccgcgtacgcgtgcattacaccggtaagcttattgatggcaccgtatttgacagctccgtcgcgcgcggcgaaccggctgaattcccggtaaatggcgtgatcgccggctggattgaagcgctgactctgatgccggtaggttccaaatgggaactgactatcccacaggagctggcctatggcgagcgtggggccggggcatctattccgccattcagcaccctggtgtttgaagtggaactgctggaaattctgtaa

SEQ ID NO: 153838 - protein, 220 aa, Salmonella typhimurium LT2
MLPATFLISDEGKIMATPTFDTIEAQASYGIGLQVGQQLSESGLEGLLPEALVAGIADALEGKHPAVPVDVVHRALREIHERADAVRRERFKAMAAEGVKYLEENREKDGVNSTESGLQFRVLTQGEGAIPARTDRVRVHYTGKLIDGTVFDSSVARGEPAEFPVNGVIAGWIEALTLMPVGSKWELTIPQELAYGERGAGASIPPFSTLVFEVELLEIL

SEQ ID NO: 153839 - DNA, 903 bp, Xanthomonas axonopodis pv. citri str. 306
  CDS (1)..(903): transl_table=11
atgtcgcagcaaccggccgcagcggccaccaaggagaagccagctttgaatgcatcgtctgataagagcacgcgcgacaacgtcagctacgccatcggtatggacgtggcacgttcgttcgagccgatcgctcaggacatcgatgtgaacgcgatgcaacgcgccatcgaaaatgcattcaagggcggcaagccgctgttgtcggatgagcagacccaggccaccgatactgcattgcgtaccgcgctcgctgcccgcaacggccagcaggtgccaggcatggcgccgggcgccgcgccggctgcaccgtccaaggaaaatgtcggcctgatgctcggcgatcgcgcggttggtccgtcgctggccggtatcaaggacgagatcgatctgtcgatcctgatggaagcggtgcgtaccgtgttcgccaagggcaccacgcgtctgacccagcaggaggccgcagccaccatgcaggcattcgcctctgccaagcagggcgctgccgctgccaacaatcgccagcagggcaatgaattccttgccaagaacaagaccgagacgggcgtgatcaccaccgcgtccggcctgcagtacatggtgttgcgccagggtagcggcgagcgcccgatgcggaccagcaaggtgcgtgtgaactacgaaggcaagctgctcaacgggcaggtcttcgacagttcctaccagcgcggccagccggcggagttcggtctggatcaagtcattcccggttggaccgagggcgtggcgttgatgccggtcggttcgaaataccgtttctggattccatccaacttggcctatggcccgaacggcacgcaaggagggccgatcggacctgacgcaacgttgacgttcgatgtcgaactgatgggtatccttccctga

SEQ ID NO: 153840 - protein, 300 aa, Xanthomonas axonopodis pv. citri str. 306
MSQQPAAAATKEKPALNASSDKSTRDNVSYAIGMDVARSFEPIAQDIDVNAMQRAIENAFKGGKPLLSDEQTQATDTALRTALAARNGQQVPGMAPGAAPAAPSKENVGLMLGDRAVGPSLAGIKDEIDLSILMEAVRTVFAKGTTRLTQQEAAATMQAFASAKQGAAAANNRQQGNEFLAKNKTETGVITTASGLQYMVLRQGSGERPMRTSKVRVNYEGKLLNGQVFDSSYQRGQPAEFGLDQVIPGWTEGVALMPVGSKYRFWIPSNLAYGPNGTQGGPIGPDATLTFDVELMGILP

SEQ ID NO: 153841 - DNA, 840 bp, Yersinia pestis KIM
  CDS (1)..(840): transl_table=11
ttgcttggggttagagtccttaagccaatggagaaatggatgaaatcactgtttaaagtaacgttgctggctacggccatgacgctaaccctgaatacctcaactgttttcgctgctgacgcaacctcaccagtagtaaccaatagcgcatttaaaaataatgatcagcaatctgcttatgcattaggtgcgtctttgggccgctatatggataattccctgaaagaacaagaaaaattggggattaagttggataaagaccagttgatcgctggtgtgcaagatgcttttgctaacaaaagcaaactgactgacgaagagatcgaaaaaaccctgcaaaattttgaagctcgggtaaaagcgtctgctcaagccaaaatggagcaagatgccaaagaaaacgcggataaaggcgctaagtaccgcgatacctttgctaaagaaaaaggtgtgaagaaaaccgcatctggcctgctgtacaaggtagagaacgccggtacgggtgatgcaccaaaagacagcgatactgttgtcgttaactacaaaggcactttggctgacggaactgagtttgataactcatacaaacgtggcgagccattgtctttccgtctggatggcgttatcccaggctggactgaaggcctgaagcaaatcaaaaaaggtggcaaaatcaccttggttatcccgccagaactggcttacggcaaagcaggcgtccctggtattcctgccaactctactctgatattcgatgtagaactgctggatgtgaaagccgcagctaaagccgatgctcaagagcaacagcctgcggttgatacaaaagctaagaagtaa

SEQ ID NO: 153842 - protein, 279 aa, Yersinia pestis KIM
MLGVRVLKPMEKWMKSLFKVTLLATAMTLTLNTSTVFAADATSPVVTNSAFKNNDQQSAYALGASLGRYMDNSLKEQEKLGIKLDKDQLIAGVQDAFANKSKLTDEEIEKTLQNFEARVKASAQAKMEQDAKENADKGAKYRDTFAKEKGVKKTASGLLYKVENAGTGDAPKDSDTVVVNYKGTLADGTEFDNSYKRGEPLSFRLDGVIPGWTEGLKQIKKGGKITLVIPPELAYGKAGVPGIPANSTLIFDVELLDVKAAAKADAQEQQPAVDTKAKK

SEQ ID NO: 153843 - DNA, 672 bp, Shigella flexneri 2a str. 301
  CDS (1)..(672): transl_table=11
atgtggctgatatgctgcccgctacttttataccctaagaaaggaaatacgatgaccaccccaacttttgacaccatcgaagcgcaagcaagctacggcattggtttgcaggtagggcaacaactgagtgaatctggcctggaagggctgctgccagaagcactggttgcaggtattgccgatgcgctggaaggcaaacatccggctgtgccggttgatgtggtgcatcgcgcgctgcgtgaaatccacgaacgcgccgatgccgttcgtcgtcagcgtttccaggcgatggctgctgaaggcgtgaaatacctggaagaaaacgccaaaaaagaaggtgtgaatagcaccgaatctggcctgcaattccgcgtgatcaaccagggtgaaggcgcaattccggcacgtaccgaccgcgttcgtgttcattacaccggtaaactgatcgacggcaccgtgtttgacagctccgttgctcgtggtgaacccgctgaattcccggttaatggcgtgatccctggctggattgaagcactgactctgatgccggtaggttctaaatgggaactgactatcccgcaggaactggcatatggcgagcgcggcgcaggtgcatccatccctccgttcagcaccctggtgtttgaagtcgaactgctggaaatcctctaa

SEQ ID NO: 153844 - protein, 223 aa, Shigella flexneri 2a str. 301
MWLICCPLLLYPKKGNTMTTPTFDTIEAQASYGIGLQVGQQLSESGLEGLLPEALVAGIADALEGKHPAVPVDVVHRALREIHERADAVRRQRFQAMAAEGVKYLEENAKKEGVNSTESGLQFRVINQGEGAIPARTDRVRVHYTGKLIDGTVFDSSVARGEPAEFPVNGVIPGWIEALTLMPVGSKWELTIPQELAYGERGAGASIPPFSTLVFEVELLEIL

SEQ ID NO: 153845 - DNA, 780 bp, Shewanella oneidensis MR-1
  CDS (1)..(780): transl_table=11
atgaaaaaatctatgccaacttcttttatcccaaaaaccatcacagtggcgacctgcgccgcattgtttgtgtcaatggcgagctttgccgccccaagccttaaaaccgatgcagataaagcgtcatacagtatcggtgcatctgtcggtaactacatttctggccaggtttataaccaagtggaattgggcgcggaagtgaatgtggatttagtcgttcaaggttttgtggacgcgctgaaaaagcaacagcaattaaccgatgaagaagtggtgacgtatctcaatcaacgcgccgaagaattaaatcaagtgagaaaagctaacgctgaaaaattagccgctgaaaatatcaaagcgggtgaagcctttcttgctgaaaacaaaaagaaagctggcgtgactgtgaccgaatcaggcctgcaatatgaagtgttaaccaaaggcacaggtaacaagcctaatcctgaggatgtggtgaccgttgaatacgtcggcaagcttatcgatggcactgagtttgaaaatactgttggtcgtaaagagccgacacgtttcgccttaatgacagtgatccctggttgggaagaaggcttaaagctgatgccgatgggctcaaaataccgttttgtcattcccgcaaacttagcttatggcaatgaatttgtgggtgaaattccaccgcaatctaccttgatatttgaaattgagctgaaaaatatcgaaaagccaagtgagaagaaagaagcccgcatgatgggcatgatgcccgctcactaa

SEQ ID NO: 153846 - protein, 259 aa, Shewanella oneidensis MR-1
MKKSMPTSFIPKTITVATCAALFVSMASFAAPSLKTDADKASYSIGASVGNYISGQVYNQVELGAEVNVDLVVQGFVDALKKQQQLTDEEVVTYLNQRAEELNQVRKANAEKLAAENIKAGEAFLAENKKKAGVTVTESGLQYEVLTKGTGNKPNPEDVVTVEYVGKLIDGTEFENTVGRKEPTRFALMTVIPGWEEGLKLMPMGSKYRFVIPANLAYGNEFVGEIPPQSTLIFEIELKNIEKPSEKKEARMMGMMPAH

SEQ ID NO: 153847 - DNA, 768 bp, Shewanella oneidensis MR-1
  CDS (1)..(768): transl_table=11
atgaaatcgatttataaattatcgttagttgcattggctgttattggcctatctgcttgtaatcaagaagaaaaagcaacaaatgcaagcacaaatgttgaattaacgactgaagcacagaaagaagcctacagtgttggcgcttcaatcggtcgttatatgtctggccatattaaagagcaagaagaattaggcctgccagttgaccgcactttgatcgtgactggtttcactagcggtttaaatgatcaactgaaattaactgaagaagaaatgcaaaccattcttcaaagtttagataaaaagttaaacgacaaacgtcaagaacaagctaaagccattgcggtgaaaaatctcgaggatggcaaaaagttccttgatgaaaacaaagctaagtctggcgtcgtcaccactgaatctggcctgcaatacgaagtattaactccaggttcaggtgagaagccagctgctgaagacacagttgaagtggattacgtgggcacactgattgacggtaaagagtttgatagctcgtacaaacgtggtgagtcgcttaagttcccgttgaatcgtgttattcctggttggaccgaaggcgtacaattgatgccagttggcgctaagtacaagtttgttattcctgcaaacttagcttacggtgatcgcgataatggtactattccacctaactcaacgctgatttttgaagttgaactgaaatcaattgagaaagcagctgctcctgcagcagagcctgctaagaagtaa

SEQ ID NO: 153848 - protein, 255 aa, Shewanella oneidensis MR-1
MKSIYKLSLVALAVIGLSACNQEEKATNASTNVELTTEAQKEAYSVGASIGRYMSGHIKEQEELGLPVDRTLIVTGFTSGLNDQLKLTEEEMQTILQSLDKKLNDKRQEQAKAIAVKNLEDGKKFLDENKAKSGVVTTESGLQYEVLTPGSGEKPAAEDTVEVDYVGTLIDGKEFDSSYKRGESLKFPLNRVIPGWTEGVQLMPVGAKYKFVIPANLAYGDRDNGTIPPNSTLIFEVELKSIEKAAAPAAEPAKK

SEQ ID NO: 153849 - DNA, 618 bp, Shewanella oneidensis MR-1
  CDS (1)..(618): transl_table=11
atgtctgataaattcagtactgttgaacagcaagcaagctatggtgtaggccgtcaaatgggtgagcaactggcagcaaattcttttgaaggcgtcgatatccctgccgttcaagctggcttagccgatgcatttgccggtcttgaaagtgctgtgtctatgcaggaactgcaagtggcattcactgagatcagccgtcgcattcaagctgctcaagaacaagctgctgctgaggcttctgctgaaggcgaagcgtttttagttgaaaacgctaatcgtgaaggcgtaattgtgactgagtcaggtctgcaatacgaagtgttagttcaaggtaacggtgctaaaccaacctacgaagacactgtacgtactcactaccatggttcattcatcaatggtgatgtgttcgacagctctgttgttcgtggtcaacctgctgagttcccagtatcaggcgttatcgctggctggactgaagcactgcaactgatgccagtaggtacgaagttaaaattatatgtgccacatcacttagcttacggtgagcgtggcgcgggcgcttctattcctccgtattcaaccttagtgtttgaagtcgagttattagacatcgtctaa

SEQ ID NO: 153850 - protein, 205 aa, Shewanella oneidensis MR-1
MSDKFSTVEQQASYGVGRQMGEQLAANSFEGVDIPAVQAGLADAFAGLESAVSMQELQVAFTEISRRIQAAQEQAAAEASAEGEAFLVENANREGVIVTESGLQYEVLVQGNGAKPTYEDTVRTHYHGSFINGDVFDSSVVRGQPAEFPVSGVIAGWTEALQLMPVGTKLKLYVPHHLAYGERGAGASIPPYSTLVFEVELLDIV

SEQ ID NO: 153851 - DNA, 663 bp, Pseudomonas putida KT2440
  CDS (1)..(663): transl_table=11
ttgctggtatttgggagtcaggcgttgcctcgatatcttgttttgggtttatgcctgatggcacccctcgccttggccgacaacgacgaccacgatttggcctacagcctgggtgccagcctgggtgaacgcctgcgccaggagatgccaggcttgcagctggatgcactggtcgaaggcctgaagcagtcctatcaggggcaacccctgaaactcgacaaggcacgcatgcaggcagtgctgcagcagcatgaagcccaggaaggtgacgccgctgcgcaaaagctgcaggccgccgaaacgcgtttcatggctaatgaacgtgggcgttatggggtgcacgaactaacggaaggtgtgctgtacagcgaattgcaggcaggcacgggtgcacagccaaaagcgggcggcaaagtgcaagtgcgctatgtgggcagattgccggacggctcaatattcgaccagaaccagaccccccaatggttcaacctggattcggttatcgaaggctggcaggtcgccttgccgaaaatgcacaccggcgccaaatggcgcctggtaattccttcagcgcaagcctatggcgccgagggggcgggagacctgattgcaccctacacccccttggtattcgagatcgaactgctggcggttggcgactga

SEQ ID NO: 153852 - protein, 220 aa, Pseudomonas putida KT2440
MLVFGSQALPRYLVLGLCLMAPLALADNDDHDLAYSLGASLGERLRQEMPGLQLDALVEGLKQSYQGQPLKLDKARMQAVLQQHEAQEGDAAAQKLQAAETRFMANERGRYGVHELTEGVLYSELQAGTGAQPKAGGKVQVRYVGRLPDGSIFDQNQTPQWFNLDSVIEGWQVALPKMHTGAKWRLVIPSAQAYGAEGAGDLIAPYTPLVFEIELLAVGD

SEQ ID NO: 153853 - DNA, 753 bp, Pseudomonas putida KT2440
  CDS (1)..(753): transl_table=11
atgaaacagcatcgtttggcggctgcggttgccctggtaggcctggtactggctggctgcgatcaacaagccagcagccccgagctgaagactccggcgcagaaagcctcctacggtatcggcctgaacatgggcaagagcctggctcaggaaggcatggaagaccttgattcgaaagcagtcgccctcggcatcgaagacgccgttagcaagaaagaacaacgcatcaaggatgaagagctggtagaggccttcaccgcattgcagaaacgcgccgaggagcgcctggccaaggccagcgaagaagccgcctccgccggcaagaaattcctcgaagaaaacgccaagaagccaggcgtggttaccactgcctcgggcctgcagtacgaagtggtcaagaaggccgacggcccgcagcccaaaccgactgacgtggtcactgtccactacgaaggcaagctgatcgatggcaaggtcttcgacagctccgtcgagcgtggcagcccgatcgacctgccggtcagcggtgtgatcccaggttgggtcgaaggtttgcaactgatgcacgtcggcgagaagtacaagttgttcatcccggctgaactggcctatggcgcacaaagcccaagcccgctgatcccggccaactcggtactggtgttcgatctggaactgatcgccatcaaggacccggcccagttgcaaggtgccgagccgcaggccgaagcccctgaagaagcacctgccaagtaa

SEQ ID NO: 153854 - protein, 250 aa, Pseudomonas putida KT2440
MKQHRLAAAVALVGLVLAGCDQQASSPELKTPAQKASYGIGLNMGKSLAQEGMEDLDSKAVALGIEDAVSKKEQRIKDEELVEAFTALQKRAEERLAKASEEAASAGKKFLEENAKKPGVVTTASGLQYEVVKKADGPQPKPTDVVTVHYEGKLIDGKVFDSSVERGSPIDLPVSGVIPGWVEGLQLMHVGEKYKLFIPAELAYGAQSPSPLIPANSVLVFDLELIAIKDPAQLQGAEPQAEAPEEAPAK

SEQ ID NO: 153855 - DNA, 780 bp, Escherichia coli CFT073
  CDS (1)..(780): transl_table=11
atgatgtccgtggtaaacccgcctttattatattcatacgggatattgctattgtttctttttccccgggatttgtcatcattcccgcgacaaagttttacccaaagaagtgtggctgatatgctgcccgctactttataccctaagaaaggaaatacgatgaccaccccaacttttgacaccatcgaagcgcaagcaagctacggcattggtttgcaggtagggcaacaactgagtgaatctggcctggaagggctgctgccagaagcactggttgcaggcattgccgatgcgctggaaggcaaacatccggctgttccggttgatgtggtgcaccgcgcgctgcgtgaaatccacgaacgcgccgatgccgttcgtcgtcagcgtttccagacgatggctgctgaaggtgtgaaatacctggaagaaaacgccaaaaaagaaggtgtaaatagcaccgaatctggcctgcaattccgcgtgatcaaccagggcgaaggcgcaattccggcacgtaccgaccgcgttcgtgttcattacaccggaaaactgatcgacggcaccgtgtttgacagctccgttgctcgcggcgagccagctgaattcccggttaacggcgtgatccctggctggattgaagcactgactctgatgccagtaggttctaaatgggaactgactatcccgcaggaactggcatatggcgagcgtggcgcaggcgcgtccatccctccgttcagcaccctggtgtttgaagtcgaactgctggaaatcctctaa

SEQ ID NO: 153856 - protein, 259 aa, Escherichia coli CFT073
MMSVVNPPLLYSYGILLLFLFPRDLSSFPRQSFTQRSVADMLPATLYPKKGNTMTTPTFDTIEAQASYGIGLQVGQQLSESGLEGLLPEALVAGIADALEGKHPAVPVDVVHRALREIHERADAVRRQRFQTMAAEGVKYLEENAKKEGVNSTESGLQFRVINQGEGAIPARTDRVRVHYTGKLIDGTVFDSSVARGEPAEFPVNGVIPGWIEALTLMPVGSKWELTIPQELAYGERGAGASIPPFSTLVFEVELLEIL

SEQ ID NO: 153857 - DNA, 561 bp, Vibrio vulnificus CMCP6
  CDS (1)..(561): transl_table=11
atgggccagcagctagcaggttcaggtcttgatggcctaaacgttgcagccatcgcagcgggtatcgccacatctctaacaggcgacatgccagcggtagaagtagacgaaatcaacaaagcgctacacgagctatacactcgcgcagaatctgcgcgtgcagaagcggcaaaagccgcagcggctgacggcgaggtattcctaaaagacaacgcgcttcgtccagaagtaacggttcttgagtctggcctgcaatacgaaatcatcaccgaaggtaatggcgaaatcccaacgtcagacaaaaccgtacgtgttcactaccatggcgaactggttgacggcaccgttttcgatagctcagtatcacgtggccaaccagcgcaattcccagtaacgggtgtgattaaaggttgggttgaagcactacaactgatgcctgtaggctctaaatggaaactgtacatcccacacgatcttgcttacggcgagcgtggtgcgggcgcgtccattcctccatttgcagcacttgtatttgaagtagaactgctagacatcgtttaa

SEQ ID NO: 153858 - protein, 186 aa, Vibrio vulnificus CMCP6
MGQQLAGSGLDGLNVAAIAAGIATSLTGDMPAVEVDEINKALHELYTRAESARAEAAKAAAADGEVFLKDNALRPEVTVLESGLQYEIITEGNGEIPTSDKTVRVHYHGELVDGTVFDSSVSRGQPAQFPVTGVIKGWVEALQLMPVGSKWKLYIPHDLAYGERGAGASIPPFAALVFEVELLDIV

SEQ ID NO: 153859 - DNA, 783 bp, Vibrio vulnificus CMCP6
  CDS (1)..(783): transl_table=11
atgaaatcagttttaaaagtgtcactgcttgcagctactgtaatgctggcagtcggctgtcagaaagaagaagcaaaaccagcagccgcaccacaagcagagcaggtacaggcagaaaccggtaaagcggttcactttaaatcagaagatgacaaagcggcttacgcgattggcgtgtcgtttgctaactacctaagtgcaagcctagacaagccaagtgaaattggtatcaacctaaataaagatttggtgcttaaaggtatcgagcatgtttttgctggtaaccctgagctgaatgaagaagaaacacgcgcggcactagaagcgctagataagcgcgtagctgaaaccatgcagaagaaagcggcagaaaaagcagaagctgcaaagaaagccggtgatgaattccgcgctgagtttgaaaaacaagaaggtgtggtgaagacggacactggtcttctataccaagtgatcacgcctgctgaaggtgagaaaccaaaagacaccgacacagttcaagttcactacaaaggtacattaacagatggtactcagttcgatagctcttacgatcgtggtgagccagcaactttcccactgaaccgagttatcccaggttggacggaaggtgttcaattgatgccagtaggttctaagttcaagttcgttattccacctgagctagcgtacggcgcgcaagacacgccaagcattccagcgaactcaacattggtgttcgaagtcgaactattgaagattgaaaacggcgacaacgcgcagtaa

SEQ ID NO: 153860 - protein, 260 aa, Vibrio vulnificus CMCP6
MKSVLKVSLLAATVMLAVGCQKEEAKPAAAPQAEQVQAETGKAVHFKSEDDKAAYAIGVSFANYLSASLDKPSEIGINLNKDLVLKGIEHVFAGNPELNEEETRAALEALDKRVAETMQKKAAEKAEAAKKAGDEFRAEFEKQEGVVKTDTGLLYQVITPAEGEKPKDTDTVQVHYKGTLTDGTQFDSSYDRGEPATFPLNRVIPGWTEGVQLMPVGSKFKFVIPPELAYGAQDTPSIPANSTLVFEVELLKIENGDNAQ

SEQ ID NO: 153861 - DNA, 699 bp, Xylella fastidiosa Temecula1
  CDS (1)..(699): transl_table=11
ttgatctctgaggaagttgctcagacaaccgatactgcgctgcgtgccatgttggcagctcgttccgggcaacaggaagcttcggggactgcgccgcctgctgtatccaaagagaacattggtctcatgcttgggagctatatggtcggcccgtcgctgctggcgatcaaggatgatattgatcttcctgtgcttctacaggcactgcgtaccagattcgcaaagcgcacaccgttgatggatgaacaagaaatgaccacaaggatgcaagcatttgtggcctctaaaaatgctgtggttgcaggaaaaaatcgtgatgagggcagtgcttttctctctaagaacaagaacgagaagggcgtggtcaccaccgcttcaggtcttcagtacatggtgttgcggcagggaagcggctcacgtccgaccccaagtaataatgtgcgtgtcaactacgagggcaagctgctcagcggtcaagtgtttgatagctcttatcagcgtggtcagccggccgagtttggtcttggtcaggtgattaaagggtggtctgaggggctgtcgttgatgcctgtcggttctaagtaccgtttttggattcctgctgatcttgcttacgggcagcaggggactccgggtggtccgattggtcctgatgcaacgttgacctttgacgtggagctgctcagtatcctcccttaa

SEQ ID NO: 153862 - protein, 232 aa, Xylella fastidiosa Temecula1
MISEEVAQTTDTALRAMLAARSGQQEASGTAPPAVSKENIGLMLGSYMVGPSLLAIKDDIDLPVLLQALRTRFAKRTPLMDEQEMTTRMQAFVASKNAVVAGKNRDEGSAFLSKNKNEKGVVTTASGLQYMVLRQGSGSRPTPSNNVRVNYEGKLLSGQVFDSSYQRGQPAEFGLGQVIKGWSEGLSLMPVGSKYRFWIPADLAYGQQGTPGGPIGPDATLTFDVELLSILP

SEQ ID NO: 153863 - DNA, 675 bp, Pseudomonas syringae pv. tomato str. DC3000
  CDS (1)..(675): transl_table=11
atgtcgcgctacttgttaacgtcgttgttcctcttgctacccttggctcaagccgccgaagcaccaccggacaatgatgctcatgaccttgcatacagtctgggcgccagtcttggcgagcgcctgcatcaggaagtcccggaccttgatctgaaggcgttggtcgatggtttgaaacaggcttatcagggcaagccgcttgcgctcaaacaggagcgtattgaccagatcctgcgtgagcatgatgcagcgatcgcgcaagccgagaccgcaggtaccgatgcgcctaccgaagccgccctcaaggccgagcgcacgttcatggccggcgagaaggccaagccaggcgtcaaggaactggccgatggcattctcatgaccgagctgacaccgggcaccggccccaagcctgatgccaatggcagagtcgaagtgcgttatgtcggtcgtttgccggacggcaagatcttcgatcagagcacccagcctcagtggttcaggctcgacagcgtgatcagtggctggaccagcgcgttgcagaacatgccgaccggcgcgaagtggcgcctggtgatcccttcggatcaagcctacggcgccgaaggtgctggcgacctgatcgatccgttcacaccgctggtgttcgagatcgagctgatcgcggtttcacagtaa

SEQ ID NO: 153864 - protein, 224 aa, Pseudomonas syringae pv. tomato str. DC3000
MSRYLLTSLFLLLPLAQAAEAPPDNDAHDLAYSLGASLGERLHQEVPDLDLKALVDGLKQAYQGKPLALKQERIDQILREHDAAIAQAETAGTDAPTEAALKAERTFMAGEKAKPGVKELADGILMTELTPGTGPKPDANGRVEVRYVGRLPDGKIFDQSTQPQWFRLDSVISGWTSALQNMPTGAKWRLVIPSDQAYGAEGAGDLIDPFTPLVFEIELIAVSQ

SEQ ID NO: 153865 - DNA, 675 bp, Pseudomonas syringae pv. tomato str. DC3000
  CDS (1)..(675): transl_table=11
atgaccgttcaggttttacgcaattatcgactgcgtgcccctcagcggagcagtgtcatgtccgaagtcaatctgtccaccgacgaaacccgcgtcagctacggcatcggccgtcagttgggcgaccagttgcgcgacaacccgccaccgggcgtcaatctggaggccatcgtggcaggcctgcgcgatgcgtttggcggtcagccaagccgtgtcggtcaggaagaaatgtccgccagcttcaaggtcatccgtgaaatcatgcaggccgaagcggccgccaaggccgaacaggctgcaggtgccggcaaggcttacctggctgaaaatgccaagcgcgaaggcgtgaccacactggcttccggtcttcaatttgaagcgctgacttccggtgatggcgccaagccaacccgtgaagaccaggtgcgcgtgcactatcacggcacgctgatcgacggcactgtcttcgacagctcttacgatcgtggcgaacctgccgagtttccggtcagcggcgtgatcgcgggctggaccgaagcactgcaattgatgaacgccggcagcaaatggcgtctgcacgtgccgagcgaactggcttacggcgctcagggcgtcggcagcatcgcaccgcacagcgtgctggtgttcgacgtggaactgctggacgttctgtaa

SEQ ID NO: 153866 - protein, 224 aa, Pseudomonas syringae pv. tomato str. DC3000
MTVQVLRNYRLRAPQRSSVMSEVNLSTDETRVSYGIGRQLGDQLRDNPPPGVNLEAIVAGLRDAFGGQPSRVGQEEMSASFKVIREIMQAEAAAKAEQAAGAGKAYLAENAKREGVTTLASGLQFEALTSGDGAKPTREDQVRVHYHGTLIDGTVFDSSYDRGEPAEFPVSGVIAGWTEALQLMNAGSKWRLHVPSELAYGAQGVGSIAPHSVLVFDVELLDVL

SEQ ID NO: 153867 - DNA, 621 bp, Vibrio parahaemolyticus RIMD 2210633
  CDS (1)..(621): transl_table=11
atgtctgaaattaaatttgaaactgcagaacaaaaagcaagctacggcattggtctgcaaatgggtcagcaactagctggctctggtcttgaaggccttagcgttgacgctatcgctgcgggtatcgcaacagcattgactggcgaaatgccatcaatcgaaattgacgaaatcaacaatgcactgcaagagctacactctcgcgcagaagcagctcgtcaagaagcagctaaagcagcagcagctgatggtgaagcgttcctaaaagacaacgctctacgtccagaagttaatgttcttgaatctggcctacagtacgaaatcatcaatgaaggtactggcgaaatcccaacagctgataaatctgtacgtgttcactaccacggtgaactaacagacggcacagtattcgacagctctgtatctcgcggccaaccagctgagttcccagtaactggcgtaattaaaggttgggttgaagctctacaactaatgcctgtaggttctaagtggaaactatacatcccacaagaccttgcgtacggtgaacgtggcgcaggcgctgcaatccctccattcgcagcactagtattcgaagttgagctactagacattctataa

SEQ ID NO: 153868 - protein, 206 aa, Vibrio parahaemolyticus RIMD 2210633
MSEIKFETAEQKASYGIGLQMGQQLAGSGLEGLSVDAIAAGIATALTGEMPSIEIDEINNALQELHSRAEAARQEAAKAAAADGEAFLKDNALRPEVNVLESGLQYEIINEGTGEIPTADKSVRVHYHGELTDGTVFDSSVSRGQPAEFPVTGVIKGWVEALQLMPVGSKWKLYIPQDLAYGERGAGAAIPPFAALVFEVELLDIL

SEQ ID NO: 153869 - DNA, 783 bp, Vibrio parahaemolyticus RIMD 2210633
  CDS (1)..(783): transl_table=11
atgaaatcagttttaaaagtgtcgctacttgctgcaacagtaatgctagcggtaggttgtcagaaagaagaaacaaaaccagaagcagcacctcaagcagaacaagttcaagcagaaacaggtaaagcggttcactttaaaaccgacgacgacaaagcggcatacgcaatcggtgtttcatttgctaactacctaagcactagcatcgaaaaaccaagcgaaatcggtatcaacctaaacaaagaccttgttcttaaaggtatcgaagatgtctttaaaggcaacgcagagctaaacgaagaagaaacacgtgctgctctagagtctctagacaagcgtgttgctgagaagatgcaagcacaagcagcagaaaaagcagcggcagcgaaaaaagctggcgatgatttccgtgcggaattcgaaaagcaagaaggcgtagtgaaaacagacacaggtcttctataccaagtaatcacacctgctgaaggcgagaagccaaaagacactgacactgtacaagtacactacaaaggtacgttgattgacggtactcagttcgacagctcttacgatcgtggtgagccagcaacgttccctctaaaccgtgttatcccaggttggacagaaggtgttcagctaatgccagtgggttctaaattcaaatttgttatcccgccagagcttgcatacggtgaccaagacacgccaagcattccagcaaactcaacacttgtatttgaagttgagctactaaaagttgagaatgacaaagctgagcaataa

SEQ ID NO: 153870 - protein, 260 aa, Vibrio parahaemolyticus RIMD 2210633
MKSVLKVSLLAATVMLAVGCQKEETKPEAAPQAEQVQAETGKAVHFKTDDDKAAYAIGVSFANYLSTSIEKPSEIGINLNKDLVLKGIEDVFKGNAELNEEETRAALESLDKRVAEKMQAQAAEKAAAAKKAGDDFRAEFEKQEGVVKTDTGLLYQVITPAEGEKPKDTDTVQVHYKGTLIDGTQFDSSYDRGEPATFPLNRVIPGWTEGVQLMPVGSKFKFVIPPELAYGDQDTPSIPANSTLVFEVELLKVENDKAEQ

SEQ ID NO: 153871 - DNA, 585 bp, Bacteroides thetaiotaomicron VPI-5482
  CDS (1)..(585): transl_table=11
atggataaattcagttacgctattggcctcggaatcggtcaaaacttattaagcatgggtgcaaaaggcatcgccgtagatgactttgcacaagcaattaaagatgtattggaaggtaatcagacggctatcagccatcaggaagcccgcgaaatagtgaacaagtatttcgaagaactggaagctaagatgggcgctgccgccatcgaacaaggaaaagctttcctcgaagaaaataagaaaaagccgggcgtggttacgctacccagcggactgcaatacgaagtgatcaacgaaggcacaggcaaaaaagcgaaagctaccgatcaggtaaaatgccactacgaaggcacactgatcgacggtacactgttcgacagctctatcaagcgcggagaaccggctgtattcggcgtcaatcaggtaatcccgggatgggtggaagcattgcaactgatgcccgaaggttccaaatggaaactctatattccgtccgaccttgcttatggcgccagaggtgccggagaaatgattcctccccacagcacattggtatttgaagtagaattactcgaagtattataa

SEQ ID NO: 153872 - protein, 194 aa, Bacteroides thetaiotaomicron VPI-5482
MDKFSYAIGLGIGQNLLSMGAKGIAVDDFAQAIKDVLEGNQTAISHQEAREIVNKYFEELEAKMGAAAIEQGKAFLEENKKKPGVVTLPSGLQYEVINEGTGKKAKATDQVKCHYEGTLIDGTLFDSSIKRGEPAVFGVNQVIPGWVEALQLMPEGSKWKLYIPSDLAYGARGAGEMIPPHSTLVFEVELLEVL

SEQ ID NO: 153873 - DNA, 876 bp, Bacteroides thetaiotaomicron VPI-5482
  CDS (1)..(876): transl_table=11
atgaaaaaagttagtatttttatggcaatcgccgctgctgcaagtcttgcttcttgtacagctcaagctcctaaagcaaatctgaaaacagacatcgactcactgtcttactctatcggtatggctcagactcaaggtctgaaaggctatctgacaggccgtctggacgttgatactgcttacatggcagaattcatcaaaggtttgaacgaaggtgcaaacaagactagcaagaaagacatcgcttatatggcaggtcttcagatcggtcagcagatcagcaaccagatgatgaagggtatcaaccaagaactgttcgctggtgactctaccaaaacgatcagcaaagacaacttcatggctggtttcatcgcaggtacactggaaaaaggtggcgtgatgactatggaagctgctcaggaatatactcgcacagctatggaaactatcaaagcgaaagctatggaagaaaaatacgctgacaataaagctgccggtgaaaaattccttgctgaaaacaaaactaaagaaggtgtgaaaactactgaaagcggattgcagtacaaagtaatcactgaaggtaaaggtgaaatccctgccgacacttgcaaagtgaaagtgaactataaaggtactttgatcgacggtacagaattcgacagctcttacaaacgtaacgagcctgctactttccgtgccaaccaagtaatcaaaggctggacagaagctctgactatgatgcctgtaggttctaaatgggaactttacatcccgcaagaactcgcttacggttcaagagaatcaggacagatcaaaccgttctctactctgattttcgaagttgagttggtaggtatcgaaaaagataagaaataa

SEQ ID NO: 153874 - protein, 291 aa, Bacteroides thetaiotaomicron VPI-5482
MKKVSIFMAIAAAASLASCTAQAPKANLKTDIDSLSYSIGMAQTQGLKGYLTGRLDVDTAYMAEFIKGLNEGANKTSKKDIAYMAGLQIGQQISNQMMKGINQELFAGDSTKTISKDNFMAGFIAGTLEKGGVMTMEAAQEYTRTAMETIKAKAMEEKYADNKAAGEKFLAENKTKEGVKTTESGLQYKVITEGKGEIPADTCKVKVNYKGTLIDGTEFDSSYKRNEPATFRANQVIKGWTEALTMMPVGSKWELYIPQELAYGSRESGQIKPFSTLIFEVELVGIEKDKK

SEQ ID NO: 153875 - DNA, 1005 bp, Streptomyces avermitilis MA-4680
  CDS (1)..(1005): transl_table=11
atgcgccgacgctcagttcttctcgccgtgccggccggactggtcacgctcgccggatgcggtgacgaaaagtccgacacggccaagaccaagcccagcaccagcccgtctccgtcggcctccgcatcgtcggccccgccccccaagatcgtcgacggcccgctgccggccatcaccgccggtaccaagttcgacgagaagccgaccgtggccaagggcagcggcgacccctcgaaggacgtggcggtcaagacggtcatcgcgggcagcggcaagacggtcgcggagaacgactacatccaggcgaactacctgggccaggtctgggacacggcgaaggtcttcgacaactcctacgaccgcaagacgccgctggtcatccagctcgcccagggaagcatcatcgacggctggcgctatgcgctggcgggcaagaaggccggcagccgggtcctgatgtccgtgccgcccacctggggctacggcaagcagggcaactcgcaggcgggcatcaagggcaccgacaccctggtgttcgtggtcgacatccagaacacgttcaacgcgaagagctccgcccagggcaaggacgtcgcacagggcgacgccaagctgccgaaggtcggcaccaacaccgacggcaaggccccctccatcgacgtaccgaagacggccgccccgacgaagctcgtggcgaactacgtcatcgagggcgacggcgacgtggtcaaggcggacagcagcgtcctcgtgcagtacaagggcgtgctctgggacaccggcaaggagttcgactccacgtacagccgctcggcgctgacgtccttctcgctgcagcaggtcgtcaagggctggtcccagggtctgaccggcaagaaggtgggcagccgcgtactcatcgtggtgccgccgaagctgggttacggcgacagcccgccgagcgggagcggcatcgagaaggactccaccctggtcttctccgtcgacatcctggcgaagatgtaa

SEQ ID NO: 153876 - protein, 334 aa, Streptomyces avermitilis MA-4680
MRRRSVLLAVPAGLVTLAGCGDEKSDTAKTKPSTSPSPSASASSAPPPKIVDGPLPAITAGTKFDEKPTVAKGSGDPSKDVAVKTVIAGSGKTVAENDYIQANYLGQVWDTAKVFDNSYDRKTPLVIQLAQGSIIDGWRYALAGKKAGSRVLMSVPPTWGYGKQGNSQAGIKGTDTLVFVVDIQNTFNAKSSAQGKDVAQGDAKLPKVGTNTDGKAPSIDVPKTAAPTKLVANYVIEGDGDVVKADSSVLVQYKGVLWDTGKEFDSTYSRSALTSFSLQQVVKGWSQGLTGKKVGSRVLIVVPPKLGYGDSPPSGSGIEKDSTLVFSVDILAKM

SEQ ID NO: 153877 - DNA, 768 bp, Chlamydophila caviae GPIC
  CDS (1)..(768): transl_table=11
atgaaaaaacgatggcatttaatgataataacaatggttgtgtccttttccattgcttcctgtgattcaagttctcaaagagggaaccaaatagcacaagttgaggagaaaagcgctgccaacgattcgcaactttctgtaaatcaacagatatcgcgtactttcggtcatttgctcgcaagacagttacgcaaatcagaagatatcatgatggatatcgctgaggttgctaaaggattgcaaggtgagctagaatgcaaaagcgcacctttaactgaatcagaatatgaggaaaaaatggcagaaatacagaaattagttttcgagaaaaaagcgaaggaaaatctctccttggcagaaagattcctacaagaaaataagaaaaattcaggtgttgtcgaagtacaagctgataaactgcaataccgcattgtcaaagaaggtacagggagagctatttcaggtaagccttcagcgcttcttcactacaaggggacttttatcgatggtcaggtatttagtagctcagaagctaataaagagcctattcttcttcctctagcacaaacaatacctggatttgctttaggtatgcagggaatgaaagaaggtgaaactcgtatcctttacatccatcctgatcttgcttatggaacttctggccaactgcctccgaactctttattgatttttgaaatcaatttaatcgaaactacagatgattctgtagcagcacaaaacacagagaatgaaaacactgcctcatga

SEQ ID NO: 153878 - protein, 255 aa, Chlamydophila caviae GPIC
MKKRWHLMIITMVVSFSIASCDSSSQRGNQIAQVEEKSAANDSQLSVNQQISRTFGHLLARQLRKSEDIMMDIAEVAKGLQGELECKSAPLTESEYEEKMAEIQKLVFEKKAKENLSLAERFLQENKKNSGVVEVQADKLQYRIVKEGTGRAISGKPSALLHYKGTFIDGQVFSSSEANKEPILLPLAQTIPGFALGMQGMKEGETRILYIHPDLAYGTSGQLPPNSLLIFEINLIETTDDSVAAQNTENENTAS

SEQ ID NO: 153879 - DNA, 717 bp, Rhodopirellula baltica SH 1
  CDS (1)..(717): transl_table=11
atgccccgtctctcccgcctaattcccaccctctgtttggccacgttcgtcatgacctcccccggcaacgcccaagatgattctgcggccaaggtcgatgatcaactcggctacttcctcggattcaccgtcggcaactctttcgttcaacaaggtttcgaaccaaccgacttcaccgtcgaaggtatgaaccaaggtctgaaagacgcgttgtcagaaaaggacccagcgttgtccgacgaacaactgcaagaaatccaaggcaagattcaagccatgatgcagaagcgtcaggcggagcggatggccgagcttaaaaagcaaggcgtgatgaacaaagagaagagcgacttgtggctgaaacaaaacgccaaggcgaagggcatcaaagaactcgagggtggactgcaatataaagtggtcaaggaaggcgaaggagcatccccgaccgctgaagacaccgtcgcggttcactacaccggcaaactgaccaatggcgaagtcttcgacagttcggtcgagcgtggtcaacctgccaagttccctgtcggtcgagtgatccaaggatggcagatggctcttcagaagatgaaggttggttcgaaatggatgctctacattccaccagaattggcatacggcgagaacggttcgccaccaaagatcggacccaacgaagtgttggttttcgaagtcgagttgcttgagattttgtag

SEQ ID NO: 153880 - protein, 238 aa, Rhodopirellula baltica SH 1
MPRLSRLIPTLCLATFVMTSPGNAQDDSAAKVDDQLGYFLGFTVGNSFVQQGFEPTDFTVEGMNQGLKDALSEKDPALSDEQLQEIQGKIQAMMQKRQAERMAELKKQGVMNKEKSDLWLKQNAKAKGIKELEGGLQYKVVKEGEGASPTAEDTVAVHYTGKLTNGEVFDSSVERGQPAKFPVGRVIQGWQMALQKMKVGSKWMLYIPPELAYGENGSPPKIGPNEVLVFEVELLEIL

SEQ ID NO: 153881 - DNA, 735 bp, Haemophilus ducreyi 35000HP
  CDS (1)..(735): transl_table=11
atgttaaaaaataaactctcaactcttgcattagtagtaggtacattatttgcctctcaagcaacatttgcagaaaaagcagatcaagcatttgtgaatgattcatcttatgcggtaggtgtcttaatgggtaaaaatatccaaggcgtcatcgaatcccaaaaagaggttttttcttataatcaagagaaaatcttagtgggcgtacaagataccttaaaaaaaaccggtaaacttactgacgaagaactacaaaaacaattaaaagcactagatacttaccttgctaaacaagaaagcaaaatagctgctgaaaaaagtaaagcaactaaagaagcgggcgacaaattccgcgcagaatatgagaaaaaagcaggcgtgaaaaaaaccgcttcaggcttactctacaaaattgaaaaagcaggtacaggcgcatcaccaaaagctgaagatatcgtaatagcacactacaaaggcacattaccagatggcacagtatttgatagttcatatgaacgcaatgaaccaatcgaactacaattaaaacaattaattccagcgtggattgaagcgattccaatgctgaaaaaaggtggaaaaatggaaattgttgcaccacctaaattagcttatggcgaccgcccatcgggcaaagtaccggcaaatgcaacattgaaatttgaaattgaattattagatttcaaaccaactgccgcgcaaccaaagaaaaaataa

SEQ ID NO: 153882 - protein, 244 aa, Haemophilus ducreyi 35000HP
MLKNKLSTLALVVGTLFASQATFAEKADQAFVNDSSYAVGVLMGKNIQGVIESQKEVFSYNQEKILVGVQDTLKKTGKLTDEELQKQLKALDTYLAKQESKIAAEKSKATKEAGDKFRAEYEKKAGVKKTASGLLYKIEKAGTGASPKAEDIVIAHYKGTLPDGTVFDSSYERNEPIELQLKQLIPAWIEAIPMLKKGGKMEIVAPPKLAYGDRPSGKVPANATLKFEIELLDFKPTAAQPKKK

SEQ ID NO: 153883 - DNA, 831 bp, Porphyromonas gingivalis W83
  CDS (1)..(831): transl_table=11
atgaaaaaaacaattgcaattatcgcctcagccctcttggctttaggagccgtcggctgtaagaaaaatgctgacactaccgctgtcagtgaaaaggatagcatagccttgtccatgggtattttgtacggacaggattttgccaatcagttcgaaatgtcccgcttgcaaggccagccgattgattcggtagctttcttggacggtttcaaatatggtatcgatacgacgcgcttctcgtacaatctgggagccatctatgcttccaatatagctcgtcagctggctcatgattccatcgatatcgacaagttctatgcagccatgcgtgcggctcttcttaaagacaccgtatctatcgccatgaagcctgcagatgcacaggctttcatgcaacgaatccaagccaaaaagcagcgagaaaacaatatgaagcagtttggccagaacatcgaaaagggtaatgaatacatcgatacctttaaaaaagaagatggtgtaactgttacgacaagtggtctggcatacaagactcttcaggaaggtacgggagctactccctctttggccgatactgtacgtgtcaagtatgtgggtactctggtcgatggtaaagagttcgacaaaaacgaagaaggaatcgaatttgccgttaccggtgtgattaaaggctggacggagatgctccaactcatgaaggtcggtcagaaagttcgcgtggtaatcccacaggagctggcttatggggagaccggcaactataccatcgaaccgttctctaccctgacgttcgagatggaacttatcgggatcaagcccgggaaaaagtaa

SEQ ID NO: 153884 - protein, 276 aa, Porphyromonas gingivalis W83
MKKTIAIIASALLALGAVGCKKNADTTAVSEKDSIALSMGILYGQDFANQFEMSRLQGQPIDSVAFLDGFKYGIDTTRFSYNLGAIYASNIARQLAHDSIDIDKFYAAMRAALLKDTVSIAMKPADAQAFMQRIQAKKQRENNMKQFGQNIEKGNEYIDTFKKEDGVTVTTSGLAYKTLQEGTGATPSLADTVRVKYVGTLVDGKEFDKNEEGIEFAVTGVIKGWTEMLQLMKVGQKVRVVIPQELAYGETGNYTIEPFSTLTFEMELIGIKPGKK

SEQ ID NO: 153885 - DNA, 762 bp, Porphyromonas gingivalis W83
  CDS (1)..(762): transl_table=11
atgatcattgccggcttagcctttttagtggccggattatctgcctttgcaaaaaaaccgcccaaaaaggatgaggtgcaaaccgtgaagcctatcgtgacttctgctgactctgtggcatacgctttcggtataagcggagcaataaatttcaatgactataccggacggatgccgggcgattctctggatcgtgccctgattctccgagcattcgaagaagtactcatgggaaagagcactgctatctcttcccaaaatgcggacgaaatgatcaagaaatacttcaaggaagtacaggacagactcaaagccgaaaacttggcagcaggcaaagcttatcaggaagaatatcgcaagcagccgggcgttaaggctaccgaaagcggtttgttgtatcgtgtcttgaaggaaggggaaggacctcgcccgacggttcaggatacggtcgttgttcattatgtgggcaagaacattgaagggaaagaattcgacagctcttattctcgcaacgagccggcaaagttcagcctcctgcaagtgattccgggatggactgagggtgtttgtctgatgcaaaagggtgccaagtacgaatttgttatcccgaccgaactgggatatggcgaacgtagcatgggcgaacttctcaagccgaactctacgcttttcttcgaagtagaactactcgaaatcaagcctttcgtagagaagccggcaaagcctatcccggcaaaacctactccaaataagaaaaactaa

SEQ ID NO: 153886 - protein, 253 aa, Porphyromonas gingivalis W83
MIIAGLAFLVAGLSAFAKKPPKKDEVQTVKPIVTSADSVAYAFGISGAINFNDYTGRMPGDSLDRALILRAFEEVLMGKSTAISSQNADEMIKKYFKEVQDRLKAENLAAGKAYQEEYRKQPGVKATESGLLYRVLKEGEGPRPTVQDTVVVHYVGKNIEGKEFDSSYSRNEPAKFSLLQVIPGWTEGVCLMQKGAKYEFVIPTELGYGERSMGELLKPNSTLFFEVELLEIKPFVEKPAKPIPAKPTPNKKN

SEQ ID NO: 153887 - DNA, 588 bp, Porphyromonas gingivalis W83
  CDS (1)..(588): transl_table=11
atggataaagtgagctatgctctgggattgagcatcggtaataatttcaagtcttcgggcatcgacagcgtcgttatggatgatttcatgcaaggtctgtctgatgtactggaagaaaaagcccctcagctctcgtatgacgaggccaagcgcgaaatagaggcgtatttcatggatttgcagcagaaggctgtcaaactgaacaaagaggccggagaagaattcctcaagataaatgcacacaaggaaggtgtgacgaccttaccgagcggcttgcaatacgaagtcattaagatgggagagggcccgaaacccaccctttcggacacggtaacctgtcattatcacggtacgctcatcaacggtatcgttttcgatagctctatggacaggggagaaccggccagtttccctctaagaggagttatagccggctggacggagattcttcaattaatgcctgtaggatccaagtggaaagtaactataccgagcgatctggcgtatggagatcgtggtgccggcgaacatatcaaaccgggtagtacgctcatttttataatcgaattattgagtatcaacaaataa

SEQ ID NO: 153888 - protein, 195 aa, Porphyromonas gingivalis W83
MDKVSYALGLSIGNNFKSSGIDSVVMDDFMQGLSDVLEEKAPQLSYDEAKREIEAYFMDLQQKAVKLNKEAGEEFLKINAHKEGVTTLPSGLQYEVIKMGEGPKPTLSDTVTCHYHGTLINGIVFDSSMDRGEPASFPLRGVIAGWTEILQLMPVGSKWKVTIPSDLAYGDRGAGEHIKPGSTLIFIIELLSINK

SEQ ID NO: 153889 - DNA, 792 bp, Wolinella succinogenes DSM 1740
  CDS (1)..(792): transl_table=11
atgagcgttaaaaaaatctctgttgggttgtttctgttggcctgtttggtttctcaaggaatcgcaagtgatctgaaaacagatgtgcaaaaagaatcgtatagcattggagcgtccatgggcgcttatgtctccaatcaactttttgagcaatctcagctcggcgctaaggcggatgtccaagcgttgattgatgggtttgtggatgctttgaaaaaacagcaaaaactctctgatgatgagatcatcacgcatcttaacaatcgagccgagggtttgaacaaaatcagccaagagagatttaaacaacagcttgatcagaggctcaaagagggcaaaaagtatctcgccaacaacgccaaaaacaaaaaagttctcaccaccaagacaggccttcaatatgaagaattggtcgctggtaaaggggagagacccaagaaagagagcattgtcatgattcactacaaagggactcttgtggatgggacaccctttgatagcacctatgagcgtcaaacccctgcccatctctccatggtcaatgtgattgatggtttgcaagaggggctcatgcttatgaaggagggcgagaaggctagattggtgattcctagtgatctggcgtatggcaatgcggatgtccaagcgattcctgcgggctcaacagtggtttttgaggtggagcttttgaaggtgctcaagcctggcgagctagctgatagtgccaaaccgcttagcgatgaggtcaaaaaagaggttgaagaaatggggaaaaagcccatcaaaggctag

SEQ ID NO: 153890 - protein, 263 aa, Wolinella succinogenes DSM 1740
MSVKKISVGLFLLACLVSQGIASDLKTDVQKESYSIGASMGAYVSNQLFEQSQLGAKADVQALIDGFVDALKKQQKLSDDEIITHLNNRAEGLNKISQERFKQQLDQRLKEGKKYLANNAKNKKVLTTKTGLQYEELVAGKGERPKKESIVMIHYKGTLVDGTPFDSTYERQTPAHLSMVNVIDGLQEGLMLMKEGEKARLVIPSDLAYGNADVQAIPAGSTVVFEVELLKVLKPGELADSAKPLSDEVKKEVEEMGKKPIKG

SEQ ID NO: 153891 - DNA, 765 bp, Photorhabdus luminescens subsp. laumondii TTO1
  CDS (1)..(765): transl_table=11
atgaaatcattgtttaaagttaccctgcttgctaccacattagcgatggctttcagcgcccctcaggtgttggcggctaaagcagatagccagagtagtacagaattgaacagcgcatttaaaacagaagatcagcaaaatgcttatgctctgggcgcatctttagggcgttatatgcaaaacaccctgaaagaacagaaatctctgggtatcccattggataaagatcaattgttatcgggtgtgcaggatgctttcaataataagagcaaactgactgacagcgaaattgaaaatacgctgcgtgcgtttgaaggtaaagtgaagtctgctgctgaagctaagatggaaaaagaagccagcgagaatgaagctaaaggcgttaaatatcgtgaagaatttgctaaggaaaagggtgtcgttaagagtaaaaccggccttttgtataaaatagagaaggaaggcagtggtaagaagcctgtggcaagcgacacggtagttgtgaactaccgggggacattgattgacggtaaagagttcgatagttcctataagcgtaatgaacccctttctattcgcctggatagcgttatcccaggttggacagaaggtttacagaatgtgaaaaaaggcggaaaaattaaactggttattccaccagagctggcctatggtaaagcggatctgccgggtattcctgcaaattcgacactagtatttgatattgagctgctggatgttaaagcggagaccaaagctaagtaa

SEQ ID NO: 153892 - protein, 254 aa, Photorhabdus luminescens subsp. laumondii TTO1
MKSLFKVTLLATTLAMAFSAPQVLAAKADSQSSTELNSAFKTEDQQNAYALGASLGRYMQNTLKEQKSLGIPLDKDQLLSGVQDAFNNKSKLTDSEIENTLRAFEGKVKSAAEAKMEKEASENEAKGVKYREEFAKEKGVVKSKTGLLYKIEKEGSGKKPVASDTVVVNYRGTLIDGKEFDSSYKRNEPLSIRLDSVIPGWTEGLQNVKKGGKIKLVIPPELAYGKADLPGIPANSTLVFDIELLDVKAETKAK

SEQ ID NO: 153893 - DNA, 795 bp, Vibrio vulnificus YJ016
  CDS (1)..(795): transl_table=11
ttggagagtttaatgaaatcagttttaaaagtgtcactgcttgcagctactgtaatgctggcagtcggctgtcagaaagaagaagcaaaaccagcagccgcaccacaagcagagcaggtacaggcagaaaccggtaaagcggttcactttaaatcagaagatgacaaagcggcttacgcgattggcgtgtcgtttgctaactacctaagtgcaagcctagacaagccaagtgaaattggtatcaacctaaataaagatttggtgcttaaaggtatcgagcatgtttttgctggtaaccctgagctgaatgaagaagaaacacgcgcggcactagaagcgctagataagcgcgtagctgaaaccatgcagaagaaagcggcagaaaaagcagaagctgcaaagaaagctggtgatgaattccgcgctgagtttgaaaaacaagaaggtgtggtgaagacggacactggtcttctataccaagtgatcacgcctgctgaaggtgagaaaccaaaagacaccgacacagttcaagttcactacaaaggtacattaacagatggtactcagttcgatagctcttacgatcgtggtgagccagcaactttcccactgaaccgagttatcccaggttggacggaaggtgttcaattgatgccagtaggttctaagttcaagttcgttattccacctgagctagcgtacggcgcgcaagacacgccaagcattccagcgaactcaacattggtgttcgaagtcgaactattgaagattgaaaacggcgacaacgcgcagtaa

SEQ ID NO: 153894 - protein, 264 aa, Vibrio vulnificus YJ016
MESLMKSVLKVSLLAATVMLAVGCQKEEAKPAAAPQAEQVQAETGKAVHFKSEDDKAAYAIGVSFANYLSASLDKPSEIGINLNKDLVLKGIEHVFAGNPELNEEETRAALEALDKRVAETMQKKAAEKAEAAKKAGDEFRAEFEKQEGVVKTDTGLLYQVITPAEGEKPKDTDTVQVHYKGTLTDGTQFDSSYDRGEPATFPLNRVIPGWTEGVQLMPVGSKFKFVIPPELAYGAQDTPSIPANSTLVFEVELLKIENGDNAQ

SEQ ID NO: 153895 - DNA, 696 bp, Bdellovibrio bacteriovorus HD100
  CDS (1)..(696): transl_table=11
atgaataaattggttctgggtggtctggttgttgcggcgatggccttcacaacagcttgccaaaagaaagttaagctcgacactgatatgaaaaaagcgagctatgctatcggtcaacaaatcggtggtaacttgaaacaacaaaacatcgacttcgatgcagatgcattggcgatggctttgaaagacgcagcagcgggtaaaaacgaaatgtctaaagaagacatgcaagctgctatgatgaaacttcaagaaatggcgatgaaaaaacaacaggaacaagctgaaggcaatgctaaagctggtaaagacttcctggagaaaaacaaatctgcagcgggcgtgaagacaactgcttccggtttgcagtacatcgttgaaaaagaaggcactggcgcttctcctaaaaaagaagacgtagtaaaagttcactacaaagggactttgactaacggtgaacagttcgactcttcctacgatcgtggtcaaccggctgaattcccagttggtggcgtgatcccaggttggacagaagctcttcagttgatgaaagttggcggcaaagccaagcttttcatcccacctgagctggcttacggtccatccggtcgtcctggcattccgccaaactctgtgcttgtgttcgaagttgagttgatcgacatcgttaaacaagacactaaaaagaaaaagtaa

SEQ ID NO: 153896 - protein, 231 aa, Bdellovibrio bacteriovorus HD100
MNKLVLGGLVVAAMAFTTACQKKVKLDTDMKKASYAIGQQIGGNLKQQNIDFDADALAMALKDAAAGKNEMSKEDMQAAMMKLQEMAMKKQQEQAEGNAKAGKDFLEKNKSAAGVKTTASGLQYIVEKEGTGASPKKEDVVKVHYKGTLTNGEQFDSSYDRGQPAEFPVGGVIPGWTEALQLMKVGGKAKLFIPPELAYGPSGRPGIPPNSVLVFEVELIDIVKQDTKKKK

SEQ ID NO: 153897 - DNA, 750 bp, Treponema denticola ATCC 35405
  CDS (1)..(750): transl_table=11
atgaaatttattaaaaattttactcttattttatgttgtgcctgcttgttttttgcgtttacatcctgtaaggacaaaaaagcggaaacggaagttccttccgaaaacaatgcagccgatgaaaaggaaaaaatttcggtaaccgaggaagaggtaggctatgccttcggcgttatcatcgcacaaagtgcaaagcaagacggtataaaactcaaccccaagcacattttaaagggctataatgaagcaatggctaaggattttaaagaaacaggacttcaggatgctcagacggttttaaataaggcctttaaaatggctcagatagaaaaggctgcaaaggctcttgaagaagctaatgcctttttggaaaaaaacaaggctaaagagggtgttgtagttaccgaatccggtttgcagtatgaggtgctttcaaaggggaaggaagatttctatcctacagcaaatgatgaagttgaagtcaactatatcggaaaacttatagacgaaagtgtttttgacgattcatataaaagcggttcaagcgtaaaaatccagttatcaagggtgatccccggctggaaagaaggcttacagttgatgagccaggatgcaaaattcagactttatgttccgccggcattggcttacggagaacagggtattactcagggcaatacggttataattccccccaatgctgttttgatttttgacattgagttggtaaatatcttaccccaaaagtag

SEQ ID NO: 153898 - protein, 249 aa, Treponema denticola ATCC 35405
MKFIKNFTLILCCACLFFAFTSCKDKKAETEVPSENNAADEKEKISVTEEEVGYAFGVIIAQSAKQDGIKLNPKHILKGYNEAMAKDFKETGLQDAQTVLNKAFKMAQIEKAAKALEEANAFLEKNKAKEGVVVTESGLQYEVLSKGKEDFYPTANDEVEVNYIGKLIDESVFDDSYKSGSSVKIQLSRVIPGWKEGLQLMSQDAKFRLYVPPALAYGEQGITQGNTVIIPPNAVLIFDIELVNILPQK

SEQ ID NO: 153899 - DNA, 1308 bp, Apis mellifera
  CDS (197)..(1210)
ttacttggcgcgaggtcatagaagtacctgatatatgtaattggtcgtacaaactcagtgtgtatatgtgtgtgtgtatatatatatatatatatatatattatatatatatgtatattatcaatttatttgcatataaagtttaattattaatatttcatttctctactataaaagttatataattacacacaaaatgttttggggtttaatattagaaccaaataagcggtatacacagaccgttgaaaaatcattccatgtatcaatggccagtttaaatctttcaacagccgatgacaatgtggtacaagtaatgttatattatgaaaatagtagttatttattatgcaatttaaaaaagagctcaacatggcaggtaccacttgatttaaattttcaagaaggaactacgatagcattcatatgtcatggccatggtcaagttcatttaactggttatttaatacccgatgaggatttggatttagatgaaatagaagaagaagatgaagatgagcaggtaccacaattacttgacaaacaatctaagagaaaagctacagattctttaaaaaatgagaaaaatgttaaacgtcttaaacaagaaattgaagctgaatcttctgatgaagatatagaattagatggagtaaatgaagaaaatgactctgatgattctgaagaagatgaagattcattattaaatgaagaagaaactgaagaagatgaagaagatgaagaaaaaaatgaacaagatgaagaagaaaaaaaggtgaagaataaaataataataaatgggaaagaaataaaacaagaaaaaaataaaggagaacaacaacaaaatgaaatgaatgttcagactgatcaaaaaaaaagaatagtagaaggtggagtacaaatagaagaattaaaaataggtaatggttcttttgctaagaatggaaaatttgtatctgtatattatgtgggtcgtttaaaaaatggaaaaaagtttgatgcaacaacacatggagatggtttcaaatttagacttggaaaaggtgaagtaattaaaggatgggatattggtattgcaggaatgaaagttggaggaaaacgtcgtattacaatacctccagctatggcatatggtgcaaaaggttcaccacctgttattcctggtaatagtacattaatgtttgaagtggaacttaggaatgtacattaaaacttctgaatttttattgatatttaagtgtttgttaagcgacatataatgtattttaaactaataaacgtaatatccttttttattacttaaaaaga

SEQ ID NO: 153900 - protein, 337 aa, Apis mellifera
MFWGLILEPNKRYTQTVEKSFHVSMASLNLSTADDNVVQVMLYYENSSYLLCNLKKSSTWQVPLDLNFQEGTTIAFICHGHGQVHLTGYLIPDEDLDLDEIEEEDEDEQVPQLLDKQSKRKATDSLKNEKNVKRLKQEIEAESSDEDIELDGVNEENDSDDSEEDEDSLLNEEETEEDEEDEEKNEQDEEEKKVKNKIIINGKEIKQEKNKGEQQQNEMNVQTDQKKRIVEGGVQIEELKIGNGSFAKNGKFVSVYYVGRLKNGKKFDATTHGDGFKFRLGKGEVIKGWDIGIAGMKVGGKRRITIPPAMAYGAKGSPPVIPGNSTLMFEVELRNVH

SEQ ID NO: 153901 - DNA, 870 bp, Aedes aegypti
  CDS (1)..(870)
atggaaaatgccatcgttgtggaaaaactggccacatgcagagagactgccgggtcaagaagcctgagagcaacgctaatactgttgttggaggaacgcatcgccaagaaggtcgcccagaaagtgaacgccaaggaagttcagctggaggaagacggcgaggaggacgatctggatgagacgttcgaacccccgaagggagctgccaagaaggccggtgctgcggaggaagaggaagactccgacgacgacgatgatgaggatgacgatgacgatgaggacgatgatgaggacatggaagacagcaaattagacggagaagcggacagtgacgacgacgatgaagatgacgatgatgaagacgaggatgaggatgatgatgatgacgaggaggacgaatccgaagacgaacaaccgaaagccaaggttgccaaagtggaaaagaagggctccaagcagaacggcgtcgaaaatggcaaagcttctcccaaggaactgaagaaggatggccaacagcagcaggaagctaagacacgcaccctccagggtggactggtcgtggaagacctcaaagtcggcggtggcgcagaagccaagccaggcaagaagattgccgtctactacgaaggtcgcctgaagaagaacaacaaggtgttcgattcgaccaacaagggacccggcttcaagttcgccctgggccgcggagaagtcatcaagggatgggatttgggagtgtccggaatgaaggtcggaggcaagcgacgattgaccgtgccccaccagttggcctacggaacccgaggaagccccccggtgatccccccgaacagcactctggtcttcgacgtggagctgaaaaacgtcttctaa

SEQ ID NO: 153902 - protein, 289 aa, Aedes aegypti
MENAIVVEKLATCRETAGSRSLRATLILLLEERIAKKVAQKVNAKEVQLEEDGEEDDLDETFEPPKGAAKKAGAAEEEEDSDDDDDEDDDDDEDDDEDMEDSKLDGEADSDDDDEDDDDEDEDEDDDDDEEDESEDEQPKAKVAKVEKKGSKQNGVENGKASPKELKKDGQQQQEAKTRTLQGGLVVEDLKVGGGAEAKPGKKIAVYYEGRLKKNNKVFDSTNKGPGFKFALGRGEVIKGWDLGVSGMKVGGKRRLTVPHQLAYGTRGSPPVIPPNSTLVFDVELKNVF

SEQ ID NO: 153903 - DNA, 1458 bp, Magnaporthe grisea 70-15
  CDS (1)..(1458)
atgcctcttctgcccgccgctttgtacggacttcgcgtcccggccggcgatgagccgatgcccgctgccattgacttccctgctactattcgcatcacaatggccgccatcgaccctactgaggagcccgaggccgatgaggacggcaaggtccctcgtgtgccccgctcaacactcaagctcgtcaaggagaccgtcaaccccgacatggatgaggacagcgacgaggatgacgactacctgcagcagctcctcgccgacggcggcgacgactctgaggacgatgatgaggaggaggaggccaacggtggcccgtctgacccatccaagtccaagaaggctcgccaggaggctgcactgaagaagcttctcgctgccgccaacgaggaggactctgacgaggagatggccgacgccggctccaagtcgaagaagtcgaagaagggcaaggctcctgccaccaaggacaatgatgaggactcggaggacgaggacgatgatgacgactcggacatgggtgtcgacatggaggagcacgttctgtgcacactcgaccttgagaggaacttccagcagcctcttgacattgttattggagagggtgagagggcttacttcgtcgtcagcggtactcactcgatccacctcaccggaaactacgtcatccccgacgtcgaggaggacgacagcgatgatgaggatgacagcgacgacgagtacgaccttacccctgacatggaggacgttctcggcgacggcgagtctgtctctagcgacgacctcgacgagatcgacggtgctatgcgcgtcgaggagatcgacacggacgaggaggaggctcccaagctggtcaaggctaaggacagcaagaagagcaagaagcgccccgctgaggacgaggaggccgagggtctcgatgctctgattgcccaggaggccgagggcaagttgagcaagaagcagcaaaagaagctcaagaacaacaagggcgaggctgtcgaggccgagaccaaggagaaggccaccccggccaagggtgacaagaaggtccagttcgccaagaacctggagcaaggccccaccggctcggctgagaagcccaaggccaacggcaaggcctcgctcggtgtcaagaccgtccagggcatcaccatcgacgaccgcaagctcggccagggccgtgttgccaagtcgggtgacaaggtcagcatgcgctacattggcaagcttaccaacggcaaggtgtttgatgccaacaagaagggcccccctttcagcttcaagctcggcaagggtgaggttatcaagggctgggacattggtgtggccggcatggctgtcggcggagagcgccgcctgaccatccccgcatcgcacgcctacggaagctcgggtgttcctggcattccaggaaacagcacgcttgttttcgacgtcaagctgttggagatcaagtaa

SEQ ID NO: 153904 - protein, 485 aa, Magnaporthe grisea 70-15
MPLLPAALYGLRVPAGDEPMPAAIDFPATIRITMAAIDPTEEPEADEDGKVPRVPRSTLKLVKETVNPDMDEDSDEDDDYLQQLLADGGDDSEDDDEEEEANGGPSDPSKSKKARQEAALKKLLAAANEEDSDEEMADAGSKSKKSKKGKAPATKDNDEDSEDEDDDDDSDMGVDMEEHVLCTLDLERNFQQPLDIVIGEGERAYFVVSGTHSIHLTGNYVIPDVEEDDSDDEDDSDDEYDLTPDMEDVLGDGESVSSDDLDEIDGAMRVEEIDTDEEEAPKLVKAKDSKKSKKRPAEDEEAEGLDALIAQEAEGKLSKKQQKKLKNNKGEAVEAETKEKATPAKGDKKVQFAKNLEQGPTGSAEKPKANGKASLGVKTVQGITIDDRKLGQGRVAKSGDKVSMRYIGKLTNGKVFDANKKGPPFSFKLGKGEVIKGWDIGVAGMAVGGERRLTIPASHAYGSSGVPGIPGNSTLVFDVKLLEIK

SEQ ID NO: 153905 - DNA, 1134 bp, Tribolium castaneum
  CDS (1)..(1050)
atgttctggggtttgatcatggaaccggggcggtgttacacccaaacggtcaaagtcgcattccatgtatcaatggctgcgttggatatttcaaattccggggatgaaccggctcaagtaatgtgcgtgtttgaggggcgtaattacctcctgtgcacgctcaacaggaaggacaagtggcagtgcgccctggatttgagttttgaggtcggttctaaggtttcttttgctacaaacggcaaatcccacgtgcacttgaccgggtatttgaccgatctccaagatgagtttgatgaggaagaggttgaggaggaagaagaaaaaaacaacacattgatggacgttagttggagtaaaactggcaaaactttagttaaatccaatgttttagctcctagtaaaaaatccaaaactctggaagaatcaattacggaggaagaggacgattctgattcagattttgacttaaatcacgtcatgcaggagtcgggggaggaagaagagtcgggtgaggaggaagaatcaggtgaggaggaagaagacgaggaggaggaggaggatgaagcgtccagtttgagtgatggagaaagcgaggaggaaaaggaagtgaagccgaaacagaacggtattgcaaaacccactcagaagaagaagcaaaaagaagaaaagtctaaaccacaagaagagaagaaagggaaacagaagcccaagaagactgtcctgaaagggggtgtgatagtcgaagacctcaaagaaggttcgggcgatttggtctccaacgggaaatttgtccacgtttactacgaaggccgtctcaaggactctaacaaaatgtttgactcaaccaccaaaggcccaggatttagtttcagggttggcaaaggagaggttatcaaaggctgggacgtcggtttagtcggaatgaaggtcgggggcaagcgccgcatcatgtgccccccgaaaatggcctacggggccaagggctcgcccccggtgatccccccgaacgcaaacttggtctttgatgtggagctcaagaaagtcagctaaatgtgtaactttgttgtctgtaatctccagtttgcttttttactttacttatcggtttcagttataaataaacggtattttttc

SEQ ID NO: 153906 - protein, 349 aa, Tribolium castaneum
MFWGLIMEPGRCYTQTVKVAFHVSMAALDISNSGDEPAQVMCVFEGRNYLLCTLNRKDKWQCALDLSFEVGSKVSFATNGKSHVHLTGYLTDLQDEFDEEEVEEEEEKNNTLMDVSWSKTGKTLVKSNVLAPSKKSKTLEESITEEEDDSDSDFDLNHVMQESGEEEESGEEEESGEEEEDEEEEEDEASSLSDGESEEEKEVKPKQNGIAKPTQKKKQKEEKSKPQEEKKGKQKPKKTVLKGGVIVEDLKEGSGDLVSNGKFVHVYYEGRLKDSNKMFDSTTKGPGFSFRVGKGEVIKGWDVGLVGMKVGGKRRIMCPPKMAYGAKGSPPVIPPNANLVFDVELKKVS

SEQ ID NO: 153907 - DNA, 990 bp, Dichelobacter nodosus VCS1703A
  CDS (1)..(990): transl_table=11
atgatgaaaaaaacttctttactattatcagccgcgattgccttgagtttgacgcaggtttatgccggcgttgtgttaaaaaatgaagggcaaaaagtgggttatgccatcggggtggatatgggaagttccattgcgcaattaggtatttctgatggggaagaattggattttaatgccgtgattttgggattgcgcgatgcttatcaaaagaaagatttgcttttaactcaagatgaaatgacgaaaacgctgcaagatttttctgaaaaacgtttgcaagccatgaaaaaagaaatggaaaaaatcgccgctgaagaagcagaaaaaggcaaagcgtttttagaagaaaatgcgaaaaaagacggcgtaattacaacggaatctggtttgcaatataaagttgttaaaaaaggaaccggcgcaaaacccaatagcgacgaccgcgttaccgttgattacaccggcactttgattgacggcaccgaatttgacagctcaaaaggacgcgaacctattacgattaacgtacaagatgttattgctggttgggttgaaggtttgcaactgatgaccgaaggcgctaattatattttctatattccgtctgatttagcttatggctctcgcggcgccggtaacgctattccgcctaatgctactttgatttttgatgtgaatttactcaaaattgaaaaaaatgaagcggaagccgaagctgataaaaaagaatcgattgcaaaatccatcaataaatctttagaagaagccacggaaatcgtaaaagcagaagtggaagctgacaaaaaagaatcgattgcaaaatccattaataaatctttggaagaagccacagaaaccgtaaaagcggaagccgaagctgataaaaaagaagccattgccaattctattaataaatctttagaagaagcggcggaagcggtaaaagaagtgatcgaagcgaaacctgatgaagcggctaaaaaatag

SEQ ID NO: 153908 - protein, 329 aa, Dichelobacter nodosus VCS1703A
MMKKTSLLLSAAIALSLTQVYAGVVLKNEGQKVGYAIGVDMGSSIAQLGISDGEELDFNAVILGLRDAYQKKDLLLTQDEMTKTLQDFSEKRLQAMKKEMEKIAAEEAEKGKAFLEENAKKDGVITTESGLQYKVVKKGTGAKPNSDDRVTVDYTGTLIDGTEFDSSKGREPITINVQDVIAGWVEGLQLMTEGANYIFYIPSDLAYGSRGAGNAIPPNATLIFDVNLLKIEKNEAEAEADKKESIAKSINKSLEEATEIVKAEVEADKKESIAKSINKSLEEATETVKAEAEADKKEAIANSINKSLEEAAEAVKEVIEAKPDEAAKK

SEQ ID NO: 153909 - DNA, 831 bp, Klebsiella pneumoniae subsp. pneumoniae MGH 78578
  CDS (1)..(831): transl_table=11
atgaaatcactgtttaaagtaacgctgctgacggccacaatggccgtcgccctgaatgcaccgctgaccttcgctgcagatacggcaacgaaggcagccccggcggctgagagtaaatcggcatttaaaaatgacgatcagaaatcggcctatgcgctgggcgcgtccctggggcgttacatggaaaactccctgaaagaacaagagaagctgggcattaagctggataaagcccagctgatcgccggcgtacaggacgcgtttgccgataagagcaaactgtccgaccaggagatcgaacagactctgcaggcctttgaaacgcgcgtgaagaccgcggctcagcagaaaatggaaaaagacgccactgagaacgaagccaaaggcaaagctttccgtgacaactttgccaaagagaagggcgtgaaaacctcaaaaactggcctgctgtataaagtcgagaaagaaggcgctggcgatgcgccgaaagacagcgataccgtggtggtaaactacaaaggtaccctgatcgacggtaaagagtttgataactcttatactcgcggcgagccgctctctttccgtctcgacggcgtgatcccgggctggactgaaggcctgaagaacatcaagaaaggcggcaaaatcaagctggttattccgccggacctggcctacggtaaaactggcgtcccgggcatcccggccaactctacgctggtctttgatgtagaactgctggatatcaaaccggcgccgaaggcagatgcacagccggaagccgcaggcgatgcgaaagccgcggacgcgaaagctgacgctaagaagtaa

SEQ ID NO: 153910 - protein, 276 aa, Klebsiella pneumoniae subsp. pneumoniae MGH 78578
MKSLFKVTLLTATMAVALNAPLTFAADTATKAAPAAESKSAFKNDDQKSAYALGASLGRYMENSLKEQEKLGIKLDKAQLIAGVQDAFADKSKLSDQEIEQTLQAFETRVKTAAQQKMEKDATENEAKGKAFRDNFAKEKGVKTSKTGLLYKVEKEGAGDAPKDSDTVVVNYKGTLIDGKEFDNSYTRGEPLSFRLDGVIPGWTEGLKNIKKGGKIKLVIPPDLAYGKTGVPGIPANSTLVFDVELLDIKPAPKADAQPEAAGDAKAADAKADAKK

SEQ ID NO: 153911 - DNA, 681 bp, Klebsiella pneumoniae subsp. pneumoniae MGH 78578
  CDS (1)..(681): transl_table=11
atggctgttatgctttcgcacgcttttatcttgatgtttatcacccaaaaaggaacaacgatggcaaccccaacttttgacactatcgaagcgcaggcaagttacggtatcggcttgcaggttggacaacagctgagcgaatccggcctgcaggggctgctgccggaagcgctggtggcgggtatcgccgatgcgctggaaggtaaccagccgcaggtgccggtggaagccgttcaccgcgcgctgcgtgaaatccacgagcgtgctgacgctgtgcgtcgcgagcgttttcaggccatggccgctgacggccaaaaataccttgatgaaaaccgcgagaaagaaggtgtgaacagcaccgagtctggtctgcagttccgcgtactgacccagggcgaaggcccgatcccggcgcgtactgaccgcgttcgcgtgcactacactggcaaactgatcgacggcaccgtcttcgacagctccgtcgctcgcggtgaaccggctgaattcccggtgaccggcgtgatcggcggctggattgaagcgctgactctgatgccggtaggttccaaatgggaactgacgatcccgcacaacctcgcctacggtgagcgcggcgctggcgcatcgattcctccgttcagcaccctgatcttcgaagttgaactgctggacattatctaa

SEQ ID NO: 153912 - protein, 226 aa, Klebsiella pneumoniae subsp. pneumoniae MGH 78578
MAVMLSHAFILMFITQKGTTMATPTFDTIEAQASYGIGLQVGQQLSESGLQGLLPEALVAGIADALEGNQPQVPVEAVHRALREIHERADAVRRERFQAMAADGQKYLDENREKEGVNSTESGLQFRVLTQGEGPIPARTDRVRVHYTGKLIDGTVFDSSVARGEPAEFPVTGVIGGWIEALTLMPVGSKWELTIPHNLAYGERGAGASIPPFSTLIFEVELLDII

SEQ ID NO: 153913 - DNA, 753 bp, Desulfococcus oleovorans Hxd3
  CDS (1)..(753)
atgaaaaaaatgattaccttttttgtcaccatcgccatgattgccggcctgacagcctgccagaagagcgccgatacccaggccgcaccaccggcccttgaaaccgacaaggacaaggccagctacgccatcggcgtgaacatggcccaggccctggtcaagattaaagacgaggtcaacatcgacatggtggcagccggcctgaaagacaaggtcgacggcaacaccctgcttattgaagaagcggacgcccgatccctgctggctgatttctccaaaaagttacgggaaaagcagatggcggagcgggaggccctgggccagaaaaaccttgaagaaggacaggcctttcttgaggccaacaaggcaaagcccgatgtggtgaccacggaaagcggccttcaatacatggttgtcaaaaagggggatggcccggtgcccacgaacgaagaccgggtcaaggtacactaccggggcaccaccatcgacggcaccgagtttgacagctcctacgagcgggaagagcctgtcaccctggcggttaccggtgtgatcaagggctggaccgaggccctgcaactgatgccggtgggcagcacctacaaactttttgtacccgctgaccttgcctacggccccaggggcgcgggcgaccgcatcggccccaatgccgttctggtgttcgatgtggaactgctggagatcgtgacgccggaaaaaacgcccgccgaaacacccggtccggagatgtaa

SEQ ID NO: 153914 - protein, 250 aa, Desulfococcus oleovorans Hxd3
MKKMITFFVTIAMIAGLTACQKSADTQAAPPALETDKDKASYAIGVNMAQALVKIKDEVNIDMVAAGLKDKVDGNTLLIEEADARSLLADFSKKLREKQMAEREALGQKNLEEGQAFLEANKAKPDVVTTESGLQYMVVKKGDGPVPTNEDRVKVHYRGTTIDGTEFDSSYEREEPVTLAVTGVIKGWTEALQLMPVGSTYKLFVPADLAYGPRGAGDRIGPNAVLVFDVELLEIVTPEKTPAETPGPEM

SEQ ID NO: 153915 - DNA, 699 bp, Acinetobacter sp. ADP1
  CDS (1)..(699): transl_table=11
atgatgaaaaaaataggtttggctctgatcgcctcaagtatgacagtgactgcttttgccgcatcgattggtgcatcgagtccacaaaaagatcaactgggctatagctatggttacgttatgggacgtaccaatgcagatacattaaaggatctgaatgtagatgcttttgttcagggccttaaagaaggtgctcaaggcaaggattcagctttgagcgatgaggccatggctaaagttctaagccagtataaaaagcaggtcgaagccaaacagctctatgcatttcagcaattggcacaagataacctcaaacgtggtgaagcttttcttgcagaaaatgccaagaaatcgggtgtgattagcactaaatcgggtttgcagtatcaagtactcagtgcagggaaaggtaaatcaccgaaagccagttctcgcgtaaaagtaaattacgaggggcgtttactggacggtacagtctttgacagctcaattgcccgtaatcatcctgtcgagtttcagctcagccaagtgattccaggctggaccgaaggcttgcaactgatgaaagaaggtgaaaaagcgcgtctgtttattccagccaaacttgcgtatggtgaagtcggtagcggtgatgcgattggaccaaatagtacgctgatttttgatatcgaattactggaaattcttccatccaaataa

SEQ ID NO: 153916 - protein, 232 aa, Acinetobacter sp. ADP1
MMKKIGLALIASSMTVTAFAASIGASSPQKDQLGYSYGYVMGRTNADTLKDLNVDAFVQGLKEGAQGKDSALSDEAMAKVLSQYKKQVEAKQLYAFQQLAQDNLKRGEAFLAENAKKSGVISTKSGLQYQVLSAGKGKSPKASSRVKVNYEGRLLDGTVFDSSIARNHPVEFQLSQVIPGWTEGLQLMKEGEKARLFIPAKLAYGEVGSGDAIGPNSTLIFDIELLEILPSK

SEQ ID NO: 153917 - DNA, 708 bp, Acinetobacter sp. ADP1
  CDS (1)..(708): transl_table=11
atgagtaaagccttacccattgctgtcgctgtaattttaggcggtgctgcacttatccctgtttattacgcctctcagcatcctgcgacagatgtaggtagcaaggcagataaaaatgcgactccagtacaaaaaatcagttatgcactgggctacgaagtagcaaaccagacgcctgccgagctcgatgttaatacatttgtgcaaggtattcgtgatggtcatgcacatgctcctgccgcttataccgaagaacagttacaagcagcttataaagaatatcagcaggaaatgcagaaaaaacagcttgatcaaactcatcagtctgcctcaagcagcaacaattttcttgcagaaaatgccaaaaaagaaggcgttaaaaccactgcttctggtttgcagtacaaaattattaccgaaggtacaggtaaacgtccaagcgcttcatctgtggtaaaggtcaattataaaggtcaattgactgatggtaaggtatttgacagctcttacgagcgtggtcaacctgtcgagttcccattaaatcaagtgattccaggctggactgaaggcttacagcttctcaaggaaggtggtaaagcgaccttgtatatcccagccaaactgggctatggtgagcaaggtgttcctggcatgatcccaccaaacagtactttaatttttgatgtagaactgttagaagtgaaatag

SEQ ID NO: 153918 - protein, 235 aa, Acinetobacter sp. ADP1
MSKALPIAVAVILGGAALIPVYYASQHPATDVGSKADKNATPVQKISYALGYEVANQTPAELDVNTFVQGIRDGHAHAPAAYTEEQLQAAYKEYQQEMQKKQLDQTHQSASSSNNFLAENAKKEGVKTTASGLQYKIITEGTGKRPSASSVVKVNYKGQLTDGKVFDSSYERGQPVEFPLNQVIPGWTEGLQLLKEGGKATLYIPAKLGYGEQGVPGMIPPNSTLIFDVELLEVK

SEQ ID NO: 153919 - DNA, 621 bp, Erwinia carotovora subsp. atroseptica SCRI1043
  CDS (1)..(621): transl_table=11
atgacaactccttcttttgatagcgtcgaggcgcaggcaagttacggcatcggcttacaggttggtcaacagttacaggaatcaggtcttgaaggcctgatcccagaagctctgcttgctggtctacgtgatgcgctggaaggtaatgcgccagcggtgcctgtggatgtggttcatcgtgcgctgcgcgaaattcatgagcgtgctgatgcggtgcgtcgcgatcgtcagcaagagctggcggtagaaggccagcaattcctggctgaaaacgcgcagaaagaaggcgtggatagcacggagtctggtctgcaattccgcgtgttgacacagggtgaaggtgcgattcctgctcgtcaggatcgtgtacgtgtgcattacactggtcgtttaactgacggcagtgtgttcgatagctccgttgagcgtggtcaacctgctgaattcccagtaagcggcgtgattccaggctggattgaggcgttgacgctgatgccagtcggttccaagtgggaactctatattccacataatctggcgtatggtgaacgtggcgcgggtgcttccattccgccgttcagcgccctgatttttgaagtggaactgctggaaattctgtaa

SEQ ID NO: 153920 - protein, 206 aa, Erwinia carotovora subsp. atroseptica SCRI1043
MTTPSFDSVEAQASYGIGLQVGQQLQESGLEGLIPEALLAGLRDALEGNAPAVPVDVVHRALREIHERADAVRRDRQQELAVEGQQFLAENAQKEGVDSTESGLQFRVLTQGEGAIPARQDRVRVHYTGRLTDGSVFDSSVERGQPAEFPVSGVIPGWIEALTLMPVGSKWELYIPHNLAYGERGAGASIPPFSALIFEVELLEIL

SEQ ID NO: 153921 - DNA, 819 bp, Erwinia carotovora subsp. atroseptica SCRI1043
  CDS (1)..(819): transl_table=11
atgaaatcactgtttaaagtaacgctgttagcaacaacgatggctctggctctgaacgcgggccaggctctggcagcagacaaggcacaggcgtctgagagtactacggcagccaaattcaaaaacgatgagcaggcagcggcttacgcgttaggtgcatctttagggcgttacatggataactctctgaaagagcaggaaaaattaggtatcaagctggataaggatcagctgattgctggtgttcaggatgcctttgctgataagagcaagctgactgacgaagaaatcgaaaaaacactgcaaggctttgaaggtaaagttaaagctgctgctgaagccaagatgaagcaagatgcgaaagataacgctgataaaggcgccaagtatcttgagtcctttgctaaagaaaaaggcgtgaagaaaactgaatctggccttctgtatcaggttgagaaagaaggtagcggcaacgcgccgaaagacagcgatactgtagtggttaactacaaaggtacgctggtcgacggtagcgagttcgacaactcctacaaacgtggtgagccgctttctttccgtctggacggtgtgatccctggctggactgaaggcctgaagcacgttaagaaaggcggcaaaatcaagttggctatcccgccagcacaggcctatggcgaaaacggtgtacctggtatcccggctaactctacgctggtgtttgacgttgaactgttggacattaaatctgaagctgacttgaaagcagcggatgatgcgaaagctgaaaaaccagctgccgcagagaaaaccgctaaataa

SEQ ID NO: 153922 - protein, 272 aa, Erwinia carotovora subsp. atroseptica SCRI1043
MKSLFKVTLLATTMALALNAGQALAADKAQASESTTAAKFKNDEQAAAYALGASLGRYMDNSLKEQEKLGIKLDKDQLIAGVQDAFADKSKLTDEEIEKTLQGFEGKVKAAAEAKMKQDAKDNADKGAKYLESFAKEKGVKKTESGLLYQVEKEGSGNAPKDSDTVVVNYKGTLVDGSEFDNSYKRGEPLSFRLDGVIPGWTEGLKHVKKGGKIKLAIPPAQAYGENGVPGIPANSTLVFDVELLDIKSEADLKAADDAKAEKPAAAEKTAK

SEQ ID NO: 153923 - DNA, 738 bp, Desulfotalea psychrophila LSv54
  CDS (1)..(738): transl_table=11
atgaagaagaagattgttgcagcaacactcggagtttgtcttgtcatgcctctttgggcccagtcagcagagagcaataataccaagctgaagacctttgaggataagctgagctatagtattggcactgacattggcaagtctttgggagagcttaaggagcaaattcgttttgactccttgatcctgggactcaccgatacctatgagggaaagaaaggtcttcttagtgctgaagagatgaagcaggttcagcagcagtttgtggctaagatgcaggcagatcaggctaagaaaatggttgaaatgcagaagaaaaataaagccgcgggtgatgcctttcttgctgccaatgcaaagaaaaaaggtgttgtgaccaccaagtctggtcttcagtataattttgtgaaaaagggtaagggcgtaaaacctgcccttacggatattgtcagcgtcaactatacgggtacccttattaatggaacagagtttgacagttctataaagaggggtaaaccggttacatttccagtggctcaggtgatttctggttggagtgaggctcttcagcttatgcccgttggttcatcggtgcatttggtgattccagcagcccttgcctatggtgataatggtgcgcctccggtgatcgagcctggttctgtccttgtctttgatgtggatcttatctccatcggcgaggaaaaaaaggcaactccggctacagctaagaaatag

SEQ ID NO: 153924 - protein, 245 aa, Desulfotalea psychrophila LSv54
MKKKIVAATLGVCLVMPLWAQSAESNNTKLKTFEDKLSYSIGTDIGKSLGELKEQIRFDSLILGLTDTYEGKKGLLSAEEMKQVQQQFVAKMQADQAKKMVEMQKKNKAAGDAFLAANAKKKGVVTTKSGLQYNFVKKGKGVKPALTDIVSVNYTGTLINGTEFDSSIKRGKPVTFPVAQVISGWSEALQLMPVGSSVHLVIPAALAYGDNGAPPVIEPGSVLVFDVDLISIGEEKKATPATAKK

SEQ ID NO: 153925 - DNA, 837 bp, Mannheimia succiniciproducens MBEL55E
  CDS (1)..(837): transl_table=11
atgttattcgtcatttttgttaaacccactgagccgaggctctcaataaaggaaatagtgatgttaaaaattcaaaagttttcagcagtggcattattagtcggcgccgtattggcgacctctgcctgtaaagatgacaaaaaagcgcaagcggcggcagagcctgcaaaacaggaagcaccggcagccgcgcaggcggaaaatagccgggttaaagatccttcttatgcggtaggcgtgttaatcggtaatgatttaaaaggtttggttgaagcgcagaaagacgtaatcgcttatgataacgataaaattcttgcgggcgttgcggaagcattgcagggcaaaattgatttaaccaaccaagacgtggtgaacacgttaaaggatattgatgaaaaattaaaagttgccgcccaaaccaaagccgaagaacaagcgaaacaggccaaagcggaaagtgagaaattcattgccgaatttaagcaaaaagacggcgtgaaagaaaccaaatccggtttgctgtatcgcattgaaaaagaaggtgaaggcgcagctattaaaccgacagattccgtgaaagtacattacaccggcaaattaactaacggtacggtatttgacagctcggtagaacgtggtcagccggtagaatttttattggatcaggttattccgggttggaccgaaggtctgcagttagtgaaaaaaggcggcaaaatcgaattggttattcctgccgaacttgcttacggcgagcaggatttaggtacgattccacctaactcaacacttcattttgaagttgaagtattagacgttactccggctaaaaaataa

SEQ ID NO: 153926 - protein, 278 aa, Mannheimia succiniciproducens MBEL55E
MLFVIFVKPTEPRLSIKEIVMLKIQKFSAVALLVGAVLATSACKDDKKAQAAAEPAKQEAPAAAQAENSRVKDPSYAVGVLIGNDLKGLVEAQKDVIAYDNDKILAGVAEALQGKIDLTNQDVVNTLKDIDEKLKVAAQTKAEEQAKQAKAESEKFIAEFKQKDGVKETKSGLLYRIEKEGEGAAIKPTDSVKVHYTGKLTNGTVFDSSVERGQPVEFLLDQVIPGWTEGLQLVKKGGKIELVIPAELAYGEQDLGTIPPNSTLHFEVEVLDVTPAKK

SEQ ID NO: 153927 - DNA, 633 bp, Mannheimia succiniciproducens MBEL55E
  CDS (1)..(633): transl_table=11
atgtcaaaacaattttttgattcagttgcgttagacagcgtatcggcaaaaggcggctatggcgtaggattacaaatcggccagcaattattagacagccgattaaatgttgaagcggaagcggtagcgaaaggtatttacgacgtattaaacaataatgcccctgcgttagatttaaatgaagtcagcaaagcgttacaggaattacagcaaaaagcgcaagatgccgctcaagcgcaatttaaacaaattgaagaagacggtcgcgcatttttagtggaaaatgcgaaaaaagacggcgtgcaggtaacggaatccggtcttcaatatgaaattctagtggaaggtaacggtaataaaccttcccgtgaagataccgtgcgcgttcattatacggggactttacctgacggtaccgtatttgacagttccgtaagccgcggtcaaccggcggaatttccggtaggcggcgttattgcaggctgggtggaagcattacaattaatgccggtgggttctaaatggcgtttagctattccgcataatttagcgtacggtgaacgcggtgcgggagcatcaattccgccgttcagcccgttggtgtttgaagtggaattattagatattctttaa

SEQ ID NO: 153928 - protein, 210 aa, Mannheimia succiniciproducens MBEL55E
MSKQFFDSVALDSVSAKGGYGVGLQIGQQLLDSRLNVEAEAVAKGIYDVLNNNAPALDLNEVSKALQELQQKAQDAAQAQFKQIEEDGRAFLVENAKKDGVQVTESGLQYEILVEGNGNKPSREDTVRVHYTGTLPDGTVFDSSVSRGQPAEFPVGGVIAGWVEALQLMPVGSKWRLAIPHNLAYGERGAGASIPPFSPLVFEVELLDIL

SEQ ID NO: 153929 - DNA, 819 bp, Neisseria gonorrhoeae FA 1090
  CDS (1)..(819): transl_table=11
atgaacaccattttcaaaatcagcgcactgaccctttccgccgctttggcactttccgcctgcggcaaaaaagaagccgcccccgcatctgcatccgaacctgccgccgcttctgccgcgcagggcgacacctcttcaatcggcagcacgatgcagcaggcaagctatgcaatgggcgtggacatcggacgctccctgaaacaaatgaaggaacagggcgcggaaatcgatttgaaagtctttaccgatgccatgcaggcagtgtatgacggcaaagaaatcaaaatgaccgaagagcaggcccaggaagtgatgatgaaattcctgcaggagcagcaggctaaagccgtagaaaaacacaaggcggatgcgaaggccaacaaagaaaaaggcgaagccttcctgaaggaaaatgccgccaaagacggcgtgaagaccactgcttccggtctgcagtacaaaatcaccaaacagggtgaaggcaaacagccgacaaaagacgacatcgttaccgtggaatacgaaggccgcctgattgacggtaccgtattcgacagcagcaaagccaacggcggcccggccaccttccctttgagccaagtgattccgggttggaccgaaggcgtacggcttctgaaagaaggcggcgaagccacgttctacatcccgtccaaccttgcctaccgcgaacagggtgcgggcgaaaaaatcggtccgaacgccactttggtatttgacgtgaaactggtcaaaatcggcgcacccgaaaacgcgcccgccaagcagccggatcaagtcgacatcaaaaaagtaaattaa

SEQ ID NO: 153930 - protein, 272 aa, Neisseria gonorrhoeae FA 1090
MNTIFKISALTLSAALALSACGKKEAAPASASEPAAASAAQGDTSSIGSTMQQASYAMGVDIGRSLKQMKEQGAEIDLKVFTDAMQAVYDGKEIKMTEEQAQEVMMKFLQEQQAKAVEKHKADAKANKEKGEAFLKENAAKDGVKTTASGLQYKITKQGEGKQPTKDDIVTVEYEGRLIDGTVFDSSKANGGPATFPLSQVIPGWTEGVRLLKEGGEATFYIPSNLAYREQGAGEKIGPNATLVFDVKLVKIGAPENAPAKQPDQVDIKKVN

SEQ ID NO: 153931 - DNA, 771 bp, Pseudomonas syringae pv. syringae B728a
  CDS (1)..(771): transl_table=11
atgaaacagcatcggttggcagcggcgattgccctggtcggtctggtactcgcaggttgtgacaagcaagccagcaccgtagagctgaaaaccccagcacaaaaagcgtcttatggcatcggtctgaacatgggcaaaagcctggctcaggaaggtatggatgatctggattccaaggctgtagccctgggtatcgaagatgctgttggcaagaaagatcagaaactcaaggacgaagagctggttgaagccttctccgcgctgcaaaagcgttccgaagagcgtctggcgaagatgagcgaagaggcttctgccgctggcaagaaattcctcgaagagaacggtaagaaggacggcgtggtcaccaccgcttccggcctgcagtatcagatcatcaagaaagccgatggcgctcagcccaagcctaccgatgttgtgactgttcactacgaaggcaagctgatcgacggcaaggtcttcgacagttccgttgagcgcggcagcccgatcgacctgccggttggcggtgtgattccgggttgggtcgaaggtctgcaactgatgcacgtcggcgagaagatcaaactcttcatcccgagtgatctggcttacggcgcacagagcccgagcccggcgatccctgccaactcggtactggtgttcgatcttgaactgctgggtatcaaggaccctgcagcggcaccgactcctggtgctgatgccgacgaagaagaggcagctcctgccgcttcggctccggccaagaagtaa

SEQ ID NO: 153932 - protein, 256 aa, Pseudomonas syringae pv. syringae B728a
MKQHRLAAAIALVGLVLAGCDKQASTVELKTPAQKASYGIGLNMGKSLAQEGMDDLDSKAVALGIEDAVGKKDQKLKDEELVEAFSALQKRSEERLAKMSEEASAAGKKFLEENGKKDGVVTTASGLQYQIIKKADGAQPKPTDVVTVHYEGKLIDGKVFDSSVERGSPIDLPVGGVIPGWVEGLQLMHVGEKIKLFIPSDLAYGAQSPSPAIPANSVLVFDLELLGIKDPAAAPTPGADADEEEAAPAASAPAKK

SEQ ID NO: 153933 - DNA, 618 bp, Pseudomonas syringae pv. syringae B728a
  CDS (1)..(618): transl_table=11
atgtccgaagtcaatctgtccaccgacgaaacccgcgtcagctacggcattggccgtcagttgggcgatcagttgcgcgacaacccgccaccgggcgtcgatctggaagccatcgtggcaggcctgcgcgatgcgtttggcggtcagccaagccgtgtcggtcaggaagaaatgtccgccagcttcaaggtcatccgcgaaatcatgcaggctgaagcagccgccaaggctgaacaggctgcgggcgccggcaaggcctacctggctgaaaacgccaagcgcgaaggcgtgaccacgctggcttcgggtctgcaattcgaagtcgtgaccgctggtactggcgccaagccaacccgtgaagaccaggtacgcgttcactaccacggcacgttgatcgacggtaacgtcttcgacagctcctacgatcgtggcgagccggccgaatttccggtcagcggcgtgattgccggctggaccgaggcgctgcaactgatgaacgccggcagcaaatggcgtctgcacgtgccgagcgaactggcttacggcgctcagggcgtaggcagcatcgcaccgcacagcgtgctggtgtttgacgtggaactgctggacgttctgtaa

SEQ ID NO: 153934 - protein, 205 aa, Pseudomonas syringae pv. syringae B728a
MSEVNLSTDETRVSYGIGRQLGDQLRDNPPPGVDLEAIVAGLRDAFGGQPSRVGQEEMSASFKVIREIMQAEAAAKAEQAAGAGKAYLAENAKREGVTTLASGLQFEVVTAGTGAKPTREDQVRVHYHGTLIDGNVFDSSYDRGEPAEFPVSGVIAGWTEALQLMNAGSKWRLHVPSELAYGAQGVGSIAPHSVLVFDVELLDVL

SEQ ID NO: 153935 - DNA, 714 bp, Pseudomonas fluorescens Pf-5
  CDS (1)..(714): transl_table=11
atgaaacagcatcggttggcggcggcggtggccctggttagcctggtacttgcgggttgtgattcgcagaccagcgtagagctgaaaaccccggcgcaaaaagcttcctacggtatcggcctgaacatgggcaagagtctggctcaggaaggcatggatgacctggactccaaagcggtcgcccagggcatcgaagatgccgtcggcaagaaagaacagaagctgaaggatgaagagttggtcgaagccttcgccgcgctgcaaaagcgtgccgaagagcgcatggccaagatgagcgaagagtcggcggctgccggcaagaaattcctcgaagagaacggcaagaaaaccggtgtgaccaccaccgcttccggtctgcagtacgaagtattgaaaaaggctgacggtcctcagcccaagccgactgatgtcgtgactgttcactacaccggcaccctgaccaacggcactgtgttcgacagctcggtagagcgtggcagcccgatcgatctgccggtcagcggcgtgatcccgggttgggtcgaaggcctgcaactgatgcacgtgggcgagaagtataagctgtacatcccgagcgacctggcctacggcgcccagagcccgagcccggccattccagccaactcggtgctggtcttcgaattggagctgctgggtatcaaggatccagccaagcaggacgccgccaagtaa

SEQ ID NO: 153936 - protein, 237 aa, Pseudomonas fluorescens Pf-5
MKQHRLAAAVALVSLVLAGCDSQTSVELKTPAQKASYGIGLNMGKSLAQEGMDDLDSKAVAQGIEDAVGKKEQKLKDEELVEAFAALQKRAEERMAKMSEESAAAGKKFLEENGKKTGVTTTASGLQYEVLKKADGPQPKPTDVVTVHYTGTLTNGTVFDSSVERGSPIDLPVSGVIPGWVEGLQLMHVGEKYKLYIPSDLAYGAQSPSPAIPANSVLVFELELLGIKDPAKQDAAK

SEQ ID NO: 153937 - DNA, 618 bp, Pseudomonas fluorescens Pf-5
  CDS (1)..(618): transl_table=11
atgtccgaagtaaatctgtccaccgacgaaacccgcgtcagctacggcatcggccgtcagctgggcgaccaactgcgtgacaacccgcccccgggcgtgagcctagatgcaatcctggccggtctgaccgacgctttcgccggtaagccgagccgtgtgggtcaggaagaaatgtctgccagcttcaaagtcatccgcgaaatcatgcaggctgaagccgctgccaaggccgaagcggctgccggtgccggtctggcattcctggcggaaaacgccaagcgtgaaggcatcaccaccctggcttccggcctgcagttcgaagtgctgacccagggcgaaggcgccaagccatcccgtgaagacagcgttcgcactcactaccacggcaccctgatcgacggcactgtgttcgacagctcctacgagcgcggccagcctgccgaattcccggttggcggcgtgatcgctggctggaccgaagcgctgcaactgatgaacgccggtagcaaatggcgtctgtacgtgccgagcgaactggcttacggcgcacaaggcgtgggcagcatcccgccgcacagcgtcctggtgttcgacgtcgagctgctggacgttctgtaa

SEQ ID NO: 153938 - protein, 205 aa, Pseudomonas fluorescens Pf-5
MSEVNLSTDETRVSYGIGRQLGDQLRDNPPPGVSLDAILAGLTDAFAGKPSRVGQEEMSASFKVIREIMQAEAAAKAEAAAGAGLAFLAENAKREGITTLASGLQFEVLTQGEGAKPSREDSVRTHYHGTLIDGTVFDSSYERGQPAEFPVGGVIAGWTEALQLMNAGSKWRLYVPSELAYGAQGVGSIPPHSVLVFDVELLDVL

SEQ ID NO: 153939 - DNA, 732 bp, Psychrobacter arcticus 273-4
  CDS (1)..(732): transl_table=11
atgaaaaaaatcactaccctaagcatcagtgccctggctagcgctatgttattaattacaggctgtagcgcaaacaacggtaataaagaaactgctgccaaaagtgtttcagttactgaacaaagccctgccaaggaaaaagtaggttatagcttgggctatatgatggcagaagggaataaagaagcggttggggatctgaaccttgatacttttgaaaaaggcttccgtgatggctatgaaggtaaaaaagcggcattgacagaagagcaaatgcaagaagtgttaacgacctatcaaaaagaacaggaagcgaagtttgtgaaagatatggaatctaaagcgggtgcaaacaaaaccaagggctcagcattcttagtagagaatggcaaaaaagccggcgtgaaaaccactgcttctggcctacaatataaagtagtgaccgcaggtactggtaaatcaccaaaagctacggatgtggttgaagtaaactatgaaggtaaattgattgacggtaccgtattcgacagctcatatgagcgcggtgagccagttgaattcccacttaatcaagtgattgctggctggactgaaggtctacagttgatgaaagagggtggtaaatacgagttttatatcccatctgatatcgcttatggcgaagcgggtaacgcaggtatcgagcctaacagcacgcttatctttaccgttgaactattaaaagtaaaataa

SEQ ID NO: 153940 - protein, 243 aa, Psychrobacter arcticus 273-4
MKKITTLSISALASAMLLITGCSANNGNKETAAKSVSVTEQSPAKEKVGYSLGYMMAEGNKEAVGDLNLDTFEKGFRDGYEGKKAALTEEQMQEVLTTYQKEQEAKFVKDMESKAGANKTKGSAFLVENGKKAGVKTTASGLQYKVVTAGTGKSPKATDVVEVNYEGKLIDGTVFDSSYERGEPVEFPLNQVIAGWTEGLQLMKEGGKYEFYIPSDIAYGEAGNAGIEPNSTLIFTVELLKVK

SEQ ID NO: 153941 - DNA, 768 bp, Colwellia psychrerythraea 34H
  CDS (1)..(768): transl_table=11
atgaaattgtttaagcctaccttagtagcccttgccttatttgccgttgttggttgtaacgaaaaagctgttgaagaagtaaaagcaccggtattagatactgaagtgcaaaaacaagcctacggcttaggtgcctcaattggtatgtacatgcaacgtaacttagaagagcatgacaaactaggtttaacgttagataaagagcttatcgtacgcggttttgtagacagcattgacggtaaatctgttatcgaaaaagaagaaattcaagccttattgatgaaccttgatactagcatgaaagaaaaacagcaagcagctgcaatcgccgcttctgaatctagcctagctgacggcgctaagtttcttgaagacaacgctaaaaaagaaggcgtaacagtaactgaatcaggtattcaatacgaagtattaaccgctgccgaaggtgatacacctttagcaactgatactgttaaagttcactataaaggtactttcttaaacggtgaaacctttgatagttcatacaaacgtggtgaaccagcagtattcccacttaatcgtgtaatcaaaggttggactgaaggcgtacaattaatgcctgtaggcgctaagtacaagttcactatcccttcagatttagcctatggtcctaacggtaacccaccaagtattccgggtaactcagtattgcaatttgaaattgaattattagaaattcaaaaagcagaagaagctccaaaggctgatgaacacgctgctcactag

SEQ ID NO: 153942 - protein, 255 aa, Colwellia psychrerythraea 34H
MKLFKPTLVALALFAVVGCNEKAVEEVKAPVLDTEVQKQAYGLGASIGMYMQRNLEEHDKLGLTLDKELIVRGFVDSIDGKSVIEKEEIQALLMNLDTSMKEKQQAAAIAASESSLADGAKFLEDNAKKEGVTVTESGIQYEVLTAAEGDTPLATDTVKVHYKGTFLNGETFDSSYKRGEPAVFPLNRVIKGWTEGVQLMPVGAKYKFTIPSDLAYGPNGNPPSIPGNSVLQFEIELLEIQKAEEAPKADEHAAH

SEQ ID NO: 153943 - DNA, 642 bp, Colwellia psychrerythraea 34H
  CDS (1)..(642): transl_table=11
atgacagtattgtctggagtttatataccaatgagttttgatactattgaacaacgtgttagttatggcgtaggtcgtcaattaggtgaccaacttcgcaacaacccttttaaagagtttgatatcaccgctgtacaagctggtattgctgatgctcttgctgatgcggctagccaagtttcagatgaagatttaaacgatgctttttctataatttctaaaaaattacaagaacaagagcaagctgctgctaaagaagcttcagctgaaggcgaagtattcctagctgataacgctaagcgtgatgaagttactgtaactgaatctggtttacagtatgaagtaattactacaggtgaaggtgaaaaaccttcagctgaaagcactgtaagtgtacattaccacggtacttttgctaacggtgatgtttttgatagttctgttgaacgtggccaaccggctgaattcccagtaaacggcgttatcgctggttggactgaagcactacagttaatgactgaaggcagtaagtggaaattaactatcccttatgatttagcatacggtgagcgcggttctcaaggtgctatacctccttatgctacgttagtttttgatgttgaattattaagcatcaaataa

SEQ ID NO: 153944 - protein, 213 aa, Colwellia psychrerythraea 34H
MTVLSGVYIPMSFDTIEQRVSYGVGRQLGDQLRNNPFKEFDITAVQAGIADALADAASQVSDEDLNDAFSIISKKLQEQEQAAAKEASAEGEVFLADNAKRDEVTVTESGLQYEVITTGEGEKPSAESTVSVHYHGTFANGDVFDSSVERGQPAEFPVNGVIAGWTEALQLMTEGSKWKLTIPYDLAYGERGSQGAIPPYATLVFDVELLSIK

SEQ ID NO: 153945 - DNA, 681 bp, Pseudomonas syringae pv. phaseolicola 1448A
  CDS (1)..(681): transl_table=11
atgtcgcgctacctgttaacgtcgttgttcctcttgctacccctggctcaagctgccgaagcaccacctgcggcggccgatgatggtcatgatctcgcctacagcctgggtgcaagcctgggtgaacgcttgcatcaggaagtccctgaccttgatctcaaggcacttgtcgacggtctgaaacaggcttatcagggcaagccgctggcactcaagcaggagcgtatcgaccaggtcctgcgtgagcatgacgccgcaatcgcgcaggccgagaccgcaggcacagacgcgcctaccgaagcagccctgaaggcagagcgcacgttcatggacagcgagaaggccaagccgggtgtgaaggtattggcggacgggattctcatgaccgagctgacacctggcacgggccccaaacctgatgccaatggcagggttgaagtgcgctatgtgggtcgtttgccggacggcacgatcttcgatcagagcacccagccgcaatggttccggctcgacagcgtgatcagcggctggaccagcgcattgcagacgatgccgaccggcgcgaaatggcgactggtgattccttcggatcaagcctacggcgctgagggtgctggcgacctgatcgatccgttcactccgctggtatttgaaatcgagctgattgccgtttcacagtaa

SEQ ID NO: 153946 - protein, 226 aa, Pseudomonas syringae pv. phaseolicola 1448A
MSRYLLTSLFLLLPLAQAAEAPPAAADDGHDLAYSLGASLGERLHQEVPDLDLKALVDGLKQAYQGKPLALKQERIDQVLREHDAAIAQAETAGTDAPTEAALKAERTFMDSEKAKPGVKVLADGILMTELTPGTGPKPDANGRVEVRYVGRLPDGTIFDQSTQPQWFRLDSVISGWTSALQTMPTGAKWRLVIPSDQAYGAEGAGDLIDPFTPLVFEIELIAVSQ

SEQ ID NO: 153947 - DNA, 771 bp, Pseudomonas syringae pv. phaseolicola 1448A
  CDS (1)..(771): transl_table=11
atgaaacagcatcggttggcagcggcgattgccctggtcggtctggtactcgcaggttgtgacaagcaagccagcaccgtagagctgaaaactccggcacaaaaagcgtcttatggcatcggtctgaacatgggcaaaagcctggctcaggaaggtatggatgatctggattccaaggctgtggccctgggtatcgaagacgcagtcggcaagaaagatcagaaactcaaagacgaagagctggttgaagccttctcggccctgcagaagcgctccgaggagcgtctggccaagatgagcgaagaggcttcggccgctggcaagaaattcctcgaagagaacggcaaaaaggatggcgtggtcaccactgcttccggcttgcagtatcaaatcatcaagaaagcggatggcgctcagcctaagcctaccgatgttgtgactgttcactacgaaggcaaactgattgacggcaaggtcttcgacagttccgttgaacgcggcagcccgattgacctgcctgtaggcggcgttatcccgggttgggtcgaaggtctgcaactgatgcacgtaggcgagaagatcaaactcttcatccctagtgatctggcgtacggcgcgcagagcccgagccctgcgatcccggcaaattcggtactggtttttgaccttgagttgcttggcatcaaagacccggcagctgctccgacagctggtgctgatgctgacgaagaagaggcagctcctgccgcttccgctccggccaagaagtaa

SEQ ID NO: 153948 - protein, 256 aa, Pseudomonas syringae pv. phaseolicola 1448A
MKQHRLAAAIALVGLVLAGCDKQASTVELKTPAQKASYGIGLNMGKSLAQEGMDDLDSKAVALGIEDAVGKKDQKLKDEELVEAFSALQKRSEERLAKMSEEASAAGKKFLEENGKKDGVVTTASGLQYQIIKKADGAQPKPTDVVTVHYEGKLIDGKVFDSSVERGSPIDLPVGGVIPGWVEGLQLMHVGEKIKLFIPSDLAYGAQSPSPAIPANSVLVFDLELLGIKDPAAAPTAGADADEEEAAPAASAPAKK

SEQ ID NO: 153949 - DNA, 660 bp, Pseudomonas syringae pv. phaseolicola 1448A
  CDS (1)..(660): transl_table=11
ttgcgtgattgccgactgcgtgcccctctgcggagcagtgtcatgtccgaagtcaatctgtccaccgatgaaacccgcgtcagctacggcattggccgtcagttgggcgaccagttgcgcgacaatccgccaccgggtgtcgacctggaagccatcgtggcaggcctgcgtgatgcatttggcggtcagccaagccgtgtgggtcaggaagaaatgtccgccagcttcaaggttatccgtgaaatcatgcaggccgaagcggccgccaaggctgaacaggctgtgggtgccggcaaggcttacctggctgaaaatgccaagcgcgaaggcgtgaccacgctggcctcaggtctgcaattcgaagtgctgaccgctggcgctggcgccaagccaacccgtgaagatcaggtgcgcgtgcactatcacggtacgctgatcgacggtaacgtcttcgacagctcctatgatcgtggcgagcctgcggaatttccggtcagcggcgtgattgctggctggaccgaggcgctgcaactgatgaacgctggcagcaaatggcgtctgcacgtaccgagcgagctggcttacggcgctcagggcgtgggcagcatcgcaccgcacagcgtgctggtgttcgacgtggaactgctcgacgttctgtaa

SEQ ID NO: 153950 - protein, 219 aa, Pseudomonas syringae pv. phaseolicola 1448A
MRDCRLRAPLRSSVMSEVNLSTDETRVSYGIGRQLGDQLRDNPPPGVDLEAIVAGLRDAFGGQPSRVGQEEMSASFKVIREIMQAEAAAKAEQAVGAGKAYLAENAKREGVTTLASGLQFEVLTAGAGAKPTREDQVRVHYHGTLIDGNVFDSSYDRGEPAEFPVSGVIAGWTEALQLMNAGSKWRLHVPSELAYGAQGVGSIAPHSVLVFDVELLDVL

SEQ ID NO: 153951 - DNA, 723 bp, Pseudomonas fluorescens PfO-1
  CDS (1)..(723): transl_table=11
atgaaacagcatcggttggcggcggcggttgccctggttagcctggtcctcgcgggttgtgattcgcagaccagcgtagagctgaaaaccccggcgcaaaaagcttcctacggtatcggcctgaacatgggcaagagccttgctcaggaaggcatggatgatctggactccaaagcggtagcccagggcatcgaagatgccgtcggcaagaaagaacagaagctgaaagatgaagaactggtcgaagctttcgccgcgctgcaaaagcgtgccgaagagcgtatggccaagatgagcgaagagtcggcagccgccggcaagaaattcctcgaagaaaacggcaagaaggctggcgtgaccaccaccgcttccggtctgcagtacgaagtggtcaagaaagccgacggcccacaacccaagcctaccgatgtcgtgaccgttcactacaccggcaagctgaccaacggcaccgttttcgacagctccgtcgagcgcggaagcccgatcgatctgccggtcagcggtgtgatcccgggttgggtcgaaggcctgcaactgatgcacgttggcgagaagtacaagctgtacatccctagcgatctggcttacggcgcacaatcgccaagcccggcaatcccggccaactcggtcctggttttcgacctggaactgctggccatcaaggatccagccaaagaagacgccgctgccgccaagcaataa

SEQ ID NO: 153952 - protein, 240 aa, Pseudomonas fluorescens PfO-1
MKQHRLAAAVALVSLVLAGCDSQTSVELKTPAQKASYGIGLNMGKSLAQEGMDDLDSKAVAQGIEDAVGKKEQKLKDEELVEAFAALQKRAEERMAKMSEESAAAGKKFLEENGKKAGVTTTASGLQYEVVKKADGPQPKPTDVVTVHYTGKLTNGTVFDSSVERGSPIDLPVSGVIPGWVEGLQLMHVGEKYKLYIPSDLAYGAQSPSPAIPANSVLVFDLELLAIKDPAKEDAAAAKQ

SEQ ID NO: 153953 - DNA, 666 bp, Pseudomonas fluorescens PfO-1
  CDS (1)..(666): transl_table=11
atgtcgcgctacctttttttatccctctgcatgattttctccatggctcaggccgacgaaaaaaccaccgcgaacgatgcccatgatctggcttacagcctcggtgccagcctcggtgaacgactgcgtcaggaagtgccgcagctacagatccaggcactgatcgaaggtctgcaacaggcttatcaaggtaagccgctggcattgagcgaagcacgtatcgagcagatcctcgccgatcacgaatcgcagacagccgagcaggcagccatgccttcgactgaagccgcgatggaaaacgagcgacggtttctcaccgccgaaaaagccaagccgggtgtaaaggagctggccgacggcatcctgttgaccgagctgacaccgggaaatggcacgaaggccggcccggatggaaaagtgcaggtgctgtacatcggtcgactgcctgacggcaccgtgttcgatcagaacagtcagccgcagtggttcaatctcgacagcgtgatcgccggatggcgcaccgcgctgcagaacatgccggtcggcgcgaagtggcgactggtgattccatcggatcaggcttatggcgccgacggtgccggtgacttgatcgcgccgttcacaccgttggtgttcgaagtggaattgcgcggcgcgaccagttga

SEQ ID NO: 153954 - protein, 221 aa, Pseudomonas fluorescens PfO-1
MSRYLFLSLCMIFSMAQADEKTTANDAHDLAYSLGASLGERLRQEVPQLQIQALIEGLQQAYQGKPLALSEARIEQILADHESQTAEQAAMPSTEAAMENERRFLTAEKAKPGVKELADGILLTELTPGNGTKAGPDGKVQVLYIGRLPDGTVFDQNSQPQWFNLDSVIAGWRTALQNMPVGAKWRLVIPSDQAYGADGAGDLIAPFTPLVFEVELRGATS

SEQ ID NO: 153955 - DNA, 624 bp, Saccharophagus degradans 2-40
  CDS (1)..(624): transl_table=11
atgtcggataaccaatacaccaccgttgaacaacgtgtaagctacggcatcggccgtcaaatgggcgaccaacttgccagcaaccctttcgaaggcgttgaaccatctgccgttgcacagggtgtaatagacgcgcttgagggcaaagaaagcccagtaagcccagaagatttaaacgaagctttccgcgttatccgcgaaaaacttgaagccgaagaaaaagagcgcgcaaaaacaatgggcgctgaaggcgaagcctttttagctgagaacgccaaaaaagaaggcgtaactgttaccgaatctggcttgcagtacgaaattttaaccgaaggcactggcgaaaaaccaaaagccacttcaaccgttaaaactcactaccacggcaccttaattgacggcactgtgtttgacagctctgtagagcgcggccaaccagcagaattccccgttaacggtgtaatcgcaggctggaccgaagccctacaattgatgccagtaggctctaaatggcgcttatctatcccttaccagctagcctacggcgagcgcggtgctggcggcgcaattaagcctttcgcagcacttgtgttcgacgttgaattgttggaaattgttgcctaa

SEQ ID NO: 153956 - protein, 207 aa, Saccharophagus degradans 2-40
MSDNQYTTVEQRVSYGIGRQMGDQLASNPFEGVEPSAVAQGVIDALEGKESPVSPEDLNEAFRVIREKLEAEEKERAKTMGAEGEAFLAENAKKEGVTVTESGLQYEILTEGTGEKPKATSTVKTHYHGTLIDGTVFDSSVERGQPAEFPVNGVIAGWTEALQLMPVGSKWRLSIPYQLAYGERGAGGAIKPFAALVFDVELLEIVA

SEQ ID NO: 153957 - DNA, 732 bp, Saccharophagus degradans 2-40
  CDS (1)..(732): transl_table=11
atgaaaaaactaccattggttacagctatgtgcgcagtgatcgcattggctgggtgcaacaaagaagaagcatccgttaaaaaagaattggtattggaaacctccgagcaaaaagttagctatcttattggccaaaacttagggtccaacatgggccaagataagtttgagttggatatggatgcaatggttgcgggcttagaagaaggtcttgcgggtaaagaaagccgcatttctgaagaagacgctcgcgccgtaatgatggctttccaagccgagcaacgcgccaaaatggaagcggctcagcaagaagaagcgcaaaaaactttggctgaggcacaagctttcttagctgaaaacgccactaaagaaggtgtagtacaaaccgaaagcggcttacagtataaagaattgaaagctggcgacggcgcaacccctaccgcatctgacacggttgtggttcactactctggtacgttattagacggtaccgaatttgacagctctcacaagcgcggtaagcctgctgaatttatggtgggtgcacttattcctggttgggttgaagcgctacagttgatgcaagtgggcgacgagtgggaactatatgtacctgccgacttagcttacggccctggcggcacgccaaacattcctggcaactctacgttgatcttcaaaatggaattgttagacatcaaagctaaagaggctcctgctgaagcgaaataa

SEQ ID NO: 153958 - protein, 243 aa, Saccharophagus degradans 2-40
MKKLPLVTAMCAVIALAGCNKEEASVKKELVLETSEQKVSYLIGQNLGSNMGQDKFELDMDAMVAGLEEGLAGKESRISEEDARAVMMAFQAEQRAKMEAAQQEEAQKTLAEAQAFLAENATKEGVVQTESGLQYKELKAGDGATPTASDTVVVHYSGTLLDGTEFDSSHKRGKPAEFMVGALIPGWVEALQLMQVGDEWELYVPADLAYGPGGTPNIPGNSTLIFKMELLDIKAKEAPAEAK

SEQ ID NO: 153959 - DNA, 879 bp, Acidobacteria bacterium Ellin345
  CDS (1)..(879): transl_table=11
atgcaaacatccaaaacttccatccttgtgcttctcgcgacaggaatggcgctgagcggactcggcttggcgcagacacctgctgcttccaccaaacccgccaccggcactaagaccgcaacagccacacctgccacgaaaggcacaaccgcaaagagcacaaccgccgctccgttgaaactcacgaccgacaaagaaaaggcgagttacgccatcggtatgagcgtcggcaagaagatccacgacgataaggtcgacatcaacctgctgcttctccagcgtggactgaaggatgggattgcaggcgggaaggctttgctaactgacgaggaagtgcgtacggctttggtaaacctgcagaagacgatgcgggacgacatgctggcgaagaacaagaagcagggcgtagattacctggcggcaaacaaagcgaagccgggcgtggttacgctgccggatgggctgcaatataaggtcatccagcaaggatcaggaccgaagccgactgcttcagattcagtggtgtgcaactacaagggcaccttcatcgatggcaaagagtttgacagctcgtacaagcgcggggagcccgctacgtttccggtcactggtgtgatcaaaggttggacggaagtgttgcagatgatgccggtgggatcaaaatggcagctcgtcataccctctgagcttgcgtacggagagaacggccgtcccagcattccgcccaattccacgctggtcttcgaagtggaactcgtgaagattgcggagaagccgaaagcggaacccgcgccccaagcaacggatggtgccggccagccaggtcagcaggcgccgcccgataaatcttcgcagcccccgcaaaaccctaagaactag

SEQ ID NO: 153960 - protein, 292 aa, Acidobacteria bacterium Ellin345
MQTSKTSILVLLATGMALSGLGLAQTPAASTKPATGTKTATATPATKGTTAKSTTAAPLKLTTDKEKASYAIGMSVGKKIHDDKVDINLLLLQRGLKDGIAGGKALLTDEEVRTALVNLQKTMRDDMLAKNKKQGVDYLAANKAKPGVVTLPDGLQYKVIQQGSGPKPTASDSVVCNYKGTFIDGKEFDSSYKRGEPATFPVTGVIKGWTEVLQMMPVGSKWQLVIPSELAYGENGRPSIPPNSTLVFEVELVKIAEKPKAEPAPQATDGAGQPGQQAPPDKSSQPPQNPKN

SEQ ID NO: 153961 - DNA, 756 bp, Myxococcus xanthus DK 1622
  CDS (1)..(756): transl_table=11
atgaaaggtggatgcatgcgatcgatgtggacggcggccctggtgttcgcgctcggcgcgacgggcgcccaggcgcaggactcgaagtcggcgaagaagcccgcggccaaggccgcaccggcgactccggccgccgcgccggcggcgcccgctgcgctgtccgaggaggaccagcagaccctctacacgctcggtctctccattggccgtgatttgtccctcttcgcgctgtcgcccgaggagttgaaggtgctgcaacagggcctgtccgacggactcggtggaaagacgtccgacatcgacccgaaggagcaggctcagcggattcaggccttcgccaagagccggcaggcccttgcgggcaaggccgcgctggagcgcgccgccaaggagcccggcgcggaggtgcttccctccggcgtcatctacaagcaggtccaggcgggaaccggccgcagcccgcgcgccgtcgacaccgtcaaggtccactacgagggccggctggtggacggcaccatcttcgacacctccgcccgccgtggaatccccgtcgagttcccgctcaacggcgtcatcccctgctggacgcagggcgtggcgaagatgaaggtgggcggcaaggcgaagctcacctgccctggcaacaccgcctacggtgagcggccgccctctggctcgcgcatcccgcccaacgccgtcctcaccttcgacgtcgagctcatcgacatccccggcgacacgtcccggcagccgtag

SEQ ID NO: 153962 - protein, 251 aa, Myxococcus xanthus DK 1622
MKGGCMRSMWTAALVFALGATGAQAQDSKSAKKPAAKAAPATPAAAPAAPAALSEEDQQTLYTLGLSIGRDLSLFALSPEELKVLQQGLSDGLGGKTSDIDPKEQAQRIQAFAKSRQALAGKAALERAAKEPGAEVLPSGVIYKQVQAGTGRSPRAVDTVKVHYEGRLVDGTIFDTSARRGIPVEFPLNGVIPCWTQGVAKMKVGGKAKLTCPGNTAYGERPPSGSRIPPNAVLTFDVELIDIPGDTSRQP

SEQ ID NO: 153963 - DNA, 780 bp, Myxococcus xanthus DK 1622
  CDS (1)..(780): transl_table=11
atgcagaagacgtggctggtcgcgggaatgctggtgctggcgggctgccagcagcagggcaagacggattcgacgccggcggcgacggcgacggcgcccggcgcgagcgcgaatccgcagacggaggaccagaagacgctgtacgcgctcggcctgtccattggccgcagcgtgagcgtgttcgacatgactcccgaggagctggagtacgtcaaggcgggcatcaccgcgcaggtgaagggcgacaagcccgcggtggagctggagacgtacggcccgaagctgcaggagctggcgcgcgcgcgcagcacccgcaaggcggaggctgagaaggagaaggcgaaggcgttcctggagacggcctcgaaggaagagggcgcccagaagacggagtccggcctcatctacaaggagctgaccgccggtacgggcgcgtcgccccaggcgtcggacatcgtgaaggtgcactaccgtggcacgctgccggacggcaccgagttcgacagctcgcacaagcgtggcgagcccacgcagttcccgctccagggcgtcatcaagtgctggaccgagggcgtgcagaagatgaaagtgggcggcaaggccaagctcgtgtgcccgtccgacatcgcctacggtgaccgcggcgcgccgccgaacatcccgggtggcgccgccctggtgttcgaggtggagctgctggagatcgtcaagccgccggagatgccggccatgggcggcacgccgccggcgggcaagccctccgcggccgagaagaagtag

SEQ ID NO: 153964 - protein, 259 aa, Myxococcus xanthus DK 1622
MQKTWLVAGMLVLAGCQQQGKTDSTPAATATAPGASANPQTEDQKTLYALGLSIGRSVSVFDMTPEELEYVKAGITAQVKGDKPAVELETYGPKLQELARARSTRKAEAEKEKAKAFLETASKEEGAQKTESGLIYKELTAGTGASPQASDIVKVHYRGTLPDGTEFDSSHKRGEPTQFPLQGVIKCWTEGVQKMKVGGKAKLVCPSDIAYGDRGAPPNIPGGAALVFEVELLEIVKPPEMPAMGGTPPAGKPSAAEKK

SEQ ID NO: 153965 - DNA, 669 bp, Cytophaga hutchinsonii ATCC 33406
  CDS (1)..(669): transl_table=11
ttggaatttgtgttttgttttttaaaatcggaacttacagattcaaaattaattctatttaaaacaatggcattcacaacagaaaaagataccgttagctatagccttggtgtaaacattgcaacaagccttaaaaatcaaggatttgatgacttaaatttagatgcacttacaacagcattaagcgatgtatttggcaataaaacgttacagatagatgaagcaaaaggcgggcaaatattaaatgcttacttccagggtatgcaggaacgcaaacagaaaaaaaacattgaagaaggcgttgctttcttaaaggcaaatggtgctaaagcggatgtaattacgttacctagcggtttgcaatacaaagtgctggttgaaggaaatggccctaaaccaaccgctacagacaaagtaacaacacactaccacggaacattgatcaacggtacggtattcgatagttctgttgaacgcggacagcctgctactttccctgtaaacggtgtaattgccggctggatcgaagccttgcagttaatgcctacaggttctaaatggcagctatatgtaccatctgacctggcgtatggtgcaagaggtgcttctgaactgatcgggccacacacaacgttgatttttgatgttgaattaatttctatcaattaa

SEQ ID NO: 153966 - protein, 222 aa, Cytophaga hutchinsonii ATCC 33406
MEFVFCFLKSELTDSKLILFKTMAFTTEKDTVSYSLGVNIATSLKNQGFDDLNLDALTTALSDVFGNKTLQIDEAKGGQILNAYFQGMQERKQKKNIEEGVAFLKANGAKADVITLPSGLQYKVLVEGNGPKPTATDKVTTHYHGTLINGTVFDSSVERGQPATFPVNGVIAGWIEALQLMPTGSKWQLYVPSDLAYGARGASELIGPHTTLIFDVELISIN

SEQ ID NO: 153967 - DNA, 894 bp, Cytophaga hutchinsonii ATCC 33406
  CDS (1)..(894): transl_table=11
atgaataaagtatacatcattctgggtttttgttttctaagcatatctgtttttgctcagaaaaaacaaaagactccaagcaaggcatctctatttcatgaaaaggatgtagcctatacaccctcaggtttggcatacaaatacagacttgatgtgccgggtaaaaccggggcagtaggtgatgttgtaaaactgcattttgtattgcgtaacagtaaagattcaattctgcgcagtaccatagaggaagacaggatggttattacaaccattcaaaaaccaaggtatgcagcatcctttgaagaaggtctgggaatgctttctaaaggagacagttgtgcattctggatttcagcagattcactttttaaaaaaggtattggtgctgaaatgccgccctttattgaaaaaggaagcttccttcgttttgaagtaaagatgtatgacgtattaacaatggcagaatatgttgaggaacaagaaattatggcaaaaaaagtaaaagcagatgaagatgcggcattagcatcatacatcaaaacaaataatattccggctgtgttagacacggcaacaggtgtatattaccaggtggttcaggcaggcacaggtgctaaacctaaaaaaggaaacaaagtaattgttcattataccgggcatttattaaacggagaaatttttgacagttcactcgatcggggagatccgtttgattttatcatcggacaaggccgcgtaattgaaggctgggatgaaggtattccattgatgcgaaaaggagaaaaaggaattttatacattccatcctatcgcggttatggagagcagcgtgccggaagcattccccctaattctacattgatatttgaagttgaattgctggatataaagtag

SEQ ID NO: 153968 - protein, 297 aa, Cytophaga hutchinsonii ATCC 33406
MNKVYIILGFCFLSISVFAQKKQKTPSKASLFHEKDVAYTPSGLAYKYRLDVPGKTGAVGDVVKLHFVLRNSKDSILRSTIEEDRMVITTIQKPRYAASFEEGLGMLSKGDSCAFWISADSLFKKGIGAEMPPFIEKGSFLRFEVKMYDVLTMAEYVEEQEIMAKKVKADEDAALASYIKTNNIPAVLDTATGVYYQVVQAGTGAKPKKGNKVIVHYTGHLLNGEIFDSSLDRGDPFDFIIGQGRVIEGWDEGIPLMRKGEKGILYIPSYRGYGEQRAGSIPPNSTLIFEVELLDIK

SEQ ID NO: 153969 - DNA, 687 bp, Haemophilus somnus 129PT
  CDS (1)..(687): transl_table=11
atgttaaaaattaaaaaacgttctgcaatagcgttaatagcaagtgcggtcgtttctcaatctgtttttgctgataagcagttcaatgatgatgtttcttatgctttgggctattttatgggaaaatatttaacggtgatgggtgaagaacacaaagatgttgccagttacaattatgagaaaattgtcgctggcattaaagatgttgtagaaaataaaagcactttaactgatgaaaaagcacaagaaacgttgcaagagttagaaaacaaagcacgtcatgcaaaaatggctaaaatcaaagctgaaaatgagaaatttacagcagaatttgctaaaaaatcgaatgtgaaaaaaacggaaagcggtttactttatcgtattgaaaaaatgggagaaggtaagagcattaaaccgacagatcgtgttaaagtacattatacgggcaaactagccaatggcaaagtattcgatagttccagagagcgtggacaacctgctgaatttaaattaaatcaagtgattttaggttggaaagagggtttacaattcattaaaaaaggcggaaaaattgagttggttattcctgccgacttagcttatggcgaaagaggtgcaggtctaattccaccgagttcaacgctatattttgatattgaaatcttagatgtaacgtctgaaaaataa

SEQ ID NO: 153970 - protein, 228 aa, Haemophilus somnus 129PT
MLKIKKRSAIALIASAVVSQSVFADKQFNDDVSYALGYFMGKYLTVMGEEHKDVASYNYEKIVAGIKDVVENKSTLTDEKAQETLQELENKARHAKMAKIKAENEKFTAEFAKKSNVKKTESGLLYRIEKMGEGKSIKPTDRVKVHYTGKLANGKVFDSSRERGQPAEFKLNQVILGWKEGLQFIKKGGKIELVIPADLAYGERGAGLIPPSSTLYFDIEILDVTSEK

SEQ ID NO: 153971 - DNA, 780 bp, Shewanella sp. MR-4
  CDS (1)..(780): transl_table=11
atgaaaatatctatgccaacttcttttatcccaaaaaacctcacagtggcgacctgcgctgcattgtttgtctctatggcgagctttgctgccccaacgcttaaaaccgatgcggataaagcgtcttacagcatcggcgcctctgtgggtaattacatttctggccagatttataaccaagtcgaactgggcgccgaagtgaatgtggacttagtggtgaagggctttgtggatgcgctgaaaaaacagcagcaattaaccgatgaagaagtgctgacctatcttaaccaacgcgccgaacagttaaaccaagtgagaaaggctaacgccgagaagctcgctgcggaaaacactaaggcaggtgaagcatatcttgctgaaaataagaagaaatcaggcgtaaccgttacagagtcaggcctgcaatacgaagtgttaacccaaggctctggcaataaacccaaccctgaagatgtggtcaccgtcgagtacgttggcaagcttatcgatggcaccgagtttgaaaataccgtcggccgtgaggaacccacacgtttcgccctgatgacagtcatcccaggttgggaagagggcttaaaactcatgcctatgggctctaaataccgttttgttatcccggcagagctggcctatggcaatgagtttgtcggtgaaatcccaccgcaatccaccttaatttttgaaatcgaactgaaaaatatcgaaaagcccagcgagaaaaaagaagcccgcatgatgggcatgatgcctgcccactaa

SEQ ID NO: 153972 - protein, 259 aa, Shewanella sp. MR-4
MKISMPTSFIPKNLTVATCAALFVSMASFAAPTLKTDADKASYSIGASVGNYISGQIYNQVELGAEVNVDLVVKGFVDALKKQQQLTDEEVLTYLNQRAEQLNQVRKANAEKLAAENTKAGEAYLAENKKKSGVTVTESGLQYEVLTQGSGNKPNPEDVVTVEYVGKLIDGTEFENTVGREEPTRFALMTVIPGWEEGLKLMPMGSKYRFVIPAELAYGNEFVGEIPPQSTLIFEIELKNIEKPSEKKEARMMGMMPAH

SEQ ID NO: 153973 - DNA, 774 bp, Shewanella sp. MR-4
  CDS (1)..(774): transl_table=11
atgaaatcgatttataaattatcgttagttgcattggctgttattggcctatctgcttgtaatcaagaagaaaaagcaacaaatgcaagcacaaatgttgaattaacgactgaagcacaaaaagaagcctacagtgttggcgcttcaatcggtcgttatatgtctggccatatcaaagagcaagaagaattaggcctgccagttgaccgtacgctgatcgtgactggttttactaacggtctgaatgatcaactgaaattaaccgaagaagaaatgcaaaccattcttcaaggtttagataaaaagttaaacgacaaacgtcaagaacaagcgacagccattgctgctaaaaacatcgaggaaggtaaaaagttcctcgaggaaaacaaagctaagccaggcgttgtgaccactgaatcgggcctgcaatacgaagtattaacgccaggttctggtgaaaagccagcggctgaagatacagtggaagtggattacgtaggtactctgcttgacggtactgagtttgatagctcatacaagcgtggtcaaaccgctaagttcccattgaaccgcgttattccaggttggaccgaaggcgtacagttaatgcctgttggcgctaagtacaagtttgtgatcccttcaaacttagcttacggtgagcgcgatactggtactatcccaccaaactcaaccctgatttttgaagttgaactgaaatcaattgagaaagcgcaagcggcaccagctgcagctgagcctgctaaaaagtaa

SEQ ID NO: 153974 - protein, 257 aa, Shewanella sp. MR-4
MKSIYKLSLVALAVIGLSACNQEEKATNASTNVELTTEAQKEAYSVGASIGRYMSGHIKEQEELGLPVDRTLIVTGFTNGLNDQLKLTEEEMQTILQGLDKKLNDKRQEQATAIAAKNIEEGKKFLEENKAKPGVVTTESGLQYEVLTPGSGEKPAAEDTVEVDYVGTLLDGTEFDSSYKRGQTAKFPLNRVIPGWTEGVQLMPVGAKYKFVIPSNLAYGERDTGTIPPNSTLIFEVELKSIEKAQAAPAAAEPAKK

SEQ ID NO: 153975 - DNA, 774 bp, Shewanella sp. MR-7
  CDS (1)..(774): transl_table=11
atgaaatcgatttataaattatcgttagttgcattggctgttattggcctatctgcttgtaatcaagaagaaaaagcaacaaatgcaagcacaaatgttgaattaacgactgaagcacaaaaagaagcctacagtgttggcgcttcaatcggtcgttatatgtctggccatatcaaagagcaagaagaattaggcctgccagttgaccgtacgctgatcgtgactggttttactaacggtctgaatgatcaactgaaactaaccgaagaagaaatgcaaaccattcttcaaggtttagataaaaagttaaacgacaaacgtcaagaacaagcgacagccattgctgctaaaaacatcgaggaaggtaaaaagttcctcgaggaaaacaaagctaagccaggcgttgtgaccactgaatcgggcctgcaatacgaagtattaacgccaggttctggtgacaagccagcggctgaagatacagtggaagtggattatgtaggtactctgcttgacggtactgagtttgatagctcatacaagcgtggtcaaaccgctaagttcccattgaaccgcgttattccaggttggaccgaaggcgtacagttaatgcctgttggcgctaagtacaagtttgtgatcccttcaaacttagcttacggtgagcgcgatactggtactattccaccaaactcaaccctgatttttgaagttgaactgaaatcaattgagaaagcgcaagcggcaccagctgcagctgagcctgctaaaaagtaa

SEQ ID NO: 153976 - protein, 257 aa, Shewanella sp. MR-7
MKSIYKLSLVALAVIGLSACNQEEKATNASTNVELTTEAQKEAYSVGASIGRYMSGHIKEQEELGLPVDRTLIVTGFTNGLNDQLKLTEEEMQTILQGLDKKLNDKRQEQATAIAAKNIEEGKKFLEENKAKPGVVTTESGLQYEVLTPGSGDKPAAEDTVEVDYVGTLLDGTEFDSSYKRGQTAKFPLNRVIPGWTEGVQLMPVGAKYKFVIPSNLAYGERDTGTIPPNSTLIFEVELKSIEKAQAAPAAAEPAKK

SEQ ID NO: 153977 - DNA, 780 bp, Shewanella sp. MR-7
  CDS (1)..(780): transl_table=11
atgaaaatatctatgccaacttcttttatcccaaaaaccctcacagtggcgacctgcgctgcattgtttgtctctatggcgagctttgctgccccaacgcttaaaaccgatgcagataaagcgtcttacagcatcggcgcctctgtgggtaactacatttctggccagatttataaccaagtcgaactgggcgccgaagtgaatgtggacttagtggtgcaggggtttgtggatgcgctgaaaaagcagcagcaattaaccgatgaagaagtgctgacctatcttaaccaacgcgccgaacaattaaacgaggtacgtaaggctaacgccgagaagctcgctgcggaaaacactcaggcgggtgaagcttatcttgctgaaaataagaagaaatcaggcgttaaagtcacagactctggcctgcaatacgaagtgttaactcaaggtactggcaataagcccaacccagaagatgtggtcactgtcgagtacgttggcaagcttatcgatggcaccgagtttgaaaataccgtcggtcgtgaggaccccacacgtttcgccctgatgacagtcatcccaggttgggaagagggcttaagactcatgcctatgggctcgaaataccgttttgttattccagccaacttagcctatggcaatgagtttgtcggtgaaatcccgccgcaatccaccttaatttttgaaatcgaactgaaaaatatcgaaaagcccagtgagaaaaaagaagcccgcatgatgggcatgatgccagcccactaa

SEQ ID NO: 153978 - protein, 259 aa, Shewanella sp. MR-7
MKISMPTSFIPKTLTVATCAALFVSMASFAAPTLKTDADKASYSIGASVGNYISGQIYNQVELGAEVNVDLVVQGFVDALKKQQQLTDEEVLTYLNQRAEQLNEVRKANAEKLAAENTQAGEAYLAENKKKSGVKVTDSGLQYEVLTQGTGNKPNPEDVVTVEYVGKLIDGTEFENTVGREDPTRFALMTVIPGWEEGLRLMPMGSKYRFVIPANLAYGNEFVGEIPPQSTLIFEIELKNIEKPSEKKEARMMGMMPAH

SEQ ID NO: 153979 - DNA, 762 bp, Pseudomonas aeruginosa UCBPP-PA14
  CDS (1)..(762): transl_table=11
atgaaacaacatcggttggcagcagcgatcgcactggtcggtctggttctctccggctgcgattcgcagaccaacgttgagttgaagaccccggcgcagaaagcttcctatggtatcggcctgaacatgggcaagagcctgtcccaggaaggcatggacgacctggattcgaaagccgtcgccaagggcatcgaggacgccctcggcaagaagaagcagcagctcaccgatgaagagctgaccgaagccttcgccttcctgcagaaacgtgccgaggagcggatggccgccatcggcgacgaaaacgccaaggccggcaagaagttcctcgaggaaaacggcaagcgcgacggcgtgaccaccaccgcttccggcctccagtacgaaatcgtgaagaaggccgatggcccgcaaccgaaggccaccgacgtggtgaccgtccactacgaaggccgcctgaccgatggcaccgtcttcgacagctccatcgagcgcggcagcccgatcgacctgccggtcagcggcgtgatcccgggttgggtcgaagccctgcaactgatgcacgtcggcgagaagatcaagctgtacatccccagcgagctggcctacggcgcgcagagcccgagcccggcgatcccggccaactcggtactggtcttcgacatggaactgctcggcatcaaggatccgtccaagccggacgcggagcccgaggccggtgccgcagcgcagcccgaagccaaggcggacgcgaagaagtaa

SEQ ID NO: 153980 - protein, 253 aa, Pseudomonas aeruginosa UCBPP-PA14
MKQHRLAAAIALVGLVLSGCDSQTNVELKTPAQKASYGIGLNMGKSLSQEGMDDLDSKAVAKGIEDALGKKKQQLTDEELTEAFAFLQKRAEERMAAIGDENAKAGKKFLEENGKRDGVTTTASGLQYEIVKKADGPQPKATDVVTVHYEGRLTDGTVFDSSIERGSPIDLPVSGVIPGWVEALQLMHVGEKIKLYIPSELAYGAQSPSPAIPANSVLVFDMELLGIKDPSKPDAEPEAGAAAQPEAKADAKK

SEQ ID NO: 153981 - DNA, 618 bp, Pseudomonas aeruginosa UCBPP-PA14
  CDS (1)..(618): transl_table=11
atgagcgaactcaacctgaccactgacgaagcccgtgtcagctacggcatcggccgtcaactgggcgaccaactgcgcgagaatccggttccaggcatgaccctggacgcagtcctggccggcctgtccgatgcgttcgcaggtatcgacagccgggtttccggcgaggcgctgtcggccagcttccaggtgatccgcgaacgcatgcaggccgaagcccaggccaaggccgaagccgccgctggcgaaggccgcgcctacctggccgagaacgccaagcgcgaaggcgtgaccgtgctgccgtcgggcctgcaattcgaagtgctgagtactggcgagggcgccaagccttcccgcgaggataccgtgcgcacccactaccacggcaccctgatcgacggcaccgtattcgacagctcctaccagcgcggccagccggccgagttcccggtgggcggcgtgatcgccggctgggtcgaagcgctgcaactgatgaacgccggctccaagtggcgcctgcacgtaccgagcgaactggcctatggcggccaggcggtcggcagcattcccccgcacagcgtgctggtgttcgacgtcgaactgctggaaatcctctga

SEQ ID NO: 153982 - protein, 205 aa, Pseudomonas aeruginosa UCBPP-PA14
MSELNLTTDEARVSYGIGRQLGDQLRENPVPGMTLDAVLAGLSDAFAGIDSRVSGEALSASFQVIRERMQAEAQAKAEAAAGEGRAYLAENAKREGVTVLPSGLQFEVLSTGEGAKPSREDTVRTHYHGTLIDGTVFDSSYQRGQPAEFPVGGVIAGWVEALQLMNAGSKWRLHVPSELAYGGQAVGSIPPHSVLVFDVELLEIL

SEQ ID NO: 153983 - DNA, 795 bp, Solibacter usitatus Ellin6076
  CDS (1)..(795): transl_table=11
atgcgtggattgcttcttttgattcccgcggtgatgctcgctcagacagcgccggccccggcgcccaaagccgccaccaccgccaccggccagacggccgctcctaaacccgcgaccgctacgcccggacgcggcgcccccggacgcggcgccaccaccgccaggccggctgcccccaagcccgccgcccctcccccgttgactacggacgaccagaagaccatctacgcgctcggcctttcgatcgccaaatcgctgtcgcccttcgatctgtcgccggccgaaatcgacattatcaagcgcgccctcaccgacgcggccgccaacaagccggaagtgcaactggaagaatggggccccaagatcgacccgctcgtgcgtgctcgcggcgccaaagtcgccgaaagggagaaggctgcttccgcggcttacctggccaaatgcgccaccgagcccggcgcggtcaagactgaatccggaatgatcttcaaggaactgcgcgccggcaccggcgcatcgcccaaggccaccgataccgtgaaggtcaactaccgcggcaccctggtcaacggcaccgagttcgacagctcctacaagcgcaatgagcccgcctccttccccctgaacggcgtcatcccctgctggacggaaggcgtgcagcgcatgaaggtcggcggcaaggcgcagctggtctgcccctcgaacctcgcctatggcgatcagggacgtccgtcgatccccggcggagccacgctcatcttcgaaatcgaactgctcgatatcggcgccaaataa

SEQ ID NO: 153984 - protein, 264 aa, Solibacter usitatus Ellin6076
MRGLLLLIPAVMLAQTAPAPAPKAATTATGQTAAPKPATATPGRGAPGRGATTARPAAPKPAAPPPLTTDDQKTIYALGLSIAKSLSPFDLSPAEIDIIKRALTDAAANKPEVQLEEWGPKIDPLVRARGAKVAEREKAASAAYLAKCATEPGAVKTESGMIFKELRAGTGASPKATDTVKVNYRGTLVNGTEFDSSYKRNEPASFPLNGVIPCWTEGVQRMKVGGKAQLVCPSNLAYGDQGRPSIPGGATLIFEIELLDIGAK

SEQ ID NO: 153985 - DNA, 699 bp, Magnetococcus sp. MC-1
  CDS (1)..(699): transl_table=11
atgatgcgtttgattaaaccctctgcactggccttctgtctggtggttgctatgacgcccggatttggcatggcaggcaagctggagagcagcaaggatagactctcctatgctctgggggccgatttggccgatagcatgaccgagaacggttttgatgtagatccagatattttaatcatggggctgcgggataaattggcaggtcaggcgctgcaaatgagccctgaggagatgcaaaaggccatgaaagaggaaattttgcgccgccgtgccctggtgacggaaaaaaaagatagcctcaaaaaagataatctaaaagaggccgaagcgtttttgaaagagaatggccgcaagccaggtgtgcggaccaccatgtcggggttacaatacaaagagctcaaggcaggtaccggtgctaagccggccaatcgcaccgctaaagttaaggtgcactacgagggccgtttgttggatggtaccatttttgacagctcttataagcgtaacgagcctgttgagtttacgctgtcccaagtggttatgggctggaccgaggggctgcaattgatgaagacgggcagtatctatgaactctatctacctccccacttggcctatggcgaagcagggcgtccccctgtgatcgccccgaacaagctgctcatcttcaaggtggagctgcttgaggttaaataa

SEQ ID NO: 153986 - protein, 232 aa, Magnetococcus sp. MC-1
MMRLIKPSALAFCLVVAMTPGFGMAGKLESSKDRLSYALGADLADSMTENGFDVDPDILIMGLRDKLAGQALQMSPEEMQKAMKEEILRRRALVTEKKDSLKKDNLKEAEAFLKENGRKPGVRTTMSGLQYKELKAGTGAKPANRTAKVKVHYEGRLLDGTIFDSSYKRNEPVEFTLSQVVMGWTEGLQLMKTGSIYELYLPPHLAYGEAGRPPVIAPNKLLIFKVELLEVK

SEQ ID NO: 153987 - DNA, 780 bp, Shewanella sp. ANA-3
  CDS (1)..(780): transl_table=11
atgaaaatatctatgccaacttcttttatccccaaaaacctcacagtggcgacctgcgctgctttgtttgtctctatggcgagctttgctgcccctagccttaaaaccgatgcggataaagcgtcttacagcatcggcgcctccgtaggtaactacatttctggccagatttataaccaagtcgaactgggcgcagaagtgaatgtggacttagtggtgcagggctttgtcgatgcgctgaaaaaacagcagcaattaaccgatgaagaagtgctgacctatcttaatcagcgcgccgaagagttaaaccaagtgagaaaggcgaacgctgagaaactcgccgcggaaaatactcgggcgggtgaagcatatcttgctgaaaataagaaaaaatcaggcgtaaccgttacagaatcaggcctgcaatacgaagtattaacccaaggctcgggcaataagcccaaccctgaagatgtggtcaccgtcgagtatgtcggcaagcttatcgatggtactgagtttgaaaataccattggtcgtaaagaacccacacgtttcgctctgatgagcgtgatcccaggttgggaagagggcttaaaactcatgcctatgggctcgaaataccgttttgttattccagccaacttagcctatggcaatgaatttgtcggtgaaatcccaccgcaatccaccttaatttttgaaatcgaactgaaaaatatcgaaaagcccagtgagaaaaaagaagcccgcatgatgggtatgatgccagcccactaa

SEQ ID NO: 153988 - protein, 259 aa, Shewanella sp. ANA-3
MKISMPTSFIPKNLTVATCAALFVSMASFAAPSLKTDADKASYSIGASVGNYISGQIYNQVELGAEVNVDLVVQGFVDALKKQQQLTDEEVLTYLNQRAEELNQVRKANAEKLAAENTRAGEAYLAENKKKSGVTVTESGLQYEVLTQGSGNKPNPEDVVTVEYVGKLIDGTEFENTIGRKEPTRFALMSVIPGWEEGLKLMPMGSKYRFVIPANLAYGNEFVGEIPPQSTLIFEIELKNIEKPSEKKEARMMGMMPAH

SEQ ID NO: 153989 - DNA, 771 bp, Shewanella sp. ANA-3
  CDS (1)..(771): transl_table=11
atgaaatcgatttataaattatcgttagttgcattggctgttattggcctatctgcttgtaatcaagaagaaaaagcaacaaatgcaagcacaaatgttgaattaacgactgaagcacaaaaagaagcctacagtgttggcgcttcaatcggtcgttatatgtctggccatatcaaagagcaagaagaattaggcctgccagttgaccgtgcgctgatcgtgactggttttactaacggtctgaatgaccaactgaaattaaccgaagaagaaatgcaaaccattcttcaaggtttagacaaaaagttaaacgacaaacgtacagaacaagctaaagccattgcagcgaaaaacatcgaggacggtaaaaagttcctcgaggaaaacaaagctaagcctggcgtagtaaccactgaatcgggtctgcaatacgaagtgttaacaccaggttctggtgacaagccagcggctgaagacactgtagaagtggattacgtaggtactctgcttgacggcactgagtttgatagctcatacaaacgtggtcaaacggctaagttcccattaaaccgcgttattccaggctggaccgaaggcgtacagttaatgcctgtgggcgctaagtacaagtttgtgatccctgcaaacttagcttacggcgaccgtgatactggtactattccaccaaactcaaccctgatttttgaagttgaactgaaatcaattgagaaagcacaagcggctcctgctgctgagcctgctaaaaagtaa

SEQ ID NO: 153990 - protein, 256 aa, Shewanella sp. ANA-3
MKSIYKLSLVALAVIGLSACNQEEKATNASTNVELTTEAQKEAYSVGASIGRYMSGHIKEQEELGLPVDRALIVTGFTNGLNDQLKLTEEEMQTILQGLDKKLNDKRTEQAKAIAAKNIEDGKKFLEENKAKPGVVTTESGLQYEVLTPGSGDKPAAEDTVEVDYVGTLLDGTEFDSSYKRGQTAKFPLNRVIPGWTEGVQLMPVGAKYKFVIPANLAYGDRDTGTIPPNSTLIFEVELKSIEKAQAAPAAEPAKK

SEQ ID NO: 153991 - DNA, 807 bp, Neisseria meningitidis FAM18
  CDS (1)..(807): transl_table=11
atgaacaccattttcaaaatcagcgcactgaccctttccgccgctttggcactttccgcctgtggcaaaaaagaagccgcatccgaacctgccgccgcttctgccgcgcagggcgacacctcttcgatcggcagcacgatgcagcaggcaagctatgcgatgggcgtggacatcggacgctccctgaagcaaatgaaggaacagggtgcggaaatcgatttgaaagtctttaccgaagccatgcaggcagtgtatgacggcaaagaaatcaaaatgactgaagagcaggctcaggaagtcatgatgaaattccttcaggaacaacaggctaaagccgtagaaaaacacaaggcggacgcgaaggccaataaagaaaaaggcgaagcctttctgaaagaaaatgccgccaaagacggcgtgaagaccactgcttccggcctgcaatacaaaatcaccaaacagggtgaaggcaaacagccgtccaaagacgacatcgttaccgtggaatacgaaggccgcctgattgacggtacggtattcgacagcagcaaagccaacggcggcccggtcaccttccctttgagccaagtgattccgggttggaccgaaggcgtacagcttctgaaagaaggcggcgaagccacgttctacatcccgtccaaccttgcctaccgcgaacagggtgcgggcgacaaaatcggcccgaacgccactttggtatttgatgtgaaactggtcaaaatcggcgcacccgaaaacgcgcccgccaagcagccggctcaagtcgacatcaaaaaagtaaattaa

SEQ ID NO: 153992 - protein, 268 aa, Neisseria meningitidis FAM18
MNTIFKISALTLSAALALSACGKKEAASEPAAASAAQGDTSSIGSTMQQASYAMGVDIGRSLKQMKEQGAEIDLKVFTEAMQAVYDGKEIKMTEEQAQEVMMKFLQEQQAKAVEKHKADAKANKEKGEAFLKENAAKDGVKTTASGLQYKITKQGEGKQPSKDDIVTVEYEGRLIDGTVFDSSKANGGPVTFPLSQVIPGWTEGVQLLKEGGEATFYIPSNLAYREQGAGDKIGPNATLVFDVKLVKIGAPENAPAKQPAQVDIKKVN

SEQ ID NO: 153993 - DNA, 687 bp, Haemophilus somnus 2336
  CDS (1)..(687): transl_table=11
atgttaaaaattaaaaaacgttctgcaatagcgttaatagcaagtgcggtcgtttctcaatctgtttttgctgataagcagttcaatgatgatgtttcttatgctttgggctattttatgggaaaatatttaacggtgatgggtgaagaacacaaagatgttgccagttacaattatgagaaaattgttgctggcattaaagatgttgtagaaaataaaagcactttaactgatgaaaaagcacaagaaacgttgcaagagttagaaaacaaagcacgtcatgcaaaaatggctaaaatcaaagctgaaaatgagaaatttacagcagaatttgctaaaaaatcgaatgtgaaaaaaacggaaagcggtttactttatcgtattgaaaaaatgggagaaggtaagagcattaaaccgacagatcgtgttaaagtacattacacgggcaaattagccaatggcaaagtattcgatagttccagagagcgtggacaacctgctgaatttaaattaaatcaagtgattttaggttggacagagggtttacaattcattaaaaaaggcggaaaaattgagttggttattcctgccgacttagcttatggcgaaagaggtgcaggtctaattccaccgagttcaacgctatattttgatattgaaatcttagatgtaacttctgaaaaataa

SEQ ID NO: 153994 - protein, 228 aa, Haemophilus somnus 2336
MLKIKKRSAIALIASAVVSQSVFADKQFNDDVSYALGYFMGKYLTVMGEEHKDVASYNYEKIVAGIKDVVENKSTLTDEKAQETLQELENKARHAKMAKIKAENEKFTAEFAKKSNVKKTESGLLYRIEKMGEGKSIKPTDRVKVHYTGKLANGKVFDSSRERGQPAEFKLNQVILGWTEGLQFIKKGGKIELVIPADLAYGERGAGLIPPSSTLYFDIEILDVTSEK

SEQ ID NO: 153995 - DNA, 726 bp, Haemophilus influenzae R2846
  CDS (1)..(726): transl_table=11
atgttaaaaattcaaaaattatctatcgcagcattaatggtaagtgcggtaatttctagtcaagtttttgcagaagataacacattcgatgaaaaagcggcatcttatgcagtaggtacgctcatgggcagtcaaatgaaagatcttgttgattcccacaaagaagttattaaatatgataatgtgcgtattttagatggcttaaaagatgctttagaaggcaaagtggatgttcgtaaagatgaaaaaatccaaaaaaccttagaatctattgaagcaaaattagtggctgcatcaaaagcaaaagcagaagcgattgctaaacaagcaaaagaagaaggcgataaattccgtgctgaatttgctaaaggtaaagatgtaaaaacgacgcaatctggtttaatgtataaaattgaaagtgcaggtaaaggcgatacaatcaaatcaacggatacggttaaagtacattacacgggtaaattaccaaatggaaaagtatttgatagctctgtcgagcgcggacaacctgtagaattccaacttgatcaagtaattaaaggctggactgaaggtcttcaattagtgaaaaaaggcggaaaaattcaattagttattgcacctgaattaggctatggcgaacaaggtgctggcgcatctattccaccaaattcaacattaatttttgatgtggaagtattagacgtcaatccgaaatctgaaaaataa

SEQ ID NO: 153996 - protein, 241 aa, Haemophilus influenzae R2846
MLKIQKLSIAALMVSAVISSQVFAEDNTFDEKAASYAVGTLMGSQMKDLVDSHKEVIKYDNVRILDGLKDALEGKVDVRKDEKIQKTLESIEAKLVAASKAKAEAIAKQAKEEGDKFRAEFAKGKDVKTTQSGLMYKIESAGKGDTIKSTDTVKVHYTGKLPNGKVFDSSVERGQPVEFQLDQVIKGWTEGLQLVKKGGKIQLVIAPELGYGEQGAGASIPPNSTLIFDVEVLDVNPKSEK

SEQ ID NO: 153997 - DNA, 726 bp, Haemophilus influenzae R2866
  CDS (1)..(726): transl_table=11
atgttaaaaattcaaaaattatctattgcagcattaatggtaagtgcggtgatttctggccaagtttttgcagaagataacacattcgatgagaaagcggcatcttatgcagtaggtacgttaatgggcagtcaaatgaaagatcttgttgattcccacaaagaagtcattaaatatgataatgcgcgtattttagatggcttaaaagatgctttagaaggcaaagtggatgttcgtaaagatgaaaaaatccaaaaaaccttagaatctattgaagcaaaattagtggctgcatcaaaagcaaaagcagaagcgattgctaaacaagcaaaagaagaaggcgataaattccgtgctgaatttgctaaagggaaagatgtaaaaacgacgcaatctggtttaatttataaaattgaaagtgcaggtaaaggcgatacaatcaaatcaacggataccgttaaagtacattacacgggtaaattaccaaatggaaaagtatttgatagctctgtcgagcgcggacaacctgtagaattccaacttgatcaagtaattaaaggctggactgaaggtcttcaattagtgaaaaaaggcggaaaaattcaattagttattgcacctgaattaggctatggcgaacaaggtgctggcgcatctattccaccaaattcaacattaatttttgatgtggaagtattggacgtcaatccgaaatctgaaaaataa

SEQ ID NO: 153998 - protein, 241 aa, Haemophilus influenzae R2866
MLKIQKLSIAALMVSAVISGQVFAEDNTFDEKAASYAVGTLMGSQMKDLVDSHKEVIKYDNARILDGLKDALEGKVDVRKDEKIQKTLESIEAKLVAASKAKAEAIAKQAKEEGDKFRAEFAKGKDVKTTQSGLIYKIESAGKGDTIKSTDTVKVHYTGKLPNGKVFDSSVERGQPVEFQLDQVIKGWTEGLQLVKKGGKIQLVIAPELGYGEQGAGASIPPNSTLIFDVEVLDVNPKSEK

SEQ ID NO: 153999 - DNA, 957 bp, Xylella fastidiosa Ann-1
  CDS (1)..(957): transl_table=11
atgaagatacaaatgcgccatgctgtcgtgtcgctactggtcgcagcaatgtctgcctccttacccgctatgtccaaacaatcggtttccgttgtgaataatcaagagaaaacggtgttgagcaccgaaaaagagaaagtcagttatgccattggtttggacattgcgcgatcgcatgtgttcgagctgattgctcaagacattgatgttgctgcactacagcgtgcgatcgaaaatgtcttcaagggtgggccgcctttgatctctgaggaagttgctcagacaaccgatactgcgctgcgtgccatgttggcagcccgttccgggcaacaggaagcttcggggactgcgccgcctgctgtatccaaagagaatattggtctcatgcttgggagctatatggtcggcccgtcgctgctggcgatcaaggatgatattgatcttccggtgcttctacaggcactgcgtaccagattcgcaaagcgcacaccgttgatggatgaacaagaaatgaccacaaggatgcaagcatttgtggcctctaaaaatgctgtggttgcaggaaaaaatcgtgatgagggcagtgcttttctctctaagaacaagaacgagaagggcgtggtcaccaccgcttcaggtcttcagtacatggtgttgcggcagggaagcggctcacgtccgaccccaagtaataatgtgcgtgtcaactacgagggcaagctgctcagcggtcaagtgtttgatagctcttatcagcgtggtcagccggccgaatttggtcttgctcaggtgattaaagggtggtctgaggggctgtcgttgatgtctgtcggttctaagtaccgtttttggattcctgctgatcttgcttacgggcagcaggggactccgggtggtccgattggccctgatgcaacgttgacctttgacgtggagctgctcagtatcctcccttaa

SEQ ID NO: 154000 - protein, 318 aa, Xylella fastidiosa Ann-1
MKIQMRHAVVSLLVAAMSASLPAMSKQSVSVVNNQEKTVLSTEKEKVSYAIGLDIARSHVFELIAQDIDVAALQRAIENVFKGGPPLISEEVAQTTDTALRAMLAARSGQQEASGTAPPAVSKENIGLMLGSYMVGPSLLAIKDDIDLPVLLQALRTRFAKRTPLMDEQEMTTRMQAFVASKNAVVAGKNRDEGSAFLSKNKNEKGVVTTASGLQYMVLRQGSGSRPTPSNNVRVNYEGKLLSGQVFDSSYQRGQPAEFGLAQVIKGWSEGLSLMSVGSKYRFWIPADLAYGQQGTPGGPIGPDATLTFDVELLSILP

SEQ ID NO: 154001 - DNA, 618 bp, Pseudoalteromonas tunicata D2
  CDS (1)..(618): transl_table=11
atgtctgataaatttacaactcacgctgagcaagcaagctacggtatcggtttacaaatgggtgatcaattaaaagcaaatccatttgatggcttaaacttaaacgctgtgtttgaaggtatgaaagacgcttatactgatgctgatttccaagttgaaatcccagcaatccaagctgcatttgaacttattaatactgaaattcaagctcgtcaagaagagcaagctaaagtattagctgccgaaggcgaagctttcctagctgataatgcacagcgtgctgaagtgactgtaactgcatctggtttacaatatgaagtactaacgactggtgaaggcgaaaaaccgactgcggcttcaactgtgcgtacgcattatcatggtacattagtcaatggtactgtgtttgatagctcttatgagcgtggccaaccagctgaatttccagtaggtggcgtgatcaaaggttggactgaagcattacaaatgatgactgttggctcaaaatggcgtttatacgtaccacatgatcttgcttatggcgagcgtggtgctggtgcttctattgcgccattctctacattaatctttgatgttgaattaatcgctatcgtttaa

SEQ ID NO: 154002 - protein, 205 aa, Pseudoalteromonas tunicata D2
MSDKFTTHAEQASYGIGLQMGDQLKANPFDGLNLNAVFEGMKDAYTDADFQVEIPAIQAAFELINTEIQARQEEQAKVLAAEGEAFLADNAQRAEVTVTASGLQYEVLTTGEGEKPTAASTVRTHYHGTLVNGTVFDSSYERGQPAEFPVGGVIKGWTEALQMMTVGSKWRLYVPHDLAYGERGAGASIAPFSTLIFDVELIAIV

SEQ ID NO: 154003 - DNA, 759 bp, Pseudoalteromonas tunicata D2
  CDS (1)..(759): transl_table=11
atgaaaaaaacactaaaattatctttgatcgcagcgtctgtactcgctttaacagcctgtaatcaagaagcaaaacaagaaacagccgcagaagtgaaattagatactgtagcgcaacagcaagcttatggtattggtgcgtctgttggtggcttcttacaaaaagatttagccgataaaaaagcgctgggttttgagttagatcaagcgttattagttaaaggttttcaagatgcgctagctggttcggcaaaaatcgaagaagataaaattcgtgaagtattaactcagttagatactgatgtgcgtgctaaacaagaagaaaaagcgaaattagatgctgaagaaaacaaagcaaaaggtttagctttcttaactgaaaacggtaagcgtgaaggtgtgacaactacagagtcaggtttacaatatgaagtacttgcccaaggtgaaggtgcaaaaccatcagaaactgatgtggtggttgttcactataaaggtactttaattgatggtactgaatttgatagttcttacaaacgtaatgagccagtaaacttcccacttaaccgtgttattaaaggttggactgaaggcgttcagttaatgaatgtaggttcaaagtttaaatttgcgatcccttcagaacttgcatacggtgagcgagctttaggcaacattcctgcacattcaacgctgatttttgaagtagaactacttgaaattgaacagcctgaaaaagctgaagctgctggcgagtaa

SEQ ID NO: 154004 - protein, 252 aa, Pseudoalteromonas tunicata D2
MKKTLKLSLIAASVLALTACNQEAKQETAAEVKLDTVAQQQAYGIGASVGGFLQKDLADKKALGFELDQALLVKGFQDALAGSAKIEEDKIREVLTQLDTDVRAKQEEKAKLDAEENKAKGLAFLTENGKREGVTTTESGLQYEVLAQGEGAKPSETDVVVVHYKGTLIDGTEFDSSYKRNEPVNFPLNRVIKGWTEGVQLMNVGSKFKFAIPSELAYGERALGNIPAHSTLIFEVELLEIEQPEKAEAAGE

SEQ ID NO: 154005 - DNA, 855 bp, Photobacterium sp. SKA34
  CDS (1)..(855): transl_table=11
atgaaacctgttctaaagatgtctgtattggcagcaacaattttcctcgctgttggttgtcaggatgataataaagcagacaccaataagcctgcagagcctgcgaaagtagagcaggttgctgctaagactccagcagctgatgctaaagtagaatttaaaactgaagatcaaaaagctgcttatgcaattggtgcgtcactggcccaatatctctctgctaaccttgagcagcaaaaagagctgggtctagacctaaaccgtcaagacgtacttcaaggtgttgaagatgtatttgcgggtaagagtcgtttaacgcaagagcaaacccaacaagcgcttcaagagcttgaccagcgcgtagctaaaattgttgaagaaaaagcaaaaactgaagctgaaaaaaacgtaaaagccggtgaagagttccgtactaagttctcgaaagaaacgggtgtagtaacaactaaaacgggcctaatgtacaagattgaaaaagaaggtacaggtccaaaaccaacagcaaccgatacagttgaagttcattacaaaggcatgctaactgacggtactgtatttgacagttcttacaagcgtaatcaacctgcaactttccctctaaatcaagttatccctggttggactgaaggtgttcagctaatgcctgtaggctcaaagtttgagtttgttattccgccacagctagcttacggcgcacaagcaaacccaagcattcctgctaactcaacattggtattccaagttgagctactaagtattaaaggtaatgaaactgcaaaacctgcagcggcaccagctgaaaaatcagcagctacagagacaaaaacacaataa

SEQ ID NO: 154006 - protein, 284 aa, Photobacterium sp. SKA34
MKPVLKMSVLAATIFLAVGCQDDNKADTNKPAEPAKVEQVAAKTPAADAKVEFKTEDQKAAYAIGASLAQYLSANLEQQKELGLDLNRQDVLQGVEDVFAGKSRLTQEQTQQALQELDQRVAKIVEEKAKTEAEKNVKAGEEFRTKFSKETGVVTTKTGLMYKIEKEGTGPKPTATDTVEVHYKGMLTDGTVFDSSYKRNQPATFPLNQVIPGWTEGVQLMPVGSKFEFVIPPQLAYGAQANPSIPANSTLVFQVELLSIKGNETAKPAAAPAEKSAATETKTQ

SEQ ID NO: 154007 - DNA, 705 bp, Oceanospirillum sp. MED92
  CDS (1)..(705): transl_table=11
atgaaacaaacgttactggcggttgcactgggtgccgcactggtatcttctacagctaccgcggtagagctgaaaactgacgagcagaaagagagctacgcgattggtttacagctgggcttgcaattgcaacaggttgataacatcgattttaaaattctgacagaaggcctgaaggcaacttataaccaggaagagcctgaaatgacacctgaagaggtgaacaaggctctgatgggcctgcagcagaaaatgcaggaaaaacagcgtcaggcattcgaaaagcttagctcagataaccttgaaaaaggtaaagagtatatggctgaaaacggtaagaaagacggtgtgacaaccactgagtctggcttgcagtttgaagaactggaagcaggcaaaggcaagaagccaacagcagacgataccgttaaagtacattatcgcggcacgctgatcgacggtacagagtttgatagctcttacgcgcgtcaggaacctgtttcattctctctgaaaggtgtgattcctggttggactgaaggtgtacagatgatcaaggaaggcggtaaagcgcgcctggtgattccagctgaccttgcttatggcccaggtggtatgggtaatgcgattggaccaaacgaaacgctggtttttgaaattgagcttctggaagtgaatccaggtgctgaagaagctgcgaagtaa

SEQ ID NO: 154008 - protein, 234 aa, Oceanospirillum sp. MED92
MKQTLLAVALGAALVSSTATAVELKTDEQKESYAIGLQLGLQLQQVDNIDFKILTEGLKATYNQEEPEMTPEEVNKALMGLQQKMQEKQRQAFEKLSSDNLEKGKEYMAENGKKDGVTTTESGLQFEELEAGKGKKPTADDTVKVHYRGTLIDGTEFDSSYARQEPVSFSLKGVIPGWTEGVQMIKEGGKARLVIPADLAYGPGGMGNAIGPNETLVFEIELLEVNPGAEEAAK

SEQ ID NO: 154009 - DNA, 627 bp, Oceanospirillum sp. MED92
  CDS (1)..(627): transl_table=11
atgtctgaagctaaattcgaaacactggaacaaaaagctagctacggtatcggtcgccagatgggcgatcagctggctcaacagccatttgacggcatggatctaaatgcaatctctgcaggtatcacggacgcgtttaacggcgaagcgatgcaggttgaagtacaagagattcaggaagcatttaacgtgatcaacgagcgtcttcgcgctaagcaggaagaagaagctaagaaagctgctgctgttggtgaagagttcctggctgaaaatgctaagcgtgacgaagtaaccgtacttgagtctggcctacagtacgaaatcatcgaagccggtgaagaaggtagtgaaaaacctactgctgagtctaaagttcgtacgcattaccacggcacattcatcgatggtaacgtattcgacagctcctatgatcgcggccagccggcagaattcccagtgggcggtgttatcgctggctggactgaagcactgcagcttatgaacaaaggcgctaagtggaagctatacatcccttacaacctggcatacggcgctcagggctccccgggcggcatccctccatattctgctctggtatttgacgtagaattgctggaaatcctgtaa

SEQ ID NO: 154010 - protein, 208 aa, Oceanospirillum sp. MED92
MSEAKFETLEQKASYGIGRQMGDQLAQQPFDGMDLNAISAGITDAFNGEAMQVEVQEIQEAFNVINERLRAKQEEEAKKAAAVGEEFLAENAKRDEVTVLESGLQYEIIEAGEEGSEKPTAESKVRTHYHGTFIDGNVFDSSYDRGQPAEFPVGGVIAGWTEALQLMNKGAKWKLYIPYNLAYGAQGSPGGIPPYSALVFDVELLEIL

SEQ ID NO: 154011 - DNA, 969 bp, Flavobacteria bacterium BBFL7
  CDS (1)..(969): transl_table=11
ttgattgcgtatctttgcagccttaaaaaagaagacatgcaagaaggtatttatgcaaaatttaatacgactaaaggttcaattttaattcaacttcaccacgataaaactcctggtactgttggaaactttgtcgcactagcagaaggaaacttagaaaacgatgcaaaaccacaagggacaccatactatgatgggttaacttttcacagagtaattcctgattttatgattcaaggtggagatccacagggatctggtgctggtggacctggttacaaatttgacgatgaatttcacccagaattacgtcacgacggtcctggtgtgttaagtatggcaaatgctggtcctggaacaaatggttcacaatttttcattacccatgtagaaacagcatggttagatgataagcataccgtttttggtaaagttgtagaaggtcaggatgtagtagatgctatcgcacaaggagattctattgaaactgtagaaattattagagaaggaaatgcggcgcaatcctttaatgctgtagaagagttccgtcagttcgaaggagctgcaaaactacgcgaagagcaggcacgcaagcaagctgagcaagatctagatgaaattgctgctggatttgataaaacagatagcggattacgttataaaatcatccaagaaggtaacggcgcaaaggcagaaagtggtaaaacggtttctgttcattataaaggaatgttacctaacggtaaagtatttgattctagttttgaacgtaagcaacctatcgattttcaattaggtgctgggcaggttatcgctggttgggatgaaggaattgctttacttaaagtaggtgataaagctagattagtaattccatcacatataggttatggaagtgctggagctggcggtgttattccacctaatgcaacgttagtttttgacgtagagctggtagggattaagtaa

SEQ ID NO: 154012 - protein, 322 aa, Flavobacteria bacterium BBFL7
MIAYLCSLKKEDMQEGIYAKFNTTKGSILIQLHHDKTPGTVGNFVALAEGNLENDAKPQGTPYYDGLTFHRVIPDFMIQGGDPQGSGAGGPGYKFDDEFHPELRHDGPGVLSMANAGPGTNGSQFFITHVETAWLDDKHTVFGKVVEGQDVVDAIAQGDSIETVEIIREGNAAQSFNAVEEFRQFEGAAKLREEQARKQAEQDLDEIAAGFDKTDSGLRYKIIQEGNGAKAESGKTVSVHYKGMLPNGKVFDSSFERKQPIDFQLGAGQVIAGWDEGIALLKVGDKARLVIPSHIGYGSAGAGGVIPPNATLVFDVELVGIK

SEQ ID NO: 154013 - DNA, 711 bp, delta proteobacterium MLMS-1
  CDS (1)..(711): transl_table=11
atgaagcaaaaaatctgccgtttgcccctggtttttgccctgaccctggcggtcaccgcctgcgggcccaatgatacccaggccgacccgcaactggagacggtcaaggataaggtcagctacgccatcggcctcaacatcggtgaggatttcaccgcccagggcatggatatcgatgtcgacctgctggcccggggtatcaaggacgccgtcgcgcaggccgagccgctgctcagcgaagaagagatgcagcaggcgatcatggccttccaggaagagatggtcgcccgccaggaagagatgatgggcgaggcgggggccgaaaaccgccggctgggcgagcagttcctgcaggaaaacgccgccctggatgatgtggtggtcctggatagtggtctgcagtaccgggtggtggaggagggcgatggcgccagccccggtgccgccgacacggtggcggtgcattacgaaggtcgcctggttgatggcacggtctttgacagctcccaccagcgcggcgaacccgccgttttcccggtggaaggagtgattcccggctggacccaggccctgcaactgatgcaggaaggcgatcaatgggagatcgtgctgccctcggagctggcttacggcgcccagggcgccccgccggccatcgggccggattcggtgctggtcttcgacgtccagctactggaagttaatccttaa

SEQ ID NO: 154014 - protein, 236 aa, delta proteobacterium MLMS-1
MKQKICRLPLVFALTLAVTACGPNDTQADPQLETVKDKVSYAIGLNIGEDFTAQGMDIDVDLLARGIKDAVAQAEPLLSEEEMQQAIMAFQEEMVARQEEMMGEAGAENRRLGEQFLQENAALDDVVVLDSGLQYRVVEEGDGASPGAADTVAVHYEGRLVDGTVFDSSHQRGEPAVFPVEGVIPGWTQALQLMQEGDQWEIVLPSELAYGAQGAPPAIGPDSVLVFDVQLLEVNP

SEQ ID NO: 154015 - DNA, 756 bp, Rickettsiella grylli
  CDS (1)..(756): transl_table=11
atgacaagattaccactattgactgtcctggctggcatacttatcagtccaaacttattggctgcacagagtacccctccccttacggttaatcaacagaaatcccctataaactttccaaagatagtcagtcattccccgctattaaaaacggcaaaaggccaaattagttatagtatcggcgccgatttagcggtcaattttaaagaacagggtatccaggttgatcccatcgctctcgaaaaagggttagcagatggtatgaatggaaaatttttattaactcaagcacagatggcggatattttgaaaaattttcaacaagaattaatgaataagcgacatgctgaatttaaaaatcttagtcttaaaaataaacagcaaggtgatgctttcttggctgctaataaaatcaaacccggcgttatcaccttgaaaagtggaatccaatataaaataatacaagccggtagtggcgagcgtcccacagatacatccctggtcaaagtagaatatacaggaagcgatattcatggtactgtttttgaaaaatcaaaagaaccggtcacgtttcctttaaataatgtcattccaggatggatagaagttttaaagataatgaagcctggagcgacctatcaagttgttatcccaccacaatttgcttatggcgaacatggtattgataaagccattggaccgaatcaaacacttgtatttacgattcacctgattgacgtaaagaaaaacacttaa

SEQ ID NO: 154016 - protein, 251 aa, Rickettsiella grylli
MTRLPLLTVLAGILISPNLLAAQSTPPLTVNQQKSPINFPKIVSHSPLLKTAKGQISYSIGADLAVNFKEQGIQVDPIALEKGLADGMNGKFLLTQAQMADILKNFQQELMNKRHAEFKNLSLKNKQQGDAFLAANKIKPGVITLKSGIQYKIIQAGSGERPTDTSLVKVEYTGSDIHGTVFEKSKEPVTFPLNNVIPGWIEVLKIMKPGATYQVVIPPQFAYGEHGIDKAIGPNQTLVFTIHLIDVKKNT

SEQ ID NO: 154017 - DNA, 612 bp, Oceanobacter sp. RED65
  CDS (1)..(612): transl_table=11
atgaaatttgagactccagcgcaaaaagtgagctacttgatcggtcgtcaagtgggtgatcaattaaaaggttcacaattcccaggctttgaactagatggcgtagtgaaaggtattcaggattcgatggcgggcgaagctatgccgtttagccaagaagaaatccaagaggcgtatcaagtgattcaagctgagcttgaaaagatgcaagcagaagctgcagaacaagccaaagcagtcggtgacgaattcctagccgaaaacgccaaaaaagaaggtgttcaagtaacggactctggtcttcagtatgaagtaattagtgaaggttcaggcgcgacgccaagtaaagaaaatacagtgcgtgtacattatcacggtaccttcatcgatggtcgtatgtttgatagttcagttgagcgtggtgagccagctgaattccctgtaggtggagtaatcgcaggctggacagaagcccttcaactgatgaaagaaggcgacaaatggcgtctaaccgtaccaagtgaattagcttatggtgcgcagggtagccaaggcgctattcctccacacagtgttttagtatttgaagtagaacttctaaacgtactgtaa

SEQ ID NO: 154018 - protein, 203 aa, Oceanobacter sp. RED65
MKFETPAQKVSYLIGRQVGDQLKGSQFPGFELDGVVKGIQDSMAGEAMPFSQEEIQEAYQVIQAELEKMQAEAAEQAKAVGDEFLAENAKKEGVQVTDSGLQYEVISEGSGATPSKENTVRVHYHGTFIDGRMFDSSVERGEPAEFPVGGVIAGWTEALQLMKEGDKWRLTVPSELAYGAQGSQGAIPPHSVLVFEVELLNVL

SEQ ID NO: 154019 - DNA, 687 bp, Oceanobacter sp. RED65
  CDS (1)..(687): transl_table=11
atgcgtaaattagccttagttacagcattgagtgcagctgccctagtagggtgcagccaagacaaagaagtcgctttagaaagtgatatcgacaaaatgagctatggtatcggcttgagtatggcacgcagtgttgctggtcagccaattgaatttaaccatgatgcattggtaatgggtcttaaagatgctttggctgaaaaagagccaaagattgatgaagccacccttcgtgaagcgtttgcatcggttcgtgagtcgcaaatgcagaaacaagaagaagcttctgctgaagcattgcaagtcggtgaagactatcttgcagaaaacgctaaaaaggaaggtgtagaaacaactgagagtggtcttcagtatgaagtgctgtcttctggtgagggcgcaacacctgctgcaacagatacagtaaaagttcattaccatggcactttgattgatggaactgtgtttgatagctctgttgagcgtgattcgccagcaacctttcctgttaaccgtgtgatcagtggttggaccgaagctcttcagttgatgcaagaaggtgataagtggcgcctgactgtacctgctgatttggcctatggtgcgcaaagcccaagtcctaagatcccagccaactctgtattgatctttgaagtagagttgctagaagttcaaaaagagtcttaa

SEQ ID NO: 154020 - protein, 228 aa, Oceanobacter sp. RED65
MRKLALVTALSAAALVGCSQDKEVALESDIDKMSYGIGLSMARSVAGQPIEFNHDALVMGLKDALAEKEPKIDEATLREAFASVRESQMQKQEEASAEALQVGEDYLAENAKKEGVETTESGLQYEVLSSGEGATPAATDTVKVHYHGTLIDGTVFDSSVERDSPATFPVNRVISGWTEALQLMQEGDKWRLTVPADLAYGAQSPSPKIPANSVLIFEVELLEVQKES

SEQ ID NO: 154021 - DNA, 729 bp, Alteromonadales bacterium TW-7
  CDS (1)..(729)
ttgtcattgattgcagcgtcggttttagcgcttacagcttgtaatcaagaagcaaaaaaagagcaagctgaagtaacattagacactgtagagcaacaacaagcatacggtattggtgcttctgtaggtaactttttaaataaagacctagcagacaaatctgaaattggcattgagctagaccaagcgctattaattcgtggttttgaagatgcacttgctggcaatgcaaaaattgacgaagaaaaaattcgtgaagtgttaacagctttagatacctcagtacgcactaagcaagaagaaaaagcaaaagttgagtctgaaaaaagcaaagcggcaggtgttcaatacctagctgataacgctaaaaaagaaggcgtaacagtaactgagtctggcctacaatacgaagtattaagcgaaggcgaaggcgaaaagccagcagcaacagacgttgttaaagtacattacaaaggtactttattagacggcactgagtttgacagctcatatgcgcgtaacgaaccaactacattcccacttaaccgcgtaattgctggttggacggaaggtttacagcttatgcctgtagggtctaagtacaagtttactattccttcagagcttgcttacggcgatcgtgaccttggtaaaattccagccaattcaacactggtttttgaagttgaattactagaaattcaaaatgcagaagcacctgcagaataa

SEQ ID NO: 154022 - protein, 242 aa, Alteromonadales bacterium TW-7
MSLIAASVLALTACNQEAKKEQAEVTLDTVEQQQAYGIGASVGNFLNKDLADKSEIGIELDQALLIRGFEDALAGNAKIDEEKIREVLTALDTSVRTKQEEKAKVESEKSKAAGVQYLADNAKKEGVTVTESGLQYEVLSEGEGEKPAATDVVKVHYKGTLLDGTEFDSSYARNEPTTFPLNRVIAGWTEGLQLMPVGSKYKFTIPSELAYGDRDLGKIPANSTLVFEVELLEIQNAEAPAE

SEQ ID NO: 154023 - DNA, 621 bp, Alteromonadales bacterium TW-7
  CDS (1)..(621)
atgtcagataattttactacagatgctgaaaaagcaagttacggtattggcttacaaatgggtgagcaacttaagtctaatccttttgaaggcttaaacctaaattcagtgtttgaaggcatgaaagatgcgtacgcaggtagcgcttttcaagttgagatcccagagatccaagctgcatttgaaaaagttaacgaagagattcaagctcgtcgtgaagaagagtcaaaagtactttctgctgaaggtattgcattcttagaagaaaacgcaaaacgtcctgaaatcactgttactgagtctggtcttcaatatgaagtattagcaacaggtgaaggcgaaaagccaactgctgagtctacagtacgtgttgattaccacggtacattaattaacggtacagtatttgatagctcttacgagcgcggtcaaccagctgaattcccagtaggtggcgtgatcaaaggttggactgaagcgttacaaatgatgccagtaggcactaaatggcgtatttacgttcctcatgagctagcttatggtgaacgtggtgcaggtgctgcaattgcacctttctcaacgcttgtatttgatgttgagctacacgaaatcctttcttaa

SEQ ID NO: 154024 - protein, 206 aa, Alteromonadales bacterium TW-7
MSDNFTTDAEKASYGIGLQMGEQLKSNPFEGLNLNSVFEGMKDAYAGSAFQVEIPEIQAAFEKVNEEIQARREEESKVLSAEGIAFLEENAKRPEITVTESGLQYEVLATGEGEKPTAESTVRVDYHGTLINGTVFDSSYERGQPAEFPVGGVIKGWTEALQMMPVGTKWRIYVPHELAYGERGAGAAIAPFSTLVFDVELHEILS

SEQ ID NO: 154025 - DNA, 735 bp, marine gamma proteobacterium HTCC2143
  CDS (1)..(735): transl_table=11
atgaaacgtaaaatagtactggctgtcgctatcagtgcgacattgatagcatgtgatcaacaagccgctgaaccaacagtagatgccgctcccgccgctatgaccctcgatagtgaagtgaagagggtgagttatggcatgggtattgggctgggtcagcgtataaagcaagaatcattctccattgatgctgacgcgttctcacagggcgtaaaagatgccattgacggtgctgaacagttaatgtctcaggaagaaattatgacggaaatgcaggcctttcagcagcagcaaatggcccagcaacaagaagaagcgggtaaaattgctgagcagaatatggcggaaggcgagtcatttcttgtcgaaaatggaaccaaagatggtgttttgacgactgagagcggtttgcagtataaaattattacagcggggtctggtgctaagccggaggcaaccgatacggttgaagtccattatgcgggtactttgatcgatggtactgaatttgatagttcttatgcgcgtggcgccacggttagttttccagtcaatggcgtgattcctgggtggaccgaagcattgcagctgatgccggttggttcaaagtggcagctgttcattccttctgcgctggcttatggccccggcggcacgggtggtggtcctattggtcctaatgctacgttaatttttgatgtagagttgatatcgattaagggggcggaaggctaa

SEQ ID NO: 154026 - protein, 244 aa, marine gamma proteobacterium HTCC2143
MKRKIVLAVAISATLIACDQQAAEPTVDAAPAAMTLDSEVKRVSYGMGIGLGQRIKQESFSIDADAFSQGVKDAIDGAEQLMSQEEIMTEMQAFQQQQMAQQQEEAGKIAEQNMAEGESFLVENGTKDGVLTTESGLQYKIITAGSGAKPEATDTVEVHYAGTLIDGTEFDSSYARGATVSFPVNGVIPGWTEALQLMPVGSKWQLFIPSALAYGPGGTGGGPIGPNATLIFDVELISIKGAEG

SEQ ID NO: 154027 - DNA, 705 bp, marine gamma proteobacterium HTCC2143
  CDS (1)..(705): transl_table=11
atgatttttcattatccttttggcgattcagtagacaaaattatggtagacttccgttccattttttttagtgaagagagcactatgtctgataaatattctacggtagaacagcgggttagttacggtattggtcgccagatgggcgatcagttggcaagtaactcatttgatggggtcgatgttgacgccgtcgcagaaggtttgaaagatgccttgaacggtattcctagcgtggttgagaccggattgctgagagaggcttttgaagaaattactaagcgtatggaggccaaacaggccgaagagtcaaagacgcttgcagctgacggtgaggtatttctggcggaaaattcgcagcgggaaggcattacagttacggcgtcaggactacagtatgaagtgctgactgctggcgacggtgataagcctctagcaacgtcgaccgttcgcactcattatcacggtacgctagtggacggtactgtattcgatagttctgttgatcgtggtgaaccgacggagtttccagttaatggcgttatcgctggctggacagaagccttacaaatgatgggtgttgggtcaaagtggcgtttatatgttccgtacacactggcctacggtgaacgtggagcgggtggcgctatcggtccctatgcggcattagtctttgaagtcgaattattagccatcgtcagctag

SEQ ID NO: 154028 - protein, 234 aa, marine gamma proteobacterium HTCC2143
MIFHYPFGDSVDKIMVDFRSIFFSEESTMSDKYSTVEQRVSYGIGRQMGDQLASNSFDGVDVDAVAEGLKDALNGIPSVVETGLLREAFEEITKRMEAKQAEESKTLAADGEVFLAENSQREGITVTASGLQYEVLTAGDGDKPLATSTVRTHYHGTLVDGTVFDSSVDRGEPTEFPVNGVIAGWTEALQMMGVGSKWRLYVPYTLAYGERGAGGAIGPYAALVFEVELLAIVS

SEQ ID NO: 154029 - DNA, 618 bp, Pseudomonas putida GB-1
  CDS (1)..(618): transl_table=11
atgtccgaactcaatctgtccaccgacgaaacgcgcgtcagctacggtatcggccgtcagctgggcggccagctgcgcgacaacccgccaccaggcgtcagcctggaagccatcctggccggcctgaccgacgccttcaacggcgccgacagccgcgtcagcgaagccgacctgtcggccagcttcaaagtgatccgtgacatcatgcaagccgaagcggccgccaaggctgaagccgctgctggcgctggcaaggaattcctggccgaaaacgccaagcgtgatggcatcaccaccctggcttcgggcctgcagttcgaagtactgaccgcaggtgaaggcgccaagccgacccgcgaaagcaacgtgcgtacgcactaccacggcaccctgatcgacggcaccgtgttcgacagctcctacgagcgcggccagccggctgaattcccggttggtggtgtgatcgctggctggaccgaagccctgcagctgatgaacgctggcagcaaatggcgcctgtacgtgccgagcgagctggcttacggtgcccaaggcgttggcagcatcccgccgcacagcgtactggtgttcgacgtcgagttgctcgacgttctgtaa

SEQ ID NO: 154030 - protein, 205 aa, Pseudomonas putida GB-1
MSELNLSTDETRVSYGIGRQLGGQLRDNPPPGVSLEAILAGLTDAFNGADSRVSEADLSASFKVIRDIMQAEAAAKAEAAAGAGKEFLAENAKRDGITTLASGLQFEVLTAGEGAKPTRESNVRTHYHGTLIDGTVFDSSYERGQPAEFPVGGVIAGWTEALQLMNAGSKWRLYVPSELAYGAQGVGSIPPHSVLVFDVELLDVL

SEQ ID NO: 154031 - DNA, 765 bp, Pseudomonas putida GB-1
  CDS (1)..(765): transl_table=11
atgaaacagcatcgtttggcggctgcggttgccctggtaggcctggtactggctggctgtgaccaacaggccagcagccccgagctgaagactccggcgcagaaagcctcctacggtatcggcctgaacatgggcaagagcctggctcaggaaggcatggaagaccttgattccaaagcagtcgccctcggcatcgaagacgccgtcagcaagaaagagcagcgcatcaaggatgaagagctggtagaagcgttcaccgcattgcagaagcgcgccgaagagcgcctggccaaggccagcgaagaagccgcctccgccggcaagaaattcctcgaagaaaacgccaagaagccaggcgtggtcaccaccgcttcgggcctgcagtacgaagtggtcaagaaggccgacggcccgcagcctaagccgactgacgtggtcactgtccactacgaaggcaagctgatcgatggcaaggtattcgacagctccgtagagcgtggcagcccgatcgacctgccggtcagcggcgtgatcccaggttgggtcgaaggcctgcagctgatgcacgttggcgagaaatacaagctgttcattccggctgaactggcctacggcgcacaaagcccgagcccgttgatccctgccaactcggtactggtgttcgacctggaactgatcgccatcaaggacccggcccagctgcaaggtgccgagcctgaaggtgaggccccggccgaagcgcctacggaagcacctgccaagtaa

SEQ ID NO: 154032 - protein, 254 aa, Pseudomonas putida GB-1
MKQHRLAAAVALVGLVLAGCDQQASSPELKTPAQKASYGIGLNMGKSLAQEGMEDLDSKAVALGIEDAVSKKEQRIKDEELVEAFTALQKRAEERLAKASEEAASAGKKFLEENAKKPGVVTTASGLQYEVVKKADGPQPKPTDVVTVHYEGKLIDGKVFDSSVERGSPIDLPVSGVIPGWVEGLQLMHVGEKYKLFIPAELAYGAQSPSPLIPANSVLVFDLELIAIKDPAQLQGAEPEGEAPAEAPTEAPAK

SEQ ID NO: 154033 - DNA, 717 bp, Marinobacter sp. ELB17
  CDS (1)..(717): transl_table=11
atgaagaaaacgctgtttgcactgacgattgccggccttgttgcgggctgctcttccgctcaagaagcacctaaagaccccgcgttggaatccaacagcgaaaaagtcagttacggcatgggcctggtaatgggtgagcgcatgggtaacgacctgccagacctgcagatggaacagtttctgcagggcatccagcacggcaacaacggcgaccaggcacagcgccggatgacccaggaagaaattcaggaagcgctgatggcttaccagcagaaactgcaggaagatcaatccaaacaaattgaggaaatggcgcagaaaaatgtgaatgcgggaaacgcttttctagctgaaaatgccaagcgcgagggcgtaagaaccaccgattccggcttgcagtacgaagtgcttgaagccggcaatggcccgcaaccaggcgccggcgaaacggtaacagtccactacacgggcgaattgttgaatggcgaggtgtttgacagctcccgcgagcgcggtgaaccggtctcattccgcctggaccaggttattcccggctggacagagggcctgcagctgatgaacgaaggcgcgcgttacaaactctatattccgtcagacctggcatatgggccgggcggcaatcgcgcgattggttccaatgaaacattggtgtttgacgtggaactgttggcggttaatccggacagcgcccagtaa

SEQ ID NO: 154034 - protein, 238 aa, Marinobacter sp. ELB17
MKKTLFALTIAGLVAGCSSAQEAPKDPALESNSEKVSYGMGLVMGERMGNDLPDLQMEQFLQGIQHGNNGDQAQRRMTQEEIQEALMAYQQKLQEDQSKQIEEMAQKNVNAGNAFLAENAKREGVRTTDSGLQYEVLEAGNGPQPGAGETVTVHYTGELLNGEVFDSSRERGEPVSFRLDQVIPGWTEGLQLMNEGARYKLYIPSDLAYGPGGNRAIGSNETLVFDVELLAVNPDSAQ

SEQ ID NO: 154035 - DNA, 753 bp, Moritella sp. PE36
  CDS (1)..(753): transl_table=11
atgaaaaaattttttaaagtaacggtactcgcttcagcagtatctctgttagcggcatgtggtcaagaagcaccagaagcgccagcagaaaaaataacagacattaagacttacagcgaagatcaacaagcggcttatgcaatcggttcaatcgttgcacgcaacttggttgcaccccttaagcgtcaagaagagctaggtgcaccattggataaagaaatcattgttcaaggtattactgatgcgttaaatgaatcaacgcaattatctgacgaagagctacaagctgtattaaaagcgtatgacgaaaaaatgaatacgctttcaacggaagctgcacgtattgaaggtgagaaactggaagctgaagctgctagtttctttgctgaaaacggcaaaaaagaaggcattaccactaccgattcaggtcttcaatatgaagtgctaacggctggtgaaggtgaacttgcatcgccagatgataccgtcactgtgcattacaccggttcactattagacggttcggtatttgatagttctgtcgaacgtggcgaaccagcaacatttgcacttaatcgtgtgatccctggttggactgaaggtgtttcactaatgaacgtgggcagtaagtataaattatacatcccatctgagctaggttatggcgcacaaggtgcgggtgcagatatcccaccaaattcaacattagtatttgaagttgaattgatcgaaattgctggacaagaaaaataa

SEQ ID NO: 154036 - protein, 250 aa, Moritella sp. PE36
MKKFFKVTVLASAVSLLAACGQEAPEAPAEKITDIKTYSEDQQAAYAIGSIVARNLVAPLKRQEELGAPLDKEIIVQGITDALNESTQLSDEELQAVLKAYDEKMNTLSTEAARIEGEKLEAEAASFFAENGKKEGITTTDSGLQYEVLTAGEGELASPDDTVTVHYTGSLLDGSVFDSSVERGEPATFALNRVIPGWTEGVSLMNVGSKYKLYIPSELGYGAQGAGADIPPNSTLVFEVELIEIAGQEK

SEQ ID NO: 154037 - DNA, 618 bp, Moritella sp. PE36
  CDS (1)..(618): transl_table=11
atgtctgaatttgcaacaagtgaacaaaaaggtagttacggtattggtctacaaatgggtcaacagcttgctgctaatccattcgaaggtctagacatttcagctgttcaagctggtcttgcagatgcgttcgctggtgcagaaagcaaagttagcgatgaagagctaaacgatgctttcaaactgatccatgagaaattagaagctgaaaaagctgagaaatctaaattatttgctgctgaaggcgaaaaattcttagctgaaaatgcagaacgtgaagaagttactgtaactgaatctggtctacagtatgaagttatggcacgtggtgacatcgaggaaaaaccaactgcagaatctacagtgcgtgttcattatcatggcatgctaactgacggtactgtatttgacagctctgttgaacgtggtcaacctgctgaattcccagttggcggcgttatcgctggttggactgaagcactacaactaatgaacgttggtgataaattcaagctatctatcccacacaaccttgcttatggcgaacagggcgcaggcgctgcaatcggtccattccaagcactagtatttgaagtagaactattagacatcatctaa

SEQ ID NO: 154038 - protein, 205 aa, Moritella sp. PE36
MSEFATSEQKGSYGIGLQMGQQLAANPFEGLDISAVQAGLADAFAGAESKVSDEELNDAFKLIHEKLEAEKAEKSKLFAAEGEKFLAENAEREEVTVTESGLQYEVMARGDIEEKPTAESTVRVHYHGMLTDGTVFDSSVERGQPAEFPVGGVIAGWTEALQLMNVGDKFKLSIPHNLAYGEQGAGAAIGPFQALVFEVELLDII

SEQ ID NO: 154039 - DNA, 1044 bp, Oryza sativa subsp
  CDS (1)..(1044)
atgtgcaaatgcaatgctacgctaggaaattttgaccattctggttgggtccttgttgaatgcaaggttggtgaccaggggctcgtgaaggttgctgccctaaatcctgaaactgctccagttgcccccctagagctggaatttgaggagaacaagaatgtggttttatcagtccgtggtcagaactcagtacacttatcaggatactacatctgttcttacaatggtgactatggtgaaaacagcaaacaagccactaaagaaacggtctcgaaagatgatggtgctgctgaaaacaatgatgaaaaacaaggggatgaagctaaacagtctaaaaatgtacaggccgaactgcagcctcacattcgcgtacttgatagtgaccatggtgaaaacagcaagcaagccactaaagaaatggaatccaatgcaatggatgaagatgcatctcttggcctagagcatactctgggaggcaatgtggttcaagctgctagtcaggaggaaaatgcttcacaaactcatgaggataatgatgctgcagatcatattatccaacaaactgaccctcctatcctggtctcagaagatgatggtactgccgaagacaatgatgaggccgaactgcagcctcgcattcgtgtacttgatagtggtatgacaatagaagatctggccaagggaaatgttggtgccaaaattgcatcttgtggcaaaaaggtttatgtgaagtatgtctgtatgttgagcaatggtgatactgttgatcctaccggtgaaagttccacttgcaaattcaaacttggtgctggagaagtcattagtggatgggatcttggtatcgatggcatgcgtgtaggtggaataaggagacttggcattcctccccatctaggctatggtgatgttggaagaggaaacataccaccaaacgcgtggctcaactttgatatcgaactgctgaaagtcaagagtggacgcaagaaggcacggaaagtcgatttcatgtatgttgccttggatagagcctacattcagctatga

SEQ ID NO: 154040 - protein, 347 aa, Oryza sativa subsp
MCKCNATLGNFDHSGWVLVECKVGDQGLVKVAALNPETAPVAPLELEFEENKNVVLSVRGQNSVHLSGYYICSYNGDYGENSKQATKETVSKDDGAAENNDEKQGDEAKQSKNVQAELQPHIRVLDSDHGENSKQATKEMESNAMDEDASLGLEHTLGGNVVQAASQEENASQTHEDNDAADHIIQQTDPPILVSEDDGTAEDNDEAELQPRIRVLDSGMTIEDLAKGNVGAKIASCGKKVYVKYVCMLSNGDTVDPTGESSTCKFKLGAGEVISGWDLGIDGMRVGGIRRLGIPPHLGYGDVGRGNIPPNAWLNFDIELLKVKSGRKKARKVDFMYVALDRAYIQL

SEQ ID NO: 154041 - DNA, 702 bp, Legionella birminghamensis
  CDS (1)..(702): transl_table=11
atgaagatgaaactggtcgctgcagctaccatgggtctggctatgtccaccgcaattgctgcgtccgatgtgactctctctactgacatggataaattatcctacagtattggcgctgatttgggtaaaaatttcaaaaaacaaggtattgaaataaacccaacagcaatggcgaaaggcttacaggatggtatgagcggcagccagctcatgttgactgaagatcagatgaaagaagttctgaacaactttcaaaaagatttgatggctaagcgaaatgcggagttcagtaaaaaatctgaagaaaacaaagcaaaaggtgaaacctttttaagccagaataaatccaaagaaggtgttgtcagcttacccagcggactccagtacaaaattattgaaactggcagcggtgcaaaacctgctaaagacgatacagtaactgtagagtacactggcagaacaattgatggtcaggtatttgacagcactgacaagtctggcaaaccggctaccttcaaagtatctcaggtcattcctggctggaccgaagcgctgcagttaatgccagctggctcaacctgggaaatctatattccttcagggctggcttacggtccaagaagtgttggcgggcccattggtccaaatgaaactttaattttcaagattcatttgatttctgtaaagaaagctggcgcttaa

SEQ ID NO: 154042 - protein, 233 aa, Legionella birminghamensis
MKMKLVAAATMGLAMSTAIAASDVTLSTDMDKLSYSIGADLGKNFKKQGIEINPTAMAKGLQDGMSGSQLMLTEDQMKEVLNNFQKDLMAKRNAEFSKKSEENKAKGETFLSQNKSKEGVVSLPSGLQYKIIETGSGAKPAKDDTVTVEYTGRTIDGQVFDSTDKSGKPATFKVSQVIPGWTEALQLMPAGSTWEIYIPSGLAYGPRSVGGPIGPNETLIFKIHLISVKKAGA

SEQ ID NO: 154043 - DNA, 702 bp, Legionella bozemanii
  CDS (1)..(702): transl_table=11
atgaagatgaaattggtcactgcggccgtcatggggctggcaatgtctactgtaattgctgctactgatgctacatcgcttgttacggataaagataaattatcttatagtattggtgctgatttagggaaaaacttcaaaaatcaaggtattgatattaatccggacgcattagctaaaggaatgcaagacggaatgtctggtgcccaattgattttgactgaacaacaaatgaaagatgttctgaataaattccaaaaagagttgatggcaaaacgcagcgctgagtttaataaaaaagctgaagaaaacaaatctaaaggcgaagcctttttatcaactaacaaatcaaaatctggcgtagttgtattgccaagcggcttgcaatataaagttattgaagcaggcacaggaaataaacccggcaaatcggacacagtaactgttgaatacactggtactttaattgatggtactgtatttgatagcactgaaaaaacaggtaagccagctacattccaagtatcacaagtaattcctggttggactgaagcattacaattaatgcctgccggttctacttgggaaatttatgtaccttcagatttagcgtatggtccacgtagtgtaggtggtcctataggtccaaatgaaactttgattttcaaaattcatttgatctctgtgaaaaaatctgcctaa

SEQ ID NO: 154044 - protein, 233 aa, Legionella bozemanii
MKMKLVTAAVMGLAMSTVIAATDATSLVTDKDKLSYSIGADLGKNFKNQGIDINPDALAKGMQDGMSGAQLILTEQQMKDVLNKFQKELMAKRSAEFNKKAEENKSKGEAFLSTNKSKSGVVVLPSGLQYKVIEAGTGNKPGKSDTVTVEYTGTLIDGTVFDSTEKTGKPATFQVSQVIPGWTEALQLMPAGSTWEIYVPSDLAYGPRSVGGPIGPNETLIFKIHLISVKKSA

SEQ ID NO: 154045 - DNA, 750 bp, Legionella brunensis
  CDS (1)..(750): transl_table=11
atgaagatgagactggtcgctgcagctgtcataggtttgacaatgtcaacggcaatcgttgctgccgatgcatcagctactgccacacctgcacctgcaacatctgctacacctacaacatcattaaatagtgacatggataagctgtcttacagtattggcgctgatttaggtaaaaactttaaaaagcaaggtattgatatcaatccttcagcaatggccaaaggtttgcaagatggtatgagcggtgggcaattgttattgacagaacagcaaatgaaagatgtattgaataaatttcaaaaagatttgatggcaaagcgtactgctgaattcagcaagaaagctgacgaaaataaagctaaaggtgaagcctttttaaatcagaataaagcaaaagaaggtgttgttagtttaccaagtggtttgcaatataaaataattcaaaagggtgatggtgctaaaccttctaaagaggacactgttaccgttgaatacactggtacactgattgatggccaagtttttgacagtaccgataaagctggtaaaccagccactttcaaggtatcacaagtgattcctgggtggactgaagcactacaactgatgccagctggctcaacttgggaagtttatgttcctgcggatttagcttatggtcctcgcagtgtaggtggtcctattggtccaaatgaaacattaatttttaaaattcatttgatctctgtaaaaaaatctgacgcttaa

SEQ ID NO: 154046 - protein, 249 aa, Legionella brunensis
MKMRLVAAAVIGLTMSTAIVAADASATATPAPATSATPTTSLNSDMDKLSYSIGADLGKNFKKQGIDINPSAMAKGLQDGMSGGQLLLTEQQMKDVLNKFQKDLMAKRTAEFSKKADENKAKGEAFLNQNKAKEGVVSLPSGLQYKIIQKGDGAKPSKEDTVTVEYTGTLIDGQVFDSTDKAGKPATFKVSQVIPGWTEALQLMPAGSTWEVYVPADLAYGPRSVGGPIGPNETLIFKIHLISVKKSDA

SEQ ID NO: 154047 - DNA, 705 bp, Fluoribacter dumoffii
  CDS (1)..(705): transl_table=11
atgaagatgaaattggtcactgcagccattatggggctggcaatgtctactgcaatggctgctactgatgctacatcgcttgttacggataaagataaattatcttacagtattggtgctgatttaggaaaaaacttcaaaaatcaaggtattgatattaatccggaagcattagctaaagggatgcaagatggaatgtctggtgcccaattgattttgactgaacaacaaatgaaagatgttctgaataaattccagaaagatttgatggcaaaacgtagtgctgaattcaacaagaaagctgaagagaataaagcaaaaggcgaagcgttcttatcaagtaacaaatcaaaatctggtgtggttgtactgccaagtggcttgcaatacaaagtcatcgaagcaggttcaggcgctaagccaggtaaatctgacacagtaactgtagaatatacaggtactttaattgatggaactgtatttgatagcactgagaaagcaggtaaacctgctactttccaggtatctcaagtgattcctggttggactgaagctttacaattaatgcctgctggttctacctgggaaatttatgtgccttcaaacctggcatatggtccccgtagcgtaggtggtcctatcggtccaaatgaaactttgattttcaaaattcatttgatttccgtgaaaaaagcctcagcctaa

SEQ ID NO: 154048 - protein, 234 aa, Fluoribacter dumoffii
MKMKLVTAAIMGLAMSTAMAATDATSLVTDKDKLSYSIGADLGKNFKNQGIDINPEALAKGMQDGMSGAQLILTEQQMKDVLNKFQKDLMAKRSAEFNKKAEENKAKGEAFLSSNKSKSGVVVLPSGLQYKVIEAGSGAKPGKSDTVTVEYTGTLIDGTVFDSTEKAGKPATFQVSQVIPGWTEALQLMPAGSTWEIYVPSNLAYGPRSVGGPIGPNETLIFKIHLISVKKASA

SEQ ID NO: 154049 - DNA, 741 bp, Legionella erythra
  CDS (1)..(741): transl_table=11
atgaagataaaactggtcgctgcagctgtcgtaagcctggcaatgacaaccgcatttgctgaaacaactactcctgctgccggcacgactacaccagctactgccgcaacacccgccacgttaactaccgatattgacaagctgtcttacagtattggggctgatttaggcaaaaattttaaaaagcaagggattgaaatcagtccttctgcaatggctaagggtttgcaggatggcatgagcggttctcagttactgttgactgaagatcaaatgaaagatgtattgagtaaatttcaaaaagacctgatggcgaaacgaaacgctgaattcactaaaaaagcagaagagaacaagtctaaaggtgaagcgttcctgtcccagaacaaaaccaaagaaggcgttgtgacgctgccaagcggcctgcaatataaaatcattgaaaaaggcaatggtgctaaaccaaccaaagaagacacggtaaccgtcgagtacaccggtcgtttgattgatggtcaagtgtttgacagtaccgataaaaccggtaaaccagctacattcaaggtttctcaggttatcccgggctggactgaagccctgcaattaatgcctgccggctccgtgtgggaagtgtatgttcctgcgtcgttagcttacggcccacgcagtgttggtggacccattggccccaacgaaaccttgattttcaaaatccatttgatttctgtcaaaaaatcttaa

SEQ ID NO: 154050 - protein, 246 aa, Legionella erythra
MKIKLVAAAVVSLAMTTAFAETTTPAAGTTTPATAATPATLTTDIDKLSYSIGADLGKNFKKQGIEISPSAMAKGLQDGMSGSQLLLTEDQMKDVLSKFQKDLMAKRNAEFTKKAEENKSKGEAFLSQNKTKEGVVTLPSGLQYKIIEKGNGAKPTKEDTVTVEYTGRLIDGQVFDSTDKTGKPATFKVSQVIPGWTEALQLMPAGSVWEVYVPASLAYGPRSVGGPIGPNETLIFKIHLISVKKS

SEQ ID NO: 154051 - DNA, 714 bp, Legionella feeleii
  CDS (1)..(714): transl_table=11
atgaagatgagactggtcgctgcagctgtcataagtatggcaatgtcaacgacaattgctgcggctgatgcgacagctacaacatcattaaatagtgacatggataagttgtcttatagcattggcgctgatttaggtaagaattttaaaaagcaaggcatcgaaatcagtccggctgctatggctaagggattacaagacggcatgagtggtggtcaactgttgctgactgaacaacaaatgaaagacgttttaaataaatttcaaaaagacctaatggcaaaacgaaatgcggaattcactaaaaaagctgaagaaaataaagcgaaaggtgaagcgttcatgagccagaataaggccaaagaaggcgtagttagtttgccaagcgggttacaatataaaataatccaggctggtactggtgcaaaaccagcaaaagatgacactgtcactgttgaatacactggcaagttaattgatggccaggtttttgatagcactgaaaaaacgggtaagcctgctacgttcaaagtatcacaggttatccctggctggactgaagcattacaattaatgcctgccggttctacttgggaagtctatgttcctgccggtcttgcctatggtccacgcagtgttggtggcccaatcggacctaatgaaacattgattttcaaaattcatctgatttctgtcaagaaatctgacgcttaa

SEQ ID NO: 154052 - protein, 237 aa, Legionella feeleii
MKMRLVAAAVISMAMSTTIAAADATATTSLNSDMDKLSYSIGADLGKNFKKQGIEISPAAMAKGLQDGMSGGQLLLTEQQMKDVLNKFQKDLMAKRNAEFTKKAEENKAKGEAFMSQNKAKEGVVSLPSGLQYKIIQAGTGAKPAKDDTVTVEYTGKLIDGQVFDSTEKTGKPATFKVSQVIPGWTEALQLMPAGSTWEVYVPAGLAYGPRSVGGPIGPNETLIFKIHLISVKKSDA

SEQ ID NO: 154053 - DNA, 699 bp, Fluoribacter gormanii
  CDS (1)..(699): transl_table=11
atgaagatgaaattggtcactgcggccattatggggctggcaatgtctactgcaatggctgctactgatgctacatcgcttgttacggataaagataaattatcttatagtattggtgctgatttaggaaaaaatttcaaaaatcaaggtattgatattaatccggaagcattggctaaaggaatgcaagatggtatgtctggtgcccaattgattttgaccgaacaacaaatgaaagatgttctgaataaatttcagaaagatctgatggcaaaacgcagcgcagagtttaacaagaaagctgaagagaacaaatctaaaggcgaagcttttttgtcaactaacaagtcaaaatctggtgtagttgtattgccaagtggtttgcaatataaagttattgaagcaggtacaggcagtaaaccaggtaaatctgatacagtaactgttgaatacacgggtactctaattgatgggactgtatttgatagcactgaaaaaacaggaaaacccgctacattccaagtatcacaagtgattccaggttggacagaagcattacaattaatgccggctggttctacatgggagatttatgtgccttcagacttagcttatggcccacgtagtgtaggtggtcctataggtccaaatgaaactttgattttcaaaattcatttgatctctgtaaaaaaagcctaa

SEQ ID NO: 154054 - protein, 232 aa, Fluoribacter gormanii
MKMKLVTAAIMGLAMSTAMAATDATSLVTDKDKLSYSIGADLGKNFKNQGIDINPEALAKGMQDGMSGAQLILTEQQMKDVLNKFQKDLMAKRSAEFNKKAEENKSKGEAFLSTNKSKSGVVVLPSGLQYKVIEAGTGSKPGKSDTVTVEYTGTLIDGTVFDSTEKTGKPATFQVSQVIPGWTEALQLMPAGSTWEIYVPSDLAYGPRSVGGPIGPNETLIFKIHLISVKKA

SEQ ID NO: 154055 - DNA, 702 bp, Legionella gratiana
  CDS (1)..(702): transl_table=11
atgaagatgaaattagtcactgcggccattatggggctggcaatgtctactgcaatggctgcaactgatgctacatcgcttgctacagacaaagataagttatcttatagtattggtgctgatttaggaaaaaactttaaaaatcaaggtattgaagttaatccagaagtattagctaaaggaatgcaagatggaatgtctggtgcacagttgattttgactgaagagcagatgaaagacgttctgagtaagtttcaaaaagatttgatggctaaacgcagcgcagaattcaataagaaagccgaagaaaacaaagcaaaaggtgatgccttcttatctgctaataaggcaaagccaggggtagttgcattgccaagtggtttgcaatataagattattgatgctgggaatggtactaagccaggtaaatcagatactgtaactgttgaatatactggtactttaattgatggtacagtgtttgatagcactgaaaaagcaggcaagccagctacattccaagtatcacaagtaattcccggttggacagaagcattacaattgatgcccgctggttctacatgggaagtttatgtcccttcagatttggcttatggtccacgtagtgtaggtggtcctataggtccaaatgaaactttgattttcaaaattcatttgatttctgtaaaaaaagaagcctaa

SEQ ID NO: 154056 - protein, 233 aa, Legionella gratiana
MKMKLVTAAIMGLAMSTAMAATDATSLATDKDKLSYSIGADLGKNFKNQGIEVNPEVLAKGMQDGMSGAQLILTEEQMKDVLSKFQKDLMAKRSAEFNKKAEENKAKGDAFLSANKAKPGVVALPSGLQYKIIDAGNGTKPGKSDTVTVEYTGTLIDGTVFDSTEKAGKPATFQVSQVIPGWTEALQLMPAGSTWEVYVPSDLAYGPRSVGGPIGPNETLIFKIHLISVKKEA

SEQ ID NO: 154057 - DNA, 729 bp, Legionella israelensis
  CDS (1)..(729): transl_table=11
atgaaactgaaactggtcgctgcaacggtcatgagcatggcgatatctacggcaatagcagctactgatgcttcgtcattgaatacggatgtagaaaaattatcctacagtattggagctgatcttggtaaaaatttcaaaaagcaagggattgaaattgatccccaagctatggcagcgggaatgaaggatggaatgagcggtgataaattaaaattgaccgagcagcaaatgcgagatgttttaaataaatttcagcaagagctgatggcgaaaagaaatgccgaatttaataaaaaagccgccgaaaataaagctaaaggggaagcttttctcgagcaaaataaaggcaaggaaggcgttgttaccttacccagtggtttacaatataaaatccttgagaaaggaacaggcactaaaccttccaaatccgacacagttacagttgaatatactggacgtttgattaatggccaggtttttgacagttctgaaagagtgggaaaaccagccacatttaaagtatcacaggtcatccctggttggactgaagcattacaattgatgcctgctggttctacttgggaaatttatgttccttctgatctggcatatggtcctcgtagtatcggtggtcctattggtccaaacgagacattaattttcaaaattcatttgatatctgttaagaaagacaaggacacagatactgctcaaaaagatgcttaa

SEQ ID NO: 154058 - protein, 242 aa, Legionella israelensis
MKLKLVAATVMSMAISTAIAATDASSLNTDVEKLSYSIGADLGKNFKKQGIEIDPQAMAAGMKDGMSGDKLKLTEQQMRDVLNKFQQELMAKRNAEFNKKAAENKAKGEAFLEQNKGKEGVVTLPSGLQYKILEKGTGTKPSKSDTVTVEYTGRLINGQVFDSSERVGKPATFKVSQVIPGWTEALQLMPAGSTWEIYVPSDLAYGPRSIGGPIGPNETLIFKIHLISVKKDKDTDTAQKDA

SEQ ID NO: 154059 - DNA, 756 bp, Legionella jordanis
  CDS (1)..(756): transl_table=11
atgaagatgagactggtcgctgcagctgtaatgggcttagcaatgacatccgcaattgctgcgaatgacgcaacaaatacagcaacttctgctacgcctgcttccaacactgcaacatctgctacatcattaaatagcgacatggataagctgtcctacagtatcggcgccgatttaggcaagaattttaaaaaacaaggtattgatatcaatcctgctgctatggcaaaagggttacaagacgggatgagcggtgttcaactgcaactgaccgaacaacagatgaaagatgtactcaataaattccaaaaagatttaatggcaaaacgcaatgctgaattcagcaaaaaagctgatgaaaataaatcaaaaggtgaagcattcttaaacgcaaacaaaagtaaagagggtgttgtcagcttaccaagtgggttgcagtacaaaatcttagaaaaaggaaatggcgttaagccttctaaggatgacaccgttacggttgaatacacaggcaagttgatcgatggccaggtgtttgatagcactgaaagaacaggtaagcctgcaacgttcaaagtttcacaagtgattcctggttggactgaagctctgcaattaatgcctgctggttctacatgggaagtgtatgtccccgctgatttagcctacggcccacgcagcgtaggtggcccaattggtcctaatgaaaccttaattttcaaaatccatttgatttccgttaaaaaatcagatgcctaa

SEQ ID NO: 154060 - protein, 251 aa, Legionella jordanis
MKMRLVAAAVMGLAMTSAIAANDATNTATSATPASNTATSATSLNSDMDKLSYSIGADLGKNFKKQGIDINPAAMAKGLQDGMSGVQLQLTEQQMKDVLNKFQKDLMAKRNAEFSKKADENKSKGEAFLNANKSKEGVVSLPSGLQYKILEKGNGVKPSKDDTVTVEYTGKLIDGQVFDSTERTGKPATFKVSQVIPGWTEALQLMPAGSTWEVYVPADLAYGPRSVGGPIGPNETLIFKIHLISVKKSDA

SEQ ID NO: 154061 - DNA, 750 bp, Legionella lansingensis
  CDS (1)..(750): transl_table=11
atgaagatgagactggtcgctgcagctgtcatgggtttggcgatgacaacagcaattgctgcaagcaacacaccaaacgcagcaacgcctactacacccgcagccgcaacatctgctacatcattaaatagcgacacggataagctgtcttatagtatcggtgctgacttgggtaaaaattttaaaaagcaagggattgatattaatccttcagcaatggctaagggcttacaagatggtatgagcggtggtcagttgttactcacagagcagcaaatgaaagaagttttgaataaatttcaaaaagatctaatggcaaaacgtaatgctgagttcactaaaaaggctgaagaaaacaagattaaaggcgaagcctttttaactgcaaataaaaacaaagatggtgttattagtctgccaagtggtttgcaatataaagtccttgaaaaaggaaatggcgctaaacctacaaaaaatgatactgtgactgttgaatatacgggcaaattaattgacggccaagtttttgacagtaccgaaagaaccggtaaaccagcaacgttcaaagtatctcaagtaataccaggctggactgaggctctgcaattaatgcctgctggttcaacttgggaagtatatgttcctgccgatttagcttatggtcctcgaagcgtaggcggcccaattggtccaaacgaaacgttgattttcaaaattcatctgatatctgttaaaaaatcagaggcttaa

SEQ ID NO: 154062 - protein, 249 aa, Legionella lansingensis
MKMRLVAAAVMGLAMTTAIAASNTPNAATPTTPAAATSATSLNSDTDKLSYSIGADLGKNFKKQGIDINPSAMAKGLQDGMSGGQLLLTEQQMKEVLNKFQKDLMAKRNAEFTKKAEENKIKGEAFLTANKNKDGVISLPSGLQYKVLEKGNGAKPTKNDTVTVEYTGKLIDGQVFDSTERTGKPATFKVSQVIPGWTEALQLMPAGSTWEVYVPADLAYGPRSVGGPIGPNETLIFKIHLISVKKSEA

SEQ ID NO: 154063 - DNA, 735 bp, Tatlockia maceachernii
  CDS (1)..(735): transl_table=11
atgaagatgagattggtcgctgcagctgccatgggtttggcaatgtcaacgacaatagctgcaagcgctactaccactgatacagcaacttctgcaccagctacatcattggctacagacacagaaaaactttcttacagtattggcgctgatttaggtaagaattttaaaaagcaaggaatagagattagtcctgctgcaatggcaaaaggtttacaagatggaatgagcggcgggcaattgttgctgactgatgagcaaatgaaagaggtgttaaataagtttcaaaaagatctcatgatgaagcgcagcgctgagttcaataagaaagctgaagacaataaggcaaaaggagaagcgtttcttaatgacaataaatcaaaagaaggtgttgttagcttaccaagcggcttacagtacaaaatcattgagcgcggtgatggtgctaaacctactaaggaagacgtcgttactgtggaatacacaggtaaattgatcgatggtcaagtgtttgattctactgataaaactggcaaaccagcaaccttcaaagtttcacaagtgattcctggttggacagaagccttgcaattaatgccagctggttctacttgggaagtctatattcctgctaatctggcttatggtccacgcagtgtcggaggcccgattggacctaatgaaactttaattttcaaaattcatctgatttcagtgaagaaatctgacgcataa

SEQ ID NO: 154064 - protein, 244 aa, Tatlockia maceachernii
MKMRLVAAAAMGLAMSTTIAASATTTDTATSAPATSLATDTEKLSYSIGADLGKNFKKQGIEISPAAMAKGLQDGMSGGQLLLTDEQMKEVLNKFQKDLMMKRSAEFNKKAEDNKAKGEAFLNDNKSKEGVVSLPSGLQYKIIERGDGAKPTKEDVVTVEYTGKLIDGQVFDSTDKTGKPATFKVSQVIPGWTEALQLMPAGSTWEVYIPANLAYGPRSVGGPIGPNETLIFKIHLISVKKSDA

SEQ ID NO: 154065 - DNA, 702 bp, Legionella moravica
  CDS (1)..(702): transl_table=11
atgaagatgaaattggtcactgcggccgtcttggggctggcaatgtctagtgcaatggcaaccgatgccacatccttacctacagacaaagataaattgtcttacagtattggtgctgatttaggaaagaatttcaaaaatcaaggtattgatgtaaacccagaggcattagctaaaggtatgcaagacggtatgagtggagctcaattgatcttgaccgaacagcaaatgaaagatgttcttaataaattccaaaaagatttaatggcaaagcgtacatctgaatttaataagaaagcagaagaaaacaaatcaaaaggcgaagcgtttttaactgaaaataaaagcaaaactggtgttgtagtattgccaagtggtttgcaatataaaatcatagacgctggcacaggcgctaaacccggtaaaacagatactgtaacagtagaatataccggccgattgattgacggcactgtttttgacagtactgaaaaaacaggcaaaccagcaacattccaggtttcacaagtaattcctggttggactgaagctctgcaattaatgcctgccggatcgacctgggaaatttatgttcctgcatcgctggcttatggaccacgtagtgttggtggaccaattggaccaaatgaaactttgatctttaaaattcatttgatttcagttaaaaaatccgcatcctaa

SEQ ID NO: 154066 - protein, 233 aa, Legionella moravica
MKMKLVTAAVLGLAMSSAMATDATSLPTDKDKLSYSIGADLGKNFKNQGIDVNPEALAKGMQDGMSGAQLILTEQQMKDVLNKFQKDLMAKRTSEFNKKAEENKSKGEAFLTENKSKTGVVVLPSGLQYKIIDAGTGAKPGKTDTVTVEYTGRLIDGTVFDSTEKTGKPATFQVSQVIPGWTEALQLMPAGSTWEIYVPASLAYGPRSVGGPIGPNETLIFKIHLISVKKSAS

SEQ ID NO: 154067 - DNA, 726 bp, Legionella nautarum
  CDS (1)..(726): transl_table=11
atgaagatgagattggtcgctgctgctgccatgagtttggccatgtcaacgacaatagctgcaaatgctacagcaacttctacgccatcagcggcatcattatctactgatacggataagctgtcttacagcatcggagcggatttaggtaagaacttcaagaagcagggaattgatattagtcctgcagcaatggcaaaaggtttacaagatggaatgagtggtgggcaattattgctaactgaagaacaaatgaaagaggtattaaataaatttcagaaagaattgatgatgaagcgcagcgctgaattcaataaaaaatctgaagaaaataaatcaaaaggggaagcgttcctcaaagataataaatcaaaagatggtgttgtgagtttacctagcggtttgcaatacaaaatccttgaaaaaggggatggcgcaaaaccagctaaagacgacactgttactgttgaatacactggtcgattgatcaatggtcaagtctttgacagtacggaaaaaactggcaagcctgcaactttcaaagtttcacaggttattcctggttggactgaagctttacagttaatgccttctggttctacttgggaagtttatattccatctgatttagcctacggtccacgtagcgttggcggccctatcggacctaatgaaaccttaattttcaagattcatctgatttcagttaagaaaactgatgcctaa

SEQ ID NO: 154068 - protein, 241 aa, Legionella nautarum
MKMRLVAAAAMSLAMSTTIAANATATSTPSAASLSTDTDKLSYSIGADLGKNFKKQGIDISPAAMAKGLQDGMSGGQLLLTEEQMKEVLNKFQKELMMKRSAEFNKKSEENKSKGEAFLKDNKSKDGVVSLPSGLQYKILEKGDGAKPAKDDTVTVEYTGRLINGQVFDSTEKTGKPATFKVSQVIPGWTEALQLMPSGSTWEVYIPSDLAYGPRSVGGPIGPNETLIFKIHLISVKKTDA

SEQ ID NO: 154069 - DNA, 702 bp, Legionella parisiensis
  CDS (1)..(702): transl_table=11
atgaagatgaaattggtcactgcggccgtcatggggctggcaatgtctactgtaatggctgctactgatgctacatcgcttgttacggataaggataaattatcttatagtattggtgctgatttaggaaaaaactttaaaaatcaaggtattgatattaatccggacgcattagctaaaggaatgcaagacgggatgtctggtgcccaattgattttgactgaacaacaaatgaaagatgttctgaataaattccaaaaagagttgatggcgaagcgcagcgctgagtttaataagaaagctgaagaaaacaaatctaaaggtgatgcttttttatcaactaataaatcaaaatctggcgtaactgtattaccaagcggtttgcaatataaggtgatcgaagctggtacaggaaataaaccaggcaaatcggatacagtaactgttgagtacactggtactttaatcgatggtactgtatttgatagcactgaaaaaacaggtaagccagctacattccaagtatcacaagttattcctggttggaccgaagcattacaattaatgcctgctggttctacttgggaaatttatgtaccttcagacttagcttatggtccacgtagtgtaggtggtccaataggtccaaatgaaactttgattttcaaaatacatttgatctctgtgaaaaaatctgcctaa

SEQ ID NO: 154070 - protein, 233 aa, Legionella parisiensis
MKMKLVTAAVMGLAMSTVMAATDATSLVTDKDKLSYSIGADLGKNFKNQGIDINPDALAKGMQDGMSGAQLILTEQQMKDVLNKFQKELMAKRSAEFNKKAEENKSKGDAFLSTNKSKSGVTVLPSGLQYKVIEAGTGNKPGKSDTVTVEYTGTLIDGTVFDSTEKTGKPATFQVSQVIPGWTEALQLMPAGSTWEIYVPSDLAYGPRSVGGPIGPNETLIFKIHLISVKKSA

SEQ ID NO: 154071 - DNA, 747 bp, Legionella rubrilucens
  CDS (1)..(747): transl_table=11
atgaagataaaactggtcgctgcagctgtcgtaggcctggcaatgacaaccgcgtttgctgatacaaataccaccgctcccagcacgactacaccagccactgccgcaacacctgcaaccttaaacaccgatattgacaagttgtcttacagtattggtgctgatttaggcaaaaactttaaaaagcaaggcatcgaaatcagtccttcggcaatggccaaagggttacaggatggcatgagcggttctcagttattgctgactgaagatcaaatgaaagacgtgttgagtaaatttcagaaagacctgatggccaagcgaaatgctgaattcactaaaaaggcagaagagaataagtccaaaggcgaagcatttctgtctcagaacaaaagcaaagaaggcgtggtgacgctgccaagcggtttgcaatataaaatcattgaaaaaggcaatggcgccaaaccaaccaaggatgacacggtcacggttgagtacaccggtcgtctgattgatggtcaagtgtttgacagcacggataaaaccggcaagccagcaacattcaaagtgtctcaggttattcctggctggactgaagccctgcaattaatgcctgccggctccgtctgggaagtttatgttcctgcttccttagcttacggtccacgcagtgttggcggacccattggcccgaatgaaaccttgattttcaaaattcatttgatttctgtcaaaaagtctgacgcgtaa

SEQ ID NO: 154072 - protein, 248 aa, Legionella rubrilucens
MKIKLVAAAVVGLAMTTAFADTNTTAPSTTTPATAATPATLNTDIDKLSYSIGADLGKNFKKQGIEISPSAMAKGLQDGMSGSQLLLTEDQMKDVLSKFQKDLMAKRNAEFTKKAEENKSKGEAFLSQNKSKEGVVTLPSGLQYKIIEKGNGAKPTKDDTVTVEYTGRLIDGQVFDSTDKTGKPATFKVSQVIPGWTEALQLMPAGSVWEVYVPASLAYGPRSVGGPIGPNETLIFKIHLISVKKSDA

SEQ ID NO: 154073 - DNA, 702 bp, Legionella sainthelensi
  CDS (1)..(702): transl_table=11
atgaagatgaaattggtcactgcggccattatggggttggcaatgtctacagcaatggctgcaactgatgctacatcgcttactacggacaaagataaattatcttatagtattggtgctgatttaggaaaaaactttaaaaatcaaggcattgacattaatccagacgtattagctaaaggaatgcaagatggaatgtctggtgctcaattgattttgactgaagaacaaatgaaagatgttctgagtaaatttcagaaagatttgatggctaagcgtagcgctgaatttaataaaaaagcagaagagaacaaagcgaaaggtgaagcgttcttatctgctaacaaatcaaagcctggaatagtagtgttaccaagtggtttgcagtataaaattattgatgctggtactggtgcgaaacccggtaaatcagatactgtaactgttgaatatactggtacattaattgacggtactgtatttgacagtactgaaaaagcaggcaagccggcgacatttcaagtatctcaagtaattcctggttggacagaagcattacaattaatgccttctggttctacatgggaagtttatgttccagcagatttagcttatggcccacgtagtgtaggtggccctataggtccaaatgaaacattgatcttcaaaattcatttgatttcagtaaaaaaagcagcctaa

SEQ ID NO: 154074 - protein, 233 aa, Legionella sainthelensi
MKMKLVTAAIMGLAMSTAMAATDATSLTTDKDKLSYSIGADLGKNFKNQGIDINPDVLAKGMQDGMSGAQLILTEEQMKDVLSKFQKDLMAKRSAEFNKKAEENKAKGEAFLSANKSKPGIVVLPSGLQYKIIDAGTGAKPGKSDTVTVEYTGTLIDGTVFDSTEKAGKPATFQVSQVIPGWTEALQLMPSGSTWEVYVPADLAYGPRSVGGPIGPNETLIFKIHLISVKKAA

SEQ ID NO: 154075 - DNA, 702 bp, Legionella santicrucis
  CDS (1)..(702): transl_table=11
atgaagatgaaattggtcactgcggccattatggggctagcaatgtctacggcaatggctgcaactgatgctacatcgcttactacggacaaagataaattatcttatagtattggtgctgatttaggaaaaaatttcaaaaatcaaggtattgacattaatccagaagcattagctaaaggaatgcaagatggtatgtctggcgctcaattgattttgactgaagagcaaatgaaagacgttctgagtaaatttcaaaaagatctgatggctaagcgtagtgctgaatttaataaaaaagcagaagaaaacaaagcaaaaggtgatgctttcttatctgctaataagtcaaagcctggaatagtggtgttaccaagtggtttgcagtataaaattattgatgccggtactggttcaaaaccaggtaaatcagatactgtaactgttgaatatactggtactttaattgatggtactgtctttgatagcactgaaaaagcaggcaagccagctacatttcaagtatcacaagtaatccctggttggacagaagcattacaattaatgccttctggttctacatgggaagtttatgttcctgcagatttagcctatggttcacgtagtgtaggtggtcctataggtccaaatgaaactttgattttcaaaattcatttgatttctgtaaaaaaagcagcctaa

SEQ ID NO: 154076 - protein, 233 aa, Legionella santicrucis
MKMKLVTAAIMGLAMSTAMAATDATSLTTDKDKLSYSIGADLGKNFKNQGIDINPEALAKGMQDGMSGAQLILTEEQMKDVLSKFQKDLMAKRSAEFNKKAEENKAKGDAFLSANKSKPGIVVLPSGLQYKIIDAGTGSKPGKSDTVTVEYTGTLIDGTVFDSTEKAGKPATFQVSQVIPGWTEALQLMPSGSTWEVYVPADLAYGSRSVGGPIGPNETLIFKIHLISVKKAA

SEQ ID NO: 154077 - DNA, 708 bp, Legionella spiritensis
  CDS (1)..(708): transl_table=11
atgaagatgaaactggtcgctgcagctgccttgggtttggcaatgtcaacgacgcatgctgtaaccgatactactacgaacttaaatacggataccgataaattgtcttatagtattggggctgatttaggtaaaaacttcaaaaaacagggtattgatatcagtccggccgcaatggcaaaagggatccaggatggcatgagcggtggtgagctgatgatgaccgaccagcagatgaaagatgtgctcaataaatttcagaaagatttaatggccagacgaagtgcggaatttgccaaaaaatcagaagaaaacaaagccagaggcgagacgtttcttagccagaataaaaccaaggatggcgtggtaactttgccaagcggcctgcaatataaagttattgaaaaaggcaatggcgccaagccaagtaaagacgatgtcgtcacggttgaatacaccggacgattgattgacggacaggtttttgacagcacggaaaaaacaggcaaaccggcgacatttaaagtgtctcaggttattccgggatggactgaagcgttacaattgatgccggcagggtctacctgggaagtatatattcctgcttctctggcctatggctcacgcagcgttggcggcccaatcggacccaacgaaacactcatttttaaaatccatttgatttccgtcaaaaaaacggacgcataa

SEQ ID NO: 154078 - protein, 235 aa, Legionella spiritensis
MKMKLVAAAALGLAMSTTHAVTDTTTNLNTDTDKLSYSIGADLGKNFKKQGIDISPAAMAKGIQDGMSGGELMMTDQQMKDVLNKFQKDLMARRSAEFAKKSEENKARGETFLSQNKTKDGVVTLPSGLQYKVIEKGNGAKPSKDDVVTVEYTGRLIDGQVFDSTEKTGKPATFKVSQVIPGWTEALQLMPAGSTWEVYIPASLAYGSRSVGGPIGPNETLIFKIHLISVKKTDA

SEQ ID NO: 154079 - DNA, 699 bp, Legionella steigerwaltii
  CDS (1)..(699): transl_table=11
atgaagatgaaattggtcactgcggccattatggggctggcaatgtctactgcaatggctgctactgatgctacatcgcttgttacggataaagataagttatcttatagtattggtgctgatttaggaaaaaacttcaaaaatcaaggtattgatattaatccggacgcattagctaaaggaatgcaagatggaatgtctggtgcccaattgattttgaccgaacaacaaatgaaagatgttctgaacaaatttcagaaagatttgatggcaaaacgtagcgctgagttcaataaaaaagctgaagagaacaaggctaaaggggaagctttcttatcatctaacaaatcaaaatctggtgtagttgtattgccaagtggcttacaatacaaaattattgaagcaggtacaggaaacaaaccaggtaaatctgatacagtaactgttgaatatactggtactttaattgatggtactgtgtttgatagcactgagaaaacaggcaagcctgctacattccaagtatcacaagtgattcccggttggactgaagcattacaattaatgcctgctggctctacttgggaaatttttgttccttcagacttagcttatggcccacgtagcgtaggtggtcctattggtccaaatgaaactttgattttcaaaattcatttgatctctgtgaaaaaagcctaa

SEQ ID NO: 154080 - protein, 232 aa, Legionella steigerwaltii
MKMKLVTAAIMGLAMSTAMAATDATSLVTDKDKLSYSIGADLGKNFKNQGIDINPDALAKGMQDGMSGAQLILTEQQMKDVLNKFQKDLMAKRSAEFNKKAEENKAKGEAFLSSNKSKSGVVVLPSGLQYKIIEAGTGNKPGKSDTVTVEYTGTLIDGTVFDSTEKTGKPATFQVSQVIPGWTEALQLMPAGSTWEIFVPSDLAYGPRSVGGPIGPNETLIFKIHLISVKKA

SEQ ID NO: 154081 - DNA, 705 bp, Legionella wadsworthii
  CDS (1)..(705): transl_table=11
atgaagatgaaattggtcaatgcggccattttagggctggcaatgtctactgcaatggctgctaccgatgctacatcgcttgttacggataaggataaattatcttacagtattggtgctgatttaggaaaaaacttcaaaactcaaggtattgatatcaatccggacgcattagctaagggaatgcaagatggaatgtctggtgcccaattgattttgactgaacaacaaatgaaagatgttctcaataaattccagaaagatttgatggctaagcgtagcgctgagtttaataaaaaagctgaagaaaacaaatctaaaggcgattcattcttatcatcaaacaaaagcaaatctggtgttgtcgtattaccaagcggtttgcaatataaagtgattgaagcaggtacaggaaataagcccagtaagacagatactgttactgtagaatacaccggtacattaattgatggtactgtatttgacagcacagaaaaaacggggaaaccagctacattccaagtatcacaagttattcctggctggactgaagcattacaattaatgcctgctggttctacgtgggaaatctatgtcccttcagacttagcttacggtccacgtagtgtaggtggtccaataggtccaaatgaaactttaatatttaaaattcatttgatctctgtgaaaaaagcttctgcataa

SEQ ID NO: 154082 - protein, 234 aa, Legionella wadsworthii
MKMKLVNAAILGLAMSTAMAATDATSLVTDKDKLSYSIGADLGKNFKTQGIDINPDALAKGMQDGMSGAQLILTEQQMKDVLNKFQKDLMAKRSAEFNKKAEENKSKGDSFLSSNKSKSGVVVLPSGLQYKVIEAGTGNKPSKTDTVTVEYTGTLIDGTVFDSTEKTGKPATFQVSQVIPGWTEALQLMPAGSTWEIYVPSDLAYGPRSVGGPIGPNETLIFKIHLISVKKASA

SEQ ID NO: 154083 - DNA, 702 bp, Legionella worsleiensis
  CDS (1)..(702): transl_table=11
atgaagatgaaattggtcgctgcagccgtcttggggctggcaatgtctggtgcaatggcagctgatgctacatccttaactacagacaaagataaattgtcttacagtatcggtgctgatttgggaaagaattttaaaaatcagggtatagatgtgaatccagaggcattggctaaaggaatgcaagacgggatgagtggcacgcaattaatccttacagaacagcaaatgaaagacgttcttaataaattccaaaaagatttaatggcaaaacgcacctcggaattcaataagaaagccgatgaaaacaaattaaaaggcgaagcctttttaactgcaaataaaactaaagccggtgttgtagttctgcccagcggcttgcaatataaaattttagatgccggtacaggcaccaagcccggtaaatcagatacagtgactgtagagtatactggtcgtttaattgacggcactatatttgacagttcagacaaaactggtaaaccagcaacattccaggtgtcacaagttattcctggatggactgaggctctgcaattaatgccagctggatctacctgggagatttatgttccagcggctctggcttatggttcacgcagtattggcggacctattggacccaatgaaactttgattttcaaaattcatttgatttctgttaaaaaatctgatgcctaa

SEQ ID NO: 154084 - protein, 233 aa, Legionella worsleiensis
MKMKLVAAAVLGLAMSGAMAADATSLTTDKDKLSYSIGADLGKNFKNQGIDVNPEALAKGMQDGMSGTQLILTEQQMKDVLNKFQKDLMAKRTSEFNKKADENKLKGEAFLTANKTKAGVVVLPSGLQYKILDAGTGTKPGKSDTVTVEYTGRLIDGTIFDSSDKTGKPATFQVSQVIPGWTEALQLMPAGSTWEIYVPAALAYGSRSIGGPIGPNETLIFKIHLISVKKSDA

SEQ ID NO: 154085 - DNA, 633 bp, uncultured bacterium 463
  CDS (1)..(633): transl_table=11
atggcactactccccgaggtggaattgaccaccgatgaacagaaagtcagctacggttttggcctgcaatttggcgatcaattgcgtcgcaacagcttcgatggtttggacctggaagcggtaattggcggcatccgccactggtatgaccatcagcaggcacagcttagcgacgccgaaattaatcccagctacaaagttattcaggaccggcagcaggccatcgcctccgagcttgccggtaagcgccaggctttggccgagcagtttatgaggactaacgctgagcgcgatgaagttagtgtcactgaaagtggcctgcagtatgaagtgctggaggtgggcagcggcgaaacgcccggactgacgtccacggtggtgacgcattatcacggtacgtttgtcgacggcggcgtgtttgacagctcagtggagcgcggcgagccggctgaatttggcgtcaaccaggtgatacctggctggaccgaggccctgcagttgatgtcagtgggcgacaaatggcgcattgcctgtcctcccacgctcgcctatggcgaacagggtgcgggggattccattcctcccaatacggccctggtgtttgagattcacctgattgccatcaaggactaa

SEQ ID NO: 154086 - protein, 210 aa, uncultured bacterium 463
MALLPEVELTTDEQKVSYGFGLQFGDQLRRNSFDGLDLEAVIGGIRHWYDHQQAQLSDAEINPSYKVIQDRQQAIASELAGKRQALAEQFMRTNAERDEVSVTESGLQYEVLEVGSGETPGLTSTVVTHYHGTFVDGGVFDSSVERGEPAEFGVNQVIPGWTEALQLMSVGDKWRIACPPTLAYGEQGAGDSIPPNTALVFEIHLIAIKD

SEQ ID NO: 154087 - DNA, 618 bp, Shewanella sp
  CDS (1)..(618): transl_table=11
atgtcagatttgttcagcactatggaacagcatgctagctacggtgtaggtcgtcaaattggcgagcaactagcagcaaactcttttgaaggtattgatatccctgctgttcaagctggtcttgctgatgcatttgccgggaaagaaagcgcagtatcaatggaagagcttcaagttgcatttactgaaattagtcgtcgtttacaagcagcacaagaagctgctgcagaagctgctgccgctgaaggtgatacattcctagctgaaaacgctaagcgtgacggtattacgatcacagagtctggtcttcaatacgaagtacttgttcaaggcgacggtgaaacaccaacgtatgattcaactgtacgtactcattaccatgggactttcatcagtggtgatgtgttcgatagttctgttgctcgtggccagcctgctgagttcccagtatctggcgttatcgccggttggactgaagcattacagttaatgccagttggcactaagcttaaattatatgtcccacatcacttggcttacggtgagcggggcgcgggtgcttcaatcccgccttattcggctttggtcttcgaagttgaattgttagaaattatctag

SEQ ID NO: 154088 - protein, 205 aa, Shewanella sp
MSDLFSTMEQHASYGVGRQIGEQLAANSFEGIDIPAVQAGLADAFAGKESAVSMEELQVAFTEISRRLQAAQEAAAEAAAAEGDTFLAENAKRDGITITESGLQYEVLVQGDGETPTYDSTVRTHYHGTFISGDVFDSSVARGQPAEFPVSGVIAGWTEALQLMPVGTKLKLYVPHHLAYGERGAGASIPPYSALVFEVELLEII

SEQ ID NO: 154089 - DNA, 702 bp, Legionella cincinnatiensis
  CDS (1)..(702): transl_table=11
atgaagatgaaattggtcactgcggccattatggggctggcaatgtctacagcaatggctacaactgatgctacatcgcttactacggacaaagataaattatcttatagtattggtgctgatttaggaaaaaactttaaaaatcaaggtattgacattaatccagaggcattagctaaaggaatgcaagatggaatgtctggggctcaattgattttgactgaagagcaaatgaaagatgttctgagtaaatttcaaaaagatctgatggctaagcgtagtgctgaatttaataaaaaagcagaagaaaacaaagcaaaaggtgaagctttcttatctgctaataagtcaaagcctgggatagtagtgttaccaagtggtttgcagtataagattattgatgccggtactggtgcaaaaccaggtaagtcagacactgtaactgttgaatatactggaactttaattgacggtactgtatttgatagcactgaaaaagcaggtaagccagctacatttcaagtatcgcaagtaatccctggttggacagaagcattacaattaatgccttctggttctacatgggaagtttatgttcctgctgatttagcttatggtccacgtagtgtaggtggtcctataggtccaaatgaaactttgatcttcaaaattcatttgatttctgtaaaaaaagcagcctaa

SEQ ID NO: 154090 - protein, 233 aa, Legionella cincinnatiensis
MKMKLVTAAIMGLAMSTAMATTDATSLTTDKDKLSYSIGADLGKNFKNQGIDINPEALAKGMQDGMSGAQLILTEEQMKDVLSKFQKDLMAKRSAEFNKKAEENKAKGEAFLSANKSKPGIVVLPSGLQYKIIDAGTGAKPGKSDTVTVEYTGTLIDGTVFDSTEKAGKPATFQVSQVIPGWTEALQLMPSGSTWEVYVPADLAYGPRSVGGPIGPNETLIFKIHLISVKKAA

SEQ ID NO: 154091 - DNA, 732 bp, Legionella micdadei
  CDS (1)..(732): transl_table=11
atgaagatgagattggtcgctgcagctgccatgggtttggcaatgtcaacgacaatagctgcaaccgctacaactgatgcgacaacttctgcaccaggaacatcattgactacagacacagaaaagctctcatacagcattggtgctgatttgggtaagaattttaaaaagcagggaatagaaattagtcctgctgctatggcaaaaggtttacaagatggaatgagcggcggccaattgttgctgaccgacgaccagatgaaggatgtgctaaataagtttcaaaaagatctaatgatgaaacgcagcgcagaattcaataagaaagctgaagagaataagtcgaaaggagaagctttccttaacgaaaataaatcaaaagaaggtgttgttagtttacctagcggtttgcagtataagatccttgaacgaggcgatggtgctaaaccgaccaaggatgacgtcgttactgtggaatacaccggcaagctgattgacggtcaggttttcgacagtactgaaaagacaggcaaacctgcaacctttaaagtttctcaagttattccaggttggactgaagcactgcaattaatgccagcaggttctacttgggaagtgtatatcccttccaatctggcttatggcccacgtagcgttggcggcccaattggacctaatgaaactttaattttcaaaattcatctgatttcagtgaagaaatctgacgcgtaa

SEQ ID NO: 154092 - protein, 243 aa, Legionella micdadei
MKMRLVAAAAMGLAMSTTIAATATTDATTSAPGTSLTTDTEKLSYSIGADLGKNFKKQGIEISPAAMAKGLQDGMSGGQLLLTDDQMKDVLNKFQKDLMMKRSAEFNKKAEENKSKGEAFLNENKSKEGVVSLPSGLQYKILERGDGAKPTKDDVVTVEYTGKLIDGQVFDSTEKTGKPATFKVSQVIPGWTEALQLMPAGSTWEVYIPSNLAYGPRSVGGPIGPNETLIFKIHLISVKKSDA

SEQ ID NO: 154093 - DNA, 780 bp, Escherichia coli O157
  CDS (1)..(780): transl_table=11
atgatgtccgtggtaaacccgcctttattatattcatacgggatattgctattgtttctttttccctgggatttgtcatcattcccgcgacaaagttttacccaaagaagtgtggctgatatgctgcccgctactttataccctaagaaaggaaatacgatgaccaccccaacttttgacaccatcgaagcgcaagcaagctacggcattggtttgcaggtagggcaacaactgagtgaatctggcctggaagggctgctgccagaagcactggttgcaggtattgccgatgcgctggaaggcaaacatccggctgttccggttgatgtggtgcatcgcgcgctgcgtgaaatccacgagcgcgccgatgccgttcgtcgtcagcgtttccaggcgatggctgctgaaggtgtgaaatacctggaagaaaacgccaaaaaagaaggtgtgaatagcaccgaatctggcctgcaattccgcgtgatcaaccagggtgaaggcgcaattccggcacgtaccgaccgcgttcgtgttcattacaccggtaaactgatcgacggcaccgtgtttgacagctccgttgctcgtggtgaacccgctgaatttccggttaatggcgtgatccctggctggattgaagcactgactctgatgccggtaggttctaaatgggaactgactatcccgcaggaactggcatatggcgagcgcggcgcaggcgcatccatccctccgttcagcaccctggtgtttgaagtcgaactgctggaaatcctctaa

SEQ ID NO: 154094 - protein, 259 aa, Escherichia coli O157
MMSVVNPPLLYSYGILLLFLFPWDLSSFPRQSFTQRSVADMLPATLYPKKGNTMTTPTFDTIEAQASYGIGLQVGQQLSESGLEGLLPEALVAGIADALEGKHPAVPVDVVHRALREIHERADAVRRQRFQAMAAEGVKYLEENAKKEGVNSTESGLQFRVINQGEGAIPARTDRVRVHYTGKLIDGTVFDSSVARGEPAEFPVNGVIPGWIEALTLMPVGSKWELTIPQELAYGERGAGASIPPFSTLVFEVELLEIL

SEQ ID NO: 154095 - DNA, 711 bp, Legionella pneumophila serogroup 8
  CDS (1)..(711): transl_table=11
atgaagatgaaattggtgactgcagctgttatggggcttgcaatgtcaacagcaatggctgcaaccgatgccacatcattagctacagacaaggataagttgtcttatagcattggtgccgatttggggaagaattttaaaaatcaaggcatagatgttaatccggaagcaatggctaaaggcatgcaagacgctatgagtggcgctcaattggctttaaccgaacagcaaatgaaagacgttcttaacaagtttcagaaagatttgatggcaaagcgtactgctgaattcaataagaaagcggatgaaaataaagtaaaaggggaagcctttttaactgaaaacaaaaacaagccaggcgttgttgtattgccaagtggtttgcaatacaaagtaatcaattctggaaatggtgttaaacccggaaaatcggatacagtcactgtcgaatacactggtcgtctgattgatggtaccgtttttgacagtaccgaaaaaactggtaagccagcaacttttcaggtttcacaagttatccctggatggacagaagctttacaattgatgccagctggatcaacctgggaaatttatgttccctcaggtcttgcatatggcccacgtagcgttggcggacctattggcccaaatgaaactttaatatttaaaattcacttaatttcagtgaaaaaatcatctaagtttttttga

SEQ ID NO: 154096 - protein, 236 aa, Legionella pneumophila serogroup 8
MKMKLVTAAVMGLAMSTAMAATDATSLATDKDKLSYSIGADLGKNFKNQGIDVNPEAMAKGMQDAMSGAQLALTEQQMKDVLNKFQKDLMAKRTAEFNKKADENKVKGEAFLTENKNKPGVVVLPSGLQYKVINSGNGVKPGKSDTVTVEYTGRLIDGTVFDSTEKTGKPATFQVSQVIPGWTEALQLMPAGSTWEIYVPSGLAYGPRSVGGPIGPNETLIFKIHLISVKKSSKFF

SEQ ID NO: 154097 - DNA, 702 bp, Legionella pneumophila serogroup 1
  CDS (1)..(702): transl_table=11
atgaagatgaaaacggtgactgcagctgttatggggcttgcaatgtcaacagcaatggctgcaaccgatgccacatcattagctacagacaaggataagttgtcttatagcattggtgccgatttggggaagaattttaaaaatcaaggcatagatgttaatccggaagcaatggctaaaggcatgcaagacgctatgagtggcgctcaattggctttaaccgaacaacaaatgaaagacgttcttaacaagtttcagaaagatttgatggcaaagcgtactgctgaattcaataagaaagcggatgaaaataaagtaaaaggggaagcctttttaactgaaaacaaaaacaagccaggcgttgttgtattgccaagtggtttgcaatacaaagtaatcaattctggaaatggtgttaaacccggaaaatcggatacagtcactgtcgaatacactggtcgtctgattgatggtaccgtttttgacagtaccgaaaaaactggtaagccagcaacgttccaggtttcacaagttatccctggatggacagaagctttgcaattgatgcccgctggatcaacttgggaaatttatgttccctcaggtcttgcatatggcccacgtagcgttggcggacctattggcccaaatgaaactttaatatttaaaattcacttaatttcagtgaaaaaatcatcttaa

SEQ ID NO: 154098 - protein, 233 aa, Legionella pneumophila serogroup 1
MKMKTVTAAVMGLAMSTAMAATDATSLATDKDKLSYSIGADLGKNFKNQGIDVNPEAMAKGMQDAMSGAQLALTEQQMKDVLNKFQKDLMAKRTAEFNKKADENKVKGEAFLTENKNKPGVVVLPSGLQYKVINSGNGVKPGKSDTVTVEYTGRLIDGTVFDSTEKTGKPATFQVSQVIPGWTEALQLMPAGSTWEIYVPSGLAYGPRSVGGPIGPNETLIFKIHLISVKKSS

SEQ ID NO: 154099 - DNA, 726 bp, Actinobacillus actinomycetemcomitans
  CDS (1)..(726): transl_table=11
atgttaaaaatgaagaaaatttcagtgccggtgctgattttaagtgcggtcgtttctagcggtgttttggcggaaagcaaaactgatgcaaaatttaccgatgattcctcttacgcggtaggcgtattattcggttccgatttacaaggcttaattaacgcacaaaaaggcatgattgattacaacaatgcgaaagtgattgccgggatttccgacgtgttaaacggcaaagtaaaattggaaggcaacaaagaaatcgcctctaccttgcaaggcattaatgccaagttaaaagcggaaaatgaaaaacgtgtcgccgtcatggtgaaaaaagcggaagaagaaggcaaaaaattcacggcagaatttgctaagaaagatggcgtgaagaaaactgcttccggtttgttatatcgtgtggaaaaagaagggtccggtgatgccattaaagctgccgatgtggttaaagttcactataccggtaaattgccggacggtaccgtatttgacagctcccgtgagcgtggaacgcctgctgagtttccattaaatcaagtgattaaaggttggaccgaaggtctgcaattagttaaaaaaggcggacaaattgagttggtcattccggcggacttggggtacggtgaggacggtgcgggcgataaaattccaccgcattccacactttactttgatattgaagtattggacgtcaccccggcgaaataa

SEQ ID NO: 154100 - protein, 241 aa, Actinobacillus actinomycetemcomitans
MLKMKKISVPVLILSAVVSSGVLAESKTDAKFTDDSSYAVGVLFGSDLQGLINAQKGMIDYNNAKVIAGISDVLNGKVKLEGNKEIASTLQGINAKLKAENEKRVAVMVKKAEEEGKKFTAEFAKKDGVKKTASGLLYRVEKEGSGDAIKAADVVKVHYTGKLPDGTVFDSSRERGTPAEFPLNQVIKGWTEGLQLVKKGGQIELVIPADLGYGEDGAGDKIPPHSTLYFDIEVLDVTPAK

SEQ ID NO: 154101 - DNA, 831 bp, Porphyromonas gingivalis
  CDS (1)..(831): transl_table=11
atgaaaaaaacaattgcaattatcgcctcagccctcttggctttaggagccgtcggctgtaagaaaaatgctgacactaccgctgtcagtgaaaaggatagcatagccttgtccatgggtattttgtacggacaggattttgccaatcagttcgaaatgtcccgcttgcaaggccagccgattgattcggtagctttcttggacggtttcaaatatggtatcgatacgacgcgcttctcgtacaatctgggagccatctatgcttccaatatagctcgtcagctggctcatgattccatcgatatcgacaagttctatgcagccatgcgtgcggctcttcttaaagacaccgtatctatcgccatgaagcctgcagatgcacaggctttcatgcaacgaatccaagccagaaagcagcgagaaaacaatatgaagcagtttggccagaacatcgaaaagggtaatgaatacatcgatacctttaaaaaagaagatggtgtaactgttacgacaagtggtctggcatacaagactcttcaggaaggtacgggagctactccctctttggccgatactgtacgtgtcaagtatgtgggtactctggtcgatggtaaagagttcgacaaaaacgaagaaggaatcgaatttgccgttaccggtgtgattaaaggctggacggagatgctccaactcatgaaggtcggtcagaaagttcgcgtggtaatcccacaggagctggcttatggggagaccggcaactataccatcgaaccgttctctaccctgacgttcgagatggaacttatcgggatcaagcccgggaaaaagtaa

SEQ ID NO: 154102 - protein, 276 aa, Porphyromonas gingivalis
MKKTIAIIASALLALGAVGCKKNADTTAVSEKDSIALSMGILYGQDFANQFEMSRLQGQPIDSVAFLDGFKYGIDTTRFSYNLGAIYASNIARQLAHDSIDIDKFYAAMRAALLKDTVSIAMKPADAQAFMQRIQARKQRENNMKQFGQNIEKGNEYIDTFKKEDGVTVTTSGLAYKTLQEGTGATPSLADTVRVKYVGTLVDGKEFDKNEEGIEFAVTGVIKGWTEMLQLMKVGQKVRVVIPQELAYGETGNYTIEPFSTLTFEMELIGIKPGKK

SEQ ID NO: 154103 - DNA, 732 bp, Amoeba proteus symbiotic bacterium
  CDS (1)..(732): transl_table=11
atgaagatgagactggtcgctgcaactgtcataggtttggcaatgtcaacgacaatggctgcaagcgctgcacctgacgcagcaactactgcgtcatctgcaacatcattgactactgatatggataagctgtcttacagtatcggcgctgatttaggtaagaatctcaaaaaacagggtattgatatcagtcctgctgcgatggccaaggggttacaagacggtataagcggtggccaattgttgttgactgagcagcaaatgaaggatgtgttgaataaatttcaaaaagatttaatggcgagacgaacggctgattttaataaaaaggctgaagaaaataaaacaaagggcgactcttttttaaaccaaaataaaggaaaagacggcgtagtcagtttgccaagtggtttgcagtataaggtcattcaaaaaggcgatggggcaaaaccttccaaagaagacacagtgactgtcgactatacgggtacattacttgatggccaagtttttgatacgactgaaaaaacgggtaagcctgctacgtttaaagtatcacaggtcattcctggctggactgaggcactgcaattaatgcccgcaggctctacctgggaagtgtttgttcctgcaggtcttgcttatggtccgcgtagcgttggcggacctattggcccaaatgaaactttaatattcaaaattcacctaatttcagtgaaaaaatcatcttaa

SEQ ID NO: 154104 - protein, 243 aa, Amoeba proteus symbiotic bacterium
MKMRLVAATVIGLAMSTTMAASAAPDAATTASSATSLTTDMDKLSYSIGADLGKNLKKQGIDISPAAMAKGLQDGISGGQLLLTEQQMKDVLNKFQKDLMARRTADFNKKAEENKTKGDSFLNQNKGKDGVVSLPSGLQYKVIQKGDGAKPSKEDTVTVDYTGTLLDGQVFDTTEKTGKPATFKVSQVIPGWTEALQLMPAGSTWEVFVPAGLAYGPRSVGGPIGPNETLIFKIHLISVKKSS

SEQ ID NO: 154105 - DNA, 807 bp, Aeromonas hydrophila
  CDS (1)..(807): transl_table=11
atgaacaattttctgaaggtgtccctgttggccgcggcagttgccgtaagtctgactgcttgccaaaaagacgagaagactgctgcgaataccgcagaggtcaaggcagaagccagcaagccggcagaggcccccaaggctgaagccaagagctttgaagagcaatccggctatgcaattggcctctccatgggtcgttatatcgccaataccctggaacgtcagcaggaactcggcatcaagctggacaacagcgtcatcctcaagggtgtgaccgacggtctgggcaaagaagccaagatgaccgacgaggagatccagaaggttctgcagcagtacgacgccaagatcaacgagctgaccaaggccaaggctgacaaggatgccgtggaaaaccagaagaagggtgaagagtacctggctgccaacgccaagaaagagggcgtgaagagcaccgaatccggcctgcaataccaggtcgagaagatgggtaccggcgccaagccgaaggccaccgacatcgtcaaggtccactacaccggtaccctgaccgatggcaccaagttcgacagctccgtcgatcgcggtgagccggccaccttcccgctcaaccaggtgatcccgggctggaccgaaggcgtgcagctgatgccggtcggttccaagttcaagttcttcctgccgtccaagctggcctatggcgaacacggtgcgggttccatcccggccaatgccgtgctggtattcgacgttgagctgctggctatcgagaaaccggctgccgatggcgacaacgccaagaagtaa

SEQ ID NO: 154106 - protein, 268 aa, Aeromonas hydrophila
MNNFLKVSLLAAAVAVSLTACQKDEKTAANTAEVKAEASKPAEAPKAEAKSFEEQSGYAIGLSMGRYIANTLERQQELGIKLDNSVILKGVTDGLGKEAKMTDEEIQKVLQQYDAKINELTKAKADKDAVENQKKGEEYLAANAKKEGVKSTESGLQYQVEKMGTGAKPKATDIVKVHYTGTLTDGTKFDSSVDRGEPATFPLNQVIPGWTEGVQLMPVGSKFKFFLPSKLAYGEHGAGSIPANAVLVFDVELLAIEKPAADGDNAKK

SEQ ID NO: 154107 - DNA, 726 bp, Buchnera aphidicola subsp
  CDS (1)..(726): transl_table=11
atgatattatatgttccaaaatctttttcaatttcagcgcctatatcagatatacatttgcaatctgttttagaaacaaaaaatacatttcataataataatgaaaagttaggttatattttaggtctatccttcggtaattatgtaaaccaaacttttgaaaaacaaaaaaaaataggaatcgagttagataggaatagtcttttaaaaggaatacaagatgctatatctggaaatttaaaactctcgcatcaagatatttcttcgggtctaaaagaactagaaaaaaaattaaaacatgcgactaaaattcaattgaaaaaaaacgcaaaagaaaattttattcaaggagaattatatatgaaaaatttttctaaattaaagggtgtaaaaaaaacgtctagtggtcttctatatcttttagaaagagctggagaaggagaagcattaaaagacgagacgaaaatcactgttcattataaaggtacactaattaatggtttggaatttgataattcttacaaaagaggtagacctgtatctctaagattaaaagatgttatcttaggctggaaagaaggattaaaatatataaagaaaggcggtaaaataaaattagtaatacctcccaacttggcatatggaacagaagaagttaatggtattccagcaaattctactctcatctttgatatagaactattagatgtagttaatggagtatag

SEQ ID NO: 154108 - protein, 241 aa, Buchnera aphidicola subsp
MILYVPKSFSISAPISDIHLQSVLETKNTFHNNNEKLGYILGLSFGNYVNQTFEKQKKIGIELDRNSLLKGIQDAISGNLKLSHQDISSGLKELEKKLKHATKIQLKKNAKENFIQGELYMKNFSKLKGVKKTSSGLLYLLERAGEGEALKDETKITVHYKGTLINGLEFDNSYKRGRPVSLRLKDVILGWKEGLKYIKKGGKIKLVIPPNLAYGTEEVNGIPANSTLIFDIELLDVVNGV

SEQ ID NO: 154109 - DNA, 759 bp, Buchnera aphidicola subsp
  CDS (1)..(759): transl_table=11
atgattgtttttttattaaaaagaattttattattatatttaattttttttgttccgaaatctttttcagaaaacctacctttttttaaaattaaatcttattcagagaagaaagaattttttcaaaatgataacgaaaaagtaggatactctttaggagtatctttaggtaattatgtaaatgaatcttttgaaagacaaaaaaaaatgggaataaacttagacaaatataatattttgttaggagtacaagacgctatttcaggtaatttaaaattatcaaatgaagaaatttcaacaattcttcaaaaattagaaaaaaatttgaagaatgcagcaaaaattgaatttgaaaaaagtgaaaaagaaaacttaattcaaggaaaattatatatgaaaaaattttctgaaatgaaaggagtaagtaaaacctctagcggtcttttatatattattgataaattaggtgaaggtgaagagataaaaacaaaaaatgcagaaattacagttcattataaaggatcactaatcaatggtacagaatttgacagttcttataaacgaggaaagcctataacattaatgttaaaagatgttatattaggttggcaagaaggtttaaagtatattaaaaaaggtggtaaaattaaattaatcatacctcctaatttagggtacggaagcaatagaattaatgaaataccagcaaattctattttaatttttgatatagaattattagatatcaaaaatatttaa

SEQ ID NO: 154110 - protein, 252 aa, Buchnera aphidicola subsp
MIVFLLKRILLLYLIFFVPKSFSENLPFFKIKSYSEKKEFFQNDNEKVGYSLGVSLGNYVNESFERQKKMGINLDKYNILLGVQDAISGNLKLSNEEISTILQKLEKNLKNAAKIEFEKSEKENLIQGKLYMKKFSEMKGVSKTSSGLLYIIDKLGEGEEIKTKNAEITVHYKGSLINGTEFDSSYKRGKPITLMLKDVILGWQEGLKYIKKGGKIKLIIPPNLGYGSNRINEIPANSILIFDIELLDIKNI

SEQ ID NO: 154111 - DNA, 756 bp, Buchnera aphidicola subsp
  CDS (1)..(756): transl_table=11
atgattttgttgaaaattatacacataatttttgtaatgatttttctatcaatattttttccaaaatctttatatgctagtacatctttgattcgaaaagatcatattattcaaaagaatcttgaaaattttgatgatcaatcagcttatgcgttgggagtatcattaggaaattacattaatcattcttttcgtgagcagaagcgattaggagtgattttagataaaaatagtttattatcaggaataagagactctctttcaggaaagactatattatctgaccaagaaatttcaatggaattaataaaattagaaaaaaaattaaaatattttgaagatatagttttaaagaaggaagcacataataataaaattcaaggagatttatatattaaaaaaatgctaaagaaaaaagatgcgagacacacgtcttcgggtttagttttttttattaagaaaaaaggaagtggtaaatttttgcatgatagtgatgttatcacagttcattataaaggatcattgattaatggtaatgagtttgataattcttacaagcgaggtcaacctttatctttttctttagatagcgttattccaggttggatagaaggtttaaaatatataaaaaaaggtggtttaataaaattagtaataccaccgaaattagcatatggggaaactggagtacctggaattccaggaaattcgactttaatatttgaaatagaattaatagacatacaatctaagtaa

SEQ ID NO: 154112 - protein, 251 aa, Buchnera aphidicola subsp
MILLKIIHIIFVMIFLSIFFPKSLYASTSLIRKDHIIQKNLENFDDQSAYALGVSLGNYINHSFREQKRLGVILDKNSLLSGIRDSLSGKTILSDQEISMELIKLEKKLKYFEDIVLKKEAHNNKIQGDLYIKKMLKKKDARHTSSGLVFFIKKKGSGKFLHDSDVITVHYKGSLINGNEFDNSYKRGQPLSFSLDSVIPGWIEGLKYIKKGGLIKLVIPPKLAYGETGVPGIPGNSTLIFEIELIDIQSK

SEQ ID NO: 154113 - DNA, 621 bp, Escherichia coli
  CDS (1)..(621): transl_table=11
atgaccaccccaacttttgacaccatcgaagcgcaagcaagctacggcattggtttgcaggtagggcaacaactgagtgaatctggcctggaagggctgctgccagaagcactggttgcaggtattgccgatgcgctggaaggcaaacatccggctgttccggttgatgtggtgcatcgcgcgctgcgtgaaatccacgagcgcgccgatgccgttcgtcgtcagcgtttccaggcgatggctgctgaaggtgtgaaatacctggaagaaaacgccaaaaaagaaggtgtgaatagcaccgaatctggcctgcaattccgcgtgatcaaccagggtgaaggcgcaattccggcacgtaccgaccgcgttcgtgttcattacaccggtaaactgatcgacggcaccgtgtttgacagctccgttgctcgtggtgaacccgctgaattcccggttaatggcgtgatccctggctggattgaagcactgactctgatgccggtaggttctaaatgggaactgactatcccgcaggaactggcatatggcgagcgcggcgcaggcgcatccatccctccgttcagcaccctggtgtttgaagtcgaactgctggaaatcctctaa

SEQ ID NO: 154114 - protein, 206 aa, Escherichia coli
MTTPTFDTIEAQASYGIGLQVGQQLSESGLEGLLPEALVAGIADALEGKHPAVPVDVVHRALREIHERADAVRRQRFQAMAAEGVKYLEENAKKEGVNSTESGLQFRVINQGEGAIPARTDRVRVHYTGKLIDGTVFDSSVARGEPAEFPVNGVIPGWIEALTLMPVGSKWELTIPQELAYGERGAGASIPPFSTLVFEVELLEIL

SEQ ID NO: 154115 - DNA, 1224 bp, Yarrowia lipolytica
  CDS (1)..(1224)
atgtctaacaacgccaacaactgccttcccctggcctcctacaccctggccgtgttccccggaattcccgtggcccccattgagcaggacttccctgtttctgtgcgaatcaccatggctgccattgatcccgcccgaattgagggtgatgaggaggagcccgccactctccgaatccttaagcctgccgacaacttcgacgatgaggacgacgaggatgacgaggacgaggatgacgacgatgaggatgacgaagtctctgctgaggacatggctcagatcaagaagctgatcgccgccaacgaggacggtctcgatgaggttgagggaggagacgacgatgaggatgacgacgaggacgacgagatggagttcgaggaggacgatgaggacgacgacgacgagggtgagattgaggactttgttgtctgcactctctcccccaagtttggataccagcagactcttgatctcgttatcacccccggtgagcagatcatgttcgaggtcactggctcctacgccatccacctctccggtaactacattgagcacccctacgacatggaggacgaggatgagctccttgctctcggtgaggacgacgaggatgatgaggacgagctcgacgaaggcgagtacgatctctctcccgatgaggatgaggtcatcaacggtgacgagcgacttgtcgagctcatggagcaggacgacgaggacgatgaggacgatgaggatgaggaggaagagcccgttgtcgagcctaagaagatcctcaagcgagccgccgaggagaagaagcaggagaaggccgccaagaaggccaaggttgccttcaccaagaacctcgagcagggccccactccctccgagcccaagcccaagcttgtcacccgacagcttgagggtggtgtcaagattgaggaccgaaccgtcggtgagggtccttccgccaaggtcggctccaaggtcggtgtccgatacgttggcaagctcgccaacggtaaggtctttgactccaactccaagggtaagcctttctacttctctgtcggtaagggcgaggtcatccgaggatgggacattggtgtccagggtatgaaggtcaagggtgagcgacgaatcattatcccccctggaatggcctacggtaagcagaagctgcccggtatcccccccaactcccagcttactttcgatgttaaggtcgttaacatcaaataa

SEQ ID NO: 154116 - protein, 407 aa, Yarrowia lipolytica
MSNNANNCLPLASYTLAVFPGIPVAPIEQDFPVSVRITMAAIDPARIEGDEEEPATLRILKPADNFDDEDDEDDEDEDDDDEDDEVSAEDMAQIKKLIAANEDGLDEVEGGDDDEDDDEDDEMEFEEDDEDDDDEGEIEDFVVCTLSPKFGYQQTLDLVITPGEQIMFEVTGSYAIHLSGNYIEHPYDMEDEDELLALGEDDEDDEDELDEGEYDLSPDEDEVINGDERLVELMEQDDEDDEDDEDEEEEPVVEPKKILKRAAEEKKQEKAAKKAKVAFTKNLEQGPTPSEPKPKLVTRQLEGGVKIEDRTVGEGPSAKVGSKVGVRYVGKLANGKVFDSNSKGKPFYFSVGKGEVIRGWDIGVQGMKVKGERRIIIPPGMAYGKQKLPGIPPNSQLTFDVKVVNIK

SEQ ID NO: 154117 - DNA, 1413 bp, Aspergillus oryzae
  CDS (1)..(1413)
atgtctgtccaacctgtcgccgtttatgctcttaaggtgcctgctggaggtgcccttattcccgcagtgccagatgctgcggccatgttccgtgtgagcatggctgccatcgatcctgatgaggaacctgacttcgatggacacgatactaaccagcgccccagagccaccctcaggatcgtgcgcgctccccccggcctggatcttgaggacgactcggatgacgactacgaggatgtggactctgatgaagaatccgatgatgaggaacccaatggcggtcctagtgacaaggagaaggctcgcaagctcaaggagctcgccgctctcaaggaaatggaggaagccatggacgaggatgacgaggatgaggatgaggatgaggatggagagttcgatctgaaggctgctatctccaagctcgtcaagggcaagggccccgctactgattccgacgaagatgacgaggaagatgagggcctggaactcgatgagatggtcgtctgcaccctggatacggagaagaacctccaacagcctctggacatcaccgtctctgaggatgagcgtgttttcttcaaggtcaccggtacccacactgtttacttgaccggaaactatgtcatgcccattgacccccatttccacggtgaggacgaggatgaagaagatgaggatgactatgacctttcccctgatgaggacgagttggccctcgaccttatgggcgacgatgacaatgagagtgatgaacttgatggcctcgagaaccccagaatcaccgaggttgacagcgatgaggaaccccccaagcttgttgacaccaagggaaagaacaagcgctctgcccccgccgatgaggagaagcccgcgaagcaggccaacggcgaggaaagcttgagtaagaagcagcagaagaagcttaagaagaacaacggtgatgcagctgctgttgagcagaagaaggaggccaaggaaggaaaggaggccaagaaggtccagttcgctaagaaccttgagcagggccctaccccctccggccaggacaagaagcctgccgagcagaccaccggcacccttggtgtcaaggaggttaagggcgtcaagattgatgacaagaagcttggaaagggacctgccgccaaggccggcaacactgttgccatgagatacattggaaagctcgaggacggcaaggtctttgatgccaacaagaagggcaagcctttcaccttcaagctcggcaagggtgaagtaatcaagggctgggatattggcgttgctggtatggccgttggtggtgagcgccgcatttcgatccctcctcatctggcctacggcaaaaaggctcttcccggcatccccggcaactctaagttgatctttgatgtcaagctgcttgagatcaaatag

SEQ ID NO: 154118 - protein, 470 aa, Aspergillus oryzae
MSVQPVAVYALKVPAGGALIPAVPDAAAMFRVSMAAIDPDEEPDFDGHDTNQRPRATLRIVRAPPGLDLEDDSDDDYEDVDSDEESDDEEPNGGPSDKEKARKLKELAALKEMEEAMDEDDEDEDEDEDGEFDLKAAISKLVKGKGPATDSDEDDEEDEGLELDEMVVCTLDTEKNLQQPLDITVSEDERVFFKVTGTHTVYLTGNYVMPIDPHFHGEDEDEEDEDDYDLSPDEDELALDLMGDDDNESDELDGLENPRITEVDSDEEPPKLVDTKGKNKRSAPADEEKPAKQANGEESLSKKQQKKLKKNNGDAAAVEQKKEAKEGKEAKKVQFAKNLEQGPTPSGQDKKPAEQTTGTLGVKEVKGVKIDDKKLGKGPAAKAGNTVAMRYIGKLEDGKVFDANKKGKPFTFKLGKGEVIKGWDIGVAGMAVGGERRISIPPHLAYGKKALPGIPGNSKLIFDVKLLEIK

SEQ ID NO: 154119 - DNA, 1197 bp, Candida glabrata
  CDS (1)..(1197)
atgtctgatatgttaccgctagctatgtatgctctgaatgtggagccttacacacataccccggccgttttgctggataccccggttactgtacgtataacgatggctgccattgaccccgagccctttgacgaggacaagaagccatccacgttgcgtatcattagacgcaacccagtttacttggatgccggtgaagttgacgaggagaagctgattgaagagttggaaggtgatgaagctgcagaagatggcgatgaggcaagtgatgatgataaagaggaagaggacgaggacgaggacgtggacgaggacgatgaggatgacgatgaggatgacgacggtgaagacgagtatgaagagtgtgtcgtggttactttatccccggagaccagatgccaacaggctatcgatattaccatcgctccagaagaagacgttcaattcctggtgactggttcttacaccatttccctaactggtaactacgtgaagcatccatttgatgaaccgttagaagatctatactctgatgaagatagcgaggagtactctgatgatgagttggaccaagaaatagaagaagatgacgagttggatcacgatgaggctagctctgaagaaagtgatgaggaccaagaattctacgatgctatttccgagggtgatgaagatattgatgaacaattagctaagttagaagagaccagcgatgttgaggctcatttggaggatcttattgcaaaggataacaagaagaaaagaaaacaggaacaactagatgaacaacctgagacaaaaaaatccaaaaagactaaggatgaaaaaaatacaaaggctacagagaatgaaaagaagaataaagcacaagtgttggaaggaggtgttattattgaggaccgtaagataggtgagggtccaaaggctaagaagggctcaaaagttggtatgagatacattggaaagctaaaaaatgggaaagtttttgataaaaataccagcggtaagccattttacttcaaacttcatcgcggtgaagtcataaaaggatgggacattggtgtaactggtatggctattgggggtgagcgtagaattgtgattcctgctccatatgcttacggaaagcaaaccttaccgggtattccagctaactctgagctaacttttgacgttaagttagtttctctaaaataa

SEQ ID NO: 154120 - protein, 398 aa, Candida glabrata
MSDMLPLAMYALNVEPYTHTPAVLLDTPVTVRITMAAIDPEPFDEDKKPSTLRIIRRNPVYLDAGEVDEEKLIEELEGDEAAEDGDEASDDDKEEEDEDEDVDEDDEDDDEDDDGEDEYEECVVVTLSPETRCQQAIDITIAPEEDVQFLVTGSYTISLTGNYVKHPFDEPLEDLYSDEDSEEYSDDELDQEIEEDDELDHDEASSEESDEDQEFYDAISEGDEDIDEQLAKLEETSDVEAHLEDLIAKDNKKKRKQEQLDEQPETKKSKKTKDEKNTKATENEKKNKAQVLEGGVIIEDRKIGEGPKAKKGSKVGMRYIGKLKNGKVFDKNTSGKPFYFKLHRGEVIKGWDIGVTGMAIGGERRIVIPAPYAYGKQTLPGIPANSELTFDVKLVSLK

SEQ ID NO: 154121 - DNA, 1488 bp, Gibberella zeae
  CDS (1)..(1488)
atgtctgctgtgcctggtcccgtttacggcctcgaggtcccgcctggcgagatcttgattcctgccgccatggagttccctgcttcttcgctctcagtcgctggcgcatcatttgcgacaccgcttgtcttgccagctggagacctgaattctaaccagaaaatcttgcagttccgcatcacaatggctgccgtggaccccaccgaggagcccgaggccgatggcgagggcaacatccctaccgtccctcgctctaccctgcgcctcgtcaagcgtgctcttcctggcctcgaggatgaggatgatgagattgacgacgagtacatgaaggcccttcttgctggttcagatgatgaggaggactccgatgaggaggccaacggtggccctagcgaccctgccaaggcaaagaagcagcgacaagctgctgccattaagaagcttctcgagtccgcccaagaggagtccgacgaggagatggaggatgccaagcccaacggcaaggccaagggaaaggccaaggccaccgaggagtccgacgacgatgaggatgaggactccgacgatgacagcgaggagggtgccgaccttgagaactttgtcatctgcactctcgacaccgagaggaactaccagcagcctctcgacatcaccgtcaaccacggcgagaaggtcttctttgttgtcaccggttcccacactatctacctgaccggaaactacatcatggacgatgatgaggatgacgaggactccgaggacgaggatgaatacgatctctctcccgacgagctcgagtacggccttgagggtgacgacagtgatgctagcgacgaccttgatggacttgaggacccccgtgtcgaggagatcgacactgacgaggaggaggcccccaagctcgttgccgccaacaagggaaagaacaagcgcgccgctgaggaggccgctggccttgacgagctcatcaccaaggaggatgctaagctctccaagaagcaacaaaagaagctcaagaacaacaagggcgaggctgtcgctgccgaggagaagaaggacgccaagaaggttcagttcgccaagaaccttgagcagggccctaccggttctactactgagaagcccaagcaggccaaggactccaagcctgccaccggtgtcaaggttgtccagggcgttaccgttgacgaccgaactgttggcaacggccgcactgtcaagagcggcgacactgttggtgtccgatacatcggcaagctccagaacggaaagcagttcgatgccaacaagaagggtaagcctttctccttcaaggccggcaagggccaggtcatcaagggttgggacattggtgtcatcggcatggccattggtggcgaacgccgtcttaccattcccgcccacctcgcctacggctcccgtggcctccccggcattcccgccaacagcaccttgatcttcgatgtcaagcttctggagatcaagtga

SEQ ID NO: 154122 - protein, 495 aa, Gibberella zeae
MSAVPGPVYGLEVPPGEILIPAAMEFPASSLSVAGASFATPLVLPAGDLNSNQKILQFRITMAAVDPTEEPEADGEGNIPTVPRSTLRLVKRALPGLEDEDDEIDDEYMKALLAGSDDEEDSDEEANGGPSDPAKAKKQRQAAAIKKLLESAQEESDEEMEDAKPNGKAKGKAKATEESDDDEDEDSDDDSEEGADLENFVICTLDTERNYQQPLDITVNHGEKVFFVVTGSHTIYLTGNYIMDDDEDDEDSEDEDEYDLSPDELEYGLEGDDSDASDDLDGLEDPRVEEIDTDEEEAPKLVAANKGKNKRAAEEAAGLDELITKEDAKLSKKQQKKLKNNKGEAVAAEEKKDAKKVQFAKNLEQGPTGSTTEKPKQAKDSKPATGVKVVQGVTVDDRTVGNGRTVKSGDTVGVRYIGKLQNGKQFDANKKGKPFSFKAGKGQVIKGWDIGVIGMAIGGERRLTIPAHLAYGSRGLPGIPANSTLIFDVKLLEIK

SEQ ID NO: 154123 - DNA, 1404 bp, Neurospora crassa
  CDS (1)..(1404)
atggccccccttatgcctgtcgccgtttttggcttggaggttcctcctggcgagatcctcattcccgccgcctctgagttccctgctatcattcacatcaccatggccgccctcgatcccaccaaggctcctgaggctgacggccaaggcaacattcccgcgctcccccgctcgaccctgaagatcatcaaggccactggccacgaccatgacgacgatgatgaggaggaggatgagtacctccagtccctcctcggcggcggcgactctgacgacgaggccaacggtggtcccagcgacccttccaagtccaagaaggccaagcaggaggctgccatcaagaagcttatggctgctacccaggaggagtctgatgaggagatggaggatgccaagcccaacggcaagaagggcaagggcaagggcaaggccagcgagtccgacgaggaggagagcgacgaggagagcgactgctgcggcgatgatgacctccagcttgaggactacgttgtctgcacccttgacactgagcgcaactaccagcagcccatcaacatcaccatcggcgagggtgagaaggtcttcttctgtgtccagggtacccactctgtctatctcaccggtaacttcgttgttcccgaggatgacgaggaggacagcgaggatgatgaggatgagtccgacgacgaggattacgactttccccttggtggcgaggatgacgattccgacgatatgagcgacgagctcgacgagctcgatggcaccccccgtgtcaaggagatcacctcggaagacgaggaggaggaggctcccaagcttgtcgacaccagcaagaagggcaagaagcgccccgccgaggacgatgccgagggtctcgatgccatgatctccaaggacgacaagaagctcagcaagaagcaacagaagaagcagaaggttgaggaggccaagaaggaggagcctaagaaggagaccaagtccgacaagaaggtccagttcgccaagaacctcgagcagggccctactggccctgccaaggacaagcttgagaacaagaagcctacctctaccgtcaaggttgtccagggcgtcaccattgatgacaggaaggttggcaccggccgtgccgccaagaacggtgaccgtgttggcatgcgctacatcggaaagctccagaacggcaaggtcttcgactccaacaagaagggtgccccgttctctttcaagctcggcaagggtgaggtgatcaagggttgggacatcggtgttgctggcatggctgtcggtggtgagcgtcgtctcaccatccccgcgcaccttgcctacggcagccgtgcccttcccggcatcccccccaacagcactttgatcttcgacgtcaagctccttgagatcaagtag

SEQ ID NO: 154124 - protein, 467 aa, Neurospora crassa
MAPLMPVAVFGLEVPPGEILIPAASEFPAIIHITMAALDPTKAPEADGQGNIPALPRSTLKIIKATGHDHDDDDEEEDEYLQSLLGGGDSDDEANGGPSDPSKSKKAKQEAAIKKLMAATQEESDEEMEDAKPNGKKGKGKGKASESDEEESDEESDCCGDDDLQLEDYVVCTLDTERNYQQPINITIGEGEKVFFCVQGTHSVYLTGNFVVPEDDEEDSEDDEDESDDEDYDFPLGGEDDDSDDMSDELDELDGTPRVKEITSEDEEEEAPKLVDTSKKGKKRPAEDDAEGLDAMISKDDKKLSKKQQKKQKVEEAKKEEPKKETKSDKKVQFAKNLEQGPTGPAKDKLENKKPTSTVKVVQGVTIDDRKVGTGRAAKNGDRVGMRYIGKLQNGKVFDSNKKGAPFSFKLGKGEVIKGWDIGVAGMAVGGERRLTIPAHLAYGSRALPGIPPNSTLIFDVKLLEIK

SEQ ID NO: 154125 - DNA, 1086 bp, Schizosaccharomyces pombe
  CDS (1)..(1086)
atgtctcttccaattgctgtttatagtctttcggtaaagggaaaagatgttcccgctgtggaggaatctacagatgcatctattcatttgactatggcatccattgatgccggcgaaaagtctaataaaccaactactttattggtgaaggttcgtccccgtatccccgttgaagatgaagatgacgaagaacttgacgaacaaatgcaagagcttctggaagaaagccagcgtgaatttgttttatgtactttgaagcctggttccttataccaacagcctttaaatttgaccattactcctggcgacgaagtcttcttcagtgcatctggcgatgcaaccatccacttgtctggtaactttttggttgacgaagaagatgaggaagaggaagaatctgacgaggattacgatttgtctcctactgaggaggatcttgtcgagactgtcagcggtgatgaggaaagtgaagaggaatctgagtcggaagataattcagcatctgaggaggatgaattggattcagctcctgctaaaaaggcacaggttaaaaaaaaacgtactaaggatgaatccgagcaagaagaggctgcttctcctaagaaaaacaataccaagaagcaaaaggttgagggtacccctgttaaggaaaagaaggttgcatttgccgaaaaacttgaacaaggacctactggtcccgctgctaagaaagaaaagcaacaagcttcttctaatgcaccttctagtcccaagactcgtactttaaaaggaggcgtggttgtaactgatgttaaaactgggagcggtgcgtctgctaccaatgggaaaaaagttgaaatgagatatattgggaagctcgaaaatggaaaggtttttgacaaaaacactaaaggtaaaccctttgcttttatccttggtcgtggtgaggttattcgcgggtgggacgtcggcgttgctggaatgcaagaaggcggtgagcgtaagattacaattcctgctcccatggcttacggcaaccagagcattccaggaattcccaagaattctaccttagtttttgaagtcaagcttgttcgcgttcactaa

SEQ ID NO: 154126 - protein, 361 aa, Schizosaccharomyces pombe
MSLPIAVYSLSVKGKDVPAVEESTDASIHLTMASIDAGEKSNKPTTLLVKVRPRIPVEDEDDEELDEQMQELLEESQREFVLCTLKPGSLYQQPLNLTITPGDEVFFSASGDATIHLSGNFLVDEEDEEEEESDEDYDLSPTEEDLVETVSGDEESEEESESEDNSASEEDELDSAPAKKAQVKKKRTKDESEQEEAASPKKNNTKKQKVEGTPVKEKKVAFAEKLEQGPTGPAAKKEKQQASSNAPSSPKTRTLKGGVVVTDVKTGSGASATNGKKVEMRYIGKLENGKVFDKNTKGKPFAFILGRGEVIRGWDVGVAGMQEGGERKITIPAPMAYGNQSIPGIPKNSTLVFEVKLVRVH

SEQ ID NO: 154127 - DNA, 1179 bp, Saccharomyces cerevisiae
  CDS (1)..(1179)
atgtctgatatgcttccattggctacgtatagcctgaatgttgaaccatactccccaaccccagctctgaacttcaaaattccggttaccattagaatcacaatggcggccatcgaccctgagccctttgacgatgacaaaaagccatctactttaagaataatcaaaaggaatcctgaactcactcgcggtgagtactacaaccaagataacaatgacggcctcgaagaggatgaaagtgaaagtgaacaagaagcagatgtaccaaaaaggagtgtcaaatcaaaaaaaggtaaggcagtcgagcaaagtgaatcagaagactctgaagatgaaaacgaaatcgacgatgaattcgaagaatgcgttcttttaaccttatctccaaaaggccaatatcaacaagctttggatattaccattgcaccagaggaagacgttcaattcgtcgttaccggttcatacactatctctctaaccggtaactacgtcaaacatccattcgacaattcttcagattcagacgaagatgaagaagactattacagtgacgaagaatcttccaatggagaagaagaagaagaagaagaagaagaggacgatgaggaactaagttccggtgatgacgatcttgatgatttagtagatgctagtgacatcgaaagtcgtcttgatgaattagtcaaaaaggacgaaaagaagaaaaacaacaagaaggacagtaaaaggaaacatgaggaagatgaggaagaaagtgctaaacctgccgagaaaaaacaaacgaccaagaaagacaagaaagcagagaaagttaaagactcggaagagagcaaaccaaagccaaagacgaagctactggaaggcggtattatcattgaagaccgcgtcacaggaaaaggcccacatgccaaaaagggtaccagagttggaatgagatatgttggtaagttgaagaacgggaaagtttttgacaagaatacaaagggtaagccttttgtttttaagttgggccaaggcgaagtaattaaaggatgggacatcggtgttgctggtatggcggtcggtggtgagcgtagaattgtcattcctgctccatatgcctacggtaaacaagctttgcccggtattcctgctaactctgaattgacatttgatgttaaattggtctccatgaaatag

SEQ ID NO: 154128 - protein, 392 aa, Saccharomyces cerevisiae
MSDMLPLATYSLNVEPYSPTPALNFKIPVTIRITMAAIDPEPFDDDKKPSTLRIIKRNPELTRGEYYNQDNNDGLEEDESESEQEADVPKRSVKSKKGKAVEQSESEDSEDENEIDDEFEECVLLTLSPKGQYQQALDITIAPEEDVQFVVTGSYTISLTGNYVKHPFDNSSDSDEDEEDYYSDEESSNGEEEEEEEEEDDEELSSGDDDLDDLVDASDIESRLDELVKKDEKKKNNKKDSKRKHEEDEEESAKPAEKKQTTKKDKKAEKVKDSEESKPKPKTKLLEGGIIIEDRVTGKGPHAKKGTRVGMRYVGKLKNGKVFDKNTKGKPFVFKLGQGEVIKGWDIGVAGMAVGGERRIVIPAPYAYGKQALPGIPANSELTFDVKLVSMK

SEQ ID NO: 154129 - DNA, 726 bp, Haemophilus influenzae
  CDS (1)..(726): transl_table=11
atgttaaaaattcaaaaattatctattgcagcattaatggtaagtgcggtgatttctggccaagtttttgcagaagataacacattcgatgaaaaagcggcatcttatgcagtaggtacgctcatgggcagtcaaatgaaagatcttgttgattcccacaaagaagtcattaaatatgataatgcgcgtattttagatggcttaaaagatgctttagaaggcaaagtggatgttcgtaaagatgaaaaaatccaaaaaaccttagaatctattgaagcaaaattagtggctgcatcaaaagcaaaagcagaatcgattgctaaacaagcaaaagaagaaggcgataaattccgtgctgaatttgctaaagggaaagatgtaaaaacgacgcaatctggtttaatgtataaaattgaaagtgcaggtaaaggcgatacaatcaaatcaacggataccgttaaagtacattacacgggtaaattaccaaatggaaaagtatttgatagctctgtcgagcgcggacaacctgtagaattccaacttgatcaagtaattaaaggctggactgaaggtcttcaattagtgaaaaaaggcggaaaaattcaattcgttattgcacctgaattaggctatggcgaacaaggtgctggtgcatctattccaccaaattcaacattaatttttgatgtggaagtattggacgtcaatccgaaatctgaaaaataa

SEQ ID NO: 154130 - protein, 241 aa, Haemophilus influenzae
MLKIQKLSIAALMVSAVISGQVFAEDNTFDEKAASYAVGTLMGSQMKDLVDSHKEVIKYDNARILDGLKDALEGKVDVRKDEKIQKTLESIEAKLVAASKAKAESIAKQAKEEGDKFRAEFAKGKDVKTTQSGLMYKIESAGKGDTIKSTDTVKVHYTGKLPNGKVFDSSVERGQPVEFQLDQVIKGWTEGLQLVKKGGKIQFVIAPELGYGEQGAGASIPPNSTLIFDVEVLDVNPKSEK

SEQ ID NO: 154131 - DNA, 693 bp, Coxiella burnetii
  CDS (1)..(693): transl_table=11
atgaaacgattgattttacctttcttaagtgtgggcttacttttggggacgacggcgcacgcggctactcccttaaaaacagaacaagataaattgagctattccatgggcgttatgactggaaaagctttcagaaagcatgacataaagatcgaccctcaaacgttttcaatggggttaagcgatgcttatttaggcaaagaaacccagatgactgaagccgaaatgcgtcaaaccctgcaacaattcgaaaaacaatccctgcaaaaaatgcaacacaaaatgaaacaaacagctcaacagaatgccgaaaaaagccgcgcttttttaacggctaataaaaataaaccgggtgtgaaaaccttagcgaatggtctgcaatacaaagtcttgcaggcgggccagggacaaagccccaccttgaacgatgaagtcaccgttaattacgaagggcgtttgataaatgggaccgtgtttgacagttcctacaaacggggtcaaccggcgacgttccccctaaaaagtgttattaaaggttggcaagaagctttaacacgtatgaagccgggggcaatatgggaaatttacgtgccgccacaattggcctatggtgaacaaggcgcaccgggcgttattggaccgaatgaagctttaatttttaaagtaaatttaatttctgtaaaaaagaaataa

SEQ ID NO: 154132 - protein, 230 aa, Coxiella burnetii
MKRLILPFLSVGLLLGTTAHAATPLKTEQDKLSYSMGVMTGKAFRKHDIKIDPQTFSMGLSDAYLGKETQMTEAEMRQTLQQFEKQSLQKMQHKMKQTAQQNAEKSRAFLTANKNKPGVKTLANGLQYKVLQAGQGQSPTLNDEVTVNYEGRLINGTVFDSSYKRGQPATFPLKSVIKGWQEALTRMKPGAIWEIYVPPQLAYGEQGAPGVIGPNEALIFKVNLISVKKK

SEQ ID NO: 154133 - DNA, 26 bp, Artificial sequence
  primer
atgaaatcactgtttaaagtaacgct

SEQ ID NO: 154134 - DNA, 25 bp, Artificial sequence
  primer
ttattttttagcagaatctgcggct

SEQ ID NO: 154135 - protein, 272 aa, Artificial sequence
  consensus sequence
  Variant (2)..(74): Xaa in position 2 to 74 is any amino acid
  Variant (75)..(143): Xaa in position 75 to 143 is any or no amino acid
  Variant (146)..(149): Xaa in position 146 to 149 is any amino acid
  Variant (152)..(152): Xaa in position 152 is any amino acid
  Variant (153)..(153): Xaa in position 153 is any or no amino acid
  Variant (155)..(161): Xaa in position 155 to 161 is any amino acid
  Variant (163)..(163): Xaa in position 163 is any amino acid
  Variant (164)..(174): Xaa in position 164 to 174 is any or no amino acid
  Variant (176)..(183): Xaa in position 176 to 183 is any amino acid
  Variant (184)..(185): Xaa in position 184 to 185 is any or no amino acid
  Variant (187)..(187): Xaa in position 187 is any amino acid
  Variant (189)..(189): Xaa in position 189 is any amino acid
  Variant (191)..(191): Xaa in position 191 is any amino acid
  Variant (193)..(193): Xaa in position 193 is any amino acid
  Variant (195)..(196): Xaa in position 195 to 196 is any amino acid
  Variant (198)..(198): Xaa in position 198 is any amino acid
  Variant (199)..(200): Xaa in position 199 to 200 is any or no amino acid
  Variant (204)..(207): Xaa in position 204 to 207 is any amino acid
  Variant (208)..(209): Xaa in position 208 to 209 is any or no amino acid
  Variant (211)..(212): Xaa in position 211 to 212 is any amino acid
  Variant (214)..(217): Xaa in position 214 to 217 is any amino acid
  Variant (218)..(219): Xaa in position 218 to 219 is any or no amino acid
  Variant (222)..(222): Xaa in position 222 is any amino acid
  Variant (225)..(225): Xaa in position 225 is any amino acid
  Variant (227)..(230): Xaa in position 227 to 230 is any amino acid
  Variant (232)..(233): Xaa in position 232 to 233 is any amino acid
  Variant (235)..(241): Xaa in position 235 to 241 is any amino acid
  Variant (243)..(244): Xaa in position 243 to 244 is any amino acid
  Variant (249)..(252): Xaa in position 249 to 252 is any amino acid
  Variant (253)..(259): Xaa in position 253 to 259 is any or no amino acid
  Variant (261)..(265): Xaa in position 261 to 265 is any amino acid
  Variant (267)..(267): Xaa in position 267 is any amino acid
  Variant (269)..(271): Xaa in position 269 to 271 is any amino acid
GXXXXXXXXXXXXXXXXXXXXXXXXXXXXXXXXXXXXXXXXXXXXXXXXXXXXXXXXXXXXXXXXXXXXXXXXXXXXXXXXXXXXXXXXXXXXXXXXXXXXXXXXXXXXXXXXXXXXXXXXXXXXXXXXXXXXXXXXXXXXXXGVXXXXSGXXLXXXXXXXGXXXXXXXXXXXXGXXXXXXXXXXVXVXYXGXLXXGXXXFDSXXXXXXPXXFXXXXXXVIXGWXEXXXXMXXGXXXXXXXPXXLAYGXXXXXXXXXXXIXXXXXLXFXXXL

SEQ ID NO: 154136 - protein, 29 aa, Artificial sequence
  protein pattern
  Variant (2)..(2): Xaa in position 2 is Ile or Val
  Variant (3)..(3): Xaa in position 3 is any amino acid
  Variant (5)..(8): Xaa in position 5 to 8 is any amino acid
  Variant (9)..(9): Xaa in position 9 is Ile, Leu or Val
  Variant (10)..(14): Xaa in position 10 to 14 is any amino acid
  Variant (16)..(16): Xaa in position 16 is Ala, Asp, Glu, Gly, Gln, Ser or Thr
  Variant (17)..(19): Xaa in position 17 to 19 is any amino acid
  Variant (20)..(20): Xaa in position 20 is Phe, Ile, Leu or Val
  Variant (21)..(22): Xaa in position 21 to 22 is any amino acid
  Variant (24)..(25): Xaa in position 24 to 25 is any amino acid
  Variant (27)..(27): Xaa in position 27 is Ala or Gly
VXXGXXXXXXXXXXGXXXXXXXPXXLXYG

SEQ ID NO: 154137 - DNA, 669 bp, Synechocystis sp.
  CDS (1)..(669): transl_table=11
atggtatggaggcatttcaccccctgcaatggcacaagcataatgaattggcatattagcgacgcccaaaacctagccaccatcgactatgaaatcggggaccatggccatagccctgctcagtatgagattctgcggcgagttatctacgccacgggggattttgagtacctcaacctactgcatttttccgcccgggtactgacggtgggggccgccgctttagcatcccgcaccaccattcttgtggacgtgcccatggtacaggtaggcattgtccccactttgcaaaagacctttgccaaccctgtttattgtgctacccaaagcattaccaggccccaaaaggaaagaacagaggaagcctggggcatattgaacttggcccaccgttacccagatgggattttcgtaattggtcacgcccaaaccgccttagatgccctgatggagttagtagaagcccaacgcatccagccggccctggtcattgccaccgccactaattttggcgatcgccaagacgtggaattaaatttgcaaaaagctaacataccccacatcatagtccagggaagaaaaggggggacagaggtggccgtggccatcattactgccctagtggatttagcttggcaagcctatgaacaaagggcccacctaaattaa

SEQ ID NO: 154138 - protein, 222 aa, Synechocystis sp.
MVWRHFTPCNGTSIMNWHISDAQNLATIDYEIGDHGHSPAQYEILRRVIYATGDFEYLNLLHFSARVLTVGAAALASRTTILVDVPMVQVGIVPTLQKTFANPVYCATQSITRPQKERTEEAWGILNLAHRYPDGIFVIGHAQTALDALMELVEAQRIQPALVIATATNFGDRQDVELNLQKANIPHIIVQGRKGGTEVAVAIITALVDLAWQAYEQRAHLN

SEQ ID NO: 154139 - DNA, 633 bp, Mesorhizobium loti MAFF303099
  CDS (1)..(633): transl_table=11
atggccgcctacgactacattcacgacggcacggcgatctacgagcgctccttcgccatcatccgcgccgaggcggacctttctcgcttctccgaagccgaggctgatgtggcgatccgcatgatccatgcctgcggccaggtcgaagcatcgagccatttcgttttctcgcccgacttcgtcgcttcagcgcgcaaggctcttgccgccggcgcaccgattttctgcgacgcggaaatggtctcccacggcgtcacccgcgcccggctgccggccggcaacgaggtgatctgcacgctgcgcgacccgcgcacgcacgacattgccaaggcgatcggcaacacccgctccgccgccgccatagacctgtggggcgaacgcatagcgggttcggtcgtcgcgatcggcaatgcgccgaccgcactgttctacctgctggaaaagctgcgtgatggcgcgccgaagccggcggccatcatcggtatgccggtcggcttcgtcggcgccgctgaatcgaaagatgcgctggccgagaattcttatggcgtgccctatgccatcgtccgcggccggctcggcggcagcgccatgaccgcagccgcgctcaattccctggcgaggcccggcctgtga

SEQ ID NO: 154140 - protein, 210 aa, Mesorhizobium loti MAFF303099
MAAYDYIHDGTAIYERSFAIIRAEADLSRFSEAEADVAIRMIHACGQVEASSHFVFSPDFVASARKALAAGAPIFCDAEMVSHGVTRARLPAGNEVICTLRDPRTHDIAKAIGNTRSAAAIDLWGERIAGSVVAIGNAPTALFYLLEKLRDGAPKPAAIIGMPVGFVGAAESKDALAENSYGVPYAIVRGRLGGSAMTAAALNSLARPGL

SEQ ID NO: 154141 - DNA, 774 bp, Thermoplasma volcanium GSS1
  CDS (61)..(774): transl_table=11
ttgctaagtgtgagcgtacgtaatggatctttcataataaataaggaatacaaaataaatatggattcagacctctttagaaaaatagccggcgatgcaaaatctataaacaattcgatatcatcgcacattctaaattcctgggcagaacacttaaaggagtgggcggatccagaaaaaattgaggaggaaagcataaacatcatagagaccgtaacggagagcatagagaatgccagggagaggtacctattttccaaaatagttcatgctgccggggacttccgtctgattgatttaataaggatgtctcctggtttcgttgacacagtagctgagaagttgagggatggatgcaggatagtcgtagatgcgaagatggtcaaggcaggaatatacaacaagaatttactggatcgatgcagaataatgtattatggggacgacgaaagagtagatcgcatctccaaacaaatgggaataacgaaatctgcttctgctatgcgcatcgcttcagaggatggtgtaagagacgcgatttttgtgataggaaacgcccctacagcattgatagaattattgaacattgttcgagatacaaaagaaaagcctcctgctgtgataggtgttccggttggcttcgtgcaggcagcgagggcaaagtattccttggtatcttctggcatcgattacctcaccattcttgggtcaaggggtggaagccctatagcagcttctgtgataaatgcttttggggtgatgcttgattggtga

SEQ ID NO: 154142 - protein, 237 aa, Thermoplasma volcanium GSS1
MDSDLFRKIAGDAKSINNSISSHILNSWAEHLKEWADPEKIEEESINIIETVTESIENARERYLFSKIVHAAGDFRLIDLIRMSPGFVDTVAEKLRDGCRIVVDAKMVKAGIYNKNLLDRCRIMYYGDDERVDRISKQMGITKSASAMRIASEDGVRDAIFVIGNAPTALIELLNIVRDTKEKPPAVIGVPVGFVQAARAKYSLVSSGIDYLTILGSRGGSPIAASVINAFGVMLDW

SEQ ID NO: 154143 - DNA, 999 bp, Sulfolobus solfataricus P2
  CDS (1)..(999): transl_table=11
atggatagacaatccaatactgcagtaatattaataggtcatggttcgaggagagaaacgtataatagtgatatagaaaatatgataaattacttaaaggaaaagatctcatctccaatatatttaacttacaatgaattcgctaagcctgattggagatcattactaaacaatgtcgtaagagagggatataggagaatagtcataggcttagtatttctaggaagagggaatcacgtctttagagatataatgggagagttaggaatccaacgattaaacagttgggttgtaagtaagataagtggaaaggaggtagaactgtacgttactgaaccactctcctcgtctcccttgattggattagcattatattacagattagccagagccttgaatgcacttccaactcttgaatacactgaggatccttacgaaatcgaagagagtagtatgaacttaattctatcgaatctggacgttaaggacgaaagggagaaaagaataattggtaaggccatttttgcgtctggaaatccggaattagccagatatttaaagctaactaatttagatgcagggattgaggcaataaaagctggaagtgaaatcgtggctgatgtgaaaatggtttctgtaggtataagatggagaaaggttacttgtatgatagataatgagagaacgaaggagttatcaaaggaattaggaataaccagagcagcagccgctatgagattatcaattggacaaggtggtaaggtagtagttataggaaacgctcctactgcacttatggaaacgattaaattagttaaagaaggaattgatataccgtttatagtagcaacaccccctggtttcactaacgctaaagagtcaaaggaggcgttaatagagactaaaattccatctgtagtattaactggaacttatggtgggagtggaatagcagtggcgattattaatgagattatcaaaatggcaatggagggatga

SEQ ID NO: 154144 - protein, 332 aa, Sulfolobus solfataricus P2
MDRQSNTAVILIGHGSRRETYNSDIENMINYLKEKISSPIYLTYNEFAKPDWRSLLNNVVREGYRRIVIGLVFLGRGNHVFRDIMGELGIQRLNSWVVSKISGKEVELYVTEPLSSSPLIGLALYYRLARALNALPTLEYTEDPYEIEESSMNLILSNLDVKDEREKRIIGKAIFASGNPELARYLKLTNLDAGIEAIKAGSEIVADVKMVSVGIRWRKVTCMIDNERTKELSKELGITRAAAAMRLSIGQGGKVVVIGNAPTALMETIKLVKEGIDIPFIVATPPGFTNAKESKEALIETKIPSVVLTGTYGGSGIAVAIINEIIKMAMEG

SEQ ID NO: 154145 - DNA, 618 bp, Clostridium acetobutylicum ATCC 824
  CDS (1)..(618): transl_table=11
atgaattatataaaaaaccctggaaagattgaagaagaaagctttagaataatagaaagtgaaatgggggagcacaattttggggaaagagagcttaaaatagtaaaaagagtaatacataccacggccgattttgaatataaggatttactttatataagagaaggtgctattgatgcagctattaccttattaaaaaagggtggaataacaatttatgcagataccaatatgattacagcaggaataagtaaaaaaatgcttaatgccctaaattgcaaggttatttcttatgttagagatgaagaaatagcagctattgcaaaagaaaagggaataactagatctatggcaggaatcgagaaggctgtaagtgagggaatagaatttttcttatttggaaatgcaccaacagctctttataaacttaaagaacttatagaggagaaaaaagcagctccaaagtttgttgtagccgcaccagtaggttttgttggtgcagcacaatctaaggaggactttgaaaaacttccagtgccaatgattactgtaagaggaagaaagggtggaagtactgttacaacggctattgtaaatgcacttttatatatgttataa

SEQ ID NO: 154146 - protein, 205 aa, Clostridium acetobutylicum ATCC 824
MNYIKNPGKIEEESFRIIESEMGEHNFGERELKIVKRVIHTTADFEYKDLLYIREGAIDAAITLLKKGGITIYADTNMITAGISKKMLNALNCKVISYVRDEEIAAIAKEKGITRSMAGIEKAVSEGIEFFLFGNAPTALYKLKELIEEKKAAPKFVVAAPVGFVGAAQSKEDFEKLPVPMITVRGRKGGSTVTTAIVNALLYML

SEQ ID NO: 154147 - DNA, 633 bp, Agrobacterium tumefaciens str. C58
  CDS (1)..(633): transl_table=11
atgaccgactatgattatattcgcgatggcaatgcgatctatgagcgctctttcgccattattcgcgaggaagcggatttatccgcctttaccgaagagcaggcggatatcgccattcgcatgatccatgcctgcgggcaggtggaggcggcaggccatttccgcttttcgccggatttcgtttcggccgcgcggggcgccttgctcgccggcaaacccgttctgtgtgatgcgcaaatggttgcccatggcgtgacgcatgcaagacttccggctgataatgctgtcatctgcacgcttcgcgatccacgcacgccggagcttgcgaaaaacatcggcaacacccgctcggctgctgcgctcgatctctgggcggattatctcgacggtgccttggtcgctataggcaacgcgccaacggctttgttttatcttctggaaatgctggaaaaaggcggcccgcgtccggctgccatcatcggtatgccggttggttttgtcggtgcggcggaatcgaaagatgcgctggaggcaagtgcgcttggcattccctatgctatcgtcaagggacgtttgggcggctcggccatgacggccgccgccatcaacgcggttgcgagggcgggcctgtga

SEQ ID NO: 154148 - protein, 210 aa, Agrobacterium tumefaciens str. C58
MTDYDYIRDGNAIYERSFAIIREEADLSAFTEEQADIAIRMIHACGQVEAAGHFRFSPDFVSAARGALLAGKPVLCDAQMVAHGVTHARLPADNAVICTLRDPRTPELAKNIGNTRSAAALDLWADYLDGALVAIGNAPTALFYLLEMLEKGGPRPAAIIGMPVGFVGAAESKDALEASALGIPYAIVKGRLGGSAMTAAAINAVARAGL

SEQ ID NO: 154149 - DNA, 1002 bp, Sulfolobus tokodaii str. 7
  CDS (1)..(1002): transl_table=11
atgagcaattcagctattataataatcacacatggttctagaagaaatacctttgtagaggacatggtaaatctagcaagatatatagaagaaaaactagaagtaccagtttttttatcacataatgaatataccgaacctaattggaggaatattgtatccgaattactttcaaagggaattaatcacatagtctttgctttagcttttttgggaaggggaaatcatgtagctaaagacattatgggaagttttggtgttagtgagttttataaatgggttaagagtacttatgagggtaaagaaattaacgtctattttacaaagcctttagcggactcaaacctagtgaaattagcacttttttacagagtttctacagcgtttcctcaacaagaaaatgagtacatagaagacccagaagaaattgaagaaagaacaatgaaatttatcagggaaaaagtcagagaacgatttccatatatgggtgacagagagatagagataatagccagagcagtatatgcgtctggtaatcttgatttagcagataaaatctatatttcgcaagatgcagttgatattggaatagaaagtttgaaaacaggcatttcaattttgactgatgtaaagatggtttctgcaggaataagatggaataaagttgaaaattacctagataaagcctcagaattagctaaggaaatgagaattactagaaccgcggccggtataagacttggtttatcttctccaaagattgtagttattggaaacgctccaacagctgttgccgaagttttaaaaataaggaaagaaggtgtagagatacctttggttattgctactccaccaggatttacaaatgccgttgaggttaaggaggatttaataagatctggcataccatgtatagtgttaagaggaacttacggtggtagtagtatagcagtatcaatcataaatgagctaattagaatggtgaggagttatggcgggtaa

SEQ ID NO: 154150 - protein, 333 aa, Sulfolobus tokodaii str. 7
MSNSAIIIITHGSRRNTFVEDMVNLARYIEEKLEVPVFLSHNEYTEPNWRNIVSELLSKGINHIVFALAFLGRGNHVAKDIMGSFGVSEFYKWVKSTYEGKEINVYFTKPLADSNLVKLALFYRVSTAFPQQENEYIEDPEEIEERTMKFIREKVRERFPYMGDREIEIIARAVYASGNLDLADKIYISQDAVDIGIESLKTGISILTDVKMVSAGIRWNKVENYLDKASELAKEMRITRTAAGIRLGLSSPKIVVIGNAPTAVAEVLKIRKEGVEIPLVIATPPGFTNAVEVKEDLIRSGIPCIVLRGTYGGSSIAVSIINELIRMVRSYGG

SEQ ID NO: 154151 - DNA, 633 bp, Sinorhizobium meliloti 1021
  CDS (1)..(633): transl_table=11
atgcctgattacgattacatccgcgatggcaacgccatctatgagcgttccttcgcgatcatccgcgcggaagccgacctttccggattttcggaggaggaagccgatctcgccatacgcatggtgcatgcctgcggctcggtcgaggcggtgcgccaatttgtgttctcgcccggcttcgtctccgccgcgcgcgcggcgctgaaagacggcgcgccgattctctgcgacgccgaaatggtcgcccatggtgtgacccgcgcccggctgcccgccggaaacgaggtgatctgcacgctccgcgatccgcgcaccgcggagattgcgaccgagatcggcaatacgcgttccgccgcggcgttgaagctctggggtgagcggatggctggctccgtcgttgcgatcggcaatgcgccgaccgcactgttctatctgctcgagatgctgcgcgacggcgccccgaagccggcggcgatcctcggaatgccggtcggtttcgtcggtgcggccgaatcgaaggacgcgctcgccgaaaattcctatggcgttccctttgcgatcgtacgtggccgcctcggcggcagcgcgatgaccgccgccgcactgaattctctcgcgaggccgggcctgtga

SEQ ID NO: 154152 - protein, 210 aa, Sinorhizobium meliloti 1021
MPDYDYIRDGNAIYERSFAIIRAEADLSGFSEEEADLAIRMVHACGSVEAVRQFVFSPGFVSAARAALKDGAPILCDAEMVAHGVTRARLPAGNEVICTLRDPRTAEIATEIGNTRSAAALKLWGERMAGSVVAIGNAPTALFYLLEMLRDGAPKPAAILGMPVGFVGAAESKDALAENSYGVPFAIVRGRLGGSAMTAAALNSLARPGL

SEQ ID NO: 154153 - DNA, 624 bp, Thermoplasma acidophilum DSM 1728
  CDS (1)..(624): transl_table=11
atggcggctgccggcgaggaatacagcagcgataagatagaagaaagaagcctcgccgcaatcgattccatgatcgatccagatatcagcggcccaatgcgccatatcgttgttaaggcgatccatgctgcaggtgacttcgctatagctccactgatcagatacagcgacggtttcttcaaatccatgcttgcaaagctcaaggagggctgcaccataatatgcgatagcgagatggtgcgtgccggaatatactccaggcctgtacttgaaaggaacagggtggtttgctaccttaacgatgtcagatctaaggagatggcggatgttaatggaataacaagatctgcggctgggatcaggatcgcaatgcaggatcacaggaattctgtgatagtgatcggaaatgcgcctacagccttgttggaagccatgaggatgatagaggaaaatggctggtacgacatacccatcgtcggcattcccgttgggttcatcaacgcgagcaaggctaaggagggtctcgtttccagccacatcgaatacatatcggttgagggtcatcgcggcggaagccccatcgccgcatcgatagtcaacggttttgggaggtttttggcatga

SEQ ID NO: 154154 - protein, 207 aa, Thermoplasma acidophilum DSM 1728
MAAAGEEYSSDKIEERSLAAIDSMIDPDISGPMRHIVVKAIHAAGDFAIAPLIRYSDGFFKSMLAKLKEGCTIICDSEMVRAGIYSRPVLERNRVVCYLNDVRSKEMADVNGITRSAAGIRIAMQDHRNSVIVIGNAPTALLEAMRMIEENGWYDIPIVGIPVGFINASKAKEGLVSSHIEYISVEGHRGGSPIAASIVNGFGRFLA

SEQ ID NO: 154155 - DNA, 633 bp, Listeria monocytogenes EGD-e
  CDS (1)..(633): transl_table=11
atgaactatattaagaatccagccaaaattgaggagaaaagctttgaaattattcaacaaattattgatgatattcgtccagattacacatttcaaaacaagttagaggaagcgataatcaaacgtgcaatacatacgacggcagattttgattacttggatagcctcgtttttcaacaagacgctattgcaaaaatcattcatgttcttcaaaataaaggaactatttttacggatacaaatatggcgcttagtggaattaataaacgacttttagatgaacttgggtgtaaatatcattgttatgtgagtgatccagagacgatggagattgccaaacagcatgggattacacgctctatggctggaattaaactcgcttctttaaaagatggaccgaaactatttgtcctcggaaatgcgccaactgcggtatataaaattatcgagatggtagaaagtggtcaattgcaagcggatgcggttgttgcagtaccggttggttttgtcggagcggctgaatgtaaggaagagattttggaaacagatatcccagccattgtcgcacgcggtagaaaaggcggtagtaatcttgctgcagcaatcattaatgcaatcttgattacgatgtaa

SEQ ID NO: 154156 - protein, 210 aa, Listeria monocytogenes EGD-e
MNYIKNPAKIEEKSFEIIQQIIDDIRPDYTFQNKLEEAIIKRAIHTTADFDYLDSLVFQQDAIAKIIHVLQNKGTIFTDTNMALSGINKRLLDELGCKYHCYVSDPETMEIAKQHGITRSMAGIKLASLKDGPKLFVLGNAPTAVYKIIEMVESGQLQADAVVAVPVGFVGAAECKEEILETDIPAIVARGRKGGSNLAAAIINAILITM

SEQ ID NO: 154157 - DNA, 633 bp, Listeria innocua Clip11262
  CDS (1)..(633): transl_table=11
atgaactacattaaaaatccagccaaaattgaagagaaaagttttgaaatcattcaacaaattattgacgatattcgaccagattatacatttcaaaacaaactagaggaagccattatcaaacgtgcgatacatacgacagcagattttgattacttggatagcctcgtttttcaacaagatgttatccaaaaaattattcatgttcttaaaaataaaggaaccatttttacagatactaatatggcgcttagtggtattaataaacggctgttagatgaacttggctgtagttatcactgttatgtgagtgatccagaaacgatcgaaattgccaaacagcatggcatcacgcgctcaatggccggaattaaacttgcttctttaaaagatggaccgaaaatatttgtcctagggaacgcgccaactgcggtttataaaattatcgaaatgacggaaagcgggcaattacaagcagaggcggtcgttgcagtgcctgtcggatttgtcggggcagctgaatgtaaagaagaaattcttgaaaccgacattccagcaattgtcgctcgtggtagaaaaggcggtagtaaccttgccgcggcaatcattaatgcaatcttgattacgatgtaa

SEQ ID NO: 154158 - protein, 210 aa, Listeria innocua Clip11262
MNYIKNPAKIEEKSFEIIQQIIDDIRPDYTFQNKLEEAIIKRAIHTTADFDYLDSLVFQQDVIQKIIHVLKNKGTIFTDTNMALSGINKRLLDELGCSYHCYVSDPETIEIAKQHGITRSMAGIKLASLKDGPKIFVLGNAPTAVYKIIEMTESGQLQAEAVVAVPVGFVGAAECKEEILETDIPAIVARGRKGGSNLAAAIINAILITM

SEQ ID NO: 154159 - DNA, 627 bp, Nostoc sp. PCC 7120
  CDS (1)..(627): transl_table=11
atgtctgactacatccacgatgctaatgaaatctaccgcaattcctttgctatcatccggtcagaagccaacctagatatactcccgccagacatagcaaaagttgcagtacgcctgattcatgcctgtggaatgacggatattgtcacagacttaggatattcagccacggcggcacagtcaggcagggcagcactagcagccggcgcaccgattttgtgcgattgccgtatggtagccgacggggtgacaagacggcgcttaggagccaataatcaagttatctgcaccttgaatgaaccagaagtaccagaactagcaaaaaaattgggtaatacgcggtcggcggcggctttggaattgtggagaccacatctagaaggggcagttgtcgccattgggaacgcacctacagccctatttcgcttactagaaatgctagatgccggatgccccaaacctgccttaatcttgggctttccagtcgggtttgtgggtgcagctgaatcaaaagcagcattggcagcagatagccgtaatatcccatatatgactttacacggtcggcggggtgggagtgcgatcgccgccgccgcagttaacgccctggccacggaggaagaataa

SEQ ID NO: 154160 - protein, 208 aa, Nostoc sp. PCC 7120
MSDYIHDANEIYRNSFAIIRSEANLDILPPDIAKVAVRLIHACGMTDIVTDLGYSATAAQSGRAALAAGAPILCDCRMVADGVTRRRLGANNQVICTLNEPEVPELAKKLGNTRSAAALELWRPHLEGAVVAIGNAPTALFRLLEMLDAGCPKPALILGFPVGFVGAAESKAALAADSRNIPYMTLHGRRGGSAIAAAAVNALATEEE

SEQ ID NO: 154161 - DNA, 621 bp, Nostoc sp. PCC 7120
  CDS (1)..(621): transl_table=11
atggaatggcacgtaagtgatgctcaaagtttagcaattatcgatagtgaaattggcgatcatgtgttctcgccagcagaatatgaaattgttcgccgcgtaatttacgctacggctgattttgagtacaagtctttaatcaggttttctgagcgtgctttacaagccggagccgccgcattggcagcacggactactattgtggtagatgtaccgatggtgcaaacaggtattgcttacgatattcaaaaaacctttgctaacccagttttttgcagtacagaaactttgactcgtccccaaatagaaaaaactcgcgccgcatggggaattgaaactttagccaaacgctatccagaaggtatttttatagtaggtcaagcgccaacagctttaactacattagtcaatttaattgaagcagaagagattaacccggctttaatcattgctactcctgtagggttaggagatatagaagatgccaaaaggcgcttgcaagactctttagtccctaatatcacaatcgacagccgcaaaggtaatgctgttgtcgcagctgcgatcgccgatggtttgatagacttggcttggcaagcttatgggcagaagagggagtga

SEQ ID NO: 154162 - protein, 206 aa, Nostoc sp. PCC 7120
MEWHVSDAQSLAIIDSEIGDHVFSPAEYEIVRRVIYATADFEYKSLIRFSERALQAGAAALAARTTIVVDVPMVQTGIAYDIQKTFANPVFCSTETLTRPQIEKTRAAWGIETLAKRYPEGIFIVGQAPTALTTLVNLIEAEEINPALIIATPVGLGDIEDAKRRLQDSLVPNITIDSRKGNAVVAAAIADGLIDLAWQAYGQKRE

SEQ ID NO: 154163 - DNA, 1605 bp, Ralstonia solanacearum GMI1000
  CDS (1)..(1605): transl_table=11
atgacaaccaccaacgcatccacctccacccacggcgccgactacgccatcgtcctggccggccacggcagccgcgaccccgacggcgtggcggaattcctggccctggtggcgctgctgcgcgagcgcgcgggcggtcgcaccgtcgcgcacgggttccttgaattcgccacgcccaccctcgacgaagcggtcgatgccgtggtggccgacggcgccgggacggtggtgatggtgcccggcgtgctgctggccgccacgcacgccaagaacgacatgccgagcgaactgctggcgctcaagcaggcccatccccaggtcgatttccgcttcggcgcggcgatggacctgcatcccaagctgctcgcgctgtgccgcgagcgcatcgtcgaggccgagggccgctcggcgcagaccgtgtcgcgcgccgacacctgcctggtggtggtcgggcgcggcacgtcggaccccgacgccaactccgagatcgccaagctgacgcgcatgctggaagagggcatgggcttcggcaccgccttcgtctgctatgccggcaccgcgcgcccgctggtggccgatggcctgaaggccgccgctcggctcgggtaccggcgcatcgtcgtgctgccgtatttcctgttcgacggcgtgctggtcaagcgcatctacggtgccgccaacgacctggccgcgcgccatccggagatcgaggtgctgcgcgcgccgtacctgggcgtgcacccgcacgtggcggacgtgttcctggagcgtgcccgcgagggcatcgagggccgcgcggcgatgaactgcgcgctgtgcaagtaccgcgtgcagatcgtcggcttcgaagagcaggtcggcacgccgcagcagagccatcacggactggtgcgcgggctgctgggtcgcgacggcgccacgcccgcgcccgccgccgactggccaccctacgtgccgcacccgatcgaggccgagagcatgcgcatcatcgacgccgggcgcgactggtccggcgtgccagccgaccatcagatcgtgctcaagcggctggtgcacaccagcggcgatttcgacatcgtcgatgacctgtatttctcgcccggcgcggtcgagaccggcatccgcgccctgctgcgctgccgtcgcatcgtcgccgatgtcaccatggtgcagacgggcctcaagcgcgcggtgctcgaccagttgggcgtgcagacctggtgcggcgtgcacgacgaagaaacgcgcctgctggccgaggcgcacggcatcacccgctcggccgccggcatccggcgcgcctggcagcggttcggcaacgacgtggtggtcgccatcggcgacgcgccgaccgccatcgtggagctggtgcggctggtgcgcgagcagggctggcgcccgcaactggtggtggggctgccggtgggcttcgtcggcacgcgcgagagcaaggaggcgctgcgccggctgatgcaggtgccgcgcatcaccaaccgcggcacgcgcgggggctcgccatgggcggcctcggcggtgaacgcgctgatgattgccgccatcgatcaggtctaccgccaaaaccaatccctgccgcagcaggcctaa

SEQ ID NO: 154164 - protein, 534 aa, Ralstonia solanacearum GMI1000
MTTTNASTSTHGADYAIVLAGHGSRDPDGVAEFLALVALLRERAGGRTVAHGFLEFATPTLDEAVDAVVADGAGTVVMVPGVLLAATHAKNDMPSELLALKQAHPQVDFRFGAAMDLHPKLLALCRERIVEAEGRSAQTVSRADTCLVVVGRGTSDPDANSEIAKLTRMLEEGMGFGTAFVCYAGTARPLVADGLKAAARLGYRRIVVLPYFLFDGVLVKRIYGAANDLAARHPEIEVLRAPYLGVHPHVADVFLERAREGIEGRAAMNCALCKYRVQIVGFEEQVGTPQQSHHGLVRGLLGRDGATPAPAADWPPYVPHPIEAESMRIIDAGRDWSGVPADHQIVLKRLVHTSGDFDIVDDLYFSPGAVETGIRALLRCRRIVADVTMVQTGLKRAVLDQLGVQTWCGVHDEETRLLAEAHGITRSAAGIRRAWQRFGNDVVVAIGDAPTAIVELVRLVREQGWRPQLVVGLPVGFVGTRESKEALRRLMQVPRITNRGTRGGSPWAASAVNALMIAAIDQVYRQNQSLPQQA

SEQ ID NO: 154165 - DNA, 627 bp, Brucella melitensis 16M
  CDS (1)..(627): transl_table=11
atgacagactatatccgtgacggacaggccatttacgaccgatccttcgctattatccgcgccgaagccgatctccgtcacattccagccgatcttgaaaagcttgccgttcgcgtgattcacgcctgcggcatggtggatgtggcaaacgatcttgccttctcggaaggtgcaggcaaagccgggcgcaatgctcttctggcaggcgcgccgatcctctgcgatgcgcgcatggtggccgaaggcatcacccgctcgcgccttcccgccgataatcgcgtgatctacaccctgggcgacccatccgtgccggaacttgcaaaaaagatcggcaacacccgctccgcagccgcgcttgatctctggctcccgcatattgaaggcagcattgtcgccatcggcaatgcgccgaccgccctcttccgcctgttcgagcttctcgatgcaggggcaccgaagcccgcacttatcattggaatgccggtgggctttgtgggagcggcggaatcgaaggacgagcttgccgccaacagccgcggcgtgccttacgtgatcgtgcgcgggcgacgcggcggcagcgccatgacggcagccgcggtcaacgcgcttgcttcggagcgtgaataa

SEQ ID NO: 154166 - protein, 208 aa, Brucella melitensis 16M
MTDYIRDGQAIYDRSFAIIRAEADLRHIPADLEKLAVRVIHACGMVDVANDLAFSEGAGKAGRNALLAGAPILCDARMVAEGITRSRLPADNRVIYTLGDPSVPELAKKIGNTRSAAALDLWLPHIEGSIVAIGNAPTALFRLFELLDAGAPKPALIIGMPVGFVGAAESKDELAANSRGVPYVIVRGRRGGSAMTAAAVNALASERE

SEQ ID NO: 154167 - DNA, 954 bp, Pyrobaculum aerophilum str. IM2
  CDS (1)..(954): transl_table=11
atggagattatagtagttaatcacggctctcgcagaggcgacttcaataaattaatggaggagtgggcggcggaattatcccgccgcctcggcgtaaaggccgtagtggggtataatgaatatgcagagcctaattggagagatcttttaaaaagggctgaggggccggtgatcatagccttggcgtttttaggcgctggcaaccacgtggttagggatattctgggcgagctcggcgtagagatgggcaagtggcagatgtcaaaattcggcaagttggtatacgtcaccgagccgttagggaactcgccgctggtcttcaacgcccttctctcaagggttaaaagggccttgggcaacggggtagaaagcggttatatctcagacgccgaggagattgagatgagctccatgggctacgtcgccgcggccctcgggctagatctcaataactggaaacatagaattattgcaagagctgtatacgcctcgggcaacttagagctggcgaagtttgtttatatttcagacgatttattgggcgcggcgcgtgaggctttaatagcagaggcgccgtgtgttgtcgatgttaaaatggtggcggctgggatgcggtatccgcatgtatacatcgctgtggaggcgcctgtaaataacggggggactagggcatcggctggaatgagctactggctgtctcggctaaacggcgcttgcgtcgtcataggcaacgctcccactgctttaaaagcggctttagatatgtggtctgagggcaaagcggatatacccttcgccgtggcagcgccagttggcttcaccaacgcctctcacgttaaggaggagctggtgaaatcgaggcttcccgccgttgtaatacgcggaacctacgggggttcggggattgccgtggctctattcaacgaactgttgcgcctggcgtatgaggggtag

SEQ ID NO: 154168 - protein, 317 aa, Pyrobaculum aerophilum str. IM2
MEIIVVNHGSRRGDFNKLMEEWAAELSRRLGVKAVVGYNEYAEPNWRDLLKRAEGPVIIALAFLGAGNHVVRDILGELGVEMGKWQMSKFGKLVYVTEPLGNSPLVFNALLSRVKRALGNGVESGYISDAEEIEMSSMGYVAAALGLDLNNWKHRIIARAVYASGNLELAKFVYISDDLLGAAREALIAEAPCVVDVKMVAAGMRYPHVYIAVEAPVNNGGTRASAGMSYWLSRLNGACVVIGNAPTALKAALDMWSEGKADIPFAVAAPVGFTNASHVKEELVKSRLPAVVIRGTYGGSGIAVALFNELLRLAYEG

SEQ ID NO: 154169 - DNA, 660 bp, Fusobacterium nucleatum subsp. nucleatum ATCC 25586
  CDS (1)..(660): transl_table=11
atgataataatgagttatataaaagtaccaggagatatagagaaaagaagttttgagattattgaagaagaattaggagataaggtgaaaaaattctctgaaagtgagttactcatagtcaaaagaatagtccatacttcagcagattttgaatatgcggatttaatagaatttcaaaataatgcaatagaaagtggattaaaagccttagaaaaaggttgtaaaatttattgtgatacaaatatgatagtgaatgggcttagtaaacctgctttagccaaatataattgttctgcttactcattagtttctgataaagaagtaattgaagcagctaaaaaagaagggcttactcgttcaatagttggagtgagaaaagcaggaaaagactctgaaacaaaaatatttatcttaggaaatgcacctactgcattatatcaattaaaggaaatgatagaaaaaggcgagatagagaaacctgctttagttataggagttcctgttggttttgttggagcagcagaatcaaaagaagaatttaaaaaattaggtgtaccatatatcacagtaaatggtagaaaaggaggaagcacaataggagttgctatacttcatggaattatctatcaaatatataaaagagaaggttttcacgcataa

SEQ ID NO: 154170 - protein, 219 aa, Fusobacterium nucleatum subsp. nucleatum ATCC 25586
MIIMSYIKVPGDIEKRSFEIIEEELGDKVKKFSESELLIVKRIVHTSADFEYADLIEFQNNAIESGLKALEKGCKIYCDTNMIVNGLSKPALAKYNCSAYSLVSDKEVIEAAKKEGLTRSIVGVRKAGKDSETKIFILGNAPTALYQLKEMIEKGEIEKPALVIGVPVGFVGAAESKEEFKKLGVPYITVNGRKGGSTIGVAILHGIIYQIYKREGFHA

SEQ ID NO: 154171 - DNA, 723 bp, Methanosarcina acetivorans C2A
  CDS (1)..(723): transl_table=11
atgactactgaaaaaagtgctaatgaaagcgaagagaacctcgaagaatttaccgagcttacggtggaagtcgatcccgaacttgtaaagatctgtaccgactcgggggcaaggactgaagaggcaaaagccatctacatgaaaagccggacaatgatccgggaaattgtcgggaattccacacccgaagaccgtttccgccagcgctgcgtaattgctacaggagacctctcggttgccgacatcatgcgttttacgcacgaccccatacctgctggggttgaagcaattaaaaaaggcgctcctatctttgttgatatcaatatggtaaaagccgggatcacaaaggtcggtcactcctcggaagtgatctgcgtcctcgacgaagacccgaacgccgaaatcgccaacagatacggaattacccggacctccgcaggataccttgccgcaaaagacaaactggacggcagcatcatcgcaatcggaaatgccccttcggccctcatcatggtctgcaagctgatcgaaaaaggtgtaaggcctgctcttataatcgggcttcccgttggcttcgtaaacgcagccgaatccagggaaatggtccggaacctgaaaattcccatcccttcaatcagctgtgtcgggacaaggggggggactccgatggctgttgcctgtgtaaacgagctcgtagcaatcgcaagggaaagtgaagaataa

SEQ ID NO: 154172 - protein, 240 aa, Methanosarcina acetivorans C2A
MTTEKSANESEENLEEFTELTVEVDPELVKICTDSGARTEEAKAIYMKSRTMIREIVGNSTPEDRFRQRCVIATGDLSVADIMRFTHDPIPAGVEAIKKGAPIFVDINMVKAGITKVGHSSEVICVLDEDPNAEIANRYGITRTSAGYLAAKDKLDGSIIAIGNAPSALIMVCKLIEKGVRPALIIGLPVGFVNAAESREMVRNLKIPIPSISCVGTRGGTPMAVACVNELVAIARESEE

SEQ ID NO: 154173 - DNA, 657 bp, Streptomyces coelicolor A3(2)
  CDS (1)..(657): transl_table=11
atgaccccgtacgactccaagaacgagtacgagtacgagtacgagaaggacggcgcggccatctaccgccagtccttcgccaccatccgcgcggaggccgacctgtccgggctgcccgccgacgtcggccgggtcgcggtccggatgatccacgcctgcgggatggtcgacctggtccgcgacctgtcgtggtcccccggcgtcgtctcccgcgcccgcgaggccctgcgggccggtgcgcccgtgctctgcgacgtgcggatggtggcgagcggggtgacgcgcgcccggctgcccgcggacaacgacgtcgtgtgcaccctgtccgaccccgccgtccccgagctggcggcccggctcggcaccacgcgcagcgccgccgcgctggaactgtggcgcgaccggctggacggcgccgtggtcgccgtcggcaacgcgcccaccgcgctcttccggctgctggagatgatcggcgagggggctccgcgcccggccgcggtcatcggcgtacccgtcggcttcgtcggtgcagccgagtccaaggaggcgctggccgcccacccgtccggggtggagcacctcgtcgtacgggggcgtcgcgggggcagtgcgctcgccgccgccgcggtcaacgcgatcgccagcgaggaggagtga

SEQ ID NO: 154174 - protein, 218 aa, Streptomyces coelicolor A3(2)
MTPYDSKNEYEYEYEKDGAAIYRQSFATIRAEADLSGLPADVGRVAVRMIHACGMVDLVRDLSWSPGVVSRAREALRAGAPVLCDVRMVASGVTRARLPADNDVVCTLSDPAVPELAARLGTTRSAAALELWRDRLDGAVVAVGNAPTALFRLLEMIGEGAPRPAAVIGVPVGFVGAAESKEALAAHPSGVEHLVVRGRRGGSALAAAAVNAIASEEE

SEQ ID NO: 154175 - DNA, 732 bp, Methanosarcina mazei Go1
  CDS (1)..(732): transl_table=11
atgactactgaacaaaaagccaatgaaaatgcaggaaaccttgaaaacctcgaagaatttaccgagcttacagtggaagtagaccccgaacttgtaaagatctgcaatgactccggggcaaggactgatgaggcaaaagccatctacatgaaaagccggacaatgatccgtgagattgtcggtaactccactcccgaagaccgcttccggcagcgctgtgttattgcaacaggagacctttctgtcgccgatatcatgcgtttcaataacgaccccatacctacaggtgttgaggcaattaaaaaaggtgcccccatttttgtggacatcaatatggtaaaatccgggatcacaaaagccgggcataaatccgaaatcatctgcgtgcttgacgaagaccccgacgctaaaatcgccaacaagtacgggataaccaggacatcggcaggtttcctggcggcaagggaaaaactcgatggaagcattatagctattggaaatgctccttctgcccttattatggtctgcaagcttattgagaaaggtgtaaggcctgcccttattatcggtcttcctgtcggttttgtcaatgcagccgaatcaagggaaatggttagaaacctgaaaatcccgattccttctatcagctgtgtcgggaccaggggagggactccgatggctgttgcctgcgtaaacgagctcgtagcaatcgcaagagaaagtgaggagtaa

SEQ ID NO: 154176 - protein, 243 aa, Methanosarcina mazei Go1
MTTEQKANENAGNLENLEEFTELTVEVDPELVKICNDSGARTDEAKAIYMKSRTMIREIVGNSTPEDRFRQRCVIATGDLSVADIMRFNNDPIPTGVEAIKKGAPIFVDINMVKSGITKAGHKSEIICVLDEDPDAKIANKYGITRTSAGFLAAREKLDGSIIAIGNAPSALIMVCKLIEKGVRPALIIGLPVGFVNAAESREMVRNLKIPIPSISCVGTRGGTPMAVACVNELVAIARESEE

SEQ ID NO: 154177 - DNA, 1440 bp, Chlorobium tepidum TLS
  CDS (1)..(1440): transl_table=11
ttgccggcagtcaaccctttcgccctttgcgtcatgaacggcacgattaccgttgtgggcctcggccccggcagcgactcgatgatgaccccgcaggtgctcgatgcgatccgcacggctgacgcggtggtcggctacaccggctacatgaagagcatcgcacacctgattccggactccgtccagaccgtggcgactggcatgaccggcgagatgcagcgggccgaagaggcgttcgcgctggccgccgaagggcgtcacgtcgttgtcgtcagctccggcgacgcgggcatctacggcatggcaccactcattgtcgaactgcatgcgagcggccgctggccggaggtcgcggtcgaggtactgccgggcatcagtgcgttccaggccgctgccgcgcgactcggcgctccggtgagccacgacttctgtgccatttcgctctccgacctgatgacgccgtgggaggtgatcgaaaagcggatcgaggcagcggcatcggcggacttcgtgacggcggtttacaacccacgcagccgcgaccgctactggcagattcaccgcttccgcgagctgttcctgcgccaccgctcaccctcgacgccggtgggcatcgtccgcaatgtgacgcgcaaggatgagtcggtcgtgctgacgacgctcggtgagttcgatcccgattcgctcgacatgttcaccatgatgctggttggcaactcgaccaccttcttctccggagagcggatggtgacgccgaggggctatttcagccgagaggagcgtggcctgagaccggttggccagtcgatcatgagcagcagcttccgcgccatcgcggaactgatgaagccggactcacgcccgactgacgagcgctgggcggtcatgcacacgattcacacgaccgccgattttgagatgcaggagttgttccacgccacacccggcgcaatccagcggtggcacgaggcgctgaccgccggtggcgcgacgatcattaccgacgtgacgatggtgcagtcggggctgcgcaaggcagcgctggagcgctacggcgtgacggtgcgctgctacttgcacgacgagcgcgtgacggagctggccaaaagcgcgggcatcacgcgcagccaggcggggatgcggcttgccgccaaggagcatcccgacgcgctcttcgtcgtcggcaatgcgccgacggcgctgctggaacttgcatcgctcctgcatcgcggaggcttcgctccgatgggggtgattggagcgccggtcgggttcgtgaacgtagtcgagtcgaagcaccggctcaaggcggcggcgggcgcaacgccgattgccgtcatcgaggggcgcaagggtggcagcgcgattgcggccaccatcgtcaacgcggccttcagcctcgacgaggcggaggcgatgaatccggggcgcgatgtctga

SEQ ID NO: 154178 - protein, 479 aa, Chlorobium tepidum TLS
MPAVNPFALCVMNGTITVVGLGPGSDSMMTPQVLDAIRTADAVVGYTGYMKSIAHLIPDSVQTVATGMTGEMQRAEEAFALAAEGRHVVVVSSGDAGIYGMAPLIVELHASGRWPEVAVEVLPGISAFQAAAARLGAPVSHDFCAISLSDLMTPWEVIEKRIEAAASADFVTAVYNPRSRDRYWQIHRFRELFLRHRSPSTPVGIVRNVTRKDESVVLTTLGEFDPDSLDMFTMMLVGNSTTFFSGERMVTPRGYFSREERGLRPVGQSIMSSSFRAIAELMKPDSRPTDERWAVMHTIHTTADFEMQELFHATPGAIQRWHEALTAGGATIITDVTMVQSGLRKAALERYGVTVRCYLHDERVTELAKSAGITRSQAGMRLAAKEHPDALFVVGNAPTALLELASLLHRGGFAPMGVIGAPVGFVNVVESKHRLKAAAGATPIAVIEGRKGGSAIAATIVNAAFSLDEAEAMNPGRDV

SEQ ID NO: 154179 - DNA, 615 bp, Thermosynechococcus elongatus BP-1
  CDS (1)..(615): transl_table=11
atgtctctgctgcatccaattgcccaagcgagttttgccatcatcgatcgcgagatcgggcctcatccttttgacccccctagctattcgattttgcggcggattatccacagcacagccgattttgagtttaagaacctcctggagatttccccgggggcgatcgcccacctcacccaagccctgcgctcaggtgtgccgattatcacggatgtggccatggtcagtgttggcattcaaacgatggtcagccgcaccttccaaaacccaatcatcaccgcccttgaccatggcagccccaccgcccctggtcaaacccgcagcgccgcagggatgctccgcgcttggcaacagtggccccacggtctttttgtcattggcaatgcgccaacggcgctcctggccctgtgcgatcgcctgcaacaaacccctgtgccgcccgcaggcgttattggcgtccccgttggctttgtcaatgtcgtggagtcaaaagctgcccttgcccaactacccgtgccccaaattcgtattgccggtcgcaaggggggatcgcctgtggcagcggcgattgtcaatgccctactggagttggcctatagcgaggagccagcgtga

SEQ ID NO: 154180 - protein, 204 aa, Thermosynechococcus elongatus BP-1
MSLLHPIAQASFAIIDREIGPHPFDPPSYSILRRIIHSTADFEFKNLLEISPGAIAHLTQALRSGVPIITDVAMVSVGIQTMVSRTFQNPIITALDHGSPTAPGQTRSAAGMLRAWQQWPHGLFVIGNAPTALLALCDRLQQTPVPPAGVIGVPVGFVNVVESKAALAQLPVPQIRIAGRKGGSPVAAAIVNALLELAYSEEPA

SEQ ID NO: 154181 - DNA, 627 bp, Brucella suis 1330
  CDS (1)..(627): transl_table=11
atgacagactatatccgtgacggacaggccatttacgaccgatccttcgctattatccgcgccgaagccgatctccgtcacattccagccgatcttgaaaagcttgccgttcgcgtgattcacgcctgcggcatggtggatgtggcaaacgatcttgccttctcggaaggtgcaggcaaagccgggcgcaatgctcttctggcaggcgcgccgatcctctgcgatgcgcgcatggtggccgaaggcatcacccgctcgcgccttcccgccgataatcgcgtgatctgcaccctgggcgacccatccgtgccggaacttgcaaaaaagatcggcaacacccgctccgcagccgcgcttgatctctggctcccgcatattgaaggcagcattgtcgccatcggcaatgcgccgaccgccctcttccgcctgttcgagcttctcgatgcaggggcaccgaagcccgcacttatcattggaatgccggtgggctttgtgggagcggcggaatcgaaggacgagcttgccgccaacagccgcggcgtgccttacgtgatcgtgcgcgggcggcgcggcggcagcgccatgacggcagccgcggtcaacgcgcttgcttcggagcgtgaataa

SEQ ID NO: 154182 - protein, 208 aa, Brucella suis 1330
MTDYIRDGQAIYDRSFAIIRAEADLRHIPADLEKLAVRVIHACGMVDVANDLAFSEGAGKAGRNALLAGAPILCDARMVAEGITRSRLPADNRVICTLGDPSVPELAKKIGNTRSAAALDLWLPHIEGSIVAIGNAPTALFRLFELLDAGAPKPALIIGMPVGFVGAAESKDELAANSRGVPYVIVRGRRGGSAMTAAAVNALASERE

SEQ ID NO: 154183 - DNA, 672 bp, Leptospira interrogans serovar Lai str. 56601
  CDS (1)..(672): transl_table=11
atgaatgatatgagacaaataactaatttaggaagaaatatcgagaacaaatctttttcgatcattgatgaagaagccggacctcattcttttgcacaagaagaatgggaagtggttcgaagaattatacacgcaaccgcagattttgattataaaaatattactaaaattcatccacaagcgatcgattctggaatccaagcgttaaaaaagggatgtccgatcgtatgtgacgttcagatgattttgtccggcctaaatccagaaagacttaaagtttacggctgtaaaacatactgtttcatctcggacgaagacgtaattgaaaacgctaagagaaaaaattctacgagggcaatcgaatcgattcaaaaagcaaattcattcaatcttttaaatgaatctataatagtcatcggcaacgcgccaacagctttgttagaaatcgaaaaactaattcgtcaagaaggaatcaaaccagctcttattgtgggagttccggtgggctttgtttccgcaaaagaatccaaagaaagcatattaaaattagaatattataatgtaacttcaattccatatatccttactatgggtagaaaaggaggtagtacaatcgcagttgcaatccttcatgcacttctcttgttatcttccaaaagaggagaaagatga

SEQ ID NO: 154184 - protein, 223 aa, Leptospira interrogans serovar Lai str. 56601
MNDMRQITNLGRNIENKSFSIIDEEAGPHSFAQEEWEVVRRIIHATADFDYKNITKIHPQAIDSGIQALKKGCPIVCDVQMILSGLNPERLKVYGCKTYCFISDEDVIENAKRKNSTRAIESIQKANSFNLLNESIIVIGNAPTALLEIEKLIRQEGIKPALIVGVPVGFVSAKESKESILKLEYYNVTSIPYILTMGRKGGSTIAVAILHALLLLSSKRGER

SEQ ID NO: 154185 - DNA, 627 bp, Pseudomonas putida KT2440
  CDS (1)..(627): transl_table=11
atgattgactacatccgcgatggtcaggagatctatcgcaactccttccggatcatccgtgaggaagcccgactcgagcggatccccgcagaccttgaaaagctcgccgtgcgcgtgatccacgcctgtggcatggtcgacgccatcgatggcctgcagttctcagacggtgccggccgggccgggcgtgaggcgctgctcaacggcgcgccgatcctttgcgatgcgcacatggtggccgaagggatcacccgggcccgcttgccagctgacaacaaagtcatctgcaccctgcgtgaccccagcgtgccgggcctggccaaagacgccggcaacacacgctccgccgtagccctggaactgtggcgcccttacctggagggcagcgtggtggtcatcggcaatgcccctactgcgctgttctacctgttggaaatgctcgacgccggtgcgcccaagccggcgctgatcctcggtttcccggtcggtttcgtcggcgctgccgagtccaaggccatgctcgccgccgacagccgtggcgtgccgttcgtgatcatgcaaggccgcctgggcggcagcgcgatggccgccgcggcggtcaacgccctggccacggaggtggaatga

SEQ ID NO: 154186 - protein, 208 aa, Pseudomonas putida KT2440
MIDYIRDGQEIYRNSFRIIREEARLERIPADLEKLAVRVIHACGMVDAIDGLQFSDGAGRAGREALLNGAPILCDAHMVAEGITRARLPADNKVICTLRDPSVPGLAKDAGNTRSAVALELWRPYLEGSVVVIGNAPTALFYLLEMLDAGAPKPALILGFPVGFVGAAESKAMLAADSRGVPFVIMQGRLGGSAMAAAAVNALATEVE

SEQ ID NO: 154187 - DNA, 630 bp, Bradyrhizobium japonicum USDA 110
  CDS (1)..(630): transl_table=11
atgccgcatgtctacgagaccgacggcgcggcgatctaccggcaatcctttgcgaccatccgcgccgaggccgatcttgcccgcttcacgcccgatgaggaaccggtcgtcgtgcggatgatccatgccgccggcatggtgggcctggaagcgcatatccgcttcacatcaggcatggcgaccgccgcgcgcgtagcgttgcagaagggggcgccgatcctgtgcgatgcgcgcatggtctccgagggcattacgcgcgctagacttccggcggccaatgccgtcatctgcaccctcggcgatgccgcggtcccggcgctggcgcaatccatgcgcaacacccgctcggccgcggcgctggagctgtggcggccgcatctcgccggcgcgatcgtcgcgatcggcaacgcgccgaccgcgctgtttcatctcctcaacatgctggaggaccgcgactgcccgcggccggcggcgatcatcggttgtccggtcggcttcgtcggcgcggctgaatccaaggccgcgctgatggccgatccgccggtgccggcgttgacggtcgagggccgccttggcggttccgcgatcaccgttgcggccgtgaatgcgctggcgagccggagcgaatag

SEQ ID NO: 154188 - protein, 209 aa, Bradyrhizobium japonicum USDA 110
MPHVYETDGAAIYRQSFATIRAEADLARFTPDEEPVVVRMIHAAGMVGLEAHIRFTSGMATAARVALQKGAPILCDARMVSEGITRARLPAANAVICTLGDAAVPALAQSMRNTRSAAALELWRPHLAGAIVAIGNAPTALFHLLNMLEDRDCPRPAAIIGCPVGFVGAAESKAALMADPPVPALTVEGRLGGSAITVAAVNALASRSE

SEQ ID NO: 154189 - DNA, 657 bp, Clostridium tetani E88
  CDS (1)..(657): transl_table=11
atggttatgaaagaagggattaaagtgattgaatatataaaaaaacctatggcaatagaagaaaaaagttttgaaataataggaagcgaaatgaaaagaaaagattttacaaaagaagaattaaaaatagttaaaagaaccatacatacgacaggggactttgattatgaaaatatagtttatataagagaagatgcaatagaagaagctttaaagatactgaaaaagggagtaactatttatactgatactaatatggctaaatcaggaattaacaaagcagctttaaaaaaattaaactgtacagtagagtgttttgtttccaatgaagaagtagcccaaattgctaaggaaagaggaataactcgttctatggcaggagttgaaaaggcagtagaagatggtgtagagtttttcgtttttggaaatgcacctacagcattatttaaacttatagaattaactaaagaggggaaagctaatcctaaatttataataggctctccagtaggatttgttggggcagcagaatcaaaagaagaattagaaaaatcattagatctaccaataattacagtaagaggcagaaaaggaggaagtaatgtagcagcagctattgtaaatgctcttatgtatatgatagtagacagagattaa

SEQ ID NO: 154190 - protein, 218 aa, Clostridium tetani E88
MVMKEGIKVIEYIKKPMAIEEKSFEIIGSEMKRKDFTKEELKIVKRTIHTTGDFDYENIVYIREDAIEEALKILKKGVTIYTDTNMAKSGINKAALKKLNCTVECFVSNEEVAQIAKERGITRSMAGVEKAVEDGVEFFVFGNAPTALFKLIELTKEGKANPKFIIGSPVGFVGAAESKEELEKSLDLPIITVRGRKGGSNVAAAIVNALMYMIVDRD

SEQ ID NO: 154191 - DNA, 615 bp, Streptomyces avermitilis MA-4680
  CDS (1)..(615): transl_table=11
atgaaccgggcgttcgtacccgaggaccgtgtcgtccaccccatcgagcaggagtcgttccggcggctgcgcgcccgtctggacacctcgcacttcccgccgctgacccgggcggtcgtggagcgggtcatccactccgcggccgatctcgactacgccgaggacctcgtcatggacgagggcacgctggagcgggcacacgccgcgctgcacgcgggggcgccggtggtggtggacgtggagatggtcgcggccggcatcacccggcgcgggacggtctgccgtctcaaggacgccaggtccggtccggggctgacccgttcggcgcacgcggtccggctcgcgtacgaggaggtcggccccggcgcgctgtgggtgatcggctgcgccccgaccgcgctggaggaactgctcaccctggacgcctccccggcgctcgtcatcggtctgcccgtcgggttcgtcggcgcggccgagtcgaaggccgcgttgcgcgagagcgggctgcccgctgtcagcaacgtgtccatgaagggcggttcggcggtcgccgcggccgcgctcaacgccctgctgtaccacctcgccgcacccgcttcgaaggagaaatcgtga

SEQ ID NO: 154192 - protein, 204 aa, Streptomyces avermitilis MA-4680
MNRAFVPEDRVVHPIEQESFRRLRARLDTSHFPPLTRAVVERVIHSAADLDYAEDLVMDEGTLERAHAALHAGAPVVVDVEMVAAGITRRGTVCRLKDARSGPGLTRSAHAVRLAYEEVGPGALWVIGCAPTALEELLTLDASPALVIGLPVGFVGAAESKAALRESGLPAVSNVSMKGGSAVAAAALNALLYHLAAPASKEKS

SEQ ID NO: 154193 - DNA, 624 bp, Prochlorococcus marinus subsp. pastoris str. CCMP1986
  CDS (1)..(624): transl_table=11
atgataaaagatcatcctatttttttagaaagtattaggtttattaaatctaatttgattgaaaataatttcaattatttggaaaatagagttttagaaagattagttcatacttcaggtgattttaatattcagaaacttttggagtttagtgaaggggcgtgcgaaaaaggtgttaaatctcttaaagctggagcaccaatattgactgatactgatatggcagcagcagctattaaatcaatggcaaaaaatacaaacggaaacttagttgtttcggcgaaacattggtttgatgatagagatttatcagagttgactaaaactgcttatgggatagaaaaaggttggattgaattatctgctaataattcaggaaaccaatcgccaattattgttattggaagttctccaactgcattagtaaatttattagagattatacagaattcacaacagattcctagtttaattatcggaatgcctgtaggttttattggtgttaggcaaagtaaaaataaattactcaatactaattatcctagaattgttatgaactctacgagaggaggggctgcaatggctgcagcagctgttaatgccttattaagagaatctatttaa

SEQ ID NO: 154194 - protein, 207 aa, Prochlorococcus marinus subsp. pastoris str. CCMP1986
MIKDHPIFLESIRFIKSNLIENNFNYLENRVLERLVHTSGDFNIQKLLEFSEGACEKGVKSLKAGAPILTDTDMAAAAIKSMAKNTNGNLVVSAKHWFDDRDLSELTKTAYGIEKGWIELSANNSGNQSPIIVIGSSPTALVNLLEIIQNSQQIPSLIIGMPVGFIGVRQSKNKLLNTNYPRIVMNSTRGGAAMAAAAVNALLRESI

SEQ ID NO: 154195 - DNA, 624 bp, Prochlorococcus marinus str. MIT 9313
  CDS (1)..(624): transl_table=11
atgaagtcgcttgatcatccgatcttcacggaaagcattcgccgcattcgggagcagttgggtgtaacgggtttggatcccttgcagcagcaggtgttggagcgtttgattcacagcagtggggattttggcctaactcctttgctgcgctttactccagaggcttgtgagcttgggctggctgccttgcaggccggagcgccaattctcaccgatacggccatggcagctgtagcagtgcagccgatggcgcgacgcacactcaagacatcagttcgctgcgtgctggagtgggcgccggatgaggcaccaaacggttccacgcgaacagccgagggcttgcgatctgcatggcaagaattggcggctaaagatgcggatcaacaagcgccgattgtgctgattggtagtgctccaacggctttggaagctttgttggatctggtgtctacaggtgcaccccctcctagcctgattatcggcatgcctgtggggtttgtcggtgtggctgaaagtaagcgcaggcttttggctagtgggctggctcagattcgccttgagggcagtcgtggtggggctggtctggttgcagcgacggtcaatgctctgttgcgggcgtcatag

SEQ ID NO: 154196 - protein, 207 aa, Prochlorococcus marinus str. MIT 9313
MKSLDHPIFTESIRRIREQLGVTGLDPLQQQVLERLIHSSGDFGLTPLLRFTPEACELGLAALQAGAPILTDTAMAAVAVQPMARRTLKTSVRCVLEWAPDEAPNGSTRTAEGLRSAWQELAAKDADQQAPIVLIGSAPTALEALLDLVSTGAPPPSLIIGMPVGFVGVAESKRRLLASGLAQIRLEGSRGGAGLVAATVNALLRAS

SEQ ID NO: 154197 - DNA, 627 bp, Synechococcus sp. WH 8102
  CDS (1)..(627): transl_table=11
atggcggcgatggcccaggaccacccgatcttcactgaaagcatccggcggatccgtgtggctctgggtcctacggatctggagctgttgcaacagcaggtgctggagcggttagtgcacagcagcggcgacctggccctgggggccttactgcggttcagccccggcgcctgtgaagcgggtctgacggccctgcagcagggagctccaatcctcacggacacggccatggctgcggcggcggtggcgccgatggccaagcgcacgttgcaaacgacggtgcgcacggtgctggagtgggccccggatcaagcgccgctggggtcgacgcgtacggcagcggggatggagcaggcctggagggagctgtcagcggtcggtcctgcaccgctggtgttgatcggtagcgcccccacggccctggaggtgctgctggagcaggtggctgctggagcgctatctcccagcctggtgatcggcatgccggtggggtttgtcggggtggctgaaagcaaacgccatctggctgagagcggcctggctcagatccgtctggagggcagccgcggtggggcgggactggtggctgcggcggtcaatgccctgctgcgggcggctgcaggctga

SEQ ID NO: 154198 - protein, 208 aa, Synechococcus sp. WH 8102
MAAMAQDHPIFTESIRRIRVALGPTDLELLQQQVLERLVHSSGDLALGALLRFSPGACEAGLTALQQGAPILTDTAMAAAAVAPMAKRTLQTTVRTVLEWAPDQAPLGSTRTAAGMEQAWRELSAVGPAPLVLIGSAPTALEVLLEQVAAGALSPSLVIGMPVGFVGVAESKRHLAESGLAQIRLEGSRGGAGLVAAAVNALLRAAAG

SEQ ID NO: 154199 - DNA, 1566 bp, Chromobacterium violaceum ATCC 12472
  CDS (1)..(1566): transl_table=11
atgagccagccagactacgccatcgtgctggccggccacggcagccgcgacccggacggggtcaacgagttcatgcagctggtggacgcgctgaaggcgcgcgccggcgagcgccccgtcgcccacggttttctggagttcgcccgcccgaccatagacgaggcggtgcagcaggtgatcgccgccggcgccaagaccgtggtgatggtgcccggcgtgctgttggccgccacccacgccaagaacgacatgcccagcgagctgttggcgctgcagcaggcgcatcccggcgtgacgttccacttcggcgcggcgctggacctgcatccgcggctgctggcgctgtgccgccagcgcatcgtcgaggccgaggccgcgtcgccgcagaccatctcgcgcaacgacgcctgtctggtggtggtgggccgcggcacctcggacccggacgccaattccgaaatctccaagctcgcgcgcatgctggaggaaggcctgggcttcgccgcgtccttcgtctgctactccggcaccgccaagccgctggtggcggacggcctgcgcgccgccgccatgctgggctaccgccgcatcgtggtgctgccctacttcctgttcgacggcgtgctggtcaagcgcatctacggcgcggcggcggacctggcggcgcgccatccggaaatcgaggtgctcagcgccggctacctgggcccggatgcccaagtggccgaggtgttcctggagagggcgcgggaaggcgtggaaggccgcgccgcgatgaactgcgcgctgtgcaagtaccgggtgcagatcgtcggcttcgagcagcaggtgggcgagccgcagcgcggccaccacggcaaggtgcgcggcctgctggagcgcgagcctgccgccaatcagccgccggcctggaaacgctacaccccgcatcctatcgaggcggaaagcatgcgcatcatagacgaaggccgcgactggtcagccttcccggccgagcagcgcaccgcgctgatgcggctggtgcacaccaccggcgacttcaacagcgtcgacgacctgttcttctcgcccggcgcctgcgaaaccggcatgcgggcgctgctgcgctgccgccgcgtggtcaccgacgtcaccatggtggaaaccgggctgaaacgcgaagtgctgcgccagctggaagtggaaacctggtgcggcgtgcacgacgaggaaacccggctgctggccgaggccagcggcctcacccgctccgccgccggcatccgccgcgcctggcagaaattcggcaacgactgcgtggtggcgataggcgacgcgccgacggcgatccgcgaggtggtgcgcttggtgcgcgagcacggctggcggccgcagctggtggtgggcctgccggtgggcttcgtcggcacccgcgaatgcaaggaagagctgcgcgcgctgctgcaagtgccgcgcatcaccaaccgcggcacccgcggcggctcgccgtgggcggccaccgtggtcaacgcgctgatgatagacgcgatcgaacacgtccatcagcagcaacaacgggaagaatga

SEQ ID NO: 154200 - protein, 521 aa, Chromobacterium violaceum ATCC 12472
MSQPDYAIVLAGHGSRDPDGVNEFMQLVDALKARAGERPVAHGFLEFARPTIDEAVQQVIAAGAKTVVMVPGVLLAATHAKNDMPSELLALQQAHPGVTFHFGAALDLHPRLLALCRQRIVEAEAASPQTISRNDACLVVVGRGTSDPDANSEISKLARMLEEGLGFAASFVCYSGTAKPLVADGLRAAAMLGYRRIVVLPYFLFDGVLVKRIYGAAADLAARHPEIEVLSAGYLGPDAQVAEVFLERAREGVEGRAAMNCALCKYRVQIVGFEQQVGEPQRGHHGKVRGLLEREPAANQPPAWKRYTPHPIEAESMRIIDEGRDWSAFPAEQRTALMRLVHTTGDFNSVDDLFFSPGACETGMRALLRCRRVVTDVTMVETGLKREVLRQLEVETWCGVHDEETRLLAEASGLTRSAAGIRRAWQKFGNDCVVAIGDAPTAIREVVRLVREHGWRPQLVVGLPVGFVGTRECKEELRALLQVPRITNRGTRGGSPWAATVVNALMIDAIEHVHQQQQREE

SEQ ID NO: 154201 - DNA, 1407 bp, Porphyromonas gingivalis W83
  CDS (1)..(1407): transl_table=11
atgaatcgagcacgaatcatcgtagccggcatcggtccgggaggagcatcggatattactcctgcagtgctatcggctatcggccggtccgacgtagtcgtcggctataaatactatttccgttttatcgaaccttatctccgtccggatacccactgcgtggataccggcatgaagaaggagcggcagcgtgccgaggaagcattcgggtatgccctcagcggcaagacggtctgcgtgatcagctccggcgatgccggcatctacggtatggctcctcttatatatgaaatgaaacgagccaaaggcgtggagatggacatcgaagtgctgcccggtatcagtgcttttcagaaagcggcttcgctgctgggtgctcccatcggtcacgacctctgcctgatctcgctgagcgatctgatgaccccttggccgatcatcgaaaagcgcatagtggcagcagcctccgcggacttcgtcacagctatatacaatcctaagagcgagggccgatactggcagctctatcgtttcgtagagatcttcatgcagtatcgttcggccgatacgcccgtcggacttgtccgtcaggcaggccgggaagaggagcaggtgacggtgacgactctcggcgaattcgatcccgaagtggtggatatgttcactgtcgtactcgtaggcaattcgcagtcgtactgctacgaagggcactttatcacccctcgcggctactaccccgaagaagagatcgaagccaaaggtatcgggcaggagattatgatcaagagtttccgcacgatcgagaaagagctgcaccgtcaggattggcctttagaccacaagtgggctttgctccatgccattcataccacagcggacttcgacatggagaatatcctctacacggatgccggtgcggtggcttctctgtatgaaatgatcgaagccggacggctgcgcacgattgtcacagatgtgaccatggttacctccggtattcgcaagggggcactggagcgtctgggtgtggaggccaaatgctatctgcatgatccgcgcgtggcagaactggccgctcgtcacggcatcacccgaacgcaggcaggcatacgcctggccgtggaggagcaccccgatgctcttttcgccttcggcaatgcacccacagccttacaggaactggccgatctgatccgtcgaggcaaagcctctccggccgggatcattgcggcaccggtcggattcgtccacgtacaggaatccaaacatgccgtgaagccgttccgctccattccgaagattatcgtcgaaggccgtaaaggcggcagcaatctggctgccacgctggtcaatgccatactctgctataacgatgccgaacaactcagaccggggcgcgatgtgtga

SEQ ID NO: 154202 - protein, 468 aa, Porphyromonas gingivalis W83
MNRARIIVAGIGPGGASDITPAVLSAIGRSDVVVGYKYYFRFIEPYLRPDTHCVDTGMKKERQRAEEAFGYALSGKTVCVISSGDAGIYGMAPLIYEMKRAKGVEMDIEVLPGISAFQKAASLLGAPIGHDLCLISLSDLMTPWPIIEKRIVAAASADFVTAIYNPKSEGRYWQLYRFVEIFMQYRSADTPVGLVRQAGREEEQVTVTTLGEFDPEVVDMFTVVLVGNSQSYCYEGHFITPRGYYPEEEIEAKGIGQEIMIKSFRTIEKELHRQDWPLDHKWALLHAIHTTADFDMENILYTDAGAVASLYEMIEAGRLRTIVTDVTMVTSGIRKGALERLGVEAKCYLHDPRVAELAARHGITRTQAGIRLAVEEHPDALFAFGNAPTALQELADLIRRGKASPAGIIAAPVGFVHVQESKHAVKPFRSIPKIIVEGRKGGSNLAATLVNAILCYNDAEQLRPGRDV

SEQ ID NO: 154203 - DNA, 597 bp, Gloeobacter violaceus PCC 7421
  CDS (1)..(597): transl_table=11
atggaccttcacccaatcaccgccgaaagtttcgccatcatcgatgctgaaatcggcgagcacgccttcccacccgccgaatatcagatcgtgcggcgggtgatccacgcgacggccgacttcgagtaccaacacctgttgcgctttgagcacggagcgatccccgccgcccttgccgccattcgggcacaaaccccggtgatcgtcgatgtgcagatggtcaaagtcggcgtggccggcagccttggagatcatcctcttatttgcgcgctggaagcggggattatcccgcaggcgggtcagacgcgcacggaggcaggcttgctcggtcttagcgcccgctatcccgaagccatttacgtcatcggtaacgctcctacggccctgctggcgctggtggaggcgatccgtgcaggccgagcacatccggcgctggtggtgggcgtgccggtgggttttgtgcaggtgatccccgccaaaaaagccctcgccagtctggctattccccagatccgggtggaggggcgcaaaggcggctcgccggtggcggcggccatcgtcaacgccttgatggctctgagcaccgccgcttcctga

SEQ ID NO: 154204 - protein, 198 aa, Gloeobacter violaceus PCC 7421
MDLHPITAESFAIIDAEIGEHAFPPAEYQIVRRVIHATADFEYQHLLRFEHGAIPAALAAIRAQTPVIVDVQMVKVGVAGSLGDHPLICALEAGIIPQAGQTRTEAGLLGLSARYPEAIYVIGNAPTALLALVEAIRAGRAHPALVVGVPVGFVQVIPAKKALASLAIPQIRVEGRKGGSPVAAAIVNALMALSTAAS

SEQ ID NO: 154205 - DNA, 633 bp, Photorhabdus luminescens subsp. laumondii TTO1
  CDS (1)..(633): transl_table=11
atgaattacctccagaaacctcagcaaattgaacagaatagcttcgcaatcattggcgatattattgccagtgagcgccccgattatcgttttgttgatgagatgcaagaagcggtgattaaacgggtgatccacaccaccgcagattttgactggttggatattttatggttctcgccgggtgtgctgtcccgcatgacagaggcattacgtcggggatgcaccttgtataccgatacgacgatggctcagtccggtatcaacaaagcactgttacatcagatggggtgtgaatgccgctgctatatcagtgatccgcgagtggttgcgatggcgaaagcgcagggtatcacgcgctctatggccgcggtagacgtcgcactggcggaagagggggacaaaatcttcgtgttcggtaacgcgccaaccgccctgttccgtctgctggaaaggaaggcttcaccgttggcggtggttggggtgcctgtcggttttgtcggtgcggcggaatcgaaagccgctttgatgcaaagtgaactgccttgtatcgccgccgcaggtcgtaaagggggaagtaatatcgcggcggcgattatcaatgccattctgtaccgattgcaggaggcacaatga

SEQ ID NO: 154206 - protein, 210 aa, Photorhabdus luminescens subsp. laumondii TTO1
MNYLQKPQQIEQNSFAIIGDIIASERPDYRFVDEMQEAVIKRVIHTTADFDWLDILWFSPGVLSRMTEALRRGCTLYTDTTMAQSGINKALLHQMGCECRCYISDPRVVAMAKAQGITRSMAAVDVALAEEGDKIFVFGNAPTALFRLLERKASPLAVVGVPVGFVGAAESKAALMQSELPCIAAAGRKGGSNIAAAIINAILYRLQEAQ

SEQ ID NO: 154207 - DNA, 651 bp, Corynebacterium diphtheriae NCTC 13129
  CDS (1)..(651): transl_table=11
atgagcttcgagtacatcacagacggtaatgagatctatcggcaatcctttgccatgattcgtgaagagtcggatttaagccggttcgatgacgaacaggcacaaatcgcggttcgaatgattcacgcagcaggcgaagttgatttggcggaagatatagaattgtccaccgatgttgttaataccgcccgtgatgcattgcgccgaggcgcaccaatcttgactgatgtcaatatggtgaaaagtggcgtgactcgtaaacgtttgcctgcagacaacgaagtaatctgtctgcttaatgaacctcgttcggtggaactagctcggaaacttggtacaactcgatctgctgccgctgtcgaattgtgggagccacatattgctggtgcagttgttgctatcggcaatgcgcctacggcactctttcacctgcttaattggcttgctgaggacccgcagcgaccacgccctgctgcgattttgggtattcctgtgggattcgttggcgccgcagaatcgaaagcagcattagccaatgttgcccacgacttaggcgtcgaatttgtcactgttcacgggcgtcgtggcggatcagctatcacctgtgccgcgatcaatgctctggctacggaaaaggagattcttccatga

SEQ ID NO: 154208 - protein, 216 aa, Corynebacterium diphtheriae NCTC 13129
MSFEYITDGNEIYRQSFAMIREESDLSRFDDEQAQIAVRMIHAAGEVDLAEDIELSTDVVNTARDALRRGAPILTDVNMVKSGVTRKRLPADNEVICLLNEPRSVELARKLGTTRSAAAVELWEPHIAGAVVAIGNAPTALFHLLNWLAEDPQRPRPAAILGIPVGFVGAAESKAALANVAHDLGVEFVTVHGRRGGSAITCAAINALATEKEILP

SEQ ID NO: 154209 - DNA, 630 bp, Rhodopseudomonas palustris CGA009
  CDS (1)..(630): transl_table=11
atgacctacgcttacgaacgagacggcgacgcgatctatcgtcagtcgttttcgatcatccgcgccgaagccgctctcgatcggttcaccgccgacgaggaaaagattgcggtacggatcattcacgccagcggcatggtcgaagtcgcaggagacatcgcgttcacgcccggcttcgtcgcggcaggccgcgccgcgctgcaggccggcgcaccgatcctgtgcgacgcgcagatggtcgccaacggcgtcacccgcaagcggctgccggccgacaacgaagtgatctgcacgctgaaccatcccgatgtcccggccctcgccgcaaagctcggcactacccggtcggccgccgcggtcgatctgtggcgcgaccggatgcagggcgcggtggtggcgatcggcaatgcgccgactgcgctgttccgcctgctcgaaatccttgtcgagcccggcgcaccgcgccccgctgcgattatcggcatcccggtcggtttcgtcggcgcggccgagtccaaggaggcgctgctggcggactcgccctcgccttgcgtgatcgtgcgcggccgtcgcggcggcagcgcgatgaccgcggcagcgatcaacgcgctggcgagcgaacgcgaatga

SEQ ID NO: 154210 - protein, 209 aa, Rhodopseudomonas palustris CGA009
MTYAYERDGDAIYRQSFSIIRAEAALDRFTADEEKIAVRIIHASGMVEVAGDIAFTPGFVAAGRAALQAGAPILCDAQMVANGVTRKRLPADNEVICTLNHPDVPALAAKLGTTRSAAAVDLWRDRMQGAVVAIGNAPTALFRLLEILVEPGAPRPAAIIGIPVGFVGAAESKEALLADSPSPCVIVRGRRGGSAMTAAAINALASERE

SEQ ID NO: 154211 - DNA, 642 bp, Geobacter sulfurreducens PCA
  CDS (1)..(642): transl_table=11
atgtcggtccacctccgccccgaggagatcgaggccgagtcgttccggatcatcgatgccgaagcgggctcccactcctgggggccggaccagtggccggtggtgcgccgcgtcatccatacctccgccgatttcgactatgcccggagcatggtcttctcccccgacgccgtgccgcgcgccctggccgcgctcaaggcgggaagaggcatcgtcaccgacaccaccatggccctgtcgggcatcgccaagccgcgcctggagcgattcggcatctccgtctcctgtttcgtggctgatcccgatgtggcacgccgggcccgggagcaggggatcacccgctctatcctggctctacgtgcgggggcgtcggaccggggtaacggcatcttcgtcatcggcaacgcacccacggccctcttcgagctgatccgcctggtgcgggaagagggtctgcgtcccgacttggtggtgggcttgccggtggggttcgttggggccgcggagagcaaagaggcgctcctggccctggagcatgaggtcccggaagtccccttcatcaccaaccggggacgcaagggggggtccaacgtggcggcggcggtggtgaacgccctgctcatcatggctatggaggggtaa

SEQ ID NO: 154212 - protein, 213 aa, Geobacter sulfurreducens PCA
MSVHLRPEEIEAESFRIIDAEAGSHSWGPDQWPVVRRVIHTSADFDYARSMVFSPDAVPRALAALKAGRGIVTDTTMALSGIAKPRLERFGISVSCFVADPDVARRAREQGITRSILALRAGASDRGNGIFVIGNAPTALFELIRLVREEGLRPDLVVGLPVGFVGAAESKEALLALEHEVPEVPFITNRGRKGGSNVAAAVVNALLIMAMEG

SEQ ID NO: 154213 - DNA, 627 bp, Mycobacterium avium subsp. paratuberculosis K-10
  CDS (1)..(627): transl_table=11
atgctcgactacatccgcgatgcggcggagatctatcgcctgtcgttcgcgaccatccgcgccgaagccgacttggcccgcttccccgccgatgtggcccgcgtggtggtgcggctgatccacacctgcgggcaggtcgacgtggccgagcacgtcgcgttcaccgacgatgtcgtcgagcgggtgggcaccgccctgcgcgccggcgccccggtgttatgcgattcgtcgatggtggccgccgggatcaccgcggcgcggttgccggccgacaacgaggtggtgtccctggtcgccgatcccctgtcggccgaactggccgcccgccggcagaccacccgctcggcggccggggtcgagctgtgggccgaccggctgccgggcgccgtgctggccatcggcaacgcgcccaccgcgctgttccggctgctcgagctggtcgacgacggggtggacccgccggccggggtgctgggcgggccggtcggattcgtcgggtcggcgcagtccaagcaggagctcgtcgacaacccgcgcggcatgtcgtacctggtggtgcggggccgccgcgggggtagcgcgatggccgccgcggccgtcaacgcgatcgcgagcgaccgcgaatga

SEQ ID NO: 154214 - protein, 208 aa, Mycobacterium avium subsp. paratuberculosis K-10
MLDYIRDAAEIYRLSFATIRAEADLARFPADVARVVVRLIHTCGQVDVAEHVAFTDDVVERVGTALRAGAPVLCDSSMVAAGITAARLPADNEVVSLVADPLSAELAARRQTTRSAAGVELWADRLPGAVLAIGNAPTALFRLLELVDDGVDPPAGVLGGPVGFVGSAQSKQELVDNPRGMSYLVVRGRRGGSAMAAAAVNAIASDRE

SEQ ID NO: 154215 - DNA, 624 bp, Treponema denticola ATCC 35405
  CDS (1)..(624): transl_table=11
atgtacattaaaaaacctatggaaatagaaaataaaagcatggatataattgaagaaagcatgaaggatgttgcttttacggaagaagaaaaaattatagccaagaggatgattcacactacgggcgatgtcgagtatagaaagataatcgtatttcaaaataactttatagaatcggctaaaagggctcttcaaaaaggcataaccatttttaccgataccaagatggtgctgacaggcatcaacaagcccgccctctcaaaaaccgaaaataaacttttatgcctcatcgatgatgagagggtttttaagatgtccaaggaagacggaatcacgcgctcttcggcagccgtagaccttgcagtccaagaaggagccaaagcctttgtaatcgggaatgccccgacggctctttttaggctcttggagctctgcgaagaaaaaaaagtttcccccgaatttataatcggcgttcccgtcggctttgtaggagccgccgaatcaaaagaagccctgcgttcaaaaccctttccccaaatctctaccgtaggcaccaagggcggaagcaatgtcgccgcctccattataaacgccctgctttatatgatggtagaaagggagtaa

SEQ ID NO: 154216 - protein, 207 aa, Treponema denticola ATCC 35405
MYIKKPMEIENKSMDIIEESMKDVAFTEEEKIIAKRMIHTTGDVEYRKIIVFQNNFIESAKRALQKGITIFTDTKMVLTGINKPALSKTENKLLCLIDDERVFKMSKEDGITRSSAAVDLAVQEGAKAFVIGNAPTALFRLLELCEEKKVSPEFIIGVPVGFVGAAESKEALRSKPFPQISTVGTKGGSNVAASIINALLYMMVERE

SEQ ID NO: 154217 - DNA, 633 bp, Methanococcus maripaludis S2
  CDS (1)..(633): transl_table=11
atgggagcagtaaccaaggatggaaaagaaatcgcagaccgatcaagagaaatagtaaaaacaaaaataagcgaagttttgggaaaaaatgttgtattatactctaaggacgaaatgggaataattgaaagagtagttcatgcaactgccgatccagagtattcaaaactcgttaattttgataacaaaccaattgaacatggtttaaaagcaataaatgatgaaagtccgataattgcagatatttcgatggtaaaagcaggaatacgctatgaagacgtattatgcacaatttccgaaaagaaagtcttcgaagttgcaaaaaaagagcaagttacaagggcagttgcatcaattcgggcttcaaaagagttaatcgacggcggtattgttgttattggcaatgcaccgacagcacttcttgaagtcataagattgaataaaaaagaaggaataactcctaaattagttataggggccccagttggttttgtaaaggcagcagaatcaaaagaattattaagaacgacaaaaatcccgtcaatttctacaattggtccaaaagggggaactcctgtcgcagtttcagcaattaacggaatcattgcgcttagtaaaaatgaaagaatttaa

SEQ ID NO: 154218 - protein, 210 aa, Methanococcus maripaludis S2
MGAVTKDGKEIADRSREIVKTKISEVLGKNVVLYSKDEMGIIERVVHATADPEYSKLVNFDNKPIEHGLKAINDESPIIADISMVKAGIRYEDVLCTISEKKVFEVAKKEQVTRAVASIRASKELIDGGIVVIGNAPTALLEVIRLNKKEGITPKLVIGAPVGFVKAAESKELLRTTKIPSISTIGPKGGTPVAVSAINGIIALSKNERI

SEQ ID NO: 154219 - DNA, 624 bp, Prochlorococcus marinus str. MIT 9515
  CDS (1)..(624): transl_table=11
atgataaaagatcatcctatttttttagaaagtattagatttataagatctaatttgattgaaaataattttaattatttagaaaataaagttttagaaagattagtgcatacctcaggtgattttaatattcagaaactcttggaatttagcgaaggtgcttgtgaaaaagctgtgaaatccctaaaagacggcgcaccaatactgactgatactgatatggcagcagcagctataaaatcaatggcaaaaaatacaaatggaaacttagttgtttcggcgaaacaatggtttgatgataaaaactttttaggattgactaaaactgcttatgggatagaaaaaggttggattgaattgtctaccaaaaatgtaggaagtcaatcaccaattattgtgattggaagttctccaacagcattagttaatttattaaagattctgacaaattcaaaacagattcctagtttaattattggaatgcctgtaggttttattggggtaaaacaaagtaaaaataaattacttaataccaattatccaaggattgtcgtccaatcaacaagaggaggcgctgcaatggcggcagcagcggttaatgccttattgagagaaactatttaa

SEQ ID NO: 154220 - protein, 207 aa, Prochlorococcus marinus str. MIT 9515
MIKDHPIFLESIRFIRSNLIENNFNYLENKVLERLVHTSGDFNIQKLLEFSEGACEKAVKSLKDGAPILTDTDMAAAAIKSMAKNTNGNLVVSAKQWFDDKNFLGLTKTAYGIEKGWIELSTKNVGSQSPIIVIGSSPTALVNLLKILTNSKQIPSLIIGMPVGFIGVKQSKNKLLNTNYPRIVVQSTRGGAAMAAAAVNALLRETI

SEQ ID NO: 154221 - DNA, 636 bp, Prochlorococcus marinus str. MIT 9303
  CDS (1)..(636): transl_table=11
atgaagtcgcttgatcatccgatcttcacggaaagcattcgccgcattcgggagcagttgggtgtaacgggtttggatcccttgcagcagcaggtgttggagcgtttgattcacagcagtggggattttggcctaactcctttgctgcgttttactccagaggcttgtgagcttgggctggctgctttgcaggccggagcgccaattatcaccgatacggccatggcggctgtagcagtgcagcctatggcgcgacgcacactcaagacatcagttcgctgcgtgctggagtgggcgccggatgtggcaccaaacggttccacgcgaacagccgagggtttgcgatgcgcatggcaagaattggcgactcaatatgtggatcaacaagcgccgattgtgttgattggtagtgcacctacggccctggatgcattactggagcttgtctcatcaggttcacctcctcctagtttgatcatcggcatgcctgtgggttttgtaggtgtatctgacagcaagcggcggttagttgttagcggactggctcagattcgccttgagggcagtcgtggtggggctggtctggttgcagcgacggtcaatgctctgttgcgggcgtcacagttgcctaagtga

SEQ ID NO: 154222 - protein, 211 aa, Prochlorococcus marinus str. MIT 9303
MKSLDHPIFTESIRRIREQLGVTGLDPLQQQVLERLIHSSGDFGLTPLLRFTPEACELGLAALQAGAPIITDTAMAAVAVQPMARRTLKTSVRCVLEWAPDVAPNGSTRTAEGLRCAWQELATQYVDQQAPIVLIGSAPTALDALLELVSSGSPPPSLIIGMPVGFVGVSDSKRRLVVSGLAQIRLEGSRGGAGLVAATVNALLRASQLPK

SEQ ID NO: 154223 - DNA, 633 bp, Clostridium difficile 630
  CDS (1)..(633): transl_table=11
atggaatacataaagaatcctatgaaaatagaagaaaaaagttttgaattgatacaagaaataatagacgaaattagaccagattataaatttaagaataatatcgaagaaaaaataataaaaagagctatacatactactgctgattttgattacttagatatattaaaaatatcagaagaagcagttgatagtataatagatgcattaaaaaataatgcaagtatttatactgatacaaatatggctcttagtggtataaataaaagaaagttagaatcattaggatgtaagtataaatgtttagtggcagatgatgaaactgtaaaattagctaaagaaaaaggaattactcgttctatggcagcagtagaaattgcagctaaagaagaaggaagaaaaatattcgttttaggtaatgctccaacagctttgtataaagttatggagatgaaatcagaaggtagattagatttagatgcagttataggagttcctgtaggttttgtaggagcacaagaatcaaaagatgaagttgaaaaaacagatataccatatataatttctaaaggtagaaaaggtggcagtaatttagcagcagcaatagtaaatgctatattatatactatgtag

SEQ ID NO: 154224 - protein, 210 aa, Clostridium difficile 630
MEYIKNPMKIEEKSFELIQEIIDEIRPDYKFKNNIEEKIIKRAIHTTADFDYLDILKISEEAVDSIIDALKNNASIYTDTNMALSGINKRKLESLGCKYKCLVADDETVKLAKEKGITRSMAAVEIAAKEEGRKIFVLGNAPTALYKVMEMKSEGRLDLDAVIGVPVGFVGAQESKDEVEKTDIPYIISKGRKGGSNLAAAIVNAILYTM

SEQ ID NO: 154225 - DNA, 624 bp, Prochlorococcus marinus str. MIT 9301
  CDS (1)..(624): transl_table=11
atggtagtagatcatccaatttttttggaaagcatcagattcataagatctcatttattagccaatgatctaaattatttggaaaaaaaagtgttagagagattagtccatacttcaggagatttttcagttcaaaatctagtaaattttagtgatggtgcttgcgaaaaagggcttcaggcacttaaaaatggtgctccgattttaactgatactgatatggcagcagcagcaataaaaaatatggcagaaaatactactaggaataaagtattcaccgctagaatgtggtttgaaaaaaataatcatacaaacttaactaaaactgcatatggcttaagtgaaggctggaaggagttatccgctatgaattctggaggtaaatcacctattgtagttattggcagttcgcctacagcgttaacttatttaattgatattttagaaaatgcaaaagatttacctagtttaattatcggaatgcctgttggatttattggagtagagaaaagcaaaaacaaacttatttctaccgatcttcctagaattgttttgaattcaactagaggaggtgctgcaatggcagctgctacggttaacgccttattaagggagactctttaa

SEQ ID NO: 154226 - protein, 207 aa, Prochlorococcus marinus str. MIT 9301
MVVDHPIFLESIRFIRSHLLANDLNYLEKKVLERLVHTSGDFSVQNLVNFSDGACEKGLQALKNGAPILTDTDMAAAAIKNMAENTTRNKVFTARMWFEKNNHTNLTKTAYGLSEGWKELSAMNSGGKSPIVVIGSSPTALTYLIDILENAKDLPSLIIGMPVGFIGVEKSKNKLISTDLPRIVLNSTRGGAAMAAATVNALLRETL

SEQ ID NO: 154227 - DNA, 627 bp, Burkholderia vietnamiensis G4
  CDS (1)..(627): transl_table=11
atgcttgactacattcgcgacgggcaggagatctaccgccagtcgttcgcgacgatccgcgccgaggccgatctgacgcggattccgcccgatctcgagaaactcgcggtacgcgtgatccacgcgtgcgggatgatcgacatcgtgtacgacttgcgtttttccgcgggcgcgggccaggcgggccgcagcgcgctcgcggccggcgcgccgatcctgtgcgacgcgaaaatggtcgccgaaggcatcacgcgcgcgcggctgccggccggcaatcgcgtgatctgcacgctcggcgagccggaagtgcccgcgctcgcacgcgagctcggcaacacgcgctcggccgcggcgctcgaactgtggcgcccgcatctggccggcagcgtggtcgtgatcggcaacgcgccgaccgcgctgtttcatctgctcgacatgctcgacgccggcgcgccgcgcccggcgctgatcctcggctttccagtcggcttcatcggcgcggccgaatcgaaggcgctgctcgacgccgacagccgcggcgtgccgtacgtcgcgctgctcggccggcgcggcggcagcgcgatggccgcggccgcggtcaacgcgctggccacggaggccgaatga

SEQ ID NO: 154228 - protein, 208 aa, Burkholderia vietnamiensis G4
MLDYIRDGQEIYRQSFATIRAEADLTRIPPDLEKLAVRVIHACGMIDIVYDLRFSAGAGQAGRSALAAGAPILCDAKMVAEGITRARLPAGNRVICTLGEPEVPALARELGNTRSAAALELWRPHLAGSVVVIGNAPTALFHLLDMLDAGAPRPALILGFPVGFIGAAESKALLDADSRGVPYVALLGRRGGSAMAAAAVNALATEAE

SEQ ID NO: 154229 - DNA, 633 bp, Bradyrhizobium sp. ORS278
  CDS (1)..(633): transl_table=11
atgtctgatctgcgcgattacatcaaggatggcgcggagatctatcgccgctcgttcgcgacgatccgcgccgaggccgatctgtcgcgcttccaggggctggccgagaagatcgcggtccgcatcatccatgcctgcggcatggtggagatcacgtccgacatcgagatgtcggagcactttgccgccgcggcgcgcgcggcgctcgatcgcggcgcgccgatcctgtgcgatgccaagatggtggcccagggcattacgcgcgcgcggctgccagccaggaacgagatcatctgcacactcgatgcgcccgatgttccggcgctcgccgcgcagctcggcacgacgcgctcggccgcagcgcttgaattgtggcggccgcatctcgaaggggcgctggtcgcgatcggcaatgcaccgacctcgctgtttcatctgctcgacatgctcgatcagggcgcgccgcggccggcggcggtgatcggaacggcggtgggcttcgtcggcgcgcgcgagtccaaggaggcgctcgcggccgacggccgggtgccgtacctgatcgtgaaggggcgcaagggcggcagcgccatggccgtcgcggccgtcaatgcgatcgcgagcgacgttgaatga

SEQ ID NO: 154230 - protein, 210 aa, Bradyrhizobium sp. ORS278
MSDLRDYIKDGAEIYRRSFATIRAEADLSRFQGLAEKIAVRIIHACGMVEITSDIEMSEHFAAAARAALDRGAPILCDAKMVAQGITRARLPARNEIICTLDAPDVPALAAQLGTTRSAAALELWRPHLEGALVAIGNAPTSLFHLLDMLDQGAPRPAAVIGTAVGFVGARESKEALAADGRVPYLIVKGRKGGSAMAVAAVNAIASDVE

SEQ ID NO: 154231 - DNA, 636 bp, Klebsiella pneumoniae subsp. pneumoniae MGH 78578
  CDS (1)..(636): transl_table=11
atgcagtacatccaacaaccgcaggcgatcgaggcgaaaagcttcgacatcatcagcgagatcatcgccgaaacgcgaccggactaccgtttcgccagcccgctgcacgaggcgattatcaagcgggtgatccacaccaccgctgacttcgactggctggatattctgtggttttctccggatgccctgatcgcgctgagtgaggccttgagccggccctgcacgctgtataccgataccaccatggcgctgtccgggatcaacaaaaccctgctggcccgctttggcggcgaatgccgctgctatatcagcgacccgcgggtggtgcgcgaggcgcaaagccgggggatgacccgctcgatggcggcggtggatattgcggtgcaggagcccggggagaaagtgttcgtcttcggcaatgcgccaaccgcgctgtttcgcctgctggaacatcgcgagaccgccatcggcggcgtggtgggggtgccggtcgggttcgtcggcgccgcggagtcgaaagcggcgctcagcgagagcggcctgccggccatcgccgcgctcggccgcaaagggggaagcaacgtggcggcagcgattgtgaacgctctgctttaccacctgcgggaggcgcaatga

SEQ ID NO: 154232 - protein, 211 aa, Klebsiella pneumoniae subsp. pneumoniae MGH 78578
MQYIQQPQAIEAKSFDIISEIIAETRPDYRFASPLHEAIIKRVIHTTADFDWLDILWFSPDALIALSEALSRPCTLYTDTTMALSGINKTLLARFGGECRCYISDPRVVREAQSRGMTRSMAAVDIAVQEPGEKVFVFGNAPTALFRLLEHRETAIGGVVGVPVGFVGAAESKAALSESGLPAIAALGRKGGSNVAAAIVNALLYHLREAQ

SEQ ID NO: 154233 - DNA, 636 bp, Xanthobacter autotrophicus Py2
  CDS (1)..(636): transl_table=11
atgaccctccccttcaactacgtgcgcgacggcaccgccatctacgagcgctccttcgccattatccgcgccgaggccgacctgtcgcgcttctcccccgaggaggaagacgtggcggtgcgcatgatccacgcctgcgggctggtggacgcggcgcgcgatttcgtcttcggcccgggcgtggtggccgccgcccgcgcggcactgcaagccggcgcgcccatcctgtgcgatgcccagatggtggcccacggcatcacccgcgcccgcctgccagccagcaacgaggtggtctgcaccctgcgcgatcccgccgtgccggcgctggccgaaaagctcggcaccacccgctcggccgccgcgctggaattgtggcgcgagcagcttgccggcgcggtcgtcgccatcggcaatgcgcccaccgccctcttccatttgctggaaatgctagacaagggcgcaccccgccccgccgccatcctgggcatgccggtgggcttcgtgggcgcggcggaatccaaggatgcgctggcggccgatccgcgcggcgtgccgttcgccatcgtgcgcgggcggctcggcggcagcgccatcacctcggccgccgtcaacgcgctggcgagggccgggctatga

SEQ ID NO: 154234 - protein, 211 aa, Xanthobacter autotrophicus Py2
MTLPFNYVRDGTAIYERSFAIIRAEADLSRFSPEEEDVAVRMIHACGLVDAARDFVFGPGVVAAARAALQAGAPILCDAQMVAHGITRARLPASNEVVCTLRDPAVPALAEKLGTTRSAAALELWREQLAGAVVAIGNAPTALFHLLEMLDKGAPRPAAILGMPVGFVGAAESKDALAADPRGVPFAIVRGRLGGSAITSAAVNALARAGL

SEQ ID NO: 154235 - DNA, 624 bp, Prochlorococcus marinus str. MIT 9215
  CDS (1)..(624): transl_table=11
atggtaatagatcatccaatttttttggaaagcatcagattcataagatctcatttagaagccaatgatctaaattatttggaaaaaaaagttttagaaagattagtccatacttcaggagatttttcagttcaaaatcttttaaattttggagaaggtgcttgcgaaaaggggcttcaggcactgaaaaatggtgctccgattttaactgataccgatatggctgcagcagcaataaaatccatggcagaaaataccactaggaatgaagtattcacggctagaatgtggattggaaaaaataatcagacacaattaactaaaactgcatatggcttaagtaaaggttggaaggagttatccgctataaattatggaagcaaatcacctattgtagttattggcagttctccaacagctttaacttatttaattgatattttagagaatgcaaaagatttacctagtttaattattgggatgcccgttggctttattggagtagagaaaagcaaaaacaaactgatttctacagatcttcctagaattgttttgaactcaactagaggaggtgctgccatggcagctgctgcggtcaacgccttgttgagggaaactatttaa

SEQ ID NO: 154236 - protein, 207 aa, Prochlorococcus marinus str. MIT 9215
MVIDHPIFLESIRFIRSHLEANDLNYLEKKVLERLVHTSGDFSVQNLLNFGEGACEKGLQALKNGAPILTDTDMAAAAIKSMAENTTRNEVFTARMWIGKNNQTQLTKTAYGLSKGWKELSAINYGSKSPIVVIGSSPTALTYLIDILENAKDLPSLIIGMPVGFIGVEKSKNKLISTDLPRIVLNSTRGGAAMAAAAVNALLRETI

SEQ ID NO: 154237 - DNA, 699 bp, Thermus thermophilus HB27
  CDS (1)..(699): transl_table=11
atggatgacctgatcaaggcgcagaaaaaccctgcccaccagatgacggaaaaagggcgggccatagaggaggagagcttccgcatcgtggaccaggaagcggggccccacggcttctcccccctggagtggcccgtggtgcgccggatgatccacgccaccgccgactttgagtacaaggcgctcacccgctttagccaaggggcggtggaggcggggctaaaggccatccaagcgggggcgcggatcctggtggacgcccggatgatcgcctgcggcctaaacccggaaaggctcaggctcttcggcaacgaggtggtggagctcctcgcccaccctgaggtggtggcaagggccaaggccacggggggaacccgggccgaggcggcggtggcctacgcctgggaaaaggggcttctggacggggccatcgtgggggtggggaacgcccccaccttcctcctcgccctggtggaggccatccggcaaggggcgaggcccgccctggtcctggggatgcccgtgggcttcgtgaacgtcctagaggccaagcgggccctcatggaagccccggtgccctggatcgtcacggagggccgaaaagggggaagcaccctggtggtggccgccctccacgccctgatccgcctcgcggcggacgggggggtggacacctccagggcctacagggaggggtag

SEQ ID NO: 154238 - protein, 232 aa, Thermus thermophilus HB27
MDDLIKAQKNPAHQMTEKGRAIEEESFRIVDQEAGPHGFSPLEWPVVRRMIHATADFEYKALTRFSQGAVEAGLKAIQAGARILVDARMIACGLNPERLRLFGNEVVELLAHPEVVARAKATGGTRAEAAVAYAWEKGLLDGAIVGVGNAPTFLLALVEAIRQGARPALVLGMPVGFVNVLEAKRALMEAPVPWIVTEGRKGGSTLVVAALHALIRLAADGGVDTSRAYREG

SEQ ID NO: 154239 - DNA, 642 bp, Desulfovibrio vulgaris subsp. vulgaris str. Hildenborough
  CDS (1)..(642): transl_table=11
atgcccacaagactgcaaccatgtttcgcccctgacgagattgaagcgcgttcgttcgccatcatcgacgccgaggcgggagactccaaaccctttaccggacgactgtggcatgtggcgcgccgccttgtgcacacctgcgccgacttcgacatcctgcccgacctcgttctggacggcgcgggggtcgacgcgggcatcgctgccatccgggcgggggcatccatcttcaccgacaccgagatggcccgctgcggcatggtggcgcgccgcttcgcccccttcgggtgcaccgtcgagagcctcatatcgctcccgggcgtggcggaaagggcccgcagcacaggttcgacacgctccgccgctgcggtcgcactggctggagaacgcctcggcggggccatcgtggccatcggcaacgcccccacggcggtgctggcgctgatcgaccacctcgacaggggcggccccgcaccggcgctggtggtgggcatgcccgtgggcttcgtcaacgcggcagagtcgaaggaactgctgcttgagcgttgtcccgtaccgcatatcgtcctgcgcggacgcaagggcgggtcgacgctggctgccgccacggtcaacgccctcgccatcctcgccgcagaatga

SEQ ID NO: 154240 - protein, 213 aa, Desulfovibrio vulgaris subsp. vulgaris str. Hildenborough
MPTRLQPCFAPDEIEARSFAIIDAEAGDSKPFTGRLWHVARRLVHTCADFDILPDLVLDGAGVDAGIAAIRAGASIFTDTEMARCGMVARRFAPFGCTVESLISLPGVAERARSTGSTRSAAAVALAGERLGGAIVAIGNAPTAVLALIDHLDRGGPAPALVVGMPVGFVNAAESKELLLERCPVPHIVLRGRKGGSTLAAATVNALAILAAE

SEQ ID NO: 154241 - DNA, 633 bp, Listeria monocytogenes str. 4b F2365
  CDS (1)..(633): transl_table=11
atgaactatattaagaatccagccaaaattgaagagaaaagctttgaaattattcaacaaattattaatgatattcgtccagattacacatttcaaaacaagttagaggaagcgattatcaagcgtgcaatacatacgacggcagattttgattacttagatagcctcgtttttcaacaagatgccatcgcgaaaatcattcatgttcttcaaaataaaggaactattttcacggatacgaatatggcacttagtggaattaataaacgacttttagatgaacttgggtgtaaatatcattgttatgtgagtgacccagagacgatggagattgccaaacagcatgggattacacgctctatggctggaattaaactcgcttctttaaaagatggaccgaaactatttgtcctcggaaatgcgccaactgcggtgtataaaattatcgagatgacagaaagtggggaattgcaagcagatgcagtagtggcagtaccggttggttttgtcggagcggctgaatgtaaagaggaaattttagaaacagatatcccagccattgtcgcacgcggtagaaaaggcggtagtaatcttgctgcagctatcattaatgcaatcttgattacgatgtaa

SEQ ID NO: 154242 - protein, 210 aa, Listeria monocytogenes str. 4b F2365
MNYIKNPAKIEEKSFEIIQQIINDIRPDYTFQNKLEEAIIKRAIHTTADFDYLDSLVFQQDAIAKIIHVLQNKGTIFTDTNMALSGINKRLLDELGCKYHCYVSDPETMEIAKQHGITRSMAGIKLASLKDGPKLFVLGNAPTAVYKIIEMTESGELQADAVVAVPVGFVGAAECKEEILETDIPAIVARGRKGGSNLAAAIINAILITM

SEQ ID NO: 154243 - DNA, 588 bp, Picrophilus torridus DSM 9790
  CDS (1)..(588): transl_table=11
atgttaaatccaggggaaatttacaggaaaagccttgaaataatctataatagccttggcatagatgatagtaaagagaacagaataaaggcccgtgcggttcatgcaaccggagatcttgatgtatttaaaacgattgtttttaagaacgatccattaaataatggcattaacgccttaagattaaacaggtttatagtaacagatgttaacatggtaatttcagggataacaaggtataatagaaaggtatgcctaataaatgacgacgatgtccttttaaaatcaaaaatgaccgggctttcaaggtcatatctttcaataaagaaggccgcatcaatttataaagatgcaatctatgttataggtgatgcgccaacagcacttatgtcattgatcgaggaggtgaaaaaaggcctaaggccatcgcttgtcatagcaacgcccgtcggctttgtatcagcacttgaatcaaagattgatcttttatcctgcgaaataccgttgataacaaatatttccagaaaaggtggttccccaatggctgcagcattaatgaatggaataataggtgagcttcatgcctag

SEQ ID NO: 154244 - protein, 195 aa, Picrophilus torridus DSM 9790
MLNPGEIYRKSLEIIYNSLGIDDSKENRIKARAVHATGDLDVFKTIVFKNDPLNNGINALRLNRFIVTDVNMVISGITRYNRKVCLINDDDVLLKSKMTGLSRSYLSIKKAASIYKDAIYVIGDAPTALMSLIEEVKKGLRPSLVIATPVGFVSALESKIDLLSCEIPLITNISRKGGSPMAAALMNGIIGELHA

SEQ ID NO: 154245 - DNA, 654 bp, Propionibacterium acnes KPA171202
  CDS (1)..(654): transl_table=11
atggcccacgaatacatcaacaacggatccgacatttaccgcgagtccttccgtatcattcgctctgaggcgaacctggatcgcttccccaccgacgttgagggggttgtcgtccgcatgatccacgccgctgccgatccggccatcgccgatgacatcgcttttaccccggcagtagtgacggcagctcgcagggctttaggtgacggtgcaccaattctgtgtgattcctccatgacggccaccggcattatccgatcccgactgcctcgcgacaacgaaacgatctgctacatcaaagaccctcgcttggccgatatcgctcaggcgaaagatatgacgaagacctgcgccgcggtggacttgtggaccgaggaaggcaaactcgacggagccattgtcgctatcggcaatgcccccaccgcgctgtttcgagtgcttgaggtgtgcgaagagaccggcgctcgcccagcagccgtcgttggtatcccggtcgggttcgtcggtgcagcagagtccaagcaggccctcgtcgactcaaaactgggcttggagtacctcaccttgctgggacgccgcggtggatcagcgatcgcagtggccgccgttaacgccatcgcatcgaccgacgagttgaccaatagtcatcgctga

SEQ ID NO: 154246 - protein, 217 aa, Propionibacterium acnes KPA171202
MAHEYINNGSDIYRESFRIIRSEANLDRFPTDVEGVVVRMIHAAADPAIADDIAFTPAVVTAARRALGDGAPILCDSSMTATGIIRSRLPRDNETICYIKDPRLADIAQAKDMTKTCAAVDLWTEEGKLDGAIVAIGNAPTALFRVLEVCEETGARPAAVVGIPVGFVGAAESKQALVDSKLGLEYLTLLGRRGGSAIAVAAVNAIASTDELTNSHR

SEQ ID NO: 154247 - DNA, 633 bp, Desulfotalea psychrophila LSv54
  CDS (1)..(633): transl_table=11
atgtccgtcaccatccaaaaaatagggcccaccgagatcgaagccgagagttttcgtattatagagagtgaaatcggcgagcacggtcttgacccacaaacctgggccatcacccgccgggtgatccatgccaccgcagattttgccttccgcgacaatcttaagtttcatccccaagccatagaacggggcatcgctgccatccgggctggcaaaaacatcctcaccgatgtcaatatgacggccatcggcatcagcaagggactcctcggccattttggcggcacggtaagttgcggggtggccgatcctgctattgccatccgggccaaagaactgggtaagacccgctctcaaacagccatcagcgaaggcctcaacgaagatgtcggcatcatcgccatcggcaatgcccccacggccctcctccaaatcatgaagattctgaaagaacggccggaactgaaccccctaatcatcggggtccccgtaggctttgtcaatgcggctgaatcaaaggccctgctcgccgagagcccccatctttatatcaccagcctgggacgcaagggaggcagtccggtggccgcatccatcaccaatgccctgctccatctggcaaaagagctatga

SEQ ID NO: 154248 - protein, 210 aa, Desulfotalea psychrophila LSv54
MSVTIQKIGPTEIEAESFRIIESEIGEHGLDPQTWAITRRVIHATADFAFRDNLKFHPQAIERGIAAIRAGKNILTDVNMTAIGISKGLLGHFGGTVSCGVADPAIAIRAKELGKTRSQTAISEGLNEDVGIIAIGNAPTALLQIMKILKERPELNPLIIGVPVGFVNAAESKALLAESPHLYITSLGRKGGSPVAASITNALLHLAKEL

SEQ ID NO: 154249 - DNA, 660 bp, Methylococcus capsulatus str. Bath
  CDS (1)..(660): transl_table=11
atgagcaacgacagcgtcaccgaacagctcaccgaagcggggcgccgcatcgagcacgattccttcgccatcgtcgatgccgaggccggcgcccatgcctacggccccgagcaatggcaggtggtgcggcgcatgatccacgccaccgctgatttcgagttcaacggcctgacccgcttccacccggaagccgtcgcggcggggctgcgggcgatccgcagcggcgcccccatcgtcgccgatgtcgagatgatctgcgtcgggctgtccagaccgcgcctggaccatttcggcatgaccgtccatcagttcatcgccgacccggacgtgatcgccggcgccagggcggaaaacaccacgcgggccgtgcaggccatgcgcaaggcccggtcggcgggtcttctggacggcggcatcgtcgccgtgggcaacgcgcccaccgccctgcgggaagtggtgcgcatgatccgcgaggagggcctccggccggcgctgatcgtcggcatgccggtgggcttcgtcgcggcggcggagtccaaggccgaaaccgcggcgctggattcggtgccctggatcgtcaccgagggccgcaagggcggttccaccctggtggtggcggccctccacgcgttgctggccctggccgaggcggcaagctga

SEQ ID NO: 154250 - protein, 219 aa, Methylococcus capsulatus str. Bath
MSNDSVTEQLTEAGRRIEHDSFAIVDAEAGAHAYGPEQWQVVRRMIHATADFEFNGLTRFHPEAVAAGLRAIRSGAPIVADVEMICVGLSRPRLDHFGMTVHQFIADPDVIAGARAENTTRAVQAMRKARSAGLLDGGIVAVGNAPTALREVVRMIREEGLRPALIVGMPVGFVAAAESKAETAALDSVPWIVTEGRKGGSTLVVAALHALLALAEAAS

SEQ ID NO: 154251 - DNA, 630 bp, Silicibacter pomeroyi DSS-3
  CDS (1)..(630): transl_table=11
atgccctatgaatacgaaaccgatggcgcggcgatctacaaacagtcctttgccaccatccgggccgaggccgatctggcccgtttcgacgcggacgaggagcaggtcgcggtccgcatgatccatgccgccggcatggtcgggctggaagagttcgttcatttctcgcccggcttcgtcaccgccgcgcgggatgctctggaggcgggcgcgccgatcctgtgcgatgcgcgcatggtgagcgagggcgtgacccggttccgcctgcccgccgataacacggtgatctgtaccctgcatgacgagcgcgtgcgcccgctggccgccgagatgggcaacacccgctcggccgccgcgctggaactgtggcgcccgcatctggcaggcgccgtggtggcgatcggtaatgcgcccaccgccctgttccacctgctgaacatgctggaagaccccgattgcccgcgccccgccgcgatcatcggctgcccggtgggctttgtcggcgcggtcgagtcgaaagacgccctgtgggaggcacagccggtgccctgctgcatcgtcaagggccgcctgggcggcagcgccatcaccgttgcggcgatcaacgccatcgcgagccgcgccgaatga

SEQ ID NO: 154252 - protein, 209 aa, Silicibacter pomeroyi DSS-3
MPYEYETDGAAIYKQSFATIRAEADLARFDADEEQVAVRMIHAAGMVGLEEFVHFSPGFVTAARDALEAGAPILCDARMVSEGVTRFRLPADNTVICTLHDERVRPLAAEMGNTRSAAALELWRPHLAGAVVAIGNAPTALFHLLNMLEDPDCPRPAAIIGCPVGFVGAVESKDALWEAQPVPCCIVKGRLGGSAITVAAINAIASRAE

SEQ ID NO: 154253 - DNA, 1410 bp, Bacteroides fragilis NCTC 9343
  CDS (1)..(1410): transl_table=11
atgaaacaatccaaaattatcgtagccggcattgggccgggaagcgaacaagatatcactcctgccgtgctcgccgctgtacgcgaagcagatgtagtggtgggatataaatattatttccgttttatacgtgattttgtccgtccggacgccgagtgtatcgacaccggaatgaaacgcgaacgtgcccgcgccgaacaggctttcgaatatgccgaacaaggaaagaccgtttgtgtcattagctccggagatgccggtatctatggcatgacacccttgatttacgaaatgaaacgcgaacgtcagagtaacgtagaaatcattgccttaccgggaatcagcgctttccagaaagcggcctcactacttggtgcaccgatcgggcatgacttctgtgtcatctctctatcagacctgatgacaccatgggaacgtatcgagcgccgtatcctcgctgcagcccaggccgactttgtgacggctgtatacaatcccaagagtgatgggcgctattggcaaatttatcgtctgcgcgaaatctttctgcgcgaaggacgctcaccggaaacccctgtaggctatgttcggcaggctggtcgtgaagaacaggaaatacacatcaccactctcgccgcattcgatccggaaactgtggatatgtttacggtcgttctgattggtaactcacaaacatatacatttaaccaaaacataattactccacggggatactatcgcgaaacacgcagtgaagcaaccggtatcggacaagacatcatgatacgcagtttccgcaccatcgagacggaattgaagaaccgtgatattccactcgaccggaaatgggccttattgcatgctatccatacgacagccgacttcgagatggaacgtttgctttacactgatcccaatgctgtggcctctctctatgacgccatccgcacaggaaatctgcggactattgtaacagatgtaacgatggcagcttccggcatccgtaaaggtgcattgcagcgtctgggtgtagaagtgaaatgttacttgaacgatgaaagagtagccgaaatggcaacttcaaaggggatcacccgtacacaagcgggcatccgcctggctgtggaagaacatcctgatgcactctttgtctttggtaatgcccccacagcactgatggaactttgtgatctgatccggaaagagaaagcgcaaccggcaggtatcgtagccgctcccgtagggtttgtccatgtagaagagtcaaaacacatgacaaagcccttcacccacatccccaaactgattgtggaaggacgcaagggcggaagtaatctggctgccaccctggtaaatgccattctttgctatcccgatgcggaacaactcagacccggaagagacgtatag

SEQ ID NO: 154254 - protein, 469 aa, Bacteroides fragilis NCTC 9343
MKQSKIIVAGIGPGSEQDITPAVLAAVREADVVVGYKYYFRFIRDFVRPDAECIDTGMKRERARAEQAFEYAEQGKTVCVISSGDAGIYGMTPLIYEMKRERQSNVEIIALPGISAFQKAASLLGAPIGHDFCVISLSDLMTPWERIERRILAAAQADFVTAVYNPKSDGRYWQIYRLREIFLREGRSPETPVGYVRQAGREEQEIHITTLAAFDPETVDMFTVVLIGNSQTYTFNQNIITPRGYYRETRSEATGIGQDIMIRSFRTIETELKNRDIPLDRKWALLHAIHTTADFEMERLLYTDPNAVASLYDAIRTGNLRTIVTDVTMAASGIRKGALQRLGVEVKCYLNDERVAEMATSKGITRTQAGIRLAVEEHPDALFVFGNAPTALMELCDLIRKEKAQPAGIVAAPVGFVHVEESKHMTKPFTHIPKLIVEGRKGGSNLAATLVNAILCYPDAEQLRPGRDV

SEQ ID NO: 154255 - DNA, 627 bp, Pseudomonas syringae pv. syringae B728a
  CDS (1)..(627): transl_table=11
atgattgattacatccgcgatggtcaggagatatatcgcaactctttcacgatcattcgcgccgaagcgcgtcttgacacgatccctgccgacctggaaaaactcgccgtgcgcgtgatccatgcctgcgggatggtcgaagtcatcgaagacctgcgcttctcgccgggtgccggtaccgccgggcgcaacgctctggccgccggagcgccgatcctgtgtgatgcgcgcatggtttccgaaggcatcacccgcacccggctgcccgccaataacccgatcatctgcaccttgcatgatgaaggcgtgcgggaaatggccctggagctgggcaatacgcgttctgcggtggcgcttgagctgtggcgtccgcacctggaaggcagtgtagtggtcatcggcaacgcgccgaccgcgctgttctatctgttggaaatgctcgatgccggtgcgccgaagcctgcgctgattctcggctttccggtcggctttgtcggggccgccgagtctaaggcgatgctcgccgccgatagccgcggcgtgccgttcgtgatcatgcagggccgtcgtggcggcagcgccatggccgtggccgctgtcaacgcactggccacggagatcgaatga

SEQ ID NO: 154256 - protein, 208 aa, Pseudomonas syringae pv. syringae B728a
MIDYIRDGQEIYRNSFTIIRAEARLDTIPADLEKLAVRVIHACGMVEVIEDLRFSPGAGTAGRNALAAGAPILCDARMVSEGITRTRLPANNPIICTLHDEGVREMALELGNTRSAVALELWRPHLEGSVVVIGNAPTALFYLLEMLDAGAPKPALILGFPVGFVGAAESKAMLAADSRGVPFVIMQGRRGGSAMAVAAVNALATEIE

SEQ ID NO: 154257 - DNA, 627 bp, Pseudomonas fluorescens Pf-5
  CDS (1)..(627): transl_table=11
atgcttgattacatccgcgacggtcaggagatctatcgcaactccttcgcgatcattcgcgaagaagcccggctggagcgcattcccgccgacctggagaaactcgccgtgcgggtgatccatgcctgcggcatggtcgaggccgtcgatggcctgcagttttccgagggcgccggcaaggccgggcgcgatgccctggcggccggtgcaccgattctctgcgatgcgcgcatggtttccgagggtattacccgggcccgcttgccggccaacaaccaggtgatctgcaccctgcgcgacgacagcgtgccagcgctggcccgggagctgggcaacacccgttccgctgcggccctggagctatggcgcccgcacctggaaggcagcgtggtggtgatcggcaacgcgcccaccgctttgttctacctgctggaaatgctcgatgcgggcgcgccgaaaccggcgctgatcctcggcttcccggtgggcttcgtcggtgccgccgaatccaaggcgatgctcgccgccgacagccgtggggtgcccttcgtgatcatgcagggccgcctgggcggcagcgccatggcggcggctgcggtcaatgccctggccacggaggtcgaatga

SEQ ID NO: 154258 - protein, 208 aa, Pseudomonas fluorescens Pf-5
MLDYIRDGQEIYRNSFAIIREEARLERIPADLEKLAVRVIHACGMVEAVDGLQFSEGAGKAGRDALAAGAPILCDARMVSEGITRARLPANNQVICTLRDDSVPALARELGNTRSAAALELWRPHLEGSVVVIGNAPTALFYLLEMLDAGAPKPALILGFPVGFVGAAESKAMLAADSRGVPFVIMQGRLGGSAMAAAAVNALATEVE

SEQ ID NO: 154259 - DNA, 627 bp, Pseudomonas syringae pv. phaseolicola 1448A
  CDS (1)..(627): transl_table=11
atgattgattacatccgcgatggtcaggagatatatcgcaactccttctcgatcattcgcgccgaagcgcgcctggacacgatccccgccgacctggaaaaactcgccgtgcgcgtgatccatgcctgcgggatggtcgaagtcattgaagacctgcgcttctcgccgggtgccggtacagccgggcgcaatgccctggccgccggtgcaccgatcctctgcgacgcacgcatggtctcagaaggcatcacccgtacccggctgcccgccaacaaccagattatctgcacattgcacgatgaaggcgtgcgggaaatggcgctcgaactgggcaatacgcgctctgcggtggcgctggagctgtggcgtccgtacctggaaggcagcgtagtggtcatcggcaatgcgccgactgcgctgttctatctgctcgaaatgctcgatgcaggcgcgccgaaaccagcgctgattctcggctttccggttggctttgtcggcgctgccgagtccaaggccatgcttgccgcagacagccgtggcgtgccatttgtgatcatgcagggtcgtcgtggcggcagcgccatggccgtggccgctgtcaatgcactggccacggagatcgaatga

SEQ ID NO: 154260 - protein, 208 aa, Pseudomonas syringae pv. phaseolicola 1448A
MIDYIRDGQEIYRNSFSIIRAEARLDTIPADLEKLAVRVIHACGMVEVIEDLRFSPGAGTAGRNALAAGAPILCDARMVSEGITRTRLPANNQIICTLHDEGVREMALELGNTRSAVALELWRPYLEGSVVVIGNAPTALFYLLEMLDAGAPKPALILGFPVGFVGAAESKAMLAADSRGVPFVIMQGRRGGSAMAVAAVNALATEIE

SEQ ID NO: 154261 - DNA, 678 bp, Dechloromonas aromatica RCB
  CDS (1)..(678): transl_table=11
atgaccaccaacactatcaccgaacaactgaccgccgccggccgtgccatcgagcacgattcatttgccgtgatcgatgcagaagccggcccgcacacctataccgacgagcagtggccactggttcgccgcatgatccacgccaacgccgacttcgagttcaacggcctgaccgcctttcatcaggaagccatgcgcgccggctttcaggcggtgttgaagggcaatacgccgatcgtcgccgatgtcgagatgatctgcgtcggcctctccaagccacgcctgcagcacttcggcctgagcacgcaccactacatttccgatgaagacgtcatcgagcaggccagggccgaagacaccacccgcgccgtccaggccatgcgcaaggcccagcgtctgggcaagctcgatggcgccatcgttggcatcggcaatgcgccgactgcactgatcgaactggtccgcctgattcgcgaggaaggcgtccgtccggcgctggtggtcgcgatgccggtcggtttcgtttcagcggccgaatcgaaggatctgatgatgaccgtcaacgaagtgccctgggtcgccatcaaggggcgcaagggcggctcgaccctggtggttgcggcaatccacgccatgctgtcgctggccgaggccgaacagcacaagtcggtggcctga

SEQ ID NO: 154262 - protein, 225 aa, Dechloromonas aromatica RCB
MTTNTITEQLTAAGRAIEHDSFAVIDAEAGPHTYTDEQWPLVRRMIHANADFEFNGLTAFHQEAMRAGFQAVLKGNTPIVADVEMICVGLSKPRLQHFGLSTHHYISDEDVIEQARAEDTTRAVQAMRKAQRLGKLDGAIVGIGNAPTALIELVRLIREEGVRPALVVAMPVGFVSAAESKDLMMTVNEVPWVAIKGRKGGSTLVVAAIHAMLSLAEAEQHKSVA

SEQ ID NO: 154263 - DNA, 675 bp, Thermobifida fusca YX
  CDS (1)..(675): transl_table=11
atgacaccgcattccgacaggcccaccccgctctccccgccgcctcggcgctacacctacgagaccgacagcgcaaccatctacgcgcactccttcgccaccatccgggccgaagccgacctgtccgggctccccacggacgccgaaaagattgcggtccgcatgatccacgcctgcggccaaaccgacctcgcccgtgacctggtcatccaccccaacctggtgcccgcggcccgagacgcgctgcgcggcggggcccccatcctcaccgacgcacgcatggtggcgtccggggtgacccgttcccggctccccgccgacaacgaggtgctgtgtctgctcaacgaccctcgtgttccccaactcgccacggcgtgggggacgacgcgctccgcggccgcggtgtcgctgtggacggaccgcttggcaggcgcagtcatcgcgatcggcaacgcccccaccgccctattccacctgctagagctgatcgactccggcgcgccccgaccagccgcgatcatcggcgtgcccgtcgggttcatcggcgcggccgaatccaaagaagccctcatgtcccaccccgcaggcatcccctacctggtggtacgtggccgccgcggaggctcggcgctagccgcgtccgcggtcaacgctctcgcgcaggaggaggaatga

SEQ ID NO: 154264 - protein, 224 aa, Thermobifida fusca YX
MTPHSDRPTPLSPPPRRYTYETDSATIYAHSFATIRAEADLSGLPTDAEKIAVRMIHACGQTDLARDLVIHPNLVPAARDALRGGAPILTDARMVASGVTRSRLPADNEVLCLLNDPRVPQLATAWGTTRSAAAVSLWTDRLAGAVIAIGNAPTALFHLLELIDSGAPRPAAIIGVPVGFIGAAESKEALMSHPAGIPYLVVRGRRGGSALAASAVNALAQEEE

SEQ ID NO: 154265 - DNA, 645 bp, Prochlorococcus marinus str. NATL2A
  CDS (1)..(645): transl_table=11
atgaaaacatcagaacatccaatttttctagaaagcatcaaatacattcgatctaaactaggcaataccggacttgatcaaactcagcaatcaattttagaacgcattattcattcaagtggagactttagtttgcagtcatgtctcaagtttagtcccactgcttgtaaggatgctattagggcattgaaaaatggtgcaacgattttgactgatactcatatggcagaggcagcaatatcgcctatggctaaacgaaccttgaattcaaatattgaatgcattttagatatggctccagcttctatatccataaatacaagtttgactactagaagtgcaattggtatgaaaaataagtggttaaattttgaggataaagacgccataaaaaacccaactgctccactggttgtaattgggagcgctccaacagctttaatttctttgttagatcttgttgaagctggcgataagcccccaagtttaattattggaatgccagtgggctttattggggttaatgagagtaaaactcgattattaaatagtgattgtgcatatattgttcttgaaggttctaaaggaggcgcatccctagcggcagctgctacaaatgctttattgagagcagctgagcattaa

SEQ ID NO: 154266 - protein, 214 aa, Prochlorococcus marinus str. NATL2A
MKTSEHPIFLESIKYIRSKLGNTGLDQTQQSILERIIHSSGDFSLQSCLKFSPTACKDAIRALKNGATILTDTHMAEAAISPMAKRTLNSNIECILDMAPASISINTSLTTRSAIGMKNKWLNFEDKDAIKNPTAPLVVIGSAPTALISLLDLVEAGDKPPSLIIGMPVGFIGVNESKTRLLNSDCAYIVLEGSKGGASLAAAATNALLRAAEH

SEQ ID NO: 154267 - DNA, 738 bp, Methanosarcina barkeri str. Fusaro
  CDS (1)..(738): transl_table=11
atgactactgaagagaatgctaatgaaaaggtagggaaactcgacaatcttgaagaacttaccgagcttacggttgatgtgaatcccgaactcgtaagcatttgtaaggactcaggggcaagaaccgaagaagcaaaagccatctatatgaaaagccggacaatgatccaggaactcatcggcaacaaaactccagaagaccgcttccgccagcgctgtgttattgctactggagatctttccgtggcagatatcatgcgtttcatgcatgacccaatccctgcaggcgtggaagcaatcaaaaagggtgccccgattttcgtggatatcaatatggtaaaagccggaattacaaaagcaggacacaaatctgaaattatttgcgtgcttgatgaagacccgaatgctgaaatcgctaacaggtacggaattacgcgcacatcagccggcttcctcgctgccagagagaagctcgatgggagtattattgcaatcggaaatgcaccttctgcccttattatggtctgcaaacttgtcgagaagggtgtaagaccagctcttattatagggcttccggtaggtttcgtaaatgcagctgaatctaaggaaatagtccgaaacctgaaagttcctgtaccctctattagctgtgtagggacaaggggcggaaccccaatggcggttgcatgcgtaaatgagcttgttgcaatcgcaagagaaagtgaagacgcgaaataa

SEQ ID NO: 154268 - protein, 245 aa, Methanosarcina barkeri str. Fusaro
MTTEENANEKVGKLDNLEELTELTVDVNPELVSICKDSGARTEEAKAIYMKSRTMIQELIGNKTPEDRFRQRCVIATGDLSVADIMRFMHDPIPAGVEAIKKGAPIFVDINMVKAGITKAGHKSEIICVLDEDPNAEIANRYGITRTSAGFLAAREKLDGSIIAIGNAPSALIMVCKLVEKGVRPALIIGLPVGFVNAAESKEIVRNLKVPVPSISCVGTRGGTPMAVACVNELVAIARESEDAK

SEQ ID NO: 154269 - DNA, 621 bp, Anabaena variabilis ATCC 29413
  CDS (1)..(621): transl_table=11
atggaatggcacgtaagtgatgctcaaagtttagcaattatcgatagtgagattggcgatcatgtgttctcgccagcagaatatgaaattgttcgccgagtaatttacgctacggctgattttgagtataaatctttaatcagattttctgaacgtgctttacaagccggagcagcagcattggcagcacggactactattgtggtagatgtaccgatggtgcaaacaggtattgcttacgatattcaaaagacttttgctaacccagttttttgcagtacagaagctttgactcgtccccaaatagaaaaaactcgcgctgcatggggaattgaaactttagctaaacgctatccagaaggtatttttatagtaggtcaagcaccaacagctttgactacactagtggatttaattgaagcagaagagattagcccggctttaattcttgctactcccgtaggattagtagatatggaagatgctaaaaggcgcttgcaagactctttagtccctaatatcacaatcgacagccgtaaaggtaatgctgttgtggcagctgcgatcgccgatggtttgatagacttggcttggcaagcttatgggcaaaaaagggagtga

SEQ ID NO: 154270 - protein, 206 aa, Anabaena variabilis ATCC 29413
MEWHVSDAQSLAIIDSEIGDHVFSPAEYEIVRRVIYATADFEYKSLIRFSERALQAGAAALAARTTIVVDVPMVQTGIAYDIQKTFANPVFCSTEALTRPQIEKTRAAWGIETLAKRYPEGIFIVGQAPTALTTLVDLIEAEEISPALILATPVGLVDMEDAKRRLQDSLVPNITIDSRKGNAVVAAAIADGLIDLAWQAYGQKRE

SEQ ID NO: 154271 - DNA, 627 bp, Pseudomonas fluorescens PfO-1
  CDS (1)..(627): transl_table=11
atgcttgattacatccgcgacggtcaggagatctatcgcaactccttcgcgatcattcgcagcgaggccaacctggctcgtatcccggccgacctggaaaaactcgcggtgcgggtgattcacgcctgcggcatggtcgaggccatcgacgggctgcagttctccgaaggcgccggcaaggccgggcgcgatgcgctggccgctggcgcgccgatcctctgtgatgcgcggatggtttccgaaggtgtgacccgcgcgcgcctgccggccaacaaccaagtgatctgcaccttgcgcgacgacagtgtgccggaactggcgcgcgagctgggcaacactcgctcggcagctgcgctggaactgtggcgtccgcatctggaaggcagcgtggtggtgatcggcaacgcgccgacggcgctgttctatctgctggaaatgctcgacgccggcgccccgaaaccggcgctgatcctcggcttcccggtgggctttgtcggcgctgccgaatccaaggccgagctggccgccaacagccgtggcgtgccgttcgtgatcatgcagggccgcctcggcggcagcgccatggccgccgctgcggtcaatgccctcgccacggagatcgaatga

SEQ ID NO: 154272 - protein, 208 aa, Pseudomonas fluorescens PfO-1
MLDYIRDGQEIYRNSFAIIRSEANLARIPADLEKLAVRVIHACGMVEAIDGLQFSEGAGKAGRDALAAGAPILCDARMVSEGVTRARLPANNQVICTLRDDSVPELARELGNTRSAAALELWRPHLEGSVVVIGNAPTALFYLLEMLDAGAPKPALILGFPVGFVGAAESKAELAANSRGVPFVIMQGRLGGSAMAAAAVNALATEIE

SEQ ID NO: 154273 - DNA, 630 bp, Rhodobacter sphaeroides 2.4.1
  CDS (1)..(630): transl_table=11
atggcccatcgctacgaaaccgacggggcggcgatctaccgccagtccttcgccaccatccgcgcggaggcggcgctcgcgcgcttcacgcccgaggaggaggtggtggtggtccgcatgatccatgccgccggcatggtgggtctcgaggcgcatgtccgcttctcgcccggcatggcggttgccgcgcgggcggcgctcgaggcgggtgcgccgatcctctgcgatgcgcggatggtgagcgagggcatcacccgcccgcgcctgccggccgggaaccgcgtgatctgcacgcttcaggatgcggaggtgcccgagcttgcgaaatccatggccaccacccgctccgccgcggcgctggaactctggcggccgcatctcgcgggcgccgtggtcgcgatcggcaacgcgccgaccgcgctctttcacctgctgaacatgctcgaggatccggcctgcccgaggcccgcggccatcatcggctgcccggtgggcttcgtcggcgcagccgaatccaaggaggcgctgatgcaggacctgccctgcccgtcgctgatcgtcgagggccgcctcggcggctcggccatcacggttgcggctgtcaacgcgctggcgagccgggtggaatga

SEQ ID NO: 154274 - protein, 209 aa, Rhodobacter sphaeroides 2.4.1
MAHRYETDGAAIYRQSFATIRAEAALARFTPEEEVVVVRMIHAAGMVGLEAHVRFSPGMAVAARAALEAGAPILCDARMVSEGITRPRLPAGNRVICTLQDAEVPELAKSMATTRSAAALELWRPHLAGAVVAIGNAPTALFHLLNMLEDPACPRPAAIIGCPVGFVGAAESKEALMQDLPCPSLIVEGRLGGSAITVAAVNALASRVE

SEQ ID NO: 154275 - DNA, 615 bp, Carboxydothermus hydrogenoformans Z-2901
  CDS (1)..(615): transl_table=11
atgaattatgaatttttaattaatccccgggagattgaacagaaaagttttgccattattgaaagtttaacgggacttggcaatactcctgaagaccaggtaattaaacgggccatccatgcatcaggtgatccggaaatcagaaaggattttcgttttcatcccgcggctatcgaccgggggcttgccgctttaaaaaacaaaaatttaattattaccgatgtggaaatggtccgggcgggaattaccggttatgccggcgaggtagcctgcgcgattcgcgaggaagcggttaaaagaaaagctttagaaaataaagttacccgggcttatcaggcgatgatggagctaaaagagcgaatggatggagcggttatagcaattggtaatgccccaacagctcttttagcggtgattgaactcataaagaccggggtagagccggcgctggtggtgggagtgccggtgggctttgttggagcaaaagaaagtaaggaacttttgctgaactgtgatgtgccgtatatcacgttactgggtactaaagggggtagtaccattgcggcagcaatagttaatgctttaattaaattatccaggaccggagggaaataa

SEQ ID NO: 154276 - protein, 204 aa, Carboxydothermus hydrogenoformans Z-2901
MNYEFLINPREIEQKSFAIIESLTGLGNTPEDQVIKRAIHASGDPEIRKDFRFHPAAIDRGLAALKNKNLIITDVEMVRAGITGYAGEVACAIREEAVKRKALENKVTRAYQAMMELKERMDGAVIAIGNAPTALLAVIELIKTGVEPALVVGVPVGFVGAKESKELLLNCDVPYITLLGTKGGSTIAAAIVNALIKLSRTGGK

SEQ ID NO: 154277 - DNA, 627 bp, Burkholderia sp. 383
  CDS (1)..(627): transl_table=11
atgcttgactacattcgcgacgggcaggaaatctaccgccagtcgttcgcgacgatccgcgccgaggccgacctgtcgcaggttccgcccgacctcgagaaactcgcggtgcgcgtgatccatgcgtgcgggatggtcgacgtcgtctacgacctgcgcttctcggccggtgccggcacggcaggccgcacggcgcttgccgccggtgcgccgatcctgtgcgacgcgaggatggtcgccgaaggcatcacgcgcgcacggctgccggccgacaaccgcgtgatctgcacgctcggcgagcccgaggtgcccgatctcgcgcgacatctcggcaacacgcgttcggcggccgcgctcgaactgtggcgcccgcatctcgccggcagcgtcgtcgtgatcggcaatgcaccgaccgcgctgtttcacctgctcgacatgatcgacgccggtgcaccgcgcccagcattgattctcggtttcccggtcggcttcatcggcgcggccgaatcgaaggcgctgctcgatgccgacagccgcggcgtgccgtacgtcgcgctgctcggccggcgtggcggcagcgcgatggccgctgcggcgatcaacgccctcgcgacggaggtcgaatga

SEQ ID NO: 154278 - protein, 208 aa, Burkholderia sp. 383
MLDYIRDGQEIYRQSFATIRAEADLSQVPPDLEKLAVRVIHACGMVDVVYDLRFSAGAGTAGRTALAAGAPILCDARMVAEGITRARLPADNRVICTLGEPEVPDLARHLGNTRSAAALELWRPHLAGSVVVIGNAPTALFHLLDMIDAGAPRPALILGFPVGFIGAAESKALLDADSRGVPYVALLGRRGGSAMAAAAINALATEVE

SEQ ID NO: 154279 - DNA, 639 bp, Synechococcus sp. CC9605
  CDS (1)..(639): transl_table=11
atggcccaggaccacccgatcttcaccgaaagcatccggcggatccgggcggctctgggggacacgggcctgccgccgctgcaacagcaggtgctggaacggctggtgcacagcagcggcgatctttcattgggaacactgctgcggttcagtgagggggcctgtgagcagggtttggcagcgctgaagcagggagcgccgatcctgacggacaccgcgatggcggcggcggcggtggccccgatggcccaacggactctgggcactgccgtgcacacggtgctggagtgggcacctgaggcggtaccggcgggttcaacgcgtacggcggcgggcatgcagcgggcctggcgcgcgctcgcggaggcgtcaccggctccggtggtgctgatcggcagtgcgccgaccgcccttgaggtgctgttgcagcaggtggccgccggtgctccagcccccagcttggtgatcggcatgccggtggggtttgtgggggtatcggaaagcaagaagcatttggcggccagtggcctggtccagatccgtttggagagcagcaggggtggagcgggtctggtggccgcggcggtcaatgctctgcttcgcgctgctgcagcaccagctcaccccccctccagctga

SEQ ID NO: 154280 - protein, 212 aa, Synechococcus sp. CC9605
MAQDHPIFTESIRRIRAALGDTGLPPLQQQVLERLVHSSGDLSLGTLLRFSEGACEQGLAALKQGAPILTDTAMAAAAVAPMAQRTLGTAVHTVLEWAPEAVPAGSTRTAAGMQRAWRALAEASPAPVVLIGSAPTALEVLLQQVAAGAPAPSLVIGMPVGFVGVSESKKHLAASGLVQIRLESSRGGAGLVAAAVNALLRAAAAPAHPPSS

SEQ ID NO: 154281 - DNA, 645 bp, Geobacter metallireducens GS-15
  CDS (1)..(645): transl_table=11
atgtcggtccacctcgcccccgaggagatcgaggccgaatcgttccgcctcatcgatgaagaagtgggaacccatcactgggggcctgccgagtggccggtggtgcggcgggcgatccacacgagcgccgatttcgactacgtccgcaccatggtcttctccccccgggccgttgcccgtggcgtggcggccctgcgacaagggcgggggatcgtcaccgacaccaccatggccctgtcggggatagccaagccgcggctcaagcgtttcggcctcggcgccgcctgcttcgtggccgacccggaggtggcccgggaggcgaaggcgctcggcattacccgttctattgtggccatgcgcaagggtgcggcagacggagggaacggcatcttcgtcatcggcaacgcccccacggccctcttcgaactgttgcgtctcatccgcgaggaaggggtgcgtccggcgctgatcgtggggctgccggtggggttcgtgggggccgcagagagcaaggaggcccttctggccctggaggatgagtttcccgacatccccttcatcaccaaccgggggcgcaagggggggtccaacgtggccgctgccgtggtgaatgcgctcctgatcctggcggaggaggcggggtag

SEQ ID NO: 154282 - protein, 214 aa, Geobacter metallireducens GS-15
MSVHLAPEEIEAESFRLIDEEVGTHHWGPAEWPVVRRAIHTSADFDYVRTMVFSPRAVARGVAALRQGRGIVTDTTMALSGIAKPRLKRFGLGAACFVADPEVAREAKALGITRSIVAMRKGAADGGNGIFVIGNAPTALFELLRLIREEGVRPALIVGLPVGFVGAAESKEALLALEDEFPDIPFITNRGRKGGSNVAAAVVNALLILAEEAG

SEQ ID NO: 154283 - DNA, 663 bp, Desulfovibrio desulfuricans G20
  CDS (1)..(663): transl_table=11
atggatacccccgttcttcagcaatgcttcgcacctcaggccatcgaggcgcgctcctttgccattatcgattcggaagtgcccgagccgcgccccttctgcggtgcccactggcacatagcgcgcagactggtgcataccaccgccgattttgacctgctgaaccacatacggtttcatccgcaggcagtggaggcgggtatacgcgccctgcaaaacggctgcaccatattcacagacacggagatggcccgctccggcatacccctgcgccgcatgacaccgctgggctgcacggtaacgtgtctgctgaaccgccccgatgtggtacacgcggcgcagcgcgacaacacaacccgcgcccatgccgccatgaacgccgccagcagcgaactggcgggagccatagtggccataggcaacgcacccacggcgctcatccggctggccggacatctggaacagggctgccctgcgcccgcactggtcatcgccatgcccgtgggctttgtaaacgcggcggaatccaaggcgctgttcatacagcaaaaccgtgtaccatggattaccatagagggcagaaaaggcgggtctgcactggcggcagccaccgtgaacgcactggccgtgatggcgctggaatcttcacccgccgccccgtga

SEQ ID NO: 154284 - protein, 220 aa, Desulfovibrio desulfuricans G20
MDTPVLQQCFAPQAIEARSFAIIDSEVPEPRPFCGAHWHIARRLVHTTADFDLLNHIRFHPQAVEAGIRALQNGCTIFTDTEMARSGIPLRRMTPLGCTVTCLLNRPDVVHAAQRDNTTRAHAAMNAASSELAGAIVAIGNAPTALIRLAGHLEQGCPAPALVIAMPVGFVNAAESKALFIQQNRVPWITIEGRKGGSALAAATVNALAVMALESSPAAP

SEQ ID NO: 154285 - DNA, 624 bp, Prochlorococcus marinus str. MIT 9312
  CDS (1)..(624): transl_table=11
atggtaatagatcatccaatttttttggaaagtattagattcataagatctcatttagaagccaatgaactcaattatttagaaaaaaaggttttagaaagattagttcatactgcaggagatttttctgttcaaaatctaatagaatttagtgaaggtgcttgtgaaaagggacttcaggcactgaaaaagggtgctcctatattaactgataccgatatggcagctgcagctataaaatctatggctgaaaacaccaataagaataaagtgttttccgcgagaatgtggtttgatgagaatcatcactcaaaactaactaaaacagcatatggattaagtgaaggctggaaagagttatctattaaaaatttcggaatcaaatcacctattgtagttattggtagttctccaacagctttaatctatctaattgatattctaaagaatgccaaagatctacctagtttaattattggaatgccagttggatttataggagtagaaaaaagcaaacataaattactttccactaatcttcctagaattgttttgaattcaactagaggcggtgctgcgatggcagctgcggcggttaatgctttgttgagggaatctatttaa

SEQ ID NO: 154286 - protein, 207 aa, Prochlorococcus marinus str. MIT 9312
MVIDHPIFLESIRFIRSHLEANELNYLEKKVLERLVHTAGDFSVQNLIEFSEGACEKGLQALKKGAPILTDTDMAAAAIKSMAENTNKNKVFSARMWFDENHHSKLTKTAYGLSEGWKELSIKNFGIKSPIVVIGSSPTALIYLIDILKNAKDLPSLIIGMPVGFIGVEKSKHKLLSTNLPRIVLNSTRGGAAMAAAAVNALLRESI

SEQ ID NO: 154287 - DNA, 630 bp, Synechococcus elongatus PCC 7942
  CDS (1)..(630): transl_table=11
atgttcgactacattcggaatggcactgacatctataaaaagtctttttgcattattcgtgaagaggcttgtcttagccatttgccagaggacttggctacggttgtagtccgtctcatccacgcttgtgggatgactgacattgttcaagactttgaagcctcagctacagcattagtttcaggacgtcaagcactcaaggatggatgtcctattctttgtgattctcaaatggtcgccaatggcattacccgtaagcgattacctgctgagaatccagtgatttgtaccttgaatgaacccgaagtgcccgcgatcgcacagcaaattaacaacactcgctcagctgcagcaatggagctatggcgatcgcaattacagggttcagttgttgtcattggcaatgcacccaccgcgctctttcgcttactggaaatccttgatgaaacgactgaccgccctgctgtgatcttaggctttccagttggctttgtcggagctatcgaatcaaagcaagcccttgctgagaactctcgtaatgttccttttatgacccttcatggtcgtcgcggcggcagtgcgatcgcggctgcagcagtgaacgcgatcgctcaggagagtgaactatga

SEQ ID NO: 154288 - protein, 209 aa, Synechococcus elongatus PCC 7942
MFDYIRNGTDIYKKSFCIIREEACLSHLPEDLATVVVRLIHACGMTDIVQDFEASATALVSGRQALKDGCPILCDSQMVANGITRKRLPAENPVICTLNEPEVPAIAQQINNTRSAAAMELWRSQLQGSVVVIGNAPTALFRLLEILDETTDRPAVILGFPVGFVGAIESKQALAENSRNVPFMTLHGRRGGSAIAAAAVNAIAQESEL

SEQ ID NO: 154289 - DNA, 627 bp, Rhodospirillum rubrum ATCC 11170
  CDS (1)..(627): transl_table=11
atgatcgattatagccgcgacggcgccgatatctaccggcggtcctttgccatcatccgggcggaggccgatctttcgcgcatcccggccgatctggaaaagctggcggtccgcgtcgcccattcctgcggcatggtcgatgtgatcaatgatctggtgttctcgccccaggccggagcggccgggcgggcggccttggccgccggggcgccgatcctgtgcgattgcaagatggtggccgagggcatcacccgctcgcggcttgaaggcggcaacccggtgatctgcaccctggccgacagcggcgtgcccgaactggcccgcgagatggccaccacgcgttcggcggcggctttggagctgtggcggccgatgctggccgggtcggtggtcgccatcggcaacgcgccgacggcgctgttccgtctgttggaaatgcttgatggcggggcgccgcgcccggccttgatcctgggctttccggtcggcttcgtcggcgcggccgaatccaagcaggaattggccgagaacagccgcgatgtaccctttgtcgtggtgcgtggacggcgcggcggcagcgcgatgacggtggcggccatcaacgccctggcgacggagcgcgaatga

SEQ ID NO: 154290 - protein, 208 aa, Rhodospirillum rubrum ATCC 11170
MIDYSRDGADIYRRSFAIIRAEADLSRIPADLEKLAVRVAHSCGMVDVINDLVFSPQAGAAGRAALAAGAPILCDCKMVAEGITRSRLEGGNPVICTLADSGVPELAREMATTRSAAALELWRPMLAGSVVAIGNAPTALFRLLEMLDGGAPRPALILGFPVGFVGAAESKQELAENSRDVPFVVVRGRRGGSAMTVAAINALATERE

SEQ ID NO: 154291 - DNA, 633 bp, Moorella thermoacetica ATCC 39073
  CDS (1)..(633): transl_table=11
atgggttttctgtctgacccgcgggccatcgaggcccgcagccgggaaataatagccgccagggtgggagacttgggcctggaaccgggggccagggccatagtcacccgtatcatccatgctaccggcgatttgagctacgccagcctggtcgccgtccaccccggggtggtcgcagctgccactgctgccctgcgccagggggcagatatcattaccgatgtcgaaatggtacgtaacggtgtcagcagccatctggtttcccggggcgggggccgggtattgtgcgccatcagggaggccgaagttattaaaacggctactgccaggggggaaacccgggccatggtagccatggaatatctcgctcccaggatggatggtgcgatagttgccattggtaacgcgccgacagcccttttccgcctcctggagctggtggccggaggccgggcggcaccggctgcaattgtcggcacaccggtaggctttgttggggcggcggaagccaaagcagctctagaaactaccggtataccctatgtgacggtgcgggggcccaagggtggtagtaccgtggccgttgctgctgttaatgccctgctgcatctggcctgggatgaggaggagtag

SEQ ID NO: 154292 - protein, 210 aa, Moorella thermoacetica ATCC 39073
MGFLSDPRAIEARSREIIAARVGDLGLEPGARAIVTRIIHATGDLSYASLVAVHPGVVAAATAALRQGADIITDVEMVRNGVSSHLVSRGGGRVLCAIREAEVIKTATARGETRAMVAMEYLAPRMDGAIVAIGNAPTALFRLLELVAGGRAAPAAIVGTPVGFVGAAEAKAALETTGIPYVTVRGPKGGSTVAVAAVNALLHLAWDEEE

SEQ ID NO: 154293 - DNA, 627 bp, Burkholderia thailandensis E264
  CDS (1)..(627): transl_table=11
atgcttgactaccttcgcgacggctgcgcgatctaccgcgaatcgttcgcgacgatccgctcggaagccgatctgacgggcgtgccgcccgacctcgaaaaactcgcggtgcgcgtgatccacgcgtgcggaatggtcgacgtcgtccgcgacctgcggttctccgatggcgcgggcgaagcgggccgcgcggcgctcgcggccggcgcgccgatcctctgcgacgcgcggatggtcgccgaaggaatcacgcgcgcgcggctgcccgcgaacaacccggtgatctgcacgctcggcgacccggacgtgcctcggctcgcgcgcgagctcggcaacacgcgctcggcggccgcgctcgaattgtggcgcgcgcatctcgcgggcagcgtcgtcgcgatcggcaacgcaccgaccgcgctcttccatctgctcgacatgatcgacgcgggcgcaccccgccccgcgctcattctcggctttccggtcggcttcgtcggcgcggccgaatcgaaggcgctcctcgccgccgacagccgcggcgtgccgttcgtcgcggtcgcgggccgccgcggcggcagcgcgatggtcgccgccgccgtcaacgcgctcgcctcggaggccgaatga

SEQ ID NO: 154294 - protein, 208 aa, Burkholderia thailandensis E264
MLDYLRDGCAIYRESFATIRSEADLTGVPPDLEKLAVRVIHACGMVDVVRDLRFSDGAGEAGRAALAAGAPILCDARMVAEGITRARLPANNPVICTLGDPDVPRLARELGNTRSAAALELWRAHLAGSVVAIGNAPTALFHLLDMIDAGAPRPALILGFPVGFVGAAESKALLAADSRGVPFVAVAGRRGGSAMVAAAVNALASEAE

SEQ ID NO: 154295 - DNA, 660 bp, Frankia sp. CcI3
  CDS (1)..(660): transl_table=11
atgaacggcgcatcagacatgagcggtgtgcaacgttacgcctacgttcgcgacggcgcggagatctaccgtcggtcgttcgcgacgatccgggccgaggcgcgtctcgatcgactgcccggtgacgtcgcccgggtcgcggtccgcatgatccactcctgtggaatggtggatctcgtcgacgatctcgctttcacccccagcgtggtcgctgcggcgcgcgcggcgttgctggccggcgccccggtgctctgtgacgcgcagatggtggcggccggtgtgacccgccgtcggctgcccgccgcgaacgagattctctgcctgctcggtgatccccgggtgccgcggctcgccgagcggctgggcaccacccgcagcgccgcggcggtggatctgtgggcggatcgactcgccggctccgtggtggcggtcgggaacgctccgacagcgctgttccgcctgctggaactcgtcgcggccggagccgggcgaccggcggcggtgctcggcgtgcccgtggggttcatcggcgccgcggagtccaagcaggccctcgtggatgatccggcccggttggagtatctcgtcgtgcacggccggcggggcggcagcgcgatggcggtcgccgcggtcaacgcgatcgcgagcgaggaggattaa

SEQ ID NO: 154296 - protein, 219 aa, Frankia sp. CcI3
MNGASDMSGVQRYAYVRDGAEIYRRSFATIRAEARLDRLPGDVARVAVRMIHSCGMVDLVDDLAFTPSVVAAARAALLAGAPVLCDAQMVAAGVTRRRLPAANEILCLLGDPRVPRLAERLGTTRSAAAVDLWADRLAGSVVAVGNAPTALFRLLELVAAGAGRPAAVLGVPVGFIGAAESKQALVDDPARLEYLVVHGRRGGSAMAVAAVNAIASEED

SEQ ID NO: 154297 - DNA, 630 bp, Novosphingobium aromaticivorans DSM 12444
  CDS (1)..(630): transl_table=11
atgccccatatctatgaaaccgatggcgcggccatctatcgccagtctttcgccatgatccgcgccgaagccgatctggcgccctttttcgctgatgaggaaccggtggcggtgcgcatgatccacgccgccgggatggtggaccttgccgcgcatatccgcttctcacccggctttgccagtgcggcgcgggcggcgctggccgctggcgcgccggtgctgtgcgatgcgcggatggtgtccgaagggatcacccgtgcgcggctgcctgctgataatcagatcatctgcaccctgaatgcgccgcaagtgcccgacatggcgcgggcaatgggtaacacccgctctgccgccgcactggaactgtggcggccgcatctggcaggcgcggtggtggccatcggcaacgcgccaaccgcgctgttccatctgctgaatatgctggaagatcccgattgcccgcgccctgcggcggtcatcggctgtccggtgggctttgtcggcgcggccgaatccaaggccgcgttatgggccgcgccgccggtgccgtgctgcatcgttgaagggcggctgggcggcagcgcgatcacggttgctgcgatcaacgctttggcgagcggcaccgaatga

SEQ ID NO: 154298 - protein, 209 aa, Novosphingobium aromaticivorans DSM 12444
MPHIYETDGAAIYRQSFAMIRAEADLAPFFADEEPVAVRMIHAAGMVDLAAHIRFSPGFASAARAALAAGAPVLCDARMVSEGITRARLPADNQIICTLNAPQVPDMARAMGNTRSAAALELWRPHLAGAVVAIGNAPTALFHLLNMLEDPDCPRPAAVIGCPVGFVGAAESKAALWAAPPVPCCIVEGRLGGSAITVAAINALASGTE

SEQ ID NO: 154299 - DNA, 627 bp, Burkholderia xenovorans LB400
  CDS (1)..(627): transl_table=11
atgcttgattacattcgcgacggtcaggagatctatcgccaatccttcgcgacgatccgcgcggaagccgacttgtcgcgcattcccgccgacctcgaaaaactcgcggtgcgcgtgatccacgcgtgcggcatggtcgatgtgatcgacgatctgcggttctccgaaggcgccggcccggccggccgctcggcgctcgcgcgaggcgcgccgattctgtgcgatgccggcatggtcgcgcagggcatcacgcgtacccggctgccggcgaacaacgaagtcatctgcacgctcgcgcatccggacgtgccgccgctcgcgcgcgaactcggcaatacgcgctccgcggccgcgctcgaattgtggcggccgcatctggcgggcagcgtcgtcgtgatcggcaatgcaccaaccgcactgtttcatctgctcgatatgctcgacgccggcgcgcccaaaccggcgctcatactcggctttcccgtgggctttgtcggcgccgccgaatcgaaagccatgcttgccgaagacagtcgcggcgtgccctacgtggtggtgcatggccggcgcggcggcagcgcgatggcggcggccgccgtgaacgcgctcgcaacggaggtcgaataa

SEQ ID NO: 154300 - protein, 208 aa, Burkholderia xenovorans LB400
MLDYIRDGQEIYRQSFATIRAEADLSRIPADLEKLAVRVIHACGMVDVIDDLRFSEGAGPAGRSALARGAPILCDAGMVAQGITRTRLPANNEVICTLAHPDVPPLARELGNTRSAAALELWRPHLAGSVVVIGNAPTALFHLLDMLDAGAPKPALILGFPVGFVGAAESKAMLAEDSRGVPYVVVHGRRGGSAMAAAAVNALATEVE

SEQ ID NO: 154301 - DNA, 750 bp, Methanococcoides burtonii DSM 6242
  CDS (1)..(750): transl_table=11
atgactactgaaactagcagtaagaaggacatacctgaacttgaagatctggtagagatgacggtcaagatcgacccagagctcatagaaggatgttcagattcaggcgctcgcaccgatgaagcaaagaccatctacatgaccagtcgccgcattgcgcatgacctgatcgtgaaaggtgaaaaagaaacacccgaagaacgtgtcacccagcgttgtgtgatctccacaggcgacccatctattgctgatatcatgcgctatacagacgatgcaatagaagctggtgttaaagccatcaagaacggagctccgatctttgtagatatcaatatggtcaaagccggagttacaaagaaagggcatgattgcgaagtgatctgcgtccttgatgaggaccagaacgcagaagttgctaaaaagtatggcattacaagaactgctgctggattccttttagcaagggacaggattgaaggttctattgtggctatcggaaatgcaccttccgcagctcttgctgtgtgcaggatgatcgagcacggcatcaaaccggcacttatagtcggaacccctgtcggtttcgtcaacgccgcagaatccaaggaagagatccgtaaaatggaggtcccatccatcacatgtgtaggtacacgtggcggaacgcccatggccgtagcttgtgtcaatgaacttgtggctcttgcaaaggaaagagatgagtgcaagtgctgttgtgagtgtgagtaa

SEQ ID NO: 154302 - protein, 249 aa, Methanococcoides burtonii DSM 6242
MTTETSSKKDIPELEDLVEMTVKIDPELIEGCSDSGARTDEAKTIYMTSRRIAHDLIVKGEKETPEERVTQRCVISTGDPSIADIMRYTDDAIEAGVKAIKNGAPIFVDINMVKAGVTKKGHDCEVICVLDEDQNAEVAKKYGITRTAAGFLLARDRIEGSIVAIGNAPSAALAVCRMIEHGIKPALIVGTPVGFVNAAESKEEIRKMEVPSITCVGTRGGTPMAVACVNELVALAKERDECKCCCECE

SEQ ID NO: 154303 - DNA, 630 bp, Silicibacter sp. TM1040
  CDS (1)..(630): transl_table=11
atgctgcacacctatgaaaccgacggcgccaagatctatgccgagagctttgcgaccatccgcgcagaggccaatctggcgcggttcaccaaggatgaagaggtcgtggccgtgcgcatgatccacgccgcaggcatggtcgggctcgaagagcacgtgcgcttttcagagggcatggccaaaaccgcccgtgccgcgctggcagacggcgcgccgatcctgtgtgatgcctacatggtttctgagggcatcacccgcccgcgcctgcctgcggacaacgaggtgatctgcactctgcgcgaccccaaggttcctgagatggcgcgtgagatgggcaacacccgctctgccgccgcgctggagctttggcgccccaaactcgacggcgcagtggtcgccatcggcaatgcgccaactgcgctgtttcatcttctgaacatgctcaaggaccccgcttgtccgcgtcccgcagcgatcatcggctgcccggtgggattcgtcggcgcgcgcgaatccaaggacgccctgatggaggacctgcctgtgccgtcgatgatcgtcgaaggacgtcttggtgggtctgccatcaccgtggcagcggtcaatgcgcttgcctcctggaaagaatga

SEQ ID NO: 154304 - protein, 209 aa, Silicibacter sp. TM1040
MLHTYETDGAKIYAESFATIRAEANLARFTKDEEVVAVRMIHAAGMVGLEEHVRFSEGMAKTARAALADGAPILCDAYMVSEGITRPRLPADNEVICTLRDPKVPEMAREMGNTRSAAALELWRPKLDGAVVAIGNAPTALFHLLNMLKDPACPRPAAIIGCPVGFVGARESKDALMEDLPVPSMIVEGRLGGSAITVAAVNALASWKE

SEQ ID NO: 154305 - DNA, 627 bp, Mycobacterium sp. MCS
  CDS (1)..(627): transl_table=11
atgctggactacatccgcgacgccgccgagatctaccggcagtcgttcgcgacgatccgcgacgaggcggatctggcgcggttccccgacgacgtggcccgggtggtggtccggctgatccacacctgcggtcaggtcgacgtggccgaccacgtggcgttcagcgacgacgtcgtctcccgtgcgcaggccgcgctggccgcgggcgcgccggtgctgtgcgattcgtcgatggtggccgccgggatcacccggtcgcggctgcccgccgacaacgaggtggtgtccctggtcgccgacccgcgcgcccccgaactcgcggcgcggctggggttcacccgctccgcggcggcggtcgacctgtgggccgaccggctgggcggagcggtgctcgctatcgggaacgcgccgacggccctgttccggttgctcgagttgatcgaccagggtgcgccggttccggcggcggtactgggcgggccggtcggattcgtcggctccgcgcagtcgaaggacgaactcatcgcgcggccccgcgggatggcgtacctggtggtgaccggccggcggggcggcagcgcgatggcggccgccgcggtcaatgcgattgcgagtgagcgcgaatga

SEQ ID NO: 154306 - protein, 208 aa, Mycobacterium sp. MCS
MLDYIRDAAEIYRQSFATIRDEADLARFPDDVARVVVRLIHTCGQVDVADHVAFSDDVVSRAQAALAAGAPVLCDSSMVAAGITRSRLPADNEVVSLVADPRAPELAARLGFTRSAAAVDLWADRLGGAVLAIGNAPTALFRLLELIDQGAPVPAAVLGGPVGFVGSAQSKDELIARPRGMAYLVVTGRRGGSAMAAAAVNAIASERE

SEQ ID NO: 154307 - DNA, 600 bp, Rubrobacter xylanophilus DSM 9941
  CDS (1)..(600): transl_table=11
ttgagaaggccccaccccatagaggccgagagctaccgcgttttgcgctccctggtggacctctccggcctcggtccgctctcccgggcggtggccgagcgcgtgatccacgcctccgccgacccggagtacgcccggacgctggtcctggacgaggcggcgctggagagggggctcgccgccctccgcaggggggcgccgctcgtggccgacgtggggatggccgccgcgggggtgaccgcccgcagggcgctgtgcttcgtctccgacccgcgggccgcgcgcctctccggggagctcgggatcacgcgctctgccgccggcatccggctcgcggccgcggaggtgggggagggggccgtgtggatggtgggcagcgcccccaccgccctcctcgagcttttgcgcctcccggtcgagcccgcgctcgtggcgggcttcccggtgggcttcgtgggggcggccgaggcaaaggagcgtctggaggagagcgggcttcccgcggtgactaaccggggccccaagggcgggtccgcggtcgcggccgccgcggtgaacgccctgatctaccacgggagggatgatccgcatgatgcctga

SEQ ID NO: 154308 - protein, 199 aa, Rubrobacter xylanophilus DSM 9941
MRRPHPIEAESYRVLRSLVDLSGLGPLSRAVAERVIHASADPEYARTLVLDEAALERGLAALRRGAPLVADVGMAAAGVTARRALCFVSDPRAARLSGELGITRSAAGIRLAAAEVGEGAVWMVGSAPTALLELLRLPVEPALVAGFPVGFVGAAEAKERLEESGLPAVTNRGPKGGSAVAAAAVNALIYHGRDDPHDA

SEQ ID NO: 154309 - DNA, 627 bp, Rhodococcus sp. RHA1
  CDS (1)..(627): transl_table=11
atgatcgagtacatccgagacggcgcggagatctaccgccagtccttcgccacgatccgttccgaggcggatctcagtgcctttcccgaggacgtctcgcaggccgtggtccgcatgatccacgcgagcggtcaggtcgacctcgtggacgacgtcgcgttcacccccggcgtcgtgaaggccgcccgcgcggcgctggcgggcggcgccccgatcctgtgcgacgcgcagatggtggcggcaggcgtgacccggaagcgtctccccgcggacaacgaggtgctctgcacgctgcgcgacccccgggtcccggtgctggcggagcagatcgggaacacccgctcggcggccgcgctcgaattgtggggcagcaaactcgagggtgccgtcgtcgcgatcggcaacgccccgaccgcattgttctacctgctggacatgatcgaatccggtgcaccccggcccgccgcgatcgtgggcggtccggtcggtttcatcggtgccgcggagtcgaaggaagcgttgatcgagcacccgagcggactcgactatctggtggtccgcggccgccggggtggcagtgccatcacggctgcggcgctgaatgcgattgcgagcgaggtcgaatga

SEQ ID NO: 154310 - protein, 208 aa, Rhodococcus sp. RHA1
MIEYIRDGAEIYRQSFATIRSEADLSAFPEDVSQAVVRMIHASGQVDLVDDVAFTPGVVKAARAALAGGAPILCDAQMVAAGVTRKRLPADNEVLCTLRDPRVPVLAEQIGNTRSAAALELWGSKLEGAVVAIGNAPTALFYLLDMIESGAPRPAAIVGGPVGFIGAAESKEALIEHPSGLDYLVVRGRRGGSAITAAALNAIASEVE

SEQ ID NO: 154311 - DNA, 630 bp, Trichodesmium erythraeum IMS101
  CDS (1)..(630): transl_table=11
atgattgattacattcgcaacggaaaagaaatttaccgcaaatcttttgcaatgattcgctctgaagtaaacctagagttcttgcctattgatttagctgatatggcagtcaggctaattcacgcttgtgggatgacagatattcttgaagacctagtaacttcactggatgcagtaaaaataggttgcgctgcattacaaaaaggcgcacccatcctctgtgatactcaaatggtagcaaatggaattattcgtcatcgcttgcctgccaataacaaagttatttgcaccctcaattatccagaagtgccagaaagggcacaacaaattaacaatactcgctcggcgactgctatagaattatggaaacctctgattcatggttccgttgtagctattggcaatgcaccaaccgcattgtttcacttactagaattattagatgagggaatggcaaaacctgccctaattttaggttttcctgtaggttttgtgggtgcagcagagtcaaaagtagagctggcaaccaatagtcggggtgttccatttatcacgctgcatggacgacggggaggcagtgccatagctgctgccgccgttaatgccctagcaaaggaaagcgaggtataa

SEQ ID NO: 154312 - protein, 209 aa, Trichodesmium erythraeum IMS101
MIDYIRNGKEIYRKSFAMIRSEVNLEFLPIDLADMAVRLIHACGMTDILEDLVTSLDAVKIGCAALQKGAPILCDTQMVANGIIRHRLPANNKVICTLNYPEVPERAQQINNTRSATAIELWKPLIHGSVVAIGNAPTALFHLLELLDEGMAKPALILGFPVGFVGAAESKVELATNSRGVPFITLHGRRGGSAIAAAAVNALAKESEV

SEQ ID NO: 154313 - DNA, 627 bp, Trichodesmium erythraeum IMS101
  CDS (1)..(627): transl_table=11
atggaatggcatattacagacgcccaaagcttaagaattattgacaaggaaatcggtcttcatactttatctcccgcagagtatgagatagttaaacgggtaatatatgctacggcagactttgaatataagtctctggttagtttttctgaacatgctttacagtctggagctgctgctttagcagcccgtacaaccattgtagtggatgtgccaatgttacaagtgggtattaccccagttatccaaaatacctttgttaaccctgtttactgttcaatggatgctattactagaccccagaaggaaaaaactaccgctgcctggggaattgaaactttagctagacgttatccagaaggcatctttgttattggtcaggctcaaactgctctctgtgcaattgttgatttaattgaagccgacgaaattagaccggctttagttattgggactccttctggttttgtaggggtggatgtagctaagtcacgtttatatgattcgatgattcctcacattagaattgatggccgtaagggtagtgctgtggtagcagttgctattattaatggtttagtagacttggcctggcaggcttatggccaaaaaagtccaggtaattag

SEQ ID NO: 154314 - protein, 208 aa, Trichodesmium erythraeum IMS101
MEWHITDAQSLRIIDKEIGLHTLSPAEYEIVKRVIYATADFEYKSLVSFSEHALQSGAAALAARTTIVVDVPMLQVGITPVIQNTFVNPVYCSMDAITRPQKEKTTAAWGIETLARRYPEGIFVIGQAQTALCAIVDLIEADEIRPALVIGTPSGFVGVDVAKSRLYDSMIPHIRIDGRKGSAVVAVAIINGLVDLAWQAYGQKSPGN

SEQ ID NO: 154315 - DNA, 564 bp, Synechococcus sp. CC9311
  CDS (1)..(564): transl_table=11
ttggacccgatgtcgaaagatgttctcgaacggctggtgcacagcagtggggatccctctttggcggccctgctgaagttcagccccggtgcctgtgatgccggatttcaggccctcaaagcgggagctctgatcctcacggacacggcgatggcggcagcggcggtgcggccgatggcggctcgtaccgctggcaatgaagtgcgctgcttgctcgattgggcgccggctcagtcgccgcagggatccacccgatcggcggcggcgatggttcgcgcttggccggagctaatccaggcagctgagatcgctggtcagcccctaccgctggtgctcattggcagtgcgccaacggccttggagcaactcctggatcaactggatgagggagcaccggctccaagcctgttgattggcatgccggtggggtttgtgggagttccggaaagcaagcgtcgcttagcgcagttcactctggatcagatccgcttggacggcacccgcggcggggcaggtctggtggcagcagcagtgaatgcgttgctgcgtcaggtggctagttga

SEQ ID NO: 154316 - protein, 187 aa, Synechococcus sp. CC9311
MDPMSKDVLERLVHSSGDPSLAALLKFSPGACDAGFQALKAGALILTDTAMAAAAVRPMAARTAGNEVRCLLDWAPAQSPQGSTRSAAAMVRAWPELIQAAEIAGQPLPLVLIGSAPTALEQLLDQLDEGAPAPSLLIGMPVGFVGVPESKRRLAQFTLDQIRLDGTRGGAGLVAAAVNALLRQVAS

SEQ ID NO: 154317 - DNA, 633 bp, Rhizobium leguminosarum bv. viciae 3841
  CDS (1)..(633): transl_table=11
atgccagactacgattatatccgcagcggcgatgcgatctacgagcgttcctttgccattatccgtgccgaggccgatctttcgcgcttcaccggcgatcaagccgaaatcgccgtgcgcatgatccacgcctgcgggctggtcgaggcggccgagcatttccggttctccgccgatttcgtcagcgcggcgcgcgacgcgctgaagggtggggcgccgatcttctgcgacgcggaaatggtatcccagggtgtgacccgggcgcggctgccggcgctgaacgaggtgatctgcacgctgcgcgatcccgcgacaccggagcttgcgcgcgagaccggcaatacgcgctcggccgccgccatgcatctctggctcgatcggctcggcggcagcgttgtcgcgatcggaaacgcaccgaccgccctcttccatctgctcgaactcctgcgcgacggcgccccgaaacccgcggcgatcctcggcatgcccgtgggtttcgtcggcgcggcggaatcgaaggatgcattggcggagaattcctacggcgtcccctttgccatcgtccgcggccggctcggcggcagcgccatgacggcagccgccatcaacgcattggcgaggccaggcctatga

SEQ ID NO: 154318 - protein, 210 aa, Rhizobium leguminosarum bv. viciae 3841
MPDYDYIRSGDAIYERSFAIIRAEADLSRFTGDQAEIAVRMIHACGLVEAAEHFRFSADFVSAARDALKGGAPIFCDAEMVSQGVTRARLPALNEVICTLRDPATPELARETGNTRSAAAMHLWLDRLGGSVVAIGNAPTALFHLLELLRDGAPKPAAILGMPVGFVGAAESKDALAENSYGVPFAIVRGRLGGSAMTAAAINALARPGL

SEQ ID NO: 154319 - DNA, 654 bp, Magnetococcus sp. MC-1
  CDS (1)..(654): transl_table=11
atgaccattgccattaccgaacaagatacccgtgcgggtcgccagatcgagcataactccttcgccatcgtggacgccgaggccggcccccacccctatagcgaggcacagtggcaggtggtgcggcgtatgattcacgctaccgccgactttgaatttaatggtctgacacgctttcatgatgacgccatgcaggctggtatggatgcggtcaaggcgggggcggccatcctctcggatgtggagatgatccgggtggggctctcccaggcccgtttggcacactttggtatgagctgccaccagtttattaatgatgacgatgtggcggccaaagccaagcaggaggataccacccgcgcggtacaggccatgcgtaaagcccgtgatagggggcttatgcaaggggctattgtgggcattggtaatgcccccacggcgttgttggaggtgattcggcaggtgcaagcgggggagagccagcccgccctgattattgggatgccggtgggctttgtgtcggcggcggaatccaaagcggcgctgcaagggttgcagcaggtgccgtggatcgtaacccatgggcgcaaggggggctcgaccatggtggtggcggccatccatgccctgcttagcctatgtgcccagccctaa

SEQ ID NO: 154320 - protein, 217 aa, Magnetococcus sp. MC-1
MTIAITEQDTRAGRQIEHNSFAIVDAEAGPHPYSEAQWQVVRRMIHATADFEFNGLTRFHDDAMQAGMDAVKAGAAILSDVEMIRVGLSQARLAHFGMSCHQFINDDDVAAKAKQEDTTRAVQAMRKARDRGLMQGAIVGIGNAPTALLEVIRQVQAGESQPALIIGMPVGFVSAAESKAALQGLQQVPWIVTHGRKGGSTMVVAAIHALLSLCAQP

SEQ ID NO: 154321 - DNA, 522 bp, Mycobacterium avium 104
  CDS (1)..(522): transl_table=11
atggtgcggctgatccacacttgcgggcaggtcgacgtggccgagcacgtcgcgttcaccgacgatgtcgtcgagcgggtgggcaccgccctgcgcgccggcgccccggtgttatgcgattcgtcgatggtggccgccgggatcaccgcggcgcggttgccggccgacaacgaggtggtgtccctggtcgccgatccccggtcggccgaactggccgcccgccggcagaccacccgctcggcggccggggtcgagctgtgggccgaccggctgccgggcgccgtgctggccatcggcaacgcgccgaccgcgctgttccggctgctcgagctggtggacgacggggtgggcccgccggccggggtgctgggcgggccggtcggattcgtcgggtcggcgcagtccaagcaggagctcgtcgacaacccgcgcggcatgtcgtacctggtggtgcggggccgccgcgggggtagcgcgatggccgccgcggccgtcaacgcgatcgcgagcgaccgcgaatga

SEQ ID NO: 154322 - protein, 173 aa, Mycobacterium avium 104
MVRLIHTCGQVDVAEHVAFTDDVVERVGTALRAGAPVLCDSSMVAAGITAARLPADNEVVSLVADPRSAELAARRQTTRSAAGVELWADRLPGAVLAIGNAPTALFRLLELVDDGVGPPAGVLGGPVGFVGSAQSKQELVDNPRGMSYLVVRGRRGGSAMAAAAVNAIASDRE

SEQ ID NO: 154323 - DNA, 627 bp, Mycobacterium smegmatis str. MC2 155
  CDS (1)..(627): transl_table=11
atgctcgactacatccgtgacgcagccgagatctaccggcagtcgttcgcgacgatccgcgacgaagccgatctgtcccgcttccccgccgacgtctcgcgcgtggtggtccggttgatccacacctgcggccaggtcgacgtcaccgaccatgtcgccttcaccggcgacgtcgtcaccaggacccacgccacgctcgcggacggcgcaccgatcctgtgcgactcgtcgatggtggccgcgggcatcacccgctcgcgcctgcccgccgacaacgaggtggtctccctcgtcgccgacagccgcgctcccgaactcgcggcccgtatgggcaccacgcgttcggccgccgcggtcgatctgtgggccgaccgtctcggcggtgcggtcctggcgatcggcaatgcgcccaccgcgttgttccggctgctggaactgctcgacgagggtgcgccgacccccgccgcggtgctcggcgggcccgtcggtttcgtcggctccgcgcagtccaagcaggagctgatcgagcgcccgcggggaatgtcctacctggtggtgacgggccgtcggggcggcagcgcgatggccgcggccgccgtcaacgcgattgcgagtgagcgggaatga

SEQ ID NO: 154324 - protein, 208 aa, Mycobacterium smegmatis str. MC2 155
MLDYIRDAAEIYRQSFATIRDEADLSRFPADVSRVVVRLIHTCGQVDVTDHVAFTGDVVTRTHATLADGAPILCDSSMVAAGITRSRLPADNEVVSLVADSRAPELAARMGTTRSAAAVDLWADRLGGAVLAIGNAPTALFRLLELLDEGAPTPAAVLGGPVGFVGSAQSKQELIERPRGMSYLVVTGRRGGSAMAAAAVNAIASERE

SEQ ID NO: 154325 - DNA, 663 bp, Nocardioides sp. JS614
  CDS (1)..(663): transl_table=11
atgaccctgtcccgcccaccttgccgctacgagtacgtcgacaatggcccggccatctacgtcgactcctttgccaccatccgccgagaggccgacctgtcggcgatcccggtcgacgccgagaagctggcggtgcggatgatccacggaagcgggcaggtcgatcttgctgccgacctcgtcgtgcatccgcggatggtgtccgcagcgcgcaccgccttggaggcgggcgcgtccgtgctgtgtgacgcgacgatggtggcgaccggcgttacccgcagccgtctgccgaaggacaacgacgtgttgtgcttcctcaacgatccccgggtcccggctctcgcgaagcagtgggaaaccacccgcaccgccgctgcggtctcgctgtggccgccctacctggacggtgcggtggtcgcgatcggcaacgcgccgaccgccttgttccatctgctcgagctcatcctcgacggcggtccccggcccgctgcgatcgtcggctgtccggtcggtttcatcggtgccgcggagtccaagcaggcactggtcgacttccacgaccagcatgggatcgacatccccttcgtcaccgtccgcggtcgccgtggcggttcggcgatgacctcctccgcactcaacgcactcgcccaggagatcgaatga

SEQ ID NO: 154326 - protein, 220 aa, Nocardioides sp. JS614
MTLSRPPCRYEYVDNGPAIYVDSFATIRREADLSAIPVDAEKLAVRMIHGSGQVDLAADLVVHPRMVSAARTALEAGASVLCDATMVATGVTRSRLPKDNDVLCFLNDPRVPALAKQWETTRTAAAVSLWPPYLDGAVVAIGNAPTALFHLLELILDGGPRPAAIVGCPVGFIGAAESKQALVDFHDQHGIDIPFVTVRGRRGGSAMTSSALNALAQEIE

SEQ ID NO: 154327 - DNA, 678 bp, Azoarcus sp. BH72
  CDS (1)..(678): transl_table=11
atgagcaccgccaacaccgtcaccgaacagctcaccgccgccggccgcgccatcgagcacgactccttcgccatcatcgacgccgaggtcggcgcccatgcctacagcgcggagcagtggccgatcgtccgccgcatgatccacgccaatgccgacttcgagttcaacggcctcaccgacttccaccccgcggcggtcgaagccgggctcgccgccatcctcggcggcggctcgcgggtggtggccgatgtcgagatgatctgcgtcggcctgtcggcctcgcgcctggcgcacttcggcatcagcacccaccagttcatttccgataccgacgtcatcgcccgcgcgaaggcggaggagaccacgcgcgcggtgcaggcgatgcgcaaggcgcaccggctgggattgatcaacggcgccctcgtcggcatcggcaacgctcccaccgcgctgatcgagctggtacggctgatccgcgaggaaggcgcgcgcccggcgctggtggtcggcatgccggtgggcttcgtctcggcggcggaatccaaggacctgatggccggactcgacgacgtgccgtggatcgtgatccgcggccgcaagggcggctcgacgctggtggtcgcggcgatccacgccctgctcgggctggccgaagcgcgccagcgcgaagggcgctga

SEQ ID NO: 154328 - protein, 225 aa, Azoarcus sp. BH72
MSTANTVTEQLTAAGRAIEHDSFAIIDAEVGAHAYSAEQWPIVRRMIHANADFEFNGLTDFHPAAVEAGLAAILGGGSRVVADVEMICVGLSASRLAHFGISTHQFISDTDVIARAKAEETTRAVQAMRKAHRLGLINGALVGIGNAPTALIELVRLIREEGARPALVVGMPVGFVSAAESKDLMAGLDDVPWIVIRGRKGGSTLVVAAIHALLGLAEARQREGR

SEQ ID NO: 154329 - DNA, 630 bp, Nostoc punctiforme PCC 73102
  CDS (1)..(630): transl_table=11
atggaatggcacgtaactgatgctcaaagtttagcaatcattgataatgaaattgaaaatcatgtcttttcacccgcagaatatgagattgtgcggcgggtaatatactctacagctgactttgagtataagtctttgattcgtttctctgagcgtgccttacaagcaggagcagcagcactagccgcgcgtaccacgattgtggtagatgtcccgatggtgcaagtaggtattgcatctgagattcaaaacacctttgctaatccggtgtattgcagcatggaagctctgacacgccctcaaaaagaaaaaactcggacagcatggggaatcgaaaccttagcaaagcgttatccagagggcatttttgtgattggtcaagcacaaacagcactaacagcactagttgatttaattgaggctgaggaaattagacctgctttgataattgcaactccagtaggatttgtcaatgttgatgaagcgaaagggcgtttacaagactccttagtgccccatattacaattgagagtcgcaaaggtaatgcagttgtagcagctgcgatcgttgatggattggtagacttggcttggcaagcttatggacaagatggaaatcgggggagctag

SEQ ID NO: 154330 - protein, 209 aa, Nostoc punctiforme PCC 73102
MEWHVTDAQSLAIIDNEIENHVFSPAEYEIVRRVIYSTADFEYKSLIRFSERALQAGAAALAARTTIVVDVPMVQVGIASEIQNTFANPVYCSMEALTRPQKEKTRTAWGIETLAKRYPEGIFVIGQAQTALTALVDLIEAEEIRPALIIATPVGFVNVDEAKGRLQDSLVPHITIESRKGNAVVAAAIVDGLVDLAWQAYGQDGNRGS

SEQ ID NO: 154331 - DNA, 660 bp, Fusobacterium nucleatum subsp. vincentii ATCC 49256
  CDS (1)..(660): transl_table=11
atgataataatgagttatataaaagtaccaggagatatagagaaaagaagttttgagattattgaagaagaattaggagataaggtgaaaaaattctctgaaagtgagttactcatagttaaaagaatagtccatacctcagcagattttgaatatgctgatttaatagaatttcataataatgcaatagaaagtgggctaaaagccttagaaaaaggttgtaaaatttattgtgatacaaatatgatagtgaatgggcttagtaaacctgctttagccaaatataattgttctgcttactcattagtttctgacaaagaagtaattgaagaagctaaaaaagctggacttactcgttcaatagttggaatgagaaaagcaggaaaagaccctgaaacaaagatatttattttaggaaatgcacctactgctttatatcaattaaaagaaatgatagaaaaaggtgaaatagaaaaaccagccttagttataggagttcctgttggttttgttggagcagctgaatcaaaagaggagtttaaaaaattaggtgttccatacatcacagtaaatggtagaaaaggaggaagcacaataggtgttgctatacttcatggaattatctatcaaatatataaaagagaaggttttcatgtgtaa

SEQ ID NO: 154332 - protein, 219 aa, Fusobacterium nucleatum subsp. vincentii ATCC 49256
MIIMSYIKVPGDIEKRSFEIIEEELGDKVKKFSESELLIVKRIVHTSADFEYADLIEFHNNAIESGLKALEKGCKIYCDTNMIVNGLSKPALAKYNCSAYSLVSDKEVIEEAKKAGLTRSIVGMRKAGKDPETKIFILGNAPTALYQLKEMIEKGEIEKPALVIGVPVGFVGAAESKEEFKKLGVPYITVNGRKGGSTIGVAILHGIIYQIYKREGFHV

SEQ ID NO: 154333 - DNA, 630 bp, Crocosphaera watsonii WH 8501
  CDS (1)..(630): transl_table=11
atggaatggcaccttactgatgctcaaagtctagctatgatagatcgggaaatcggcgaaacggttttctcccctgcggagtacgaaattgtacgacgggtgatttatcaaactgctgactttgactatctttctttacttcgcttttccgagaagggtttgcaatcaggggctgctgctttggcagcccgtagcactattgttgtggatgtgccgatggtgcaggtgggtattgttcccaatcttcaggaaacctttgcgaatgctgtttactgtggcacccaaaccattacccgtccccagaaaacgaagactagcaccgcttggggggtggaaactttagcaaaacgctatcccgaagctatttttgtggtgggagagtcgcaaacggccttaactgccttggtagagttggtggaacaagatgagattaaaccagctttggtgatcggcactcctgccgggtttattggggcagatgtggctaaagaacggttaaacgatgcccaaattccccatattaccgttaatggtcgtaaaggtagcgcagtggtggcagcagctattgttaatggtttattagacttagcttggcaagcttatggtcagtcggaaagtggggccaggtaa

SEQ ID NO: 154334 - protein, 209 aa, Crocosphaera watsonii WH 8501
MEWHLTDAQSLAMIDREIGETVFSPAEYEIVRRVIYQTADFDYLSLLRFSEKGLQSGAAALAARSTIVVDVPMVQVGIVPNLQETFANAVYCGTQTITRPQKTKTSTAWGVETLAKRYPEAIFVVGESQTALTALVELVEQDEIKPALVIGTPAGFIGADVAKERLNDAQIPHITVNGRKGSAVVAAAIVNGLLDLAWQAYGQSESGAR

SEQ ID NO: 154335 - DNA, 1410 bp, Prosthecochloris aestuarii DSM 271
  CDS (1)..(1410): transl_table=11
atgaaccaaggtcgtattattgtagccggaattgggcccggcgatgaatccatggtgacaccccaggtgcgtcatgccgtcagtgaagcggatgatgtcgtggggtaccatcgctatatcaacctgatcgaggggtggcttcctgctcatgtcagcaggcattcgaccgggatgacgcatgagcaggcccgtgccgacaaggcatttgctctggcctctgaaggccggaacgtcgtggtcgtgagttccggtgatgctggtatttacgggatggcgcccctgattctcgaactctgtgccagaagcggggtttccggcccggaactcgttgtgctgcccggcatcagtgccttccaggtcgcggcggcacggctcggtgcaccgatcagtcatgatttctgcgttatctctctttccgacctcatgacgccgtgggacgtgatcgaacgacggatcgaggctgcagcctcggctgacttcgtcacggcgatctacaacccggccagtcgtgaccggtattggcagatccatcgtttcaaggaacggtttctcgaacatcgttcagcatcgacgcctgtcggcattgtccgccaggcaggcagggacgacgagtctgtcgtccgcacgacgctcgggtccttcgatcccgataccctcgatatgttcagcgtcatgatcgtcggcaattcgtcgacattcatgagcgagaaccggatgatcactccccgggggtatttccggcatcaggaacatgacggcaccaggccggggcagtcgatcatgatcaacagttttcgaaccattgccggattgctgaaacgcgacgatcatgcctgcgatgcgaaatgggcgctgattcacacgatccatacaacagccgatttcgaattcgaggatatttttcagacatctccgggtgccgtggctaccttgcaccggaagctgacagcggggggagccgtgatcatcaccgatgtcaccatggtgcagtccggactgcgcaaggcggcgctgaagcggtacggcattcgtgtgcactgctacctgacggacccgcgagtgccggaactggccgctgccgagggcataacccgaacccaggcgggtataaggctggccgcgaatgagcatccggatgccctgttcgtgatcggtaacgccccgacggcgcttatggaactggcagatcttctccacaggaccgatctttcacctatgggtgtgatcggtgcaccggtcgggtttgtcaatgtcgtggagtccaagctgcgcctcaaggctgcctgccggataacgccgtacgtggtgatcgaaggccgcaagggaggcagttcggttgccgcgaccatcgtgaacgcggcaatgagcctcgaggatgcccaggcaatgaaaccgggaagagatgtctga

SEQ ID NO: 154336 - protein, 469 aa, Prosthecochloris aestuarii DSM 271
MNQGRIIVAGIGPGDESMVTPQVRHAVSEADDVVGYHRYINLIEGWLPAHVSRHSTGMTHEQARADKAFALASEGRNVVVVSSGDAGIYGMAPLILELCARSGVSGPELVVLPGISAFQVAAARLGAPISHDFCVISLSDLMTPWDVIERRIEAAASADFVTAIYNPASRDRYWQIHRFKERFLEHRSASTPVGIVRQAGRDDESVVRTTLGSFDPDTLDMFSVMIVGNSSTFMSENRMITPRGYFRHQEHDGTRPGQSIMINSFRTIAGLLKRDDHACDAKWALIHTIHTTADFEFEDIFQTSPGAVATLHRKLTAGGAVIITDVTMVQSGLRKAALKRYGIRVHCYLTDPRVPELAAAEGITRTQAGIRLAANEHPDALFVIGNAPTALMELADLLHRTDLSPMGVIGAPVGFVNVVESKLRLKAACRITPYVVIEGRKGGSSVAATIVNAAMSLEDAQAMKPGRDV

SEQ ID NO: 154337 - DNA, 630 bp, Sulfitobacter sp. EE-36
  CDS (1)..(630): transl_table=11
atgccccacacctacgagaccaacggtgccgcgatctatctggagagctttgccaccatccgcgccgaggccgatctggcgcggttcacccccgatgaagaacgtgtcgccgttcggatgatccacgccgccggtctggtcgggctggaaaagcacgtacagttttctgaaaacatggcgcagattgcacgggcggcgctggcggacggtgcgccgatcctgtgtgatgcgcatatggtgtccgaagggatcacccgcacgcgtctgcccgctgacaaccagatcatctgcaccctgcgtgatcccaaggtgccagagctggcgcagcagatgggcaacacacgctctgccgcggcgcttgaactgtggcggccacatctggcaggggccttggtggccatcggcaatgcgcccacggcgctgttccacctgctcaatatgctcgaagatcccgactgtccgcgacctgcggccatcatcggctgccccgtcggctttgtcggcgcggcggaatcgaaagaggcgctgatgcaggatttgcccgtgccgtcgatgatcgtgcaggggcgtttgggcggttcggcgattacagtggcggcggtgaacgcgctggccacgtggaaggaataa

SEQ ID NO: 154338 - protein, 209 aa, Sulfitobacter sp. EE-36
MPHTYETNGAAIYLESFATIRAEADLARFTPDEERVAVRMIHAAGLVGLEKHVQFSENMAQIARAALADGAPILCDAHMVSEGITRTRLPADNQIICTLRDPKVPELAQQMGNTRSAAALELWRPHLAGALVAIGNAPTALFHLLNMLEDPDCPRPAAIIGCPVGFVGAAESKEALMQDLPVPSMIVQGRLGGSAITVAAVNALATWKE

SEQ ID NO: 154339 - DNA, 630 bp, Roseovarius nubinhibens ISM
  CDS (1)..(630): transl_table=11
atgccctatgaatacgaaaaagacggcgctgcgatctatctggaatccttcgccacgatccgcgccgaggccgatctcggccggttcgacgcggatgaggaacaggtcgtggtgcggatgatccatgccgccgggttggtcgggctggaacgcgacgtggccgtctcgcccggcatggtcgcggcggcgcgcggcgcgctcgaggccggcgcgccgatcttctgtgacgcctatatggtcagtgaaggcgtgacccagaaacgcctgcccgcgcagaacgacgtgatctgcaccctgcgcgatccgcgggtgcccgatctcgccgccgagcttggcaccacccgctctgccgccgcgctcgagctgtggcgcgaccggctcgacggggcgctggtggccatcggcaacgcgcccaccgcgctctttcacctgctggaaatgctcgaagaccccgaatgcccgcgccctgcggcgatcatcggctgtcccgtcggtttcgtcggcgcccgcgagagtaaggacgcgctctgggaggcgctgccggtgccctcgctcatcgtgcgcggacgtctgggcggcagcgccatcaccgtcgccgccatcaacgccatcgcgagccgcgcggaatga

SEQ ID NO: 154340 - protein, 209 aa, Roseovarius nubinhibens ISM
MPYEYEKDGAAIYLESFATIRAEADLGRFDADEEQVVVRMIHAAGLVGLERDVAVSPGMVAAARGALEAGAPIFCDAYMVSEGVTQKRLPAQNDVICTLRDPRVPDLAAELGTTRSAAALELWRDRLDGALVAIGNAPTALFHLLEMLEDPECPRPAAIIGCPVGFVGARESKDALWEALPVPSLIVRGRLGGSAITVAAINAIASRAE

SEQ ID NO: 154341 - DNA, 1590 bp, Oceanicola batsensis HTCC2597
  CDS (1)..(1590): transl_table=11
atgacgcgacctctcttcgatacgcatgtggtggtggactggtccgcccggaacgcgcccagcccggcccgtccctcgaaggacgcgatatggatcgggatcgtccgggagggggccgcgcaggcgcccgtctacctcaggacccgtcacgaggcggtggcctggctggcggatttcctgtcggccgaagcagaggccgggcgccgggtcctcgcggggttcgattttcccttcgggtatccggccggtgtcgcgcagaggctctgcggctccgacagcgcgctggccctctgggactggctggccgggcgggtcgcggacggggcggacaatgtctcgaaccggttcgaggtggcggcgtcgatcaacgccgagtacgacggtgtcggccccttctgggggcggccggacacggtcgatcttcccgcgattccgatccgggcctccgatcggcacgggacggatcatccgcccgaacgccgtgtggcggacgcttcggccaagggggccaagacggtctggcaactggcctatgcggggtcggtcgggtcgcaagtgatcgtcgggctgccggcgctggcggccctgcgtgcggatccccgcctgcgcgatcgactgcaggtctggcccttcgataccgggctggccgtgccggagggccgcatcgtcctggccgaggtctatccctcgctgttgcagacgcaggctcatgccgagcgcgcggaggacgaggtgctggacagcgcgcaggtgcgggtggtggcgggtgccctggcggcgctcgaccgggagggggggctggcgccactcttccgcggcgcgccggacctcacgggccccgaacgcgaggtcgtggcgcgggaagaggcctggatcctcgggttggggcacgaggcggaactggtcgccgccgcccccgacgcgtccggccccgcgcgggctccggtgcggcagatgcgctatgaacgggacccggccgagatctatgcacagagtttcgccaccgttcgcagggaggcccggctggacaggttccccccggggcttcagtcggtcgccatccgcctgatccatgcctgcggcatggtcgaggtggccgaccggctggcctcgtcgagcggggcgtgggaggcgggccgggcggcgctgctggccggccggccggtcctctgcgattgcgagatggtggcggccggcgtcatccggcgcaacctgccggccgggaacgaggtcacggtcacgctgaacgcgcccgaggtgccggatctggcgcgacgcatcggcaatacccggtcggcggcggcggtcgagctttggctgccccatctggagggcgcggtcgtggccatcggcaacgctccgaccgcgctgttccacctgctggaactgctggaccggggcgcgccgaaacccgcgatgatcctgggattcccggtggggttcgtgggggctgcggaaagcaaggccgagctggcgtccgatccgcgcgggtgcgagttccttgccctgcgcggccgtcgcggcgggtcggccatggcctcggcggcggtcaatgcgctggctgcgggtttgccgggggaacaggtctga

SEQ ID NO: 154342 - protein, 529 aa, Oceanicola batsensis HTCC2597
MTRPLFDTHVVVDWSARNAPSPARPSKDAIWIGIVREGAAQAPVYLRTRHEAVAWLADFLSAEAEAGRRVLAGFDFPFGYPAGVAQRLCGSDSALALWDWLAGRVADGADNVSNRFEVAASINAEYDGVGPFWGRPDTVDLPAIPIRASDRHGTDHPPERRVADASAKGAKTVWQLAYAGSVGSQVIVGLPALAALRADPRLRDRLQVWPFDTGLAVPEGRIVLAEVYPSLLQTQAHAERAEDEVLDSAQVRVVAGALAALDREGGLAPLFRGAPDLTGPEREVVAREEAWILGLGHEAELVAAAPDASGPARAPVRQMRYERDPAEIYAQSFATVRREARLDRFPPGLQSVAIRLIHACGMVEVADRLASSSGAWEAGRAALLAGRPVLCDCEMVAAGVIRRNLPAGNEVTVTLNAPEVPDLARRIGNTRSAAAVELWLPHLEGAVVAIGNAPTALFHLLELLDRGAPKPAMILGFPVGFVGAAESKAELASDPRGCEFLALRGRRGGSAMASAAVNALAAGLPGEQV

SEQ ID NO: 154343 - DNA, 654 bp, Prochlorococcus marinus str. MIT 9211
  CDS (13)..(654): transl_table=11
atgatccattgtatgagtaaaaaattgacaaccattgatcatccaatttttgtggaaagtattcgttacgttaaagctcagcttggtgatacaggattagagaatttagaacaagaagttcttgcaagattaattcatactagtggagattttggaattcaacctttattgaggttttcacctaatgcttgcaaagaaggtcttgcagctttgaaagatggtgctccaattcttactgacactgctatggcagctgcagccattgcgccaatggcatcgaaaacaatacagccatcaatacattgtcttttggattgggccccgtctattgatggatacggcttgacaaggtcagcttttgggattgaggcggcatggcagcaattttcccaacaatcattgactagtagtcggccgcctattgttgttattggtagtgcccctactgctttaacatctcttttaaaagtaattgttaagacaggatttttacctagtttgattgttggtatgccagttggatttataagtgtcattgagagtaaattgcttttatctaaaagtcagatccctcaaattagacttgaaggtaataggggaggagctgctcttgcatccgcagcagtaaatgctcttttaagagcttctatataa

SEQ ID NO: 154344 - protein, 213 aa, Prochlorococcus marinus str. MIT 9211
MSKKLTTIDHPIFVESIRYVKAQLGDTGLENLEQEVLARLIHTSGDFGIQPLLRFSPNACKEGLAALKDGAPILTDTAMAAAAIAPMASKTIQPSIHCLLDWAPSIDGYGLTRSAFGIEAAWQQFSQQSLTSSRPPIVVIGSAPTALTSLLKVIVKTGFLPSLIVGMPVGFISVIESKLLLSKSQIPQIRLEGNRGGAALASAAVNALLRASI

SEQ ID NO: 154345 - DNA, 657 bp, Synechococcus sp. RS9917
  CDS (1)..(657): transl_table=11
ttgtcttctgccccgttcagcggcgaccatccgatcttcacggaaagcatccggcgcattcgtgagtatctcggtgagaccggtctggagccgctgccacagcaggtgctggagcggttggtgcacagcagcggtgatctgaacctggcgcccctgctgcgcttcagcgacggagcctgtgggcagggaatcgaggcgctgcgccatggcgccctgatcctcacggatacggcgatggccgccgcggcggtggcgccgatggcggcgcgcaccctgggcaatcccgtgcgctgcctgctcgagtgggcacccacccagtcgccgccgggctccacccgatcggcggcggcgatggcgcaggcctggcccgagctcacccaggccgctgcagccgctggtcagcccatgcccgtgctgctgatcggcagcgcccccaccgcgttggagcagctgctggatcagctggaggccggggcggcggcgcctgctctggtgatcggtatgccggtggggtttgtgggggtggcggagagcaagcggcgcctggcggccagtgggttggcccagatccgcctggaaggaagccgcggtggtgccggcctggtgggcgcggcgaccaatgccctgctgcgggcggcgagctcagagttcccttag

SEQ ID NO: 154346 - protein, 218 aa, Synechococcus sp. RS9917
MSSAPFSGDHPIFTESIRRIREYLGETGLEPLPQQVLERLVHSSGDLNLAPLLRFSDGACGQGIEALRHGALILTDTAMAAAAVAPMAARTLGNPVRCLLEWAPTQSPPGSTRSAAAMAQAWPELTQAAAAAGQPMPVLLIGSAPTALEQLLDQLEAGAAAPALVIGMPVGFVGVAESKRRLAASGLAQIRLEGSRGGAGLVGAATNALLRAASSEFP

SEQ ID NO: 154347 - DNA, 639 bp, Synechococcus sp. WH 5701
  CDS (1)..(639): transl_table=11
atgggcatggggcggcctggcttggatctggatcatccgatcttcagcgagagtgtgcggcgcatccgccagtggctgggccccaccgatctggacccggtgcagcaggaggtgctcgagcgcctggtgcacagcagtggcgatctggccatcgcggctgaccttcgcttcagcgccgaggcctgcgcgctgggcctggaggccctggctgggggggccgtgatcctcaccgatacggccatggcggccgcggccgtctcgccgatggcccggcgcaccttcgccaacccggtgcgcagcatcctcgagtgggcgccggctgtggcgccgcctggcggcacccgcacggccgagggcatggcggcggccctggcggcctgccccggggcggtggtgctgatcggcagcgcccccaccgccctggagcgtctgcttgatcagcccggcggcgccagccggccggccctggtgatcggcatgccggtgggcttcgtgggggtggcggagagcaagcggcggctggccgccagtgatctgccccagatccggctcgaaggcagcaagggtggcgccggcctggtgggcgccacctgcaacgccctgctgcgccgggcctggctgaatcaggccgcggcctga

SEQ ID NO: 154348 - protein, 212 aa, Synechococcus sp. WH 5701
MGMGRPGLDLDHPIFSESVRRIRQWLGPTDLDPVQQEVLERLVHSSGDLAIAADLRFSAEACALGLEALAGGAVILTDTAMAAAAVSPMARRTFANPVRSILEWAPAVAPPGGTRTAEGMAAALAACPGAVVLIGSAPTALERLLDQPGGASRPALVIGMPVGFVGVAESKRRLAASDLPQIRLEGSKGGAGLVGATCNALLRRAWLNQAAA

SEQ ID NO: 154349 - DNA, 708 bp, Synechococcus sp. WH 7805
  CDS (1)..(708): transl_table=11
atggtgacggggcgtcagaggatgctgaagtctgccctgtgtgggcagtgcctgtctgaggagagcgccgccatggccgatcacccgatcttcacggaaagcattcggcgcattcgtgccctgctgggggagacggatttggacaccctggagcagcaggtgctggagcggcttgtgcacagcagcggtgatcccggcctgatgtccctgcttcagttcagtgatggcgcctgcgcttgcggtgtggaggcgcttacgggtaaggctgtgattctcacggacacggccatggccgcggcggcggtgtcaccgatggcggcccgaaccctgggcaacgcagtgcattgcctgctcgactgggctccgccgctcgcgccgcagggatccactcgatcagcagcggcgatgcaaagagcctggcctgaactcagcgcagcggctcgcgcatccggctctgccctgccgttggtgctggtgggcagtgcccccaccgcgttggagcagctgctcgatcaggtgcaggcaggggccgataccccttcgctggtgatcggcatgccggtggggtttgtgggagtgccggaaagcaaacgacgcctggccgttagtggtctggcccagatccgcttagagggcacccgtggcggcgccggtttggtggctgcagccgtgaatgcattgctgcgggccgctcaggccgccagctga

SEQ ID NO: 154350 - protein, 235 aa, Synechococcus sp. WH 7805
MVTGRQRMLKSALCGQCLSEESAAMADHPIFTESIRRIRALLGETDLDTLEQQVLERLVHSSGDPGLMSLLQFSDGACACGVEALTGKAVILTDTAMAAAAVSPMAARTLGNAVHCLLDWAPPLAPQGSTRSAAAMQRAWPELSAAARASGSALPLVLVGSAPTALEQLLDQVQAGADTPSLVIGMPVGFVGVPESKRRLAVSGLAQIRLEGTRGGAGLVAAAVNALLRAAQAAS

SEQ ID NO: 154351 - DNA, 642 bp, Oceanospirillum sp. MED92
  CDS (1)..(642): transl_table=11
atggcgtttgagtacgaaattaatccacaggcaatcgagaaagacagcttccgacagattcgtaagctgaccgaactcagccattttgaccgcgaacagcagcaggttgtgatgcgcattgtacacagtctgggtatgccggagctggctgaacaggtgcgttttagcaaaaatgcctgtgaatcgggcatggctgcattggctgaggagtgtgagattctctgtgatgtggagatggtccgtcagggcatcacgaaacggatgatttcacgtttgccgagctgttatctgaatgacccgcgaaccgttgagttggcaaaagaaaccggcgaaacccgttctatggcagccgtcgaactatggcgtgaatcattagccggaagtgtcgtggtgattggtaatgccccaaccgcattgttccgtttgctggagatgatcgaaaagggcgcggggaagccggcgttgattattggtatgccggtaggctttgttggcgcggctgaatctaagcaggcactctgggatgttcatgaacaactggggatagaatgtatcaccctgcttgggcgacaaggcggaagcgcggtttcagcggccagctgcaatgcgttactgcgctgtaaccgcggggaatattactaa

SEQ ID NO: 154352 - protein, 213 aa, Oceanospirillum sp. MED92
MAFEYEINPQAIEKDSFRQIRKLTELSHFDREQQQVVMRIVHSLGMPELAEQVRFSKNACESGMAALAEECEILCDVEMVRQGITKRMISRLPSCYLNDPRTVELAKETGETRSMAAVELWRESLAGSVVVIGNAPTALFRLLEMIEKGAGKPALIIGMPVGFVGAAESKQALWDVHEQLGIECITLLGRQGGSAVSAASCNALLRCNRGEYY

SEQ ID NO: 154353 - DNA, 711 bp, delta proteobacterium MLMS-1
  CDS (1)..(711): transl_table=11
atgagcgtcaccctgcaagaggtcaaaccggaagcgattgaagaggagagcttccgaatcatcgccgcagagatcggcgagcatgggctggatgccgccacctgggcggtggtccgccgggtgatccacgccaccggcgatttctccttcgccgagaccctgcgctgcggcaacggggggatcgccgccgggctggccgccatcaaggccggcaagaacatcctcaccgatgtcaatatgagcgccgtggggatcagccagaaattaatgggccactggggtgaaggccgggtgctctgcggggtggccgacccggaggtggccgcccgggccagaaccgaagggcgcacccgctcggaggtggcgatccgggatttgctgtcggagaatatcggcattgtggccatcggtaacgctcccaccgccctgctgcgggtgatggaactgctcgccgaactgccggcggcgcggcgtcccgagctggtggtcggggtaccggtgggctttgtcaacgccgccgaggccaaggagttgcttgcccaaaaggaatatccctttatcacctgtctgggccgcaagggcggcagcccggtggcggtggccatcgtcaacgccctgctgcacctggcggcggccgctgaaccggcggcacccctctgtgccgcagccgacaccaacgcgggccccttgggccggcgctcggtggcgtaa

SEQ ID NO: 154354 - protein, 236 aa, delta proteobacterium MLMS-1
MSVTLQEVKPEAIEEESFRIIAAEIGEHGLDAATWAVVRRVIHATGDFSFAETLRCGNGGIAAGLAAIKAGKNILTDVNMSAVGISQKLMGHWGEGRVLCGVADPEVAARARTEGRTRSEVAIRDLLSENIGIVAIGNAPTALLRVMELLAELPAARRPELVVGVPVGFVNAAEAKELLAQKEYPFITCLGRKGGSPVAVAIVNALLHLAAAAEPAAPLCAAADTNAGPLGRRSVA

SEQ ID NO: 154355 - DNA, 711 bp, delta proteobacterium MLMS-1
  CDS (1)..(711): transl_table=11
atgagcgtcaccctgcaagaggtcaaaccggaagcgattgaagaggagagcttccgaatcatcgccgcagagatcggcgagcatgggctggatgccgccacctgggcggtggtccgccgggtgatccacgccaccggcgatttctccttcgccgaaaccctgcgctgcggcaacggggggatcgccgccgggctggccgccatcaaggccggcaagaacattctcaccgatgtcaatatgagcgccgtgggaatcagccagaaattaatgggccactggggtgaaggccgggtgctctgcggggtggccgagccggaggtggccgcccgggccagaaccgaagggcgcacccgctcggaggtggcgatccgggatttgctgtcggagaatatcggcattgtggccatcggtaacgctcccaccgccctgctgcgggtgatggaactgctcgccgaactgccggcggcgcggcgtcccgagctggtggtcggggtgccggtgggctttgtcaacgccgccgaagccaaggagttgctcgcccaacaggaatatccctttatcacctgtctgggccgcaagggcggcagcccggtggcggtggccatcgtcaacgccctgctgcacctggcggcagccgctgaaccggcggcaacccccggtactgctgccggcaccaacgcgggccccttgggccggcgcccggtggcgtaa

SEQ ID NO: 154356 - protein, 236 aa, delta proteobacterium MLMS-1
MSVTLQEVKPEAIEEESFRIIAAEIGEHGLDAATWAVVRRVIHATGDFSFAETLRCGNGGIAAGLAAIKAGKNILTDVNMSAVGISQKLMGHWGEGRVLCGVAEPEVAARARTEGRTRSEVAIRDLLSENIGIVAIGNAPTALLRVMELLAELPAARRPELVVGVPVGFVNAAEAKELLAQQEYPFITCLGRKGGSPVAVAIVNALLHLAAAAEPAATPGTAAGTNAGPLGRRPVA

SEQ ID NO: 154357 - DNA, 711 bp, Synechococcus sp. RS9916
  CDS (1)..(711): transl_table=11
atggtcgggacgaccgcagacgatgctgaagtctgccccctgccgccagctcctgtgacccgcgaggttgtcagcgaccatccgatcttcacggaaagcattcggcgcatccgtgtgttgctgggtgataccggcctggatgctctgcagcagcaggtgttggagcggttggtgcacagcagcggtgatcccggtttagcccctttgctgcgcttcagtgatggtgcctgtgagcgcgggttggcggctttgaaggcgggtgccgccatcctcaccgacaccgccatggcggcggcggcggtctcgccgatggcgcggcgcacgggggcgaatgcggtgtgcggtctgttggattgggcaccggaccgagcaccggagggatcgacccgatcggccgctgccatggcgcaggcctggagggccttgaccacccaggctgaggccgctggccagccgatgccgttggtgttggtgggcagtgcgcccacggcccttgagcagctgattgatcagctggaggcaggggctccggcccccagtctggtgatcggcatgccggtgggatttgtgggggtgccagaaagcaagcgccgtttggccagcaccgatctggctcagattcgcctggagggcacccgtggaggtgccggtctggtgggtgcggcctgcaatgccctgctcagggcggcagcgctagaggggcaggggtga

SEQ ID NO: 154358 - protein, 236 aa, Synechococcus sp. RS9916
MVGTTADDAEVCPLPPAPVTREVVSDHPIFTESIRRIRVLLGDTGLDALQQQVLERLVHSSGDPGLAPLLRFSDGACERGLAALKAGAAILTDTAMAAAAVSPMARRTGANAVCGLLDWAPDRAPEGSTRSAAAMAQAWRALTTQAEAAGQPMPLVLVGSAPTALEQLIDQLEAGAPAPSLVIGMPVGFVGVPESKRRLASTDLAQIRLEGTRGGAGLVGAACNALLRAAALEGQG

SEQ ID NO: 154359 - DNA, 627 bp, Pseudomonas putida GB-1
  CDS (1)..(627): transl_table=11
atgattgactacatccgcgatggtcaggagatctatcgcaattcctttcggatcatccgagaggaagccaagctcgagcggatccccgccgacctggaaaagctcgccgtgcgcgtgatccacgcctgcggcatggtcgacgccatcgatggcctgcagttttccgaaggtgccggacgggccgggcgagaggcgctgctcaacggcgcgccgatcctgtgcgatgcgcacatggtggccgaaggcattacccgggcccggctgccagcagacaacaaagtcatttgcaccctgcgcgaccccagcgtgccgggcttggccaaagacgccggcaacacccgttccgccgtggccctggagctgtggcggccgtacctggaaggcagcgtggtggtgatcggcaacgcccccaccgccctgttctacctattggaaatgctcgatgctggcgcacccaagcctgcgctgatcctcggctttccggtcggtttcgtcggcgctgccgagtccaaggccatgctcgccgccgacagccgcggcgtgccgttcgtgatcatgcaaggccgcctgggcggtagcgcgatggctgccgccgcggtcaacgccctggccacggaggtggaatga

SEQ ID NO: 154360 - protein, 208 aa, Pseudomonas putida GB-1
MIDYIRDGQEIYRNSFRIIREEAKLERIPADLEKLAVRVIHACGMVDAIDGLQFSEGAGRAGREALLNGAPILCDAHMVAEGITRARLPADNKVICTLRDPSVPGLAKDAGNTRSAVALELWRPYLEGSVVVIGNAPTALFYLLEMLDAGAPKPALILGFPVGFVGAAESKAMLAADSRGVPFVIMQGRLGGSAMAAAAVNALATEVE

SEQ ID NO: 154361 - DNA, 642 bp, Moritella sp. PE36
  CDS (1)..(642): transl_table=11
atggattataattacgaagttagaccacagaacattgagcaagaaagctttcgccaaatacgccaattaaccgcattagaccatttgagtaaagaacagcaacaagtggtgatgcgtattgtgcacagtgttggtatgcctgaggtgagcgagcaagtgcgctttagtcgtcatgcttgtgagaacgggctgcaagcaatcaatgcgcaggcacccattttatgtgatgtagaaatggtgcgccacggtattaccaaacgcatgatctcacagccgccactttgttatcttaacgatccgcgcgtgcctcctctagccaaacaaagaggtgaaacccgtaccatggcgtcgttagaattttggcagcaagatctggccaacagcatcgtcctcatcggcaatgcaccaaccgcattgttcagattattagaaatgatcgccaatggtgcaccaaaaccagcattgattataggtatgccggtgggctttgttggtgccgcagaatcaaaacaagcattgtgggatgcccatgagaaattggggattgaatgtatcaccttgcttggtcgtcagggcggtagtgcagtgacttctgctaccttaaatgccttgttacgttgcgtaaatggcgaatggtattaa

SEQ ID NO: 154362 - protein, 213 aa, Moritella sp. PE36
MDYNYEVRPQNIEQESFRQIRQLTALDHLSKEQQQVVMRIVHSVGMPEVSEQVRFSRHACENGLQAINAQAPILCDVEMVRHGITKRMISQPPLCYLNDPRVPPLAKQRGETRTMASLEFWQQDLANSIVLIGNAPTALFRLLEMIANGAPKPALIIGMPVGFVGAAESKQALWDAHEKLGIECITLLGRQGGSAVTSATLNALLRCVNGEWY

SEQ ID NO: 154363 - DNA, 591 bp, Cenarchaeum symbiosum
  CDS (1)..(591): transl_table=11
atgattgaagaggagatcggcccccacggatacggcccgctggaatggcctatcgtgcgcaggataatacactcgacggccgactttgactttgcgggcaaaaacgaggtgctcttccacccgtcggccatacaaaagggcatggccgcgctaggtagcggctgcgacatagtcgcggacgtaaacggggtcgcaggcctgctcaacaagaggaacctcaaggaatacgggaacaggatagtctgcaaggtgtctgacgaggatgcggcgtcccgggcgatacaggacggctctacgcggtcggccgcatcgatgaggctctcggcggagcatatcgacggcggggtggtcgcggcgggcagcgcgccgactgccctgctcgaggttttacagatggcaaaggaaggcgtggccacgcctgtcttgatagtggggctgccggtcggctttatctgcgccgtcgaatccaaggaggagcttgccgcatctgagataccgcacataaccaacaggggcagaaaaggcggaagcccctcggctgcagccgtgataaacgcgctgttcaggctgatcagggagccccctgcatag

SEQ ID NO: 154364 - protein, 196 aa, Cenarchaeum symbiosum
MIEEEIGPHGYGPLEWPIVRRIIHSTADFDFAGKNEVLFHPSAIQKGMAALGSGCDIVADVNGVAGLLNKRNLKEYGNRIVCKVSDEDAASRAIQDGSTRSAASMRLSAEHIDGGVVAAGSAPTALLEVLQMAKEGVATPVLIVGLPVGFICAVESKEELAASEIPHITNRGRKGGSPSAAAVINALFRLIREPPA

SEQ ID NO: 154365 - DNA, 1515 bp, Magnetospirillum gryphiswaldense
  CDS (1)..(1515): transl_table=11
atgctgaccgaagccccggtcttcgacgcctatgtcatggtcgattggagcgcggaatcacgccccaagaccggggccgacagcatctggatcattgtgctggaaagcggcaagcccgagcggctggaaaacccggccacccgtgacgccgccatcgccctgctggccgatatcctgtcggatctggcggcgcgcgggctgcatgtcttggccggattcgacttcgccctgggtttgccgcgtgggtcgcataaagcattgggcctgaaaaactggcgcgatctgtggcgacggctgatgccgctggtggacgaccgcgccgacaatggcaacagccgctttgccgccgccgctcacctgaaccaaagcctgggcgatgcacccgggccgttctggggctgtccggccagtgccgccggtccgcatctgaacaccaccaagggcgatttcaaaggcctgccggagcggcggttggcggaacagcgcctgctggcgacaaaatcggtgtggcagctgttttacaacggcaatgtcggcggtcagtcgctgaccggcatggcccggctggaacagttgcgccgccatccctggctggccgatatcacccgcgtctggccgttcgagaccggcttgaaggccgtggccaaaaattccgattggcgcatcctgatggcggaagtttatccatcgctgctgccggccaaagctgcccctggtcaggtcaaggatcaggcccaggtgatcgccctggcccgccacttcgcccatctcgaccaggacggtcggctggccgccttgttcggtggcgatgatcgtctgagcccagaggagcgtttgattatcgaaacagaggaaggctggattttgggggccaccgatccgcagaaaatcgacatccacgactggatcaagaacccggacgaaatctatcgccggtcgtttgccaccatcgccggtgaagccgatctggacagtctgcccaccgatctacgcgacatcgccatccgcatcgtccatgcctgcggcatgaccgatatcgttgccgatctggccttttcccccggcgccggcaccgccggcacccaggccttggccaagggcgcgcccatcctggtggacgcggaaatggtatcgcacggcatcatccgccgccgcctgcccaaggccaacacagtgatctgcacccttaacgacacagcggtgccggccaccgccaaggcgctgggcaccacccgctcggccatggcggtggatttgtggctgccgcatctggacggcgccgtcatcgccatcggcaacgcgccgaccgccttgttccgcctgctcgaactgatcgagcaaggggcgccgcgcccggctctggtgctgggtttcgccgtcggcttcgtcggtgccgccgaaagcaaggaagcgctgatccagtcgggcctgccgttcatcgccgtacgcggtcgccgcggtggttcggccatggccgccgccgccgtcaacgccttggccgggggcctggcatga

SEQ ID NO: 154366 - protein, 504 aa, Magnetospirillum gryphiswaldense
MLTEAPVFDAYVMVDWSAESRPKTGADSIWIIVLESGKPERLENPATRDAAIALLADILSDLAARGLHVLAGFDFALGLPRGSHKALGLKNWRDLWRRLMPLVDDRADNGNSRFAAAAHLNQSLGDAPGPFWGCPASAAGPHLNTTKGDFKGLPERRLAEQRLLATKSVWQLFYNGNVGGQSLTGMARLEQLRRHPWLADITRVWPFETGLKAVAKNSDWRILMAEVYPSLLPAKAAPGQVKDQAQVIALARHFAHLDQDGRLAALFGGDDRLSPEERLIIETEEGWILGATDPQKIDIHDWIKNPDEIYRRSFATIAGEADLDSLPTDLRDIAIRIVHACGMTDIVADLAFSPGAGTAGTQALAKGAPILVDAEMVSHGIIRRRLPKANTVICTLNDTAVPATAKALGTTRSAMAVDLWLPHLDGAVIAIGNAPTALFRLLELIEQGAPRPALVLGFAVGFVGAAESKEALIQSGLPFIAVRGRRGGSAMAAAAVNALAGGLA

SEQ ID NO: 154367 - DNA, 630 bp, Rhodobacter capsulatus
  CDS (1)..(630): transl_table=11
atgccccatgagtatgaaaaggacggcgcgaagatctacgtgcaatcctttgccacgatccgcgccgaggccgatctggcccgcttcacccccgaggaagaggtggtggtggtccgcatgatccatgccgccgggatggtcgggctggaaaaccacgtccgcttcgcgcccggcatggcgattgccgcccgcgcggcgctggaggcgggggcgccgatcctctgcgatgcgcggatggtctccgaaggcatcacccgcgcgcgtctgcccgcgaagaacgaggtgatctgcacgctgcaagacccgcgcgtgcctgcgctggcgcaggagatggggaacacccgctctgccgcggcgctggagctgtggcggccgaagctggaaggcgcggtggtggcgatcggcaatgcgccgacggctttgttccatcttctcaacatgctcgaagacccggcctgcccgcgcccggcggcgatcatcggctgtccggtgggcttcatcggcgcggcggaatcgaaagccgcgctggccgtggccaatccggtgccctgggtgattgtcgagggacggctgggcggctcggcgatcaccgtggccgcggtgaatgcgctggcctgccggaaggaatag

SEQ ID NO: 154368 - protein, 209 aa, Rhodobacter capsulatus
MPHEYEKDGAKIYVQSFATIRAEADLARFTPEEEVVVVRMIHAAGMVGLENHVRFAPGMAIAARAALEAGAPILCDARMVSEGITRARLPAKNEVICTLQDPRVPALAQEMGNTRSAAALELWRPKLEGAVVAIGNAPTALFHLLNMLEDPACPRPAAIIGCPVGFIGAAESKAALAVANPVPWVIVEGRLGGSAITVAAVNALACRKE

SEQ ID NO: 154369 - DNA, 678 bp, Bacillus megaterium
  CDS (1)..(678): transl_table=11
atggattttcgtacagaatttaaaccgttaactgttcagcctcagcaaattgaaggaaaaagttttgaaatgattacagaagagcttgggcctcatccgtttacagacgaacagtacccaattgttcagcgcgtaattcatcgctctgcagactttgagcttggacgcagcatgctgtttcatccggatgcgattcaagcaggaattaaagccattcgcagcggcaagcaagtggttgcagatgtacaaatggtgcaagtaggaacaaacaagcagcgaattgaaaaacacggcggtgaaatcaaagtttatatctcagattcggacgtcatggaagaagcgaagcgtttaaatacaacgcgtgcaattatttctatgcgaaaagcaattaaagaagcagacggcgggatttttgcaattgggaacgcaccgacagctttacttgaattaattcgtttgattaaagaaggagaagcgaagcctgggcttgttattggtctgccggtaggatttgtttcagcagctgaatctaaagaagagcttgctaaactttacgtgccgtttattacaaacattgggcgaaaaggcggtagtacggtaaccgttgctgcattaaatgcaatttcaatccttgcagattcaggtgtaacgtatgaaggaagtgccaaaagaacctaa

SEQ ID NO: 154370 - protein, 225 aa, Bacillus megaterium
MDFRTEFKPLTVQPQQIEGKSFEMITEELGPHPFTDEQYPIVQRVIHRSADFELGRSMLFHPDAIQAGIKAIRSGKQVVADVQMVQVGTNKQRIEKHGGEIKVYISDSDVMEEAKRLNTTRAIISMRKAIKEADGGIFAIGNAPTALLELIRLIKEGEAKPGLVIGLPVGFVSAAESKEELAKLYVPFITNIGRKGGSTVTVAALNAISILADSGVTYEGSAKRT

SEQ ID NO: 154371 - DNA, 687 bp, Lactobacillus reuteri
  CDS (1)..(687): transl_table=11
atggaaaaagaaagttatattacaatcccccatcaaataaccgataagagttttcaaattattcaagaagagattgaaaagatcgacccaaattatcaatttgaaagccctctacaagaagcagtaattaagcgggcaattcatacaaccgcagactttgattatttaaagaatttgaagtttacccataatgtattggagaaaataaaaaatgtcctgatgaatcagggggttatttatacagatactacgatggcattgtcagggattaataagcggcgactagataagctcggtgtaagttatcattgcctgattcgggatccacgggtgattgaaatggctaaagaaaaaggaattacccggtcgatggctgccgttgaagttgcagctagtgattcaaaacagaaaatatttattgtggggaatgcaccgactgcactttgtaaaatcattgagatggttaatgaaaatcaattggaaacggcagccgtaattggggttccggttggctttgttgaagcagctgagagtaagcaggcactgtatgaatcaaatattccggcaattgcagcactcggtagaaagggtggaagtaatctggctgcggcactgattaatgccgtgatatacaacatggatattgaaaagttaggtgatgaatatggccgtcacaccaaacaataa

SEQ ID NO: 154372 - protein, 228 aa, Lactobacillus reuteri
MEKESYITIPHQITDKSFQIIQEEIEKIDPNYQFESPLQEAVIKRAIHTTADFDYLKNLKFTHNVLEKIKNVLMNQGVIYTDTTMALSGINKRRLDKLGVSYHCLIRDPRVIEMAKEKGITRSMAAVEVAASDSKQKIFIVGNAPTALCKIIEMVNENQLETAAVIGVPVGFVEAAESKQALYESNIPAIAALGRKGGSNLAAALINAVIYNMDIEKLGDEYGRHTKQ

SEQ ID NO: 154373 - DNA, 1014 bp, Candidatus Kuenenia stuttgartiensis
  CDS (1)..(1014): transl_table=11
atgaaaacaggtgttatactcatttctcatggtagtaaaataagtagtggcaatgaaggcttgttgaaaatagcggatatgcttcgtgcaatgaatcgttgggacatggttgaaccggcatttttgcaactggcaaaacctggattggatgaggtggttgaaaaaacagtggcaaacggaatggggcggattgtagtagttccgctgcttctttttaaggggaatcatgtatttaaagacattcccgaaatgctggaaaaggagagagcgaaatatccgaagatggaatttatctataccaataatatcggagcggatgaacgaattgcattaattgcggcagaccgtattcatgaaaaactggtagagagacaattcggtgaaaaaggccggttggaacagccgcaattaattatcgatgaaagttttgagatcatcgataaactcgttaatctcgcgaatatacctgaattacagagacctgtaatacaacgcgcaattcatgctacaggcgatacggaatatgcgtacaatttactattttcttccaatgcggttgaagctggagtaaaagccataaaggatgggaaaaacatcattaccgatgtaaatatggtgaaagcggggatcagtaaaaaacctgttgaaaattttggaggaaaactggtctgtaagattgacgataacttggttgctgatgaggcaaaacgatcgggaaaaacccgtgcgatgattgccatgcagttttcacttgatgaaatgcaggggggtgttgtggtaatcggcaacgcgccaaccgccttgtttgaacttattgatttaataaaaaaggacaaggcgaaaccggcgctggtaattggtatccctgtaggatttgtaggcgcggttgaagcaaaggcggcattaaaacagatatccataccttatattaccaatgataaccgtaaaggcgggagcgcagtggcggtggctatcattaacgctgtcattgaattggcgaagaaggcacggtaa

SEQ ID NO: 154374 - protein, 337 aa, Candidatus Kuenenia stuttgartiensis
MKTGVILISHGSKISSGNEGLLKIADMLRAMNRWDMVEPAFLQLAKPGLDEVVEKTVANGMGRIVVVPLLLFKGNHVFKDIPEMLEKERAKYPKMEFIYTNNIGADERIALIAADRIHEKLVERQFGEKGRLEQPQLIIDESFEIIDKLVNLANIPELQRPVIQRAIHATGDTEYAYNLLFSSNAVEAGVKAIKDGKNIITDVNMVKAGISKKPVENFGGKLVCKIDDNLVADEAKRSGKTRAMIAMQFSLDEMQGGVVVIGNAPTALFELIDLIKKDKAKPALVIGIPVGFVGAVEAKAALKQISIPYITNDNRKGGSAVAVAIINAVIELAKKAR

SEQ ID NO: 154375 - DNA, 630 bp, Escherichia blattae
  CDS (1)..(630): transl_table=11
atgaaatatatccaatccccccagactatagagaacgaaagttttcatattatcggcgacattattgcccgggagcgcccggactaccgttttgccagcccgctccatgaggcggtgatcaaacgggttatccacaccacggcggatttcgactggctggatattttatggttttctgaccacgggctgccccgtctgcaggcggcgctgcgcagcggctgcaccctgtatacggataccaccatggccctgtcggggatcaacaaacagcgccttgccgactggggcagtgaatgccgctgttttatccgcgatccgcgggtggtggcggcagccagaaatcagggtatcacccgctccatggcggcggtggatctggcactgacaatgcccggcaaaaaagtgtttgtctttggtaacgcccctacggcgctgtttcgcctgctggaacaacagggggaggccgaaggcgttatcggtgtgccggtgggctttgtgggggcggcagaatccaaacaggcgctgatagacagcaaccacaccggggtggcagcccgggggcgcaaaggcggcagcaacgtggcggccgccattgtcaatgcgcttctctatttcagcggagaagcgtaa

SEQ ID NO: 154376 - protein, 209 aa, Escherichia blattae
MKYIQSPQTIENESFHIIGDIIARERPDYRFASPLHEAVIKRVIHTTADFDWLDILWFSDHGLPRLQAALRSGCTLYTDTTMALSGINKQRLADWGSECRCFIRDPRVVAAARNQGITRSMAAVDLALTMPGKKVFVFGNAPTALFRLLEQQGEAEGVIGVPVGFVGAAESKQALIDSNHTGVAARGRKGGSNVAAAIVNALLYFSGEA

SEQ ID NO: 154377 - DNA, 684 bp, Lactobacillus reuteri
  CDS (1)..(684): transl_table=11
atggaaaaagaaagctatattacagtacctcataaaataacggatagaagttttcaaatcattcaagaagagatcgacaaaattgatccgcattataaatttgatagtccattacaagaagcagtaatcaaaagggcaattcatacgacagcagattttgattatttgaaaaatttaaaatttacgcatgatgtattaaataaattaaaacatgtcatattaaatcatggtgttatctataccgatactacaatggctttatcaggaattaacaaacggcgccttgataaattaggtgttgattatcattgcttaatccgggacccgcgtgtaattcaattagcccaagaaaaggggattactcgttcaatggcggctgttgaaattgctgctaacgatccacgagaaaagatatttattgttggaaatgcaccaactgctctttgtaaaatcattgaactcgttaatgatgagcagcttaaagtggctgctgtaattggtgttccagttggctttgttgaggctgctgagagtaagcaagctttatatgaatcaaatatgccagcaattgctgctctagggcgaaaaggcgggagtaatcttgccgcagcccttattaatgcagtgatgtataacatggatattaagaatttaggtgatgagtatggccgtcacaccaaataa

SEQ ID NO: 154378 - protein, 227 aa, Lactobacillus reuteri
MEKESYITVPHKITDRSFQIIQEEIDKIDPHYKFDSPLQEAVIKRAIHTTADFDYLKNLKFTHDVLNKLKHVILNHGVIYTDTTMALSGINKRRLDKLGVDYHCLIRDPRVIQLAQEKGITRSMAAVEIAANDPREKIFIVGNAPTALCKIIELVNDEQLKVAAVIGVPVGFVEAAESKQALYESNMPAIAALGRKGGSNLAAALINAVMYNMDIKNLGDEYGRHTK

SEQ ID NO: 154379 - DNA, 633 bp, Methanococcus jannaschii
  CDS (1)..(633): transl_table=11
atgggagcaatatcaaaagatggattaaatatagcaaataaatcaagggaaatcgttagaaataaaataaaagaggttttaggagacagaataaatgaattcaacgaaaaagaaatgggaattattgaaagagtagttcatgctacagcagaccctgagtatgccaaacttttagtgtttaaaaataacccaatagaggaaggaattaaagctataaaggaagaaaaaccaataatagttgatgtaaatatgattaaagctgggattagatataataaagtacattgttttataaatcatccagatgtctatgaagttgctaaaaaagaggggataacaagagcagtagcttcaatgagattggctaaggatttgatagatgatggaattgtagttatcggaaactccccaactgcattgtttgaggttataagattagttaaagaagaaaatataaaaccaaaattaattgttggagttccagtggggtttgttcaggcatcagaatcaaaagaagcacttagagaggtaaatgttccaagtatatcaaccataggcccaaaaggaggaactccagtagctgttgccataattaacggcattattgcctatgcaaaaaatgaaaaagcttaa

SEQ ID NO: 154380 - protein, 210 aa, Methanococcus jannaschii
MGAISKDGLNIANKSREIVRNKIKEVLGDRINEFNEKEMGIIERVVHATADPEYAKLLVFKNNPIEEGIKAIKEEKPIIVDVNMIKAGIRYNKVHCFINHPDVYEVAKKEGITRAVASMRLAKDLIDDGIVVIGNSPTALFEVIRLVKEENIKPKLIVGVPVGFVQASESKEALREVNVPSISTIGPKGGTPVAVAIINGIIAYAKNEKA

SEQ ID NO: 154381 - DNA, 621 bp, Methanobacterium thermoautotrophicum
  CDS (1)..(621): transl_table=11
ttgatgggagcatccacaggccagggctatgaaatagcaaggaagagcagggagatagtgagggaactcatctccgaggatatatcctcgctgggtcccgctgaggtggccatagttgaaaggatagtccactccaccgccgacccggaatatgcacgtataacagaattcagccagggctttgttgatgaggcactcagatccctcaggagttcaggcgggatactcacagacattgaaatggtccgcgcaggcatatcacatccctcccggtgctacataagggaacccgctgtgagggagcttgcagagaaaagggacatcacaagggccgctgcttcaatggagtacgccgccagccagggattccgggggatcgttgtcataggcaacgcaccgacagccctcatgaaggtgattgaactaacccttgaaggcctgatggatgccagggccgttataggtgtgcctgtgggctttgtaggtgctgcagagtctaaagaggccctcagaggtacagaaatacctcatatgataaccaggggtcccaaggggggcacaccagtcgcagtggcggctgcaaacgcactcatagcattatccaaggataaagaggtttag

SEQ ID NO: 154382 - protein, 206 aa, Methanobacterium thermoautotrophicum
MMGASTGQGYEIARKSREIVRELISEDISSLGPAEVAIVERIVHSTADPEYARITEFSQGFVDEALRSLRSSGGILTDIEMVRAGISHPSRCYIREPAVRELAEKRDITRAAASMEYAASQGFRGIVVIGNAPTALMKVIELTLEGLMDARAVIGVPVGFVGAAESKEALRGTEIPHMITRGPKGGTPVAVAAANALIALSKDKEV

SEQ ID NO: 154383 - DNA, 633 bp, Salmonella typhimurium
  CDS (1)..(633): transl_table=11
atgcattatatccagcagccccaaaccattgaggccaacagtttcaccattattagcgacattattcgcgaaacgcgtcctgattaccgtttcgccagtccgctccatgaggccattatcaagcgggttattcataccaccgccgatttcgactggctggacattttgtggttctctgccgatgcgctggagcagctttgtgatgcgttacgccatccgtgcattatttataccgataccacgatggcgctgtccggcattaataaaagattactggcgacgtttggcggcgagtgtcgctgttatatcagcgatccgcgcgtggtgcgcgccgcacaaacgcaggggattacccgttcaatggccgccgtcgatatcgctatcgccgaggaggagaaaaacaagctctttgttttcggtaatgcgccgacggccctgttccgtttgcttgaacataacgtgacggtgagcggcgtggtgggcgtaccggtaggctttgtcggcgcggcggagtccaaagaggcactcacccatagccatttccccgcggttgccgcgttagggcgtaaaggcggcagtaacgtggctgccgctatcgtcaatgcgttgctctatcacctccgggaggcctga

SEQ ID NO: 154384 - protein, 210 aa, Salmonella typhimurium
MHYIQQPQTIEANSFTIISDIIRETRPDYRFASPLHEAIIKRVIHTTADFDWLDILWFSADALEQLCDALRHPCIIYTDTTMALSGINKRLLATFGGECRCYISDPRVVRAAQTQGITRSMAAVDIAIAEEEKNKLFVFGNAPTALFRLLEHNVTVSGVVGVPVGFVGAAESKEALTHSHFPAVAALGRKGGSNVAAAIVNALLYHLREA

SEQ ID NO: 154385 - DNA, 1341 bp, Archaeoglobus fulgidus
  CDS (1)..(1341): transl_table=11
gtgttactgttgccatcgcgtggtaagctctacgtggttggaataggcccgggaaaggaggagctgatgacattgaaggcaaaaagggccattgaggaggctgattatatcgtaggctatcagacctacgttgatagaatctcacatctaattgaggggaagaaggtcgtcacgactccaatgaggaaggagttggatagagtaaagattgcccttgagcttgccaaagagcacgttgttgccctcatcagcggtggtgatccatccatttatggcatccttcctctcgtcattgagtatgctgtagagaaaaaggttgatgttgaaattgaggctattccgggtgtaacagctgcctcagcagcctcatcactgctcggctcagctataagcggtgattttgctgttgttagcctcagcgatttgctggttccgtggagtgtggtggagaagaggctcctttacgccctaagcggggattttgtggtggcaatctacaacccatccagcagaaggaggaaggaaaacttcagaaaggcaatggagatagttagaaggttcaggggagatgcgtgggtcggggttgtgaggaacgcgggcagagaggggcagcaggttgaaatcaggagagtttctgaggttgatgaggtggacatgaacaccattctgattgtgggaaattcagagacgaaggttgtggatgggaagatgttcacgccccgcggttactcgaataagtacaatatcggtgaaaagagaagggcggaaaggatgggagcatcgacgaaaggtggaatggaggtggcgagaaggagcgaggagattctaaggagcttttatcctgaagaggggctgagaggggacataattaggagatgcatcgcgacaacgggggatgtgacgataaaggacgttatcaggtttgtgggggataccgaggagggagtccgagctttgcgggatggctgcaggataatcgcagacgtgcacatggtaagggccggtttgaggagagatgcgattgttgctgtagactttgccagaggtgatgacacgaggactgcttcaggcatcagaaatcttgcggagatgattgagggaagtttggttgccattggcaactcgccctcggcagcctttgctttatgcgaggtggctgagaagcatccgccaaggttcatcgttgccactcccgttggcttcgtgaatgctgcagagtcgaaggagatggtcagaaagctgccagttccttcagtgacaaccgaggggccgagaggaggaagcgggatttgtgctgcgatagttaactgcctgatcgagcatgctgatagacccgattga

SEQ ID NO: 154386 - protein, 446 aa, Archaeoglobus fulgidus
MLLLPSRGKLYVVGIGPGKEELMTLKAKRAIEEADYIVGYQTYVDRISHLIEGKKVVTTPMRKELDRVKIALELAKEHVVALISGGDPSIYGILPLVIEYAVEKKVDVEIEAIPGVTAASAASSLLGSAISGDFAVVSLSDLLVPWSVVEKRLLYALSGDFVVAIYNPSSRRRKENFRKAMEIVRRFRGDAWVGVVRNAGREGQQVEIRRVSEVDEVDMNTILIVGNSETKVVDGKMFTPRGYSNKYNIGEKRRAERMGASTKGGMEVARRSEEILRSFYPEEGLRGDIIRRCIATTGDVTIKDVIRFVGDTEEGVRALRDGCRIIADVHMVRAGLRRDAIVAVDFARGDDTRTASGIRNLAEMIEGSLVAIGNSPSAAFALCEVAEKHPPRFIVATPVGFVNAAESKEMVRKLPVPSVTTEGPRGGSGICAAIVNCLIEHADRPD

SEQ ID NO: 154387 - DNA, 627 bp, Mycobacterium bovis
  CDS (1)..(627): transl_table=11
gtgctcgactacctacgcgacgccgcggaaatctaccggcggtcattcgcggttatccgcgccgaggccgatctggcgcgcttccccgccgacgtcgcgcgggtggtggttcggttgattcacacctgcgggcaggtcgacgtcgccgagcatgtggcctacaccgacgacgtcgtcgcgcgggcgggtgccgcgctggccgccggtgccccggtgctgtgcgattcgtcgatggtggccgccgggatcaccacctcgcggctgcccgccgacaaccagatcgtctcgctggtcgccgatccacgcgccaccgagctggccgcccgtcgccagaccacccgatcggcggccggggtcgagctgtgtgccgagcggctgcccggcgcggtgctggccataggcaacgcgcccaccgcgctgtttcggctgctcgaactggtcgacgaaggggcacccccaccggcggccgtgctgggcggaccggtgggtttcgtcggatcggcacaggccaaagaggagctcatcgagcggccccgcgggatgtcctacctggtggtgcgcggtcgccgcggcggcagcgcgatggccgccgccgccgtcaatgcgatagccagcgaccgcgaatga

SEQ ID NO: 154388 - protein, 208 aa, Mycobacterium bovis
MLDYLRDAAEIYRRSFAVIRAEADLARFPADVARVVVRLIHTCGQVDVAEHVAYTDDVVARAGAALAAGAPVLCDSSMVAAGITTSRLPADNQIVSLVADPRATELAARRQTTRSAAGVELCAERLPGAVLAIGNAPTALFRLLELVDEGAPPPAAVLGGPVGFVGSAQAKEELIERPRGMSYLVVRGRRGGSAMAAAAVNAIASDRE

SEQ ID NO: 154389 - DNA, 627 bp, Pseudomonas aeruginosa
  CDS (1)..(627): transl_table=11
atgattgactacatccgcgatggccaggcgatctatcgccagtcgttcgctaccatccgcgccgaagcgaacctcgccggcatcccggccgaccttgaaaagctcgcggtcagggtgatccacgcctgcggcatggtcgacgtggtcgacgacctgcgcttctcgcccggcgccggcgccgccggccgcgccgcgctggccgccggcgcggcgatcctctgcgacgcgcggatggtcgccgaaggcgtgacccgctcgcggctgcccgccgccaaccgggtgatctgcaccctcaacgaagcggacgtgccggcgctcgccacggaactcggcaatacccgctcggcggtggccctggagcactggcgcgagcacctggagggcagcgtggtggtgatcggcaacgcgccgaccgcgctgttctacctgctggaaatgctcgacgccggcgcgccgaaaccggcgctgatcctgggcttcccggtcggcttcgtcggcgccgcggaatccaaggagatgctcgccgccgatagccgcggggtgccctacgtgatcgtccgcggtcgccgtggcggcagcgccatggccgccgcggcggtgaacgccctggccacggagcgcgaatga

SEQ ID NO: 154390 - protein, 208 aa, Pseudomonas aeruginosa
MIDYIRDGQAIYRQSFATIRAEANLAGIPADLEKLAVRVIHACGMVDVVDDLRFSPGAGAAGRAALAAGAAILCDARMVAEGVTRSRLPAANRVICTLNEADVPALATELGNTRSAVALEHWREHLEGSVVVIGNAPTALFYLLEMLDAGAPKPALILGFPVGFVGAAESKEMLAADSRGVPYVIVRGRRGGSAMAAAAVNALATERE

SEQ ID NO: 154391 - DNA, 20 bp, Artificial sequence
  primer
atggtatggaggcatttcac

SEQ ID NO: 154392 - DNA, 21 bp, Artificial sequence
  primer
ttaatttaggtgggccctttg

SEQ ID NO: 154393 - protein, 337 aa, Artificial sequence
  consensus sequence
  Variant (2)..(4): Xaa in position 2 to 4 is any amino acid
  Variant (6)..(6): Xaa in position 6 is any amino acid
  Variant (7)..(8): Xaa in position 7 to 8 is any or no amino acid
  Variant (10)..(11): Xaa in position 10 to 11 is any amino acid
  Variant (12)..(143): Xaa in position 12 to 143 is any or no amino acid
  Variant (145)..(146): Xaa in position 145 to 146 is any amino acid
  Variant (148)..(168): Xaa in position 148 to 168 is any amino acid
  Variant (169)..(172): Xaa in position 169 to 172 is any or no amino acid
  Variant (175)..(179): Xaa in position 175 to 179 is any amino acid
  Variant (180)..(181): Xaa in position 180 to 181 is any or no amino acid
  Variant (183)..(184): Xaa in position 183 to 184 is any amino acid
  Variant (186)..(187): Xaa in position 186 to 187 is any amino acid
  Variant (189)..(191): Xaa in position 189 to 191 is any amino acid
  Variant (193)..(208): Xaa in position 193 to 208 is any amino acid
  Variant (209)..(224): Xaa in position 209 to 224 is any or no amino acid
  Variant (227)..(243): Xaa in position 227 to 243 is any amino acid
  Variant (244)..(254): Xaa in position 244 to 254 is any or no amino acid
  Variant (256)..(256): Xaa in position 256 is any amino acid
  Variant (262)..(270): Xaa in position 262 to 270 is any amino acid
  Variant (271)..(276): Xaa in position 271 to 276 is any or no amino acid
  Variant (278)..(280): Xaa in position 278 to 280 is any amino acid
  Variant (281)..(281): Xaa in position 281 is any or no amino acid
  Variant (283)..(283): Xaa in position 283 is any amino acid
  Variant (289)..(291): Xaa in position 289 to 291 is any amino acid
  Variant (295)..(296): Xaa in position 295 to 296 is any amino acid
  Variant (297)..(304): Xaa in position 297 to 304 is any or no amino acid
  Variant (306)..(313): Xaa in position 306 to 313 is any amino acid
  Variant (314)..(322): Xaa in position 314 to 322 is any or no amino acid
  Variant (324)..(325): Xaa in position 324 to 325 is any amino acid
  Variant (328)..(332): Xaa in position 328 to 332 is any amino acid
  Variant (334)..(335): Xaa in position 334 to 335 is any amino acid
IXXXSXXXIXXXXXXXXXXXXXXXXXXXXXXXXXXXXXXXXXXXXXXXXXXXXXXXXXXXXXXXXXXXXXXXXXXXXXXXXXXXXXXXXXXXXXXXXXXXXXXXXXXXXXXXXXXXXXXXXXXXXXXXXXXXXXXXXXXXXXXRXXHXXXXXXXXXXXXXXXXXXXXXXXXXALXXXXXXXIXXDXXMXXXGXXXXXXXXXXXXXXXXXXXXXXXXXXXXXXXXTRXXXXXXXXXXXXXXXXXXXXXXXXXXXXGXAPTALXXXXXXXXXXXXXXXPXXXXGXPVGFVXXXESKXXXXXXXXXXLXXXXXXXXXXXXXXXXXGXXGGXXXXXAXXNA

SEQ ID NO: 154394 - DNA, 1809 bp, Saccharomyces cerevisiae
  CDS (1)..(1809)
atgatactaaagcttgtacactgtttagttgctcttacaggattaatctttgcaaagccgtatcaacaacaacaggcagttttagcgccgtcgcaggatgtaccattaagagatatccatataggggatataaattttatccatacaaccgatactcatggctggttggggtcccatctatcacaaaacgactatgatgctgactggggagatttcgttgcatttgtagatatacttagagaaaaaattttacgacagtccagagacgtaatagtcatcgacactggcgacaaacgagacggtaatggtttgagtgatgctacttggccccccggcctacgaagctcggagatattcaacatgatggattacgatcttttaacgttaggtaatcatgagctatatacagctgaaagtgccatactagagtatagaggaacttctcagtcctcaaaattcaaagacaaatatgtttgcagcaacgtagaatttattgaagatgacggaacaagggttcctttcgggaataaatacattacattcgagactcccataatgaaacaaagagtcctggcattatcatttttgtttagttttcaaagagcaaataacagagccatcgtaacaccaccattggaagaaataactcaaaaaagctggttccaaaatatggttgagacaaacagagaggaggaaatcgacctaattattgtctttggtcatttgcctgccactgaccctacagagcgtgaaatgcacaaaattcatgctctaataaggaaatactacccaaatactgttatacaatattttggagggcacactcatatcagggattttgtacagctggactcaaaatctacttgtttacaaagtggtagatttgcggaaactgtgggattcttgtcaattaatatgactgaccctgtggacgccgaaagtcctattttctcaagaaggtatattgactttaacaaggaagctttcaaataccatttgagcaaactagggcatgactcgaatgttccagtctcaacgaaaaagggtaaaactatttctcgtttggtgaatgatctgcgccatgaactaaatttgaacgagaaactggggtacattcctcaaacttactacgtttcaacaaggccattaaactccgaagagaatctttatcatttgatcacgcataagattttacccaatttaattcctcccaaaaactatgaaccttcgatgagtcgtttcattttgattaacactggctctgtcaggtacgatctttacaaaggcccatttacaaaggatactgagtatatagtgatgccattcaataatgattggcgcttcatcacagttccattggtcgttgcctccagggtggaaacctatttgaacaagggccctgtcattgcctcattaggaataccatcatcgtctcatcacaaacagcattttggcggttttcagaagtgtcccttcatcaataatccaaatttaagcgaaggctacaccacagaagacgatttcgggtgtcatggtgatgacacacctcacaattcacaaagagaatacgatatccccaatgtagtgcaatgtaaagaggtgaagaaagtgcaagaagaggaagctgatccgtcgaagatggttcatgttatcttctattcctttatggaactcgatatattaaacgccgtaaattctatcataaatgatttaggattacgtatggagaacttgaccaccaatgactgctcccattatggtggtgattcaaccaaaaagttattacgggattacttttctcaattttag

SEQ ID NO: 154395 - protein, 602 aa, Saccharomyces cerevisiae
MILKLVHCLVALTGLIFAKPYQQQQAVLAPSQDVPLRDIHIGDINFIHTTDTHGWLGSHLSQNDYDADWGDFVAFVDILREKILRQSRDVIVIDTGDKRDGNGLSDATWPPGLRSSEIFNMMDYDLLTLGNHELYTAESAILEYRGTSQSSKFKDKYVCSNVEFIEDDGTRVPFGNKYITFETPIMKQRVLALSFLFSFQRANNRAIVTPPLEEITQKSWFQNMVETNREEEIDLIIVFGHLPATDPTEREMHKIHALIRKYYPNTVIQYFGGHTHIRDFVQLDSKSTCLQSGRFAETVGFLSINMTDPVDAESPIFSRRYIDFNKEAFKYHLSKLGHDSNVPVSTKKGKTISRLVNDLRHELNLNEKLGYIPQTYYVSTRPLNSEENLYHLITHKILPNLIPPKNYEPSMSRFILINTGSVRYDLYKGPFTKDTEYIVMPFNNDWRFITVPLVVASRVETYLNKGPVIASLGIPSSSHHKQHFGGFQKCPFINNPNLSEGYTTEDDFGCHGDDTPHNSQREYDIPNVVQCKEVKKVQEEEADPSKMVHVIFYSFMELDILNAVNSIINDLGLRMENLTTNDCSHYGGDSTKKLLRDYFSQF

SEQ ID NO: 154396 - DNA, 1857 bp, Magnaporthe grisea 70-15
  CDS (1)..(1857)
atggcttttagaacaacactagtcggatgcgtcacggccgcgctggccacggtcgggcgcgcgtcccagcctggagcagccaaaccggttgaagctccgatgagggacctccagtgggcacagctcaactttctgcacacgaccgacacccacggctggcacggtggtcacctcctcgagtcccagtactcggcagactggggtgactatgtttcttttgccgagcacctccgccaccgcgccgaccaggaaggccgcgacttgctgctggtcgacacgggcgacaggattgagggcaacgggctttacgactcttcggaccccaagggccgcttcacctacgacatattccgtcggcaggacattgatatcatctgcaccggcaaccatgagctctaccaagccgacgccgctgaccgcgaatggtcgcagactgtcccgaacttcaaggacaagtacatcgcctccaacctcgattacatacacccagagacgggcgagaagaaacccatggctcagcggtttcgtagattcaaaacaaagaaccaaaagatggacgtcctagccatgggttttctgtttgactttaccggtaacgccaacaacacagtcgtacaacctgttgaggacactgtcgaggaagagtggttcaagaatgcgatcaaggagaagcctgacatctttgtcataattggacacgtcgggttacggatgcaagagtttaagcacatctttacagagatccggaagcaaaactggttcactccaattgctttctttggaggacatgcgcatgttagagacgccgtcaagttcgacgacggcgcttatgctatcgcaagtggtcggtactttgagactatagggtggatgtcggtagatgggctctacaaagacactaccaagggcaagacgccagtcaaattccagaggcggtacatcgacaacaacctgttggggttgtaccatcacactggactcaaccagtccacctttcctaccaagaagggccaagaagtgactgaaatgattacggccgccagaaaagagctcaagctggatgagaagtacggatgtgcacctcagacctactggatgaaccgcgctccttaccctggaaatgagagcgtttatacctggctggaaacggaagtgctgccaaaagtcgccgtcaatgaagagaggaagaacaattcccggctggctatcttgaacaccggtgggataaggttcgacatcttcaagggcccgtttaccagggactcgacttttattgtcagccctttcacctcgggactgaactacgtcaaggatgtaccatatgaggttgcccaaaagctcattaagctgctcaacaacggcggaccgattcttgcggccggacaaggtgtgccagacctgcgattcatggcctcaccagagcagtggttccgtaccgaggacgtcgtcgtcaccgactcgacatcgaccccgtctcattcattcaccgctgaggatttcgaccagaagcctttgagccatcatgataaacacaaaccggccttgattggtggctacacaaccaaggacgacatatctgatgatggcgacgatgcggtgcattcgccattgtcattctatagagtaccgaactgtgtccaggccgaggttggctttcccgtcgatgatgacggaaagaagaagaaccctgaaaaggtggacgttgtcttcatcagcttcatccagccgtgggttttgctcgccctcaagtttgcgggaggcgactatacctcggatgacgttggtgtctatcggaacggaacctttaccgagatgatggccgactggatccaggagaactggaagggagactgctga

SEQ ID NO: 154397 - protein, 618 aa, Magnaporthe grisea 70-15
MAFRTTLVGCVTAALATVGRASQPGAAKPVEAPMRDLQWAQLNFLHTTDTHGWHGGHLLESQYSADWGDYVSFAEHLRHRADQEGRDLLLVDTGDRIEGNGLYDSSDPKGRFTYDIFRRQDIDIICTGNHELYQADAADREWSQTVPNFKDKYIASNLDYIHPETGEKKPMAQRFRRFKTKNQKMDVLAMGFLFDFTGNANNTVVQPVEDTVEEEWFKNAIKEKPDIFVIIGHVGLRMQEFKHIFTEIRKQNWFTPIAFFGGHAHVRDAVKFDDGAYAIASGRYFETIGWMSVDGLYKDTTKGKTPVKFQRRYIDNNLLGLYHHTGLNQSTFPTKKGQEVTEMITAARKELKLDEKYGCAPQTYWMNRAPYPGNESVYTWLETEVLPKVAVNEERKNNSRLAILNTGGIRFDIFKGPFTRDSTFIVSPFTSGLNYVKDVPYEVAQKLIKLLNNGGPILAAGQGVPDLRFMASPEQWFRTEDVVVTDSTSTPSHSFTAEDFDQKPLSHHDKHKPALIGGYTTKDDISDDGDDAVHSPLSFYRVPNCVQAEVGFPVDDDGKKKNPEKVDVVFISFIQPWVLLALKFAGGDYTSDDVGVYRNGTFTEMMADWIQENWKGDC

SEQ ID NO: 154398 - DNA, 1869 bp, Gibberella zeae PH-1
  CDS (1)..(1869)
atgattcttcggagtaaaacacttgctgctggctcagcgctggtcgctgtagctcgcgcatcgcaacccggagctgcagcgccggtaccaggtcccatgagagaccttacttggggtcagattaactttatccacacaacggatacacatggctggattggcggccacttacaagaacctcaatattctgctgattggggtgactacatctccttcaccaagcacatgcgcgaccaagccgacaagaggggatccgacctactagtcatcgataccggcgatcgcatcgagggcaatggcttatatgacgcctcaacccccaagggcctcttccaatatgacatctacgccgaagccgatgtcgacatcatgtctaccggcaatcatgagctttacaaggcctactcggctgatatggaacacaacaccactgttcccaactacaagaacagctacctcgcatccaaccttgactacatcagtttcgagaccggcgatcgcgttccccaagccccgcgctacaagaagttcaagacaaagaaccagggtctcaacattgtggcgttcggctttctcttcgactttaccggaaatgccaacaacacggttgttcagcccgtggaggacaccatcaaggaagattggttccaggaagctatccatgagaagcctgatctcttcgtcgtgattggccatgttggtcttcgcatggaagagttcaaggttatctatactgccattcgaaaacagaactggcacattcccattgctttcttcggcggccatgcgcatgttcgcgatactgtccagtatgactccaaggctttggccatagccagtggccgctatttcgagaccattggatggatgtcaatagacggtattaagaaaggcggtgccaaggacgttgaggcagctgcttctcctacctttactcgccgatacatcgacaacaacctctatggcctacactatcacactggtctcaacgaaacgacattctccacagagaatggaaagagagtcagcaagatgattacccgtgcccgcaaggctcttcagctcgattacacgttcggctgcgctcctaagacactctggatggctcgggccaagcccactgacgaggatagcatttaccattggatctcaaatcatctcttgcctgatgtcatcactcgcaaggatcgcaaagacaagtcgagactggccatcttcaacactggtggaatccgatttgacattttcaagggcggtttcacacgagacagcacttatgctgtctgcccctttgacagtggatttaaatacatccctgacgtcccatacaaagccgctgccaaggttattgatctcctcaacagcgctggaagaatctttgctgagaacggccttgacgttaagtatatggccatgcccgagcaagctttccccgctcctgtcatgaaggctcagttcgagaggaacaagatagatgcagaagagtcccgtctggaacttcgaagtctcttcgataaacctgatttgactgccggctatactaccatagacgatatcggcgccgacggcgatgataccattcacgagccagtcaagttttatcagcagcccaactgtgtccaggctgagattaacatgcccaaggatggtgagccagagacagttgactttgtattccttgactttatccagccatggattatccctgccctgagactcgcaggagcgggccattttagtgatgctgatgtcgagcggtatattgagggttcttttacgtatcacatggccgattggattagcaagaactggcagtttcatgtgccccaggattccgaagtgagtaccaacttcagtatcacgtactga

SEQ ID NO: 154399 - protein, 622 aa, Gibberella zeae PH-1
MILRSKTLAAGSALVAVARASQPGAAAPVPGPMRDLTWGQINFIHTTDTHGWIGGHLQEPQYSADWGDYISFTKHMRDQADKRGSDLLVIDTGDRIEGNGLYDASTPKGLFQYDIYAEADVDIMSTGNHELYKAYSADMEHNTTVPNYKNSYLASNLDYISFETGDRVPQAPRYKKFKTKNQGLNIVAFGFLFDFTGNANNTVVQPVEDTIKEDWFQEAIHEKPDLFVVIGHVGLRMEEFKVIYTAIRKQNWHIPIAFFGGHAHVRDTVQYDSKALAIASGRYFETIGWMSIDGIKKGGAKDVEAAASPTFTRRYIDNNLYGLHYHTGLNETTFSTENGKRVSKMITRARKALQLDYTFGCAPKTLWMARAKPTDEDSIYHWISNHLLPDVITRKDRKDKSRLAIFNTGGIRFDIFKGGFTRDSTYAVCPFDSGFKYIPDVPYKAAAKVIDLLNSAGRIFAENGLDVKYMAMPEQAFPAPVMKAQFERNKIDAEESRLELRSLFDKPDLTAGYTTIDDIGADGDDTIHEPVKFYQQPNCVQAEINMPKDGEPETVDFVFLDFIQPWIIPALRLAGAGHFSDADVERYIEGSFTYHMADWISKNWQFHVPQDSEVSTNFSITY

SEQ ID NO: 154400 - DNA, 1758 bp, Candida glabrata CBS 138
  CDS (1)..(1758)
atgctgtggttggtgtttttattgtttgtgaaggttattggtgcctttccgacagaacagttctttagtactagtgaatatgctgcatcgctagaattaagacctataaaattaggtaagattaattttctgcacacgacagacactcatggttggttagggtctcatctgctgcagagagattttaacgctgattggggcgacttcatatcatttgtggaattgtttcgcaagaacagaataaatagcaagaaccaggatctaattgtgcttgatactggagataagcgagatggcaatggtttgagcgatgccacttctttagtaggtatgaactcgtcagtcatttttaatgaaatggactttgacttattgacattggggaaccacgaattgtacactgaagaggcttcaatattagagtattatgggacagctctttctggtaagttcaaggacaaatatgtttcgagcaatgtcgaattcattgatgacaaaggtagcaaacacgcatttggtaataaatatttgtgtttcaaaactacaaataccaagaccaaaattttagcgctatcttttatttttgattttaagagatataatcgtaaaacaatagtaacaccagcaatacaagaaataaagaaaccttggttctccgatatggttaaatcatatacagaagatgacatagatatggtactagtgtttggtcatattcctgctaggggtgaggctgatgatgaacttctatcgatacataaagaactccgaaagtactacccaaatattgtcattcaatattttggcggccatacccacattagagatttcaagattatggatgataagtcaacatgtctacaaagtggaaaattctcagaaactgttggatttttatccattgataatttagatagtcaaaatgttactttctcaagaagatatttggattttagtaaaaggtcatttaagtttcatgcaggcgtgaagtctttgaccacaacgctaggtgatagcgtttcgaaggcaatttcaaaacttagaacgcatttaggactaaacgaaattattgggtatgtaccccatacgttttatatgtctgccagaccattaaactcatcagagaatatctataatttattgtcaaccaaagttctccctctattagaaacgccaaaaggtttattttcacattctaggattattatgataaactctggttcagtaagatatgacttatataaaggtccatttactaaggatactgaatatatcgtgatgcctttccctaacttttggaaatatattaggttgccacttaaagtagctattcagattgaaccagcgttaaataacgggcctgtaatcgcccatttagtaccacctgagggaagagttggtagtaaattggtagcatcctctcaaaagtgtccttttgtgactaatccgaaattaagtgagggttttactacagttgatgatgcaggttgtgatggggacgatactccacatagatcacaatattatcatgatattcctaacgtggttcaatgcattcaagtacacgatgaggaacctgatacaattgtggattttatatactatagttttatggaagacagtgtcatcactgctattaatttcatattagggcagcttgaaggagaagatcacaaaaatgttactaggggcgacactcttcattacggtggtagagcaacaaaggaacttttaaaggcatacatcaaatcaatttaa

SEQ ID NO: 154401 - protein, 585 aa, Candida glabrata CBS 138
MLWLVFLLFVKVIGAFPTEQFFSTSEYAASLELRPIKLGKINFLHTTDTHGWLGSHLLQRDFNADWGDFISFVELFRKNRINSKNQDLIVLDTGDKRDGNGLSDATSLVGMNSSVIFNEMDFDLLTLGNHELYTEEASILEYYGTALSGKFKDKYVSSNVEFIDDKGSKHAFGNKYLCFKTTNTKTKILALSFIFDFKRYNRKTIVTPAIQEIKKPWFSDMVKSYTEDDIDMVLVFGHIPARGEADDELLSIHKELRKYYPNIVIQYFGGHTHIRDFKIMDDKSTCLQSGKFSETVGFLSIDNLDSQNVTFSRRYLDFSKRSFKFHAGVKSLTTTLGDSVSKAISKLRTHLGLNEIIGYVPHTFYMSARPLNSSENIYNLLSTKVLPLLETPKGLFSHSRIIMINSGSVRYDLYKGPFTKDTEYIVMPFPNFWKYIRLPLKVAIQIEPALNNGPVIAHLVPPEGRVGSKLVASSQKCPFVTNPKLSEGFTTVDDAGCDGDDTPHRSQYYHDIPNVVQCIQVHDEEPDTIVDFIYYSFMEDSVITAINFILGQLEGEDHKNVTRGDTLHYGGRATKELLKAYIKSI

SEQ ID NO: 154402 - DNA, 1914 bp, Kluyveromyces lactis NRRL Y-1140
  CDS (1)..(1914)
atgtttagcaaactcagagtaccctggacgaaaggtagctcttttatgcagtttattgccaaacaaagaaccgtgaaatttactacttctttttggaggatatacaggtgtgttcttccaccgacgatgattgaactactgagtgttgtagtattggcagtttatgcccttcccttttttctatcctgtacgttaggggccgttttacctttcactccacaacaaagtgttttatccacagtagaacgtgaaactgataaacttagagatttagacattggacaattgaattttttacacaccacggacactcacggttggttaggctctcatttaaaccaggacaattataatgccaaatggggagatctcatttcatttattgataagttcaagcgaaatgtagttcgtgacaacgatctcttgataatcgatacaggcgacaagcacgatggaaatgggttcagtgatgcgacccagccaaatggattgaactctactcagatatttaatgaactggattatgatttattgacgttgggaaaccatgaattatacgttgaggacaatactgttttggaatattacgaaacagttatgaatcccaaattcagcaataaatatgtttcgagcaatgtggaattcatcaaagaagatggatcagttgtgccatttggctctaagtatcgttactttaaaacagagaaacacggtttaagagtcttggcattatcctttctattcgacttcaagaggtataacaaaagagcccaagtaacaccggtttccaaagaaattaaaaaaccttggttcaatgaagttactggaaactactccagggaagaggttgacattttattggtttttgggcatatgcctattagtgacccagaaaatcgcgagatcaaccatctacatgcaaagttaaggcatatttatccgaacactgtcatccaatacttcggtgctcacactcatatccgcgattttgtagaattagacaacaaggcgtctgctcttcaaagtggaagattctgtgagactgtaggatttgcatcaattgacgacattacgaaggaatcccctgttgtgtcaagaaaatacattgacttcaacttagattctttcttgcatcattcaaagagcaggaacaccaaggaatttgacaccgaaaagggcgtcgaagtcaatcagcgtttagatcgtttaagagaatatttgaacttaactaccaaatatggtgatgtaccttccacttattacatgtacaataaacccctctcctcaccgcacaatatttatcatcttttaaccgaaaaagtgctacctagattagcgcctgaaaattcagatgccaacgaatcgttaacctcccgaataataatgataaatactggtgcaatcaggtacgacttatataaaggccctttcacagctgacactgagtatactatttcacccttctcaaattcatggaactatattcaattacctgcgaggttagcgatacaagtcgaatcatatttaaatggcctgggtccgattctgacgttgaacgccgtgggtaaagaacatcgccaatgtccatttgttgatgataaaacactctccaaaggatataccacatccgacgatcttggatgtgaaggcgacgacacagcacaccgcagtgaacatcaatacaggattcctaacgttgtacagtccgttgatattgttgatgaagatgaagataaagttgatttcgtgtatgttagttttatccagcccttcgttttgcaagccttgaacgacttaaatgaagatcaaaacatcgtgaaccactcattcaatgagtcggactgtagaatttatggtgttacatcaataaaggatcttcttcgtggatatatcatctcactaaaccagtcataa

SEQ ID NO: 154403 - protein, 637 aa, Kluyveromyces lactis NRRL Y-1140
MFSKLRVPWTKGSSFMQFIAKQRTVKFTTSFWRIYRCVLPPTMIELLSVVVLAVYALPFFLSCTLGAVLPFTPQQSVLSTVERETDKLRDLDIGQLNFLHTTDTHGWLGSHLNQDNYNAKWGDLISFIDKFKRNVVRDNDLLIIDTGDKHDGNGFSDATQPNGLNSTQIFNELDYDLLTLGNHELYVEDNTVLEYYETVMNPKFSNKYVSSNVEFIKEDGSVVPFGSKYRYFKTEKHGLRVLALSFLFDFKRYNKRAQVTPVSKEIKKPWFNEVTGNYSREEVDILLVFGHMPISDPENREINHLHAKLRHIYPNTVIQYFGAHTHIRDFVELDNKASALQSGRFCETVGFASIDDITKESPVVSRKYIDFNLDSFLHHSKSRNTKEFDTEKGVEVNQRLDRLREYLNLTTKYGDVPSTYYMYNKPLSSPHNIYHLLTEKVLPRLAPENSDANESLTSRIIMINTGAIRYDLYKGPFTADTEYTISPFSNSWNYIQLPARLAIQVESYLNGLGPILTLNAVGKEHRQCPFVDDKTLSKGYTTSDDLGCEGDDTAHRSEHQYRIPNVVQSVDIVDEDEDKVDFVYVSFIQPFVLQALNDLNEDQNIVNHSFNESDCRIYGVTSIKDLLRGYIISLNQS

SEQ ID NO: 154404 - DNA, 1920 bp, Debaryomyces hansenii CBS767
  CDS (1)..(1920)
atgaacatgattgaaaataagaggaagtgtcagtatggctttattgtattggcgtttattttaggtatatttttgtttccggtttcatggcttcaactaagtaaacagcacaaatcagactcatcgttgataaggaatatagagtggaatgatataaattttattcacactactgatacacacggctggtattctggacatattaaccagaaacagtacaatgctgattggggagattttatatcttttactattcatctaagggacatagctcattcaaaaaagcaagattttttgttagttgatactggtgatagacatgatgggaatggactctcagatgtaacaataccaaatggtgctaaatctttgccgatatttatgaggcaggactatgacctccttactattggaaaccacgaattatatatctgggaaaactcccaacaagaatatgatttggtccgtgatcattttaaatcgaactatattagtactaatgtggaatacaaattacaaaatggaacatatattcctatgggtcaaaggtataagtacttcacaacaccaattcaaagtattagaatattgtcatttgcattcttgtttgacttcgctaggtacaattcggagacaaaagtcgaaccaatcatgaaagttctagacgaagattggttcaaagatattttgattgatcatcctgctgatgaagtcgatttacttgtaataattggacatatcccagtgagtcataacgatgaagagttgttccaattacatctgtttttaaggaaatattaccctaagaccaaaatccaatattttggtgggcattcacatataagagatttcagcatatatgatgaatatctgactggtttgcaaagtggaagattttgtgaaactgctggctgggtaagtattaatttagagtctgccaataataatttgaatggggtagataaggttaaaaacacattctcgaggtcctacattgatttcaacttaaactcatttatgtaccatacaaatataagctcaactgaagagtttcatacgggagtaggattgaatgtttcaagacagattagtgatacccgtaaggaattgaacttagaagcgataatcggttatgttagaaacagtaattatttcatggattatgtttcaataacgaatccgaaaaatatttttaaactcttgactgataaagtattgcctacattagaaattgaaaatccagatatagcaacttcagaccagaggttaattataattaatactggttcgataaggtatgatctatacaaaggtccatatacattggattctcagtatataatttctccttttgaaaatgattgggtaaagttgacattacctaaaaatgtggctataaagatagctcccaagttgaatgagttacagtatattattcgttctgcaagcgataatacatttgacaacagacggttgttacctgagcatcaatattccagacttctcaaaaacgattatgcgagttttaataagcgtacagaagattgggggcaacatcatttcgaaaatcgtgcttccgaaaggtttcaagagataggtaaattgaagtctgcctctcgaaaaaatagattgtctaaaggttatgtcacgtatgacgatttcggtcatgacggtgatgatactttacacagaccggtagtaaaccatcctattccaaatgttgtacaatcggaagaattaaactactccgatgggggctcatccgtcgatgttgttttctacagcttcattactcctaatattttatgggcattaaaggagatcggatttgaggaagacgtgagtaatcaaatcgaattttattccaagaactatttgggtctattattaaatgaatatattagaaataatgatatatag

SEQ ID NO: 154405 - protein, 639 aa, Debaryomyces hansenii CBS767
MNMIENKRKCQYGFIVLAFILGIFLFPVSWLQLSKQHKSDSSLIRNIEWNDINFIHTTDTHGWYSGHINQKQYNADWGDFISFTIHLRDIAHSKKQDFLLVDTGDRHDGNGLSDVTIPNGAKSLPIFMRQDYDLLTIGNHELYIWENSQQEYDLVRDHFKSNYISTNVEYKLQNGTYIPMGQRYKYFTTPIQSIRILSFAFLFDFARYNSETKVEPIMKVLDEDWFKDILIDHPADEVDLLVIIGHIPVSHNDEELFQLHLFLRKYYPKTKIQYFGGHSHIRDFSIYDEYLTGLQSGRFCETAGWVSINLESANNNLNGVDKVKNTFSRSYIDFNLNSFMYHTNISSTEEFHTGVGLNVSRQISDTRKELNLEAIIGYVRNSNYFMDYVSITNPKNIFKLLTDKVLPTLEIENPDIATSDQRLIIINTGSIRYDLYKGPYTLDSQYIISPFENDWVKLTLPKNVAIKIAPKLNELQYIIRSASDNTFDNRRLLPEHQYSRLLKNDYASFNKRTEDWGQHHFENRASERFQEIGKLKSASRKNRLSKGYVTYDDFGHDGDDTLHRPVVNHPIPNVVQSEELNYSDGGSSVDVVFYSFITPNILWALKEIGFEEDVSNQIEFYSKNYLGLLLNEYIRNNDI

SEQ ID NO: 154406 - DNA, 1722 bp, Yarrowia lipolytica CLIB122
  CDS (1)..(1722)
atgaaactgaatctggcagtgctggcgctggcggtgcattccgtggcctcagcagctacgggccagcagatttttgcactcaaacgtcccgacagacgtgctctgactcccggcgagtacacctttctacagaccacagacacccacggctggtttgagcagagcggtgagacctactttggcgactggggcgatctcgccagcttccaccaacacatgaagaaaaagtacccgaatttgctgttttttgactcgggagacaagcatgatggcaacggggtttcggacgcctctaccccgagaggccactattcgcgacggctgtttcgcgaaatgccctttgacgccgtcacggtcggaaaccacgagctctacaacacagaggtggccacgttggagtacgaggaggtgtcacagcatctaggagacaagtaccttagtggtaacgtggagatttggagaggcgaatggcgtccctacggtaaccgatacaaggtgatcgagcggtcgcattacaaagacggcaaaactcgtcggatcctcacttttggcttcctctatgactttgacctgcatcccaataacattcgagtcaccaaggtcagagatgccgtcaagcagcaatggtttctggacgctctggacaacgaggagtacgacgtggtggcggtgataggccacattcccctacgatcatgggaattccctcagctgattgaggccatcagaaagcgaacaaagaagcctctggtgctgctaggtggccattctcacgtcagagacgccgtccagctgaatggagagtttgacggcccctctgacgtgtacggcatccagggaggccggttcctggaaactctgggatggctgtctcttaatgtcactggtcaggagtccacctcttcgtcccggtcatatattgatttccatattgacggtctcaagttccacgcctcacatgaccccgaccattccaagtgggacaccgctttgggcaagagccttactcggcagctgagccgcatcaagaagaagctcgatctgaaagaagtgtatggatgtgtgcccgaaaactattacaccaatggcgcaaaattccccgggccgtcttctctgctcagtctcattgctgacgaggtgctcccaactctgaatggcactgccgagggagctacgggtgaccgagtgattatcaccaacaccggcggtctgcgtttcgatctgctcaagggcccctacacacgtaataccggctttgtggtgtctcctttccccaataactgggtataccttcccaatatagacattcacacggcccatgacattttgccgtacctgaaccgaaaggcgcatattttgggaagtggtcacatggtgcctgaggagatcccccaggagtgtgacatgttccatgctgcagacaccaagggcctgttgcctggatacgtgactctggacgactacgggcatgatggagatgatactcctcattgggctcttccttactacgagcttcctaatgccattcagacagagatgcctccggacgacgtcaagtatgttgatctggtcttctacgacttcattgccccctttattcaggaggcgctgtatgctcttgaccggcctgattactttgagcggctgaccgactatggaggcaagggactgaatgagctactgaaggactacgccgaggagcactgggagtgtcggtattag

SEQ ID NO: 154407 - protein, 573 aa, Yarrowia lipolytica CLIB122
MKLNLAVLALAVHSVASAATGQQIFALKRPDRRALTPGEYTFLQTTDTHGWFEQSGETYFGDWGDLASFHQHMKKKYPNLLFFDSGDKHDGNGVSDASTPRGHYSRRLFREMPFDAVTVGNHELYNTEVATLEYEEVSQHLGDKYLSGNVEIWRGEWRPYGNRYKVIERSHYKDGKTRRILTFGFLYDFDLHPNNIRVTKVRDAVKQQWFLDALDNEEYDVVAVIGHIPLRSWEFPQLIEAIRKRTKKPLVLLGGHSHVRDAVQLNGEFDGPSDVYGIQGGRFLETLGWLSLNVTGQESTSSSRSYIDFHIDGLKFHASHDPDHSKWDTALGKSLTRQLSRIKKKLDLKEVYGCVPENYYTNGAKFPGPSSLLSLIADEVLPTLNGTAEGATGDRVIITNTGGLRFDLLKGPYTRNTGFVVSPFPNNWVYLPNIDIHTAHDILPYLNRKAHILGSGHMVPEEIPQECDMFHAADTKGLLPGYVTLDDYGHDGDDTPHWALPYYELPNAIQTEMPPDDVKYVDLVFYDFIAPFIQEALYALDRPDYFERLTDYGGKGLNELLKDYAEEHWECRY

SEQ ID NO: 154408 - DNA, 1743 bp, Aspergillus nidulans FGSC A4
  CDS (1)..(1743)
atggcttcctatctcaaccctctcgttatcttatctttggtctcggcggttcaagctgttcagccctccgctccggattttgtcgcagctcctttacgtgaactgaaatggggtcaaatcaacttccttcatacgacagatactcatggctggctggctggccatctctcagagtatgagtatcagtcgttgcttggtgatagagtagagggcaatggcctttacgattcgtcagaccctaaaggtatatatacttccgagattatacggcaacaacaaatcgacgtgttgtctcccggaaatcatgagctctacaaaaagagcacctcagaagccgaatatagaattactgtacctaacttccgcggtcactatttgtcgtccaacgtcgatatctatgaccctgaaacaggagaactcgtggagttgggtccccgatttaggaaattcaccacgaagaaccaaggcattcgcatcactgcctttggctttcttttcgactttacaaggaactataacaacacggttgtccatccggtggaggaagttgtgaaagagccttggttcaagcacgccattcaagaccaggccgtcgatctgtttttggtgatagggcatgttccagttcggtcaaaagagtacgacgcggtcttcaatgaaatcagagctagtcatccggacacgccaattcagtttttcggtggtcacctccacattcgcgattgtcatcaattcgactcgaaagctgttgggcttgccagtggccgatttatggaaactattgggtttgcgtcaattagcggactgtctacggagcgcaacaaattggagcccagcatggtagatcctatcttcgagcgaagtcacactggtcttaatgagagtacgtttccaacggagcacggccgcaatgtgtctcgtcttatccagcaatcacgaagtgcgctgaaactagacgaaatatacggctgcgtcccggagaccttgtggatgtcacgatctccgcatacagcctcaaataacatttacgcttggttgcagagggaggtacttccaagcatgctagacgacacatctcggaaagggaaaccagctttcgttatcttcaatactggcgccattcggtttgaccttttcaaggggcaattcaatcgggactcagtctatataatttcgccatttacaagtggctttcgttacctgaaggacattgcctatgccgaagcagagcaggttttgaatgtcctaaatcagcagccacaaatcttcacaggcgccgaagggacaaccgggcttctgctacgggctcttgcgccgccagagcaagctgctcgtgactacggaattgacctcgctcgactacatcgtgcagagtcgattctcaatattcccacaagtcagcatccgatgtcagttggccacgattctgagcatgagatcatacctggatatactacgacagatgatctaggtgcagatggtgatgatacagtccattccatgattgaattctatcagataccgaactgcataggtgccttgactcttgacggtggctctgctccgccagaaactgtggaccttgtgtacatcgatttcatacagccatatgtgagcttcgcggctgaccaagttgggctcggtgtcaatgtctctcaggacagtgaggtgtatatgccctctacttcatttacggatctccttgtacagtgggttaagactcactggggctgctcggtgtga

SEQ ID NO: 154409 - protein, 580 aa, Aspergillus nidulans FGSC A4
MASYLNPLVILSLVSAVQAVQPSAPDFVAAPLRELKWGQINFLHTTDTHGWLAGHLSEYEYQSLLGDRVEGNGLYDSSDPKGIYTSEIIRQQQIDVLSPGNHELYKKSTSEAEYRITVPNFRGHYLSSNVDIYDPETGELVELGPRFRKFTTKNQGIRITAFGFLFDFTRNYNNTVVHPVEEVVKEPWFKHAIQDQAVDLFLVIGHVPVRSKEYDAVFNEIRASHPDTPIQFFGGHLHIRDCHQFDSKAVGLASGRFMETIGFASISGLSTERNKLEPSMVDPIFERSHTGLNESTFPTEHGRNVSRLIQQSRSALKLDEIYGCVPETLWMSRSPHTASNNIYAWLQREVLPSMLDDTSRKGKPAFVIFNTGAIRFDLFKGQFNRDSVYIISPFTSGFRYLKDIAYAEAEQVLNVLNQQPQIFTGAEGTTGLLLRALAPPEQAARDYGIDLARLHRAESILNIPTSQHPMSVGHDSEHEIIPGYTTTDDLGADGDDTVHSMIEFYQIPNCIGALTLDGGSAPPETVDLVYIDFIQPYVSFAADQVGLGVNVSQDSEVYMPSTSFTDLLVQWVKTHWGCSV

SEQ ID NO: 154410 - DNA, 1932 bp, Ustilago maydis 521
  CDS (1)..(1932)
atgttgttgagccgcttcatcaccacggccatcgcgctcgccggtgcggtttcggcttgtcccggaatcgaccatgcccaaggccttgctcctcggaaagttgatcactccattcagcccagtggaggcaacagtctgctccgtgaactgacttggggcgatctggccgtaattgcgacaactgacatccacggctggtatatgggtcacatgaagaagagttatccggagcctaactattccggcgattggggcgactttgcgtcctttgtcaagcacatgcgcaagcttgccaagaagaagggtgtcgatctgctccttgtcgactctggtgaccttcacgacggtgctggtttgagtgacggtttccctgcaggccaggtcgacggccaagtctctaaccaattccatgccaaggtcaagtacgatctcttgaccgtcggcaaccacgagctgtacaagtacaatgttgcctggaacacgctgcaagaatttgtgcctgaagctcgcagtcgttacctgggctccaacgtcaacatcagtcatgctgcgccccgcggtggcaacaacgtctcatacacctatggcgaacggtttgtcaagttcaagaccgaccatggccgaaaggtcacctcgctcggcgtcctcttcaactttaccggtgccgacagcggcattaccgtccaagaccctgctcagatggttctcgagccctggttcatcgacgccatccaggagcagcctgatgtcttcctgatcgctggccacatgcccgtccgcaaggatcaatttcccgtcgtggttaatgcgatccgcaaagtgcacccgatcacaccgatcatgatcctcggcggccactcgcacattcgcgactgcacccagtacgacaagtactctatgggtatcgagtcgggccgatacctcgagacgatcggctggatgtcgatgaactttaccaacaacggtcccaccttcagccgcacctatatcgacgccaaccgacgcaattacgccttccacgcaggtctcgctgccaagcctgaaaagttcgacacggccctgggaaggaagatcaccaagcagatgaaccaagtcgccgatgcctggaatctctctcacgtttatggtgttgctccccaggattactacctccagcgtgtccccatcaacgacagctcatctctgatcaactttatgaccaacaaggtgctgcccaccgtcatctcgacctcgaatccggaacgcaaaggggtgcccaacattgtcatcgccaacacgggctcgcagcgattcgacctgtatgcaggtcctttcaccaagaacgaccagtacattgtctcgcccttcaccgacgctttccagtatattaaggatgtgccgtacaagtacgctagccaggtcattcacaagctcaacggtgacagggtcgctcaggctaccagccgtaggcgcgatctcgaaggcgctgagagcgaacaggagctctacgctaagggacacgtctctcacatctacaaccgctggatccaggatcagcacgtttttgcttcggctcacaacgcggcagctcgtgacctggccatattggacgctcgagcagctgaagctcaagcgaaccgcacgctcggctacgtcaccaaggaccaatgtccaggggatggagacgacaccgtgcacagcgctattcccttcgcttcggttcccgactacgttcagagccctgtcaccggtcagaacgtaagcgacacggacaaggtcgacgtcatcttcctcgactttatcgccaagaacgtcgtgagaattctcaacagcgtccaaactgaaacgacgtactcgctgagcgatgtcgctgcttacaaccagtacactacgcaggacatctacccgctttacgctgaacagatctgggccaacaactctacctctgcctga

SEQ ID NO: 154411 - protein, 643 aa, Ustilago maydis 521
MLLSRFITTAIALAGAVSACPGIDHAQGLAPRKVDHSIQPSGGNSLLRELTWGDLAVIATTDIHGWYMGHMKKSYPEPNYSGDWGDFASFVKHMRKLAKKKGVDLLLVDSGDLHDGAGLSDGFPAGQVDGQVSNQFHAKVKYDLLTVGNHELYKYNVAWNTLQEFVPEARSRYLGSNVNISHAAPRGGNNVSYTYGERFVKFKTDHGRKVTSLGVLFNFTGADSGITVQDPAQMVLEPWFIDAIQEQPDVFLIAGHMPVRKDQFPVVVNAIRKVHPITPIMILGGHSHIRDCTQYDKYSMGIESGRYLETIGWMSMNFTNNGPTFSRTYIDANRRNYAFHAGLAAKPEKFDTALGRKITKQMNQVADAWNLSHVYGVAPQDYYLQRVPINDSSSLINFMTNKVLPTVISTSNPERKGVPNIVIANTGSQRFDLYAGPFTKNDQYIVSPFTDAFQYIKDVPYKYASQVIHKLNGDRVAQATSRRRDLEGAESEQELYAKGHVSHIYNRWIQDQHVFASAHNAAARDLAILDARAAEAQANRTLGYVTKDQCPGDGDDTVHSAIPFASVPDYVQSPVTGQNVSDTDKVDVIFLDFIAKNVVRILNSVQTETTYSLSDVAAYNQYTTQDIYPLYAEQIWANNSTSA

SEQ ID NO: 154412 - DNA, 1794 bp, Cryptococcus neoformans var. neoformans B-3501A
  CDS (1)..(1794)
atgaggttccccctcctcctccctttcgccgctctcgagctcccggtccccaccgcccccctcgagtggaagcaagcgaacttcctcagcatctcagacagccacggctggctcctcggacaccaacattcaacatggcctgaaccgaattactcgggaaattatgggtcgttcgcatcattcgtgatccacatgcgcaaaatagcagatgagaagggcgttgacttactcctgatcgacgcaggggatcatcatgacggctcaggcctggtctcatcctcaccggactcggcatccttggcggaggacatattctcgatgatttcatacgatgtcattaccatcggaaatcatgagctataccattatgcggacgccctcgatatctatgagaaccacgagcgatggggtggaaggtacgttacttccaatgtaaatattacggtcaagcgggaaggggaatggcaatctgtccctattggacagacgcacctaaaattcacgacgaaacagggctataatgtcactgcctttggtgtaatatttgatttcaaggcgcatgacaagggtataacggtccagaaacctagtaagcttgtgcatgaaccttggttccaggaagccattcgcgatgctccggactattttatcctcgctggtcatatgccggtacgaggagaaaccgcggagtttgcacctgtgtttgatgctatccgcgatatccatccacaagtccctattttcttatttggagggcatacacatgttcgggattgtgtccaatatgacgaacgctctatcggagttgtcccggggaagtatcttgaaacagtggctttcacatcgtcatcattaccttcttcttcgggcgatgataggcctctagacgtggctaggagctatcaatggcatacaaatcaaacatcttatacttttgatacggaacaagggctgcatatctctctcacgcttcagcatctagcctcctctttgaacatcactgatcctcttggtgtttctcctcacgactattatctcgctcgtcatccttggggtcatccacgctctgtactgacccttttctcagacaaagttttacccaaaacagttgtcgaccatgaacgagggaaaggggagcaaggcaaggagaggatcatcatcggcaatgccgggagtttgaggtttgatttgttccagggggttttcgatagaaacgacgaacttactgtttcccctttcacgtcttcatttttatatactcgtctaccggcttcactagctcgaaacatcacggatcagatgaaccgcgctggtgcatcaaaattgatgtcaaagtcacctgtgacaccttacgaggaggagcagcgtgtgaaaaggattcacgacaggtggttgtatgaacagtggcaagcttatgagctcgaaaacgcatacgaaggcgacactcaaaaggtgatggtcgacaaagggaaagacaagcctagaactttgggacatgtcaccaaggacaaatgtcctggtactggcgatgatatcgcgcacatccctgttccattttatagtgaccagccggattttatatcttcccccttcccttcagttgcggaagacgaagaaattgatgttgtttgcatggactttgcattggatgatttcctcactgccgtcaacacccttgacccaacacttaatttaaatgagagtgagatgaagccgtatgctaaagggctacgtatcaattctgtcttcgggaaatacgcccagagatactggggagctggaactcaagagtga

SEQ ID NO: 154413 - protein, 597 aa, Cryptococcus neoformans var. neoformans B-3501A
MRFPLLLPFAALELPVPTAPLEWKQANFLSISDSHGWLLGHQHSTWPEPNYSGNYGSFASFVIHMRKIADEKGVDLLLIDAGDHHDGSGLVSSSPDSASLAEDIFSMISYDVITIGNHELYHYADALDIYENHERWGGRYVTSNVNITVKREGEWQSVPIGQTHLKFTTKQGYNVTAFGVIFDFKAHDKGITVQKPSKLVHEPWFQEAIRDAPDYFILAGHMPVRGETAEFAPVFDAIRDIHPQVPIFLFGGHTHVRDCVQYDERSIGVVPGKYLETVAFTSSSLPSSSGDDRPLDVARSYQWHTNQTSYTFDTEQGLHISLTLQHLASSLNITDPLGVSPHDYYLARHPWGHPRSVLTLFSDKVLPKTVVDHERGKGEQGKERIIIGNAGSLRFDLFQGVFDRNDELTVSPFTSSFLYTRLPASLARNITDQMNRAGASKLMSKSPVTPYEEEQRVKRIHDRWLYEQWQAYELENAYEGDTQKVMVDKGKDKPRTLGHVTKDKCPGTGDDIAHIPVPFYSDQPDFISSPFPSVAEDEEIDVVCMDFALDDFLTAVNTLDPTLNLNESEMKPYAKGLRINSVFGKYAQRYWGAGTQE

SEQ ID NO: 154414 - DNA, 1842 bp, Phaeosphaeria nodorum
  CDS (1)..(1842)
atgttcctgcatcgaagcgttgttcttgttgccctactcaagagctgttcttgcatccaaccagaagctccctcgccgaaagctgcacccctgcgtgagctaccatgggcgcagctcaacttcctgcatactaccgatgttcacggctggtggggtggccatctccaagaagcttcgtattcagctgattggggcgactatgtctcgtttgccaaacacttgcgcgatagagctgatgcagatggcaccgaccttctgattgtcgatactggagatcgtgttgaaggcaacgccatttatgattcttccaagccgcgaggaaagttcacctatgaaattgccaaggagcagcatatcgatctgatcagctccggtaaccatgagttatacaaagccgatactgctgagggagagtatatccacactgttcccgacttcaaagggagctacctagcctccaacctggacatcatacatcccaaaacagggaagctggttccgcttgcaccgcgttacaagaagtttaacacaaagaatcagggtattcgtatcctggccttcggattcatcttcgacttcactggaaatgcgaataataccgtcgttcaaagagtggaggacaccgttaaagaggagtggtttatggaggcgattagagacaaggaggtcgatctgatcgtcgtatttggtcatgtcgacatccgctctgaagagtataaagtgctctacaagactattcgctctgcgcactgggatacgccgatccaattcttcggtggccactcgcacattcgggactacaagatcttcgacagcggctctgtagctctcgagagtggtcgctacatggagacattaggcttcatgtccatcgacggactcaacgctggcggttcaaaagatgaaggcgctgcaactcagaaggcaaagctcaccttctctcggcgctacatcgataacaacctcttctccatgcagcaccacagcggcaaagacgaaaagtcttttcccaccgagcacggtcttaaagtctccaaagctatcggcaacgcccgcaaatccctggacctcacccacaagtatggctgtgctccccacgactactgggtcaaccgccgcccataccctcacaatcagagcatcttcaccctgatcgaagagcaaatgatccccgacacagtctccaaatccgaccgcatcaaagccggaggcaaagcactcctaattaccaacaccggcgccatccgctttgacatcttcaaaggcgccttcacaaaagacacaaaattccttgtctcgcccttcacgtctgcgttccgctacatccctgatctgccgtacaaagccgccagccaagtcatcaagctgctcaacaacgaaggtccgatcatgctggaaatgatggaccagaacacattcctccagccgccagaaatccacgccgcgcgattccgcccacacatcctgtcctcaagccccagctccttcgcgccccaatcccacggtcaaaacatcctcaagccctcctcggacccctcaacattccccggctacacgaccaaggacgacgccggcaccgacggcgacgacacaatccactcgcaaatcgaattcttcaacgtccccaattgcatccagtcggctattgggttcgacgccgagcatgagccgcaaacggtcgatctcatgtacaatgaatttatccagaagtgggtgttgttggcgctggagtatgtgggagagaagtatgggattgaggatacgacgagttgggatggggggaagagtttcacggatgtcatgacggagtgggtggaggggcattggaagggagagtgttag

SEQ ID NO: 154415 - protein, 613 aa, Phaeosphaeria nodorum
MFLHRSVVLVALLKSCSCIQPEAPSPKAAPLRELPWAQLNFLHTTDVHGWWGGHLQEASYSADWGDYVSFAKHLRDRADADGTDLLIVDTGDRVEGNAIYDSSKPRGKFTYEIAKEQHIDLISSGNHELYKADTAEGEYIHTVPDFKGSYLASNLDIIHPKTGKLVPLAPRYKKFNTKNQGIRILAFGFIFDFTGNANNTVVQRVEDTVKEEWFMEAIRDKEVDLIVVFGHVDIRSEEYKVLYKTIRSAHWDTPIQFFGGHSHIRDYKIFDSGSVALESGRYMETLGFMSIDGLNAGGSKDEGAATQKAKLTFSRRYIDNNLFSMQHHSGKDEKSFPTEHGLKVSKAIGNARKSLDLTHKYGCAPHDYWVNRRPYPHNQSIFTLIEEQMIPDTVSKSDRIKAGGKALLITNTGAIRFDIFKGAFTKDTKFLVSPFTSAFRYIPDLPYKAASQVIKLLNNEGPIMLEMMDQNTFLQPPEIHAARFRPHILSSSPSSFAPQSHGQNILKPSSDPSTFPGYTTKDDAGTDGDDTIHSQIEFFNVPNCIQSAIGFDAEHEPQTVDLMYNEFIQKWVLLALEYVGEKYGIEDTTSWDGGKSFTDVMTEWVEGHWKGEC

SEQ ID NO: 154416 - DNA, 1860 bp, Aspergillus oryzae
  CDS (1)..(1860)
atgatctacgatcgatcctactcatatgttctctccttctttgccctcgtcactcctatccttgctcgtcaaccttccgctccggaagctatcccggcccctttgcgtgacctgaaatggggacaactcaattttctccatactacggatactcatggctggctagccggccatctccaggagccctcctactccgcagattggggtgattatgtctccttcgctacccggatgcgagagaaagcggaggcacaaggacaagatctattagttatagatacgggtgacagggtagaaggcaatggtctctatgactcgtcggagccgaaaggcgtttatatctcggaaattctgcggcaacagcatatcgacctattatccgccgggaatcatgaactatacaaacaaaacacctcggaggctgaactcttcactacagtacctaatttccgcggaaactacttagcatctaacattgatataatacatcctttaaccaaagagactgtgccattggcccctcggttcaagaaattcacaaccaagaagcaaggtatccgtatcattgcttttggctttcttttcgatttcacaaagaactacaataacaccatcgttcatccggtggaagagactatcaaagaggagtggtttcaggaagctatcagggataaggaagttgacctcttcttggtcgtgggacacgttcctgttcattctaaggaatatgatgctgttttcaaggagatccggatggtccgttgggacacacctattcagttctttggtggtcattatcatatccgtgattttgccagattcgactctaaagcgtttgggttagcaagcggtcggttcatggagacaattggcttcatgtcaatcgatggcctaaccagtagcaaacagctcgtaaagcctgcttcgacaaccccaagcttccatcgaagatatatagataataacctctattccttttaccaccacactggccttgacgaggaaaccttctctacggaggagggtcggaacgtgtctcggcttattgaggagtctaggagcactcttcgactcgatgaggtacacggttgtgcccctcgggatctttggatgtcacgcgtcaagtatccgagtgaggatagcatttatacttggctcgagcagcaggcgctgcccaactcgctgcaggataaatctcgcactggcaagccggctcttgccatagtcaacaccggcgccattcgctttgacatattcaaaggtccttttactcaagactcgacattcatagtctctccttttaccagcggttttcgttacattaaggacattccttatgggaaggccactttaatagtcgagatcttaaacaaacagcctcaaattctgactgatgctgacaaccgatccgccatcactgagggacttgcgcccccagaacagtcagtttattcctctgatttgattattactgatagcttcgccctgggctctacgaattacctcagagatcagacgccgctgctgaggaacgatcactccgaacccagcattatccctgggtatactaccacagacgatgaaggctcggatggcgacgacacaattcattcgcccatctcgttctatcgtgttcccaagtgcatccaggctctaatctctccgaaagagtcggcggctccgaaaacagtggatctcgtatatattgatttcatagaatctcatgtggctcaagcagccaaatttgccgggctaagtatagacttcacccaggacagtgatgtgtatatgccggctacgacattaacggatctgattttggattgggtcaaggacaactggagttgtaaggaagtttga

SEQ ID NO: 154417 - protein, 619 aa, Aspergillus oryzae
MIYDRSYSYVLSFFALVTPILARQPSAPEAIPAPLRDLKWGQLNFLHTTDTHGWLAGHLQEPSYSADWGDYVSFATRMREKAEAQGQDLLVIDTGDRVEGNGLYDSSEPKGVYISEILRQQHIDLLSAGNHELYKQNTSEAELFTTVPNFRGNYLASNIDIIHPLTKETVPLAPRFKKFTTKKQGIRIIAFGFLFDFTKNYNNTIVHPVEETIKEEWFQEAIRDKEVDLFLVVGHVPVHSKEYDAVFKEIRMVRWDTPIQFFGGHYHIRDFARFDSKAFGLASGRFMETIGFMSIDGLTSSKQLVKPASTTPSFHRRYIDNNLYSFYHHTGLDEETFSTEEGRNVSRLIEESRSTLRLDEVHGCAPRDLWMSRVKYPSEDSIYTWLEQQALPNSLQDKSRTGKPALAIVNTGAIRFDIFKGPFTQDSTFIVSPFTSGFRYIKDIPYGKATLIVEILNKQPQILTDADNRSAITEGLAPPEQSVYSSDLIITDSFALGSTNYLRDQTPLLRNDHSEPSIIPGYTTTDDEGSDGDDTIHSPISFYRVPKCIQALISPKESAAPKTVDLVYIDFIESHVAQAAKFAGLSIDFTQDSDVYMPATTLTDLILDWVKDNWSCKEV

SEQ ID NO: 154418 - DNA, 1908 bp, Schizosaccharomyces pombe
  CDS (1)..(1908)
atgaaacctgcccatacattttcattaattttctctcttttatttgttatcaatccttgctattcagcaactttgcccttggcaattcgtcgggaattgacatggggtcaagtcaatattttacacactactgacatccatggctggttagcaggacatgcgcgagataaacgttattcaggagatttaggagatttcgcttcttttgttcaacatatgaagcacttggcaaaacaaaaagacgttgatttactgctagtagataccggcgatcttcatgatggtacgggcctgtcagatctgacagatccccctggtagttggacagattcattacttgcaaatatggattatgatattcttgttgctggaaatcatgagctttatctctcaactgttgcaaatgatacttatcataatttcattcctctgtgggaaggccgatatttagctgcaaacattgacatatatgatgaacatgtttcttcttttgtaccctttggagatcgatatgccatcttttctacaccccacaatgttaaaatccttgcgtttggatttgtaaactcattttctggtgctactgatacggttcgtgtcctcccagtttcgcaattctcgctacagccatggtggaacgatatggtatcaaataaagacatcgatctgattctgattcccgctcatgtacccgttcacaatgcctcagagcttgatatcgttctttcagagcttcggattcacttccctaccactccaatacaagtacttggtggtcattcccatattagagattatgccatttacgatgaaaaagcagtgggaattgagtcaggaagatattgcgaaacagttggttgggtctcaattaacggcattccatccttcaaatcgttggtcaagttatctgggatttcttctttaatgggggtggaatcttatctagctgagcgcttgagatttataggcgaaagtattagacggtcatctcagcagatattttcctctttgcaaagtgctaaatctgccagtgtcagcttctctcgttcctatattgattggaatcccgagggctttatgtttcattcgaaaacaaaaaagtcttctttcaatacctcacttggagaatttatttctaatggcatttacgaagctcggaaggcacttggcttacttactcctataggttgttccccaaaaaagtttgcattttcagaagttccatttaacgattcaaactcaatttatcatctatttcaatccgaactttttccaaaaatagtcgtcaatgagtctcgacatcacattcctcactatattattgtaaattcgggtggcattcgaggtggtctaaattcaggtgcctttggcttagacgaggtctttcaagtctgtccttttaaaagtaatatattctatgttttgaaagatgtcccatggtcgattactaagtacctgccacaagctctacaacacagtggatatctgattgctgaagatactcttcaaattaacactccacaagtttctgatgcaaaatttgaggacttttatgaacactccattcgcaagacatatggatacactacacacgatgatttaggagatgacggagatgacactgctcatcttacaactcctcattatgaaccgctgcggtttatttgctcgcaagttggatttgatgattctttttctggagacgataagcaagttgttgacgttgttgctccatcatttgttattccacgcttagacgacattttaaataaaattgcagataagcctttatattcacctgacgattgggagctttactttacgagacctgacggaaagcattctatgactgatttgttaccattatatgcagatctctattgggaccacgattgcctatataagtaa

SEQ ID NO: 154419 - protein, 635 aa, Schizosaccharomyces pombe
MKPAHTFSLIFSLLFVINPCYSATLPLAIRRELTWGQVNILHTTDIHGWLAGHARDKRYSGDLGDFASFVQHMKHLAKQKDVDLLLVDTGDLHDGTGLSDLTDPPGSWTDSLLANMDYDILVAGNHELYLSTVANDTYHNFIPLWEGRYLAANIDIYDEHVSSFVPFGDRYAIFSTPHNVKILAFGFVNSFSGATDTVRVLPVSQFSLQPWWNDMVSNKDIDLILIPAHVPVHNASELDIVLSELRIHFPTTPIQVLGGHSHIRDYAIYDEKAVGIESGRYCETVGWVSINGIPSFKSLVKLSGISSLMGVESYLAERLRFIGESIRRSSQQIFSSLQSAKSASVSFSRSYIDWNPEGFMFHSKTKKSSFNTSLGEFISNGIYEARKALGLLTPIGCSPKKFAFSEVPFNDSNSIYHLFQSELFPKIVVNESRHHIPHYIIVNSGGIRGGLNSGAFGLDEVFQVCPFKSNIFYVLKDVPWSITKYLPQALQHSGYLIAEDTLQINTPQVSDAKFEDFYEHSIRKTYGYTTHDDLGDDGDDTAHLTTPHYEPLRFICSQVGFDDSFSGDDKQVVDVVAPSFVIPRLDDILNKIADKPLYSPDDWELYFTRPDGKHSMTDLLPLYADLYWDHDCLYK

SEQ ID NO: 154420 - DNA, 1806 bp, Schizosaccharomyces pombe
  CDS (1)..(1806)
atgaagttatcatctttaccttctggattgggcctagcgtctttgcttggtcttatcagttctgctactgcttattcggccaccgatttaactacgatgtatgattggaaccaaataatcaaacctttagaatggggacaattgaatttcattcatactacggatactcacggttggcttggtggtcatcttagagatgctcgttataaagccgactttggtgaattcaaatcgtttgctttgcgcatgaaggaattagctgattttaaaggtgtagacttgttgatggttgacaccggtgatttgcacgacggaaacggcctttctgatgcttctgatcctcagggtatctacacaaacaacattttcacctatcttccctacgatattcttacaattggtaatcacgaattgtaccaagccgccatttctaataacacgcatgagtattttgtgcctcattggaatggtacgtatctcgcttctaacgttcaaatttacaactcatcaaatgaattggagcaatttggtggtgaatccacttactttattacaaaacatggtgttcgaacccttgctatgggttttctcttcaacttcagtagtaatgctaataacactgtcgttacacccgttgaaacagccatcaaatctgaatggtaccaacaacaaatcaacagaaccgacgtcgaccttttcttattgattggtcatatccccgttcgtgattatgatgagtggaaatcactacatgcctctattagaaaagtacatcccaatactcccattcaaatccttggtggtcattctcacattcgtgattttgctgtttacgacgaggcttctgtatctcttgagggtggaagatattgtgaaactgtaggctggctttcaattgacggtctttcagcatccaatgcaacccgccaatatgttggtcgtcccgtcaccaatgagactcgtcaatcatatcccaatcttcctaagcctgctacgcctttgtattatacacgtcgctacattgatttcaaccgtcaaaacttccgcttccatactcaacagtcagaggactccttcgatactccagaaggtgttgaactatcgaaggttattaaacagtaccgtgacgatcttaatctttcatatgtctttggatgcatccctaaaaattattatatgactgaagtctctcctcaagccgaggacagcatcttcaaacttatggtagatcatattttgccagaggttttggtcaatgaaaaccgttcatctgtgcctcatattataattagcaacggaggtggtgttcgtggttctatgtatgaaggaacgtttggacccgacgaaatgttccaacttaacccattccttaccaattattataattacattccagacgttccttacaaatatgccaagaagctttactctatcttgaatggcggttccactcttcgcaacgttaacgattatcttgctgctctcaatcctggttacgttactagcgacgactttggagaagatggcgatgacaccgtccatacctatgtttccacatacgcagtacctaacgttcttcaagctcaagtcggctttaacactacttcagctccagaaaccgttgatgttgttttcctcaactatttccagaccaaagtattgaaggcccttaatacaatggttaacgaaactatttatactttatcaaacgtgacacaatactgggttcgtgaagacggcaaagacagctctccttatatgtttgcccagtacgttcaacaagaatggagtgattactgtgattaa

SEQ ID NO: 154421 - protein, 601 aa, Schizosaccharomyces pombe
MKLSSLPSGLGLASLLGLISSATAYSATDLTTMYDWNQIIKPLEWGQLNFIHTTDTHGWLGGHLRDARYKADFGEFKSFALRMKELADFKGVDLLMVDTGDLHDGNGLSDASDPQGIYTNNIFTYLPYDILTIGNHELYQAAISNNTHEYFVPHWNGTYLASNVQIYNSSNELEQFGGESTYFITKHGVRTLAMGFLFNFSSNANNTVVTPVETAIKSEWYQQQINRTDVDLFLLIGHIPVRDYDEWKSLHASIRKVHPNTPIQILGGHSHIRDFAVYDEASVSLEGGRYCETVGWLSIDGLSASNATRQYVGRPVTNETRQSYPNLPKPATPLYYTRRYIDFNRQNFRFHTQQSEDSFDTPEGVELSKVIKQYRDDLNLSYVFGCIPKNYYMTEVSPQAEDSIFKLMVDHILPEVLVNENRSSVPHIIISNGGGVRGSMYEGTFGPDEMFQLNPFLTNYYNYIPDVPYKYAKKLYSILNGGSTLRNVNDYLAALNPGYVTSDDFGEDGDDTVHTYVSTYAVPNVLQAQVGFNTTSAPETVDVVFLNYFQTKVLKALNTMVNETIYTLSNVTQYWVREDGKDSSPYMFAQYVQQEWSDYCD

SEQ ID NO: 154422 - DNA, 1806 bp, Schizosaccharomyces pombe
  CDS (1)..(1806)
atgaagacagcctcgatacatttttggtcaacccttgtgcttttgttcagttgtattggttctgtaattgcttactcgtctaccgatttaactacaatgtatgattggaaccaaatcattaaacctttagaatggggtcaaatgaatttcattcatactacggacactcacggttggcttaatggtcaccttagagatgctcgctataaagccgactttggcgaatttaagtcttttgttttgcggatgaaggaattagctgattttaaagacgtagatttattattagttgataccggtgatttacatgacggaaacggactttctgatgcttctgatccagaaggaatatatacaaacaacatttttacgtacctaccctatgatattcttacgattggtaatcacgaattgtaccaagcatccgtttctaataatacccacgaatattttgtacctcactggaatggaacttatctcgcttctaacgttcaaatcttcaactcatcaaatgagttggagcaatttgcggctgaatctgcctactttactacgaaacatggcgttcgagttcttgctgtaggcttcctctacgatttcaccggtaacgccaacaacactgttgttacacctgttgagacagccgtcaactccagatggtatcaacaacaaataaatagaacagatgttgaccttttcttattacttggacatattccggttcgcgattgggacgaatggaagtcactacatgcctcaattagaaaagtgcatcctgatactcccattcaaatctttggcggtcactctcatattcgtgactttgctgtttacgacgagtcttctgtatctcttgagggtggtagatattgtgaaactgtaggctggctttcaattgatggcctagcagcatccaatgcaacccgtcaatatgttggtcgtcccgtcaccaatgaaactcgccagtcgtatcccaatctccctattccaaatacacctctgtattacacgcgccgttacattgatttcaatcgccagaacttccgtttccatactcaacaatcagaagattccttcgataccccagaaggcattgaattatctaaaattattaaacagtatcgcgacgatcttaacctctcatatgtctttggatgcgtccctaaaaactattatatgactgaagtctctcctcaatctgatgacagtatttttaagcttatgactgatcgtgttttgccagaaataattaccaatcgaaaccgttcaactgtgccccgaattatcattagcaatggaggtggtatacgaggttccatgtatcaaggaaaatttggacccgacgaaatgttccaattaaacccttttcttactaattactatatgtatttggcagatgttccttataaatacgctaagaagctatactcgaccttaaacgggggatccaatttacgcaacataaatgaaaatttggctgcccttaatcccggttatgttacaagtgatgattttggtgaagatggagatgatacagtacatacttctgttccttcgtatgctactcctaacattcttcaagcccaagctgggtttaatgctacctcctcgccagaaacaattgatgttgtcttcctcaatttccttcaaagtatcgtgctaaaggctttgaacaatatggcaaatgacactttatatacttcttcaaacgttacacaatactgggttcgtgatgatggttacgacagttctccttattcatttgcctattttgttcaacaagaatggagtgataattgtgattaa

SEQ ID NO: 154423 - protein, 601 aa, Schizosaccharomyces pombe
MKTASIHFWSTLVLLFSCIGSVIAYSSTDLTTMYDWNQIIKPLEWGQMNFIHTTDTHGWLNGHLRDARYKADFGEFKSFVLRMKELADFKDVDLLLVDTGDLHDGNGLSDASDPEGIYTNNIFTYLPYDILTIGNHELYQASVSNNTHEYFVPHWNGTYLASNVQIFNSSNELEQFAAESAYFTTKHGVRVLAVGFLYDFTGNANNTVVTPVETAVNSRWYQQQINRTDVDLFLLLGHIPVRDWDEWKSLHASIRKVHPDTPIQIFGGHSHIRDFAVYDESSVSLEGGRYCETVGWLSIDGLAASNATRQYVGRPVTNETRQSYPNLPIPNTPLYYTRRYIDFNRQNFRFHTQQSEDSFDTPEGIELSKIIKQYRDDLNLSYVFGCVPKNYYMTEVSPQSDDSIFKLMTDRVLPEIITNRNRSTVPRIIISNGGGIRGSMYQGKFGPDEMFQLNPFLTNYYMYLADVPYKYAKKLYSTLNGGSNLRNINENLAALNPGYVTSDDFGEDGDDTVHTSVPSYATPNILQAQAGFNATSSPETIDVVFLNFLQSIVLKALNNMANDTLYTSSNVTQYWVRDDGYDSSPYSFAYFVQQEWSDNCD

SEQ ID NO: 154424 - DNA, 26 bp, Artificial sequence
  primer
atgatactaaagcttgtacactgttt

SEQ ID NO: 154425 - DNA, 26 bp, Artificial sequence
  primer
ctaaaattgagaaaagtaatcccgta

SEQ ID NO: 154426 - protein, 637 aa, Artificial sequence
  consensus sequence
  Variant (2)..(2): Xaa in position 2 is any amino acid
  Variant (4)..(8): Xaa in position 4 to 8 is any amino acid
  Variant (11)..(11): Xaa in position 11 is any amino acid
  Variant (16)..(16): Xaa in position 16 is any amino acid
  Variant (20)..(21): Xaa in position 20 to 21 is any amino acid
  Variant (22)..(22): Xaa in position 22 is any or no amino acid
  Variant (24)..(28): Xaa in position 24 to 28 is any amino acid
  Variant (29)..(32): Xaa in position 29 to 32 is any or no amino acid
  Variant (34)..(35): Xaa in position 34 to 35 is any amino acid
  Variant (37)..(37): Xaa in position 37 is any amino acid
  Variant (39)..(41): Xaa in position 39 to 41 is any amino acid
  Variant (44)..(52): Xaa in position 44 to 52 is any amino acid
  Variant (53)..(57): Xaa in position 53 to 57 is any or no amino acid
  Variant (61)..(62): Xaa in position 61 to 62 is any amino acid
  Variant (64)..(64): Xaa in position 64 is any amino acid
  Variant (67)..(69): Xaa in position 67 to 69 is any amino acid
  Variant (74)..(74): Xaa in position 74 is any amino acid
  Variant (76)..(78): Xaa in position 76 to 78 is any amino acid
  Variant (80)..(80): Xaa in position 80 is any amino acid
  Variant (81)..(83): Xaa in position 81 to 83 is any or no amino acid
  Variant (85)..(89): Xaa in position 85 to 89 is any amino acid
  Variant (91)..(96): Xaa in position 91 to 96 is any amino acid
  Variant (98)..(101): Xaa in position 98 to 101 is any amino acid
  Variant (108)..(126): Xaa in position 108 to 126 is any amino acid
  Variant (127)..(130): Xaa in position 127 to 130 is any or no amino acid
  Variant (132)..(134): Xaa in position 132 to 134 is any amino acid
  Variant (136)..(152): Xaa in position 136 to 152 is any amino acid
  Variant (153)..(155): Xaa in position 153 to 155 is any or no amino acid
  Variant (157)..(157): Xaa in position 157 is any amino acid
  Variant (159)..(165): Xaa in position 159 to 165 is any amino acid
  Variant (166)..(170): Xaa in position 166 to 170 is any or no amino acid
  Variant (172)..(173): Xaa in position 172 to 173 is any amino acid
  Variant (175)..(175): Xaa in position 175 is any amino acid
  Variant (177)..(177): Xaa in position 177 is any amino acid
  Variant (179)..(186): Xaa in position 179 to 186 is any amino acid
  Variant (188)..(197): Xaa in position 188 to 197 is any amino acid
  Variant (198)..(198): Xaa in position 198 is any or no amino acid
  Variant (201)..(208): Xaa in position 201 to 208 is any amino acid
  Variant (209)..(212): Xaa in position 209 to 212 is any or no amino acid
  Variant (214)..(218): Xaa in position 214 to 218 is any amino acid
  Variant (221)..(221): Xaa in position 221 is any amino acid
  Variant (223)..(226): Xaa in position 223 to 226 is any amino acid
  Variant (227)..(229): Xaa in position 227 to 229 is any or no amino acid
  Variant (231)..(238): Xaa in position 231 to 238 is any amino acid
  Variant (240)..(245): Xaa in position 240 to 245 is any amino acid
  Variant (246)..(246): Xaa in position 246 is any or no amino acid
  Variant (248)..(250): Xaa in position 248 to 250 is any amino acid
  Variant (254)..(254): Xaa in position 254 is any amino acid
  Variant (256)..(256): Xaa in position 256 is any amino acid
  Variant (259)..(262): Xaa in position 259 to 262 is any amino acid
  Variant (264)..(271): Xaa in position 264 to 271 is any amino acid
  Variant (272)..(277): Xaa in position 272 to 277 is any or no amino acid
  Variant (280)..(281): Xaa in position 280 to 281 is any amino acid
  Variant (284)..(284): Xaa in position 284 is any amino acid
  Variant (286)..(287): Xaa in position 286 to 287 is any amino acid
  Variant (289)..(297): Xaa in position 289 to 297 is any amino acid
  Variant (298)..(347): Xaa in position 298 to 347 is any or no amino acid
  Variant (349)..(349): Xaa in position 349 is any amino acid
  Variant (353)..(353): Xaa in position 353 is any amino acid
  Variant (354)..(360): Xaa in position 354 to 360 is any or no amino acid
  Variant (362)..(366): Xaa in position 362 to 366 is any amino acid
  Variant (367)..(372): Xaa in position 367 to 372 is any or no amino acid
  Variant (374)..(374): Xaa in position 374 is any amino acid
  Variant (376)..(377): Xaa in position 376 to 377 is any amino acid
  Variant (379)..(388): Xaa in position 379 to 388 is any amino acid
  Variant (390)..(391): Xaa in position 390 to 391 is any amino acid
  Variant (393)..(393): Xaa in position 393 is any amino acid
  Variant (395)..(398): Xaa in position 395 to 398 is any amino acid
  Variant (400)..(401): Xaa in position 400 to 401 is any amino acid
  Variant (403)..(426): Xaa in position 403 to 426 is any amino acid
  Variant (427)..(427): Xaa in position 427 is any or no amino acid
  Variant (430)..(444): Xaa in position 430 to 444 is any amino acid
  Variant (445)..(448): Xaa in position 445 to 448 is any or no amino acid
  Variant (450)..(450): Xaa in position 450 is any amino acid
  Variant (452)..(452): Xaa in position 452 is any amino acid
  Variant (454)..(455): Xaa in position 454 to 455 is any amino acid
  Variant (457)..(457): Xaa in position 457 is any amino acid
  Variant (459)..(461): Xaa in position 459 to 461 is any amino acid
  Variant (463)..(463): Xaa in position 463 is any amino acid
  Variant (465)..(466): Xaa in position 465 to 466 is any amino acid
  Variant (468)..(473): Xaa in position 468 to 473 is any amino acid
  Variant (476)..(480): Xaa in position 476 to 480 is any amino acid
  Variant (481)..(481): Xaa in position 481 is any or no amino acid
  Variant (483)..(485): Xaa in position 483 to 485 is any amino acid
  Variant (486)..(486): Xaa in position 486 is any or no amino acid
  Variant (488)..(490): Xaa in position 488 to 490 is any amino acid
  Variant (492)..(497): Xaa in position 492 to 497 is any amino acid
  Variant (500)..(516): Xaa in position 500 to 516 is any amino acid
  Variant (517)..(572): Xaa in position 517 to 572 is any or no amino acid
  Variant (575)..(575): Xaa in position 575 is any amino acid
  Variant (577)..(577): Xaa in position 577 is any amino acid
  Variant (580)..(580): Xaa in position 580 is any amino acid
  Variant (582)..(582): Xaa in position 582 is any amino acid
  Variant (588)..(588): Xaa in position 588 is any amino acid
  Variant (590)..(597): Xaa in position 590 to 597 is any amino acid
  Variant (598)..(598): Xaa in position 598 is any or no amino acid
  Variant (600)..(602): Xaa in position 600 to 602 is any amino acid
  Variant (604)..(613): Xaa in position 604 to 613 is any amino acid
  Variant (614)..(621): Xaa in position 614 to 621 is any or no amino acid
  Variant (624)..(628): Xaa in position 624 to 628 is any amino acid
  Variant (630)..(636): Xaa in position 630 to 636 is any amino acid
RXLXXXXXNFXHTTDXHGWXXXHXXXXXXXXXYXXDXGXXXSFXXXXXXXXXXXXXXDLLXXDXGDXXXGNGLXDXXXPXXXXGXXXXXIXXXXXXDXXXXGNHELYXXXXXXXXXXXXXXXXXXXXXXXYXXXNXXXXXXXXXXXXXXXXXXXXFXTXXXXXXXXXXXXAXXFXFXFXXXXXXXXVXXXXXXXXXXXWFXXXXXXXXXXXXDXXXXXGHXPXXXXXXXEXXXXXXXXRXXXXXXXIXXXGGHXHXRDXXXXDXXXXXXXXXXXXXXGRXXETXGXXSXXXXXXXXXXXXXXXXXXXXXXXXXXXXXXXXXXXXXXXXXXXXXXXXXXXXXXXXXXXRXYIDXXXXXXXXHXXXXXXXXXXXFXTXXGXXXXXXXXXXRXXLXLXXXXGXXPXXXXXXXXXXXXXXXXXXXXXXXXXLPXXXXXXXXXXXXXXXXXXXIXNXGXXRXDXXXGXFXXDXXXXXXPFXXXXXXYXXXXPXXXAXXXXXXLNXXXXXXXXXXXXXXXXXXXXXXXXXXXXXXXXXXXXXXXXXXXXXXXXXXXXXXXXXXXXXXXXXXXXXXXXXGYXTXDDXGXDGDDTXHXXXXXXXXXPXXXQXXXXXXXXXXXXXXXXXXVDXXXXXFXXXXXXXA

SEQ ID NO: 154427 - protein, 16 aa, Artificial sequence
  protein pattern
  Variant (2)..(2): Xaa in position 2 is Phe or Ile
  Variant (3)..(3): Xaa in position 3 is Ile or Leu
  Variant (8)..(8): Xaa in position 8 is any amino acid
  Variant (12)..(12): Xaa in position 12 is any amino acid
  Variant (13)..(13): Xaa in position 13 is any or no amino acid
  Variant (15)..(15): Xaa in position 15 is any or no amino acid
NXXHTTDXHGWXXGXH

SEQ ID NO: 154428 - protein, 20 aa, Artificial sequence
  protein pattern
  Variant (2)..(7): Xaa in position 2 to 7 is any amino acid
  Variant (8)..(8): Xaa in position 8 is Pro or Val
  Variant (10)..(11): Xaa in position 10 to 11 is any amino acid
  Variant (12)..(12): Xaa in position 12 is Phe or Leu
  Variant (16)..(16): Xaa in position 16 is any amino acid
  Variant (18)..(18): Xaa in position 18 is Ile or Val
RXXXXXXXIXXXGGHXHXRD

SEQ ID NO: 154429 - protein, 27 aa, Artificial sequence
  protein pattern
  Variant (2)..(2): Xaa in position 2 is any or no amino acid
  Variant (4)..(4): Xaa in position 4 is Ala, Ser or Thr
  Variant (6)..(6): Xaa in position 6 is Ala, Gly or Ser
  Variant (7)..(7): Xaa in position 7 is any amino acid
  Variant (9)..(9): Xaa in position 9 is Phe or Tyr
  Variant (11)..(11): Xaa in position 11 is Ile or Leu
  Variant (12)..(13): Xaa in position 12 to 13 is any amino acid
  Variant (15)..(15): Xaa in position 15 is any amino acid
  Variant (16)..(16): Xaa in position 16 is Phe or Tyr
  Variant (17)..(17): Xaa in position 17 is Asp, Asn or Thr
  Variant (18)..(18): Xaa in position 18 is any amino acid
  Variant (19)..(19): Xaa in position 19 is Asp or Asn
  Variant (20)..(20): Xaa in position 20 is Asp, Ser or Thr
  Variant (21)..(23): Xaa in position 21 to 23 is any amino acid
  Variant (24)..(24): Xaa in position 24 is Ile or Val
  Variant (25)..(25): Xaa in position 25 is any amino acid
IXNXGXXRXDXXXGXXXXXXXXXXXPF

SEQ ID NO: 154430 - protein, 29 aa, Artificial sequence
  protein pattern
  Variant (3)..(3): Xaa in position 3 is Thr or Val
  Variant (5)..(5): Xaa in position 5 is any amino acid
  Variant (8)..(8): Xaa in position 8 is any amino acid
  Variant (9)..(9): Xaa in position 9 is Gly or Ser
  Variant (10)..(10): Xaa in position 10 is any amino acid
  Variant (11)..(11): Xaa in position 11 is Asp, Glu or His
  Variant (15)..(15): Xaa in position 15 is Ala or Thr
  Variant (16)..(16): Xaa in position 16 is Ala, Ile, Leu, Pro or Val
  Variant (18)..(22): Xaa in position 18 to 22 is any amino acid
  Variant (23)..(23): Xaa in position 23 is Phe, His or Tyr
  Variant (24)..(25): Xaa in position 24 to 25 is any amino acid
  Variant (26)..(26): Xaa in position 26 is Leu or Pro
  Variant (27)..(28): Xaa in position 27 to 28 is any amino acid
  Variant (29)..(29): Xaa in position 29 is Ile, Leu or Val
GYXTXDDXXXXGDDXXHXXXXXXXXXXXX

SEQ ID NO: 154431 - protein, 26 aa, Artificial sequence
  protein pattern
  Variant (2)..(2): Xaa in position 2 is any amino acid
  Variant (4)..(8): Xaa in position 4 to 8 is any amino acid
  Variant (9)..(9): Xaa in position 9 is Ile or Leu
  Variant (10)..(15): Xaa in position 10 to 15 is any amino acid
  Variant (17)..(17): Xaa in position 17 is Ala, Ile, Leu or Val
  Variant (18)..(18): Xaa in position 18 is Ile, Leu, Met or Val
  Variant (19)..(19): Xaa in position 19 is Cys, Ser, Thr or Val
  Variant (20)..(20): Xaa in position 20 is any amino acid
PXGXXXXXXXXXXXXDXXXXGNHELY

SEQ ID NO: 154432 - protein, 28 aa, Artificial sequence
  protein pattern
  Variant (2)..(9): Xaa in position 2 to 9 is any amino acid
  Variant (10)..(11): Xaa in position 10 to 11 is any or no amino acid
  Variant (13)..(13): Xaa in position 13 is Phe, Leu, Met or Val
  Variant (14)..(14): Xaa in position 14 is Gly or Ser
  Variant (15)..(15): Xaa in position 15 is Phe or Val
  Variant (16)..(16): Xaa in position 16 is Ile, Leu or Val
  Variant (17)..(17): Xaa in position 17 is any amino acid
  Variant (18)..(18): Xaa in position 18 is Asp, Asn or Ser
  Variant (20)..(26): Xaa in position 20 to 26 is any amino acid
  Variant (27)..(27): Xaa in position 27 is any or no amino acid
FXXXXXXXXXXAXXXXXXFXXXXXXXXV

SEQ ID NO: 154433 - protein, 21 aa, Artificial sequence
  protein pattern
  Variant (2)..(5): Xaa in position 2 to 5 is any amino acid
  Variant (6)..(6): Xaa in position 6 is Ala, Cys, Gly or Ser
  Variant (7)..(7): Xaa in position 7 is Ile or Leu
  Variant (8)..(8): Xaa in position 8 is Ala, Glu or Gln
  Variant (9)..(9): Xaa in position 9 is Gly or Ser
  Variant (12)..(12): Xaa in position 12 is Phe or Tyr
  Variant (13)..(13): Xaa in position 13 is any amino acid
  Variant (16)..(16): Xaa in position 16 is Ala, Ile, Leu or Val
  Variant (18)..(18): Xaa in position 18 is Phe or Trp
  Variant (19)..(19): Xaa in position 19 is any amino acid
  Variant (21)..(21): Xaa in position 21 is Ile, Met or Val
DXXXXXXXXGRXXETXGXXSX

SEQ ID NO: 154434 - protein, 25 aa, Artificial sequence
  protein pattern
  Variant (2)..(3): Xaa in position 2 to 3 is any amino acid
  Variant (5)..(6): Xaa in position 5 to 6 is any amino acid
  Variant (7)..(7): Xaa in position 7 is Ile, Leu or Val
  Variant (8)..(8): Xaa in position 8 is Asn, Ser or Thr
  Variant (9)..(10): Xaa in position 9 to 10 is any amino acid
  Variant (11)..(11): Xaa in position 11 is Ile, Leu or Val
  Variant (12)..(14): Xaa in position 12 to 14 is any amino acid
  Variant (16)..(17): Xaa in position 16 to 17 is any amino acid
  Variant (19)..(19): Xaa in position 19 is any amino acid
  Variant (21)..(24): Xaa in position 21 to 24 is any amino acid
TXXGXXXXXXXXXXRXXLXLXXXXG

SEQ ID NO: 154435 - protein, 14 aa, Artificial sequence
  protein pattern
  Variant (2)..(2): Xaa in position 2 is any amino acid
  Variant (6)..(9): Xaa in position 6 to 9 is any amino acid
  Variant (10)..(10): Xaa in position 10 is Ala, Gly, Asn or Ser
  Variant (11)..(12): Xaa in position 11 to 12 is any amino acid
  Variant (13)..(13): Xaa in position 13 is Phe, His or Tyr
RXYIDXXXXXXXXH

SEQ ID NO: 154436 - protein, 11 aa, Artificial sequence
  protein pattern
  Variant (2)..(2): Xaa in position 2 is Ile, Leu or Val
  Variant (3)..(3): Xaa in position 3 is Phe, Ile, Leu or Val
  Variant (4)..(4): Xaa in position 4 is Ala, Ile, Leu or Val
  Variant (5)..(5): Xaa in position 5 is Ile, Leu or Val
  Variant (6)..(6): Xaa in position 6 is any amino acid
  Variant (9)..(9): Xaa in position 9 is Ile, Leu, Met or Val
  Variant (10)..(10): Xaa in position 10 is Asp, Gly or Pro
  Variant (11)..(11): Xaa in position 11 is Ala, Ile, Leu or Val
DXXXXXGHXXX

SEQ ID NO: 154437 - DNA, 258 bp, Saccharomyces cerevisiae
  CDS (1)..(258)
atggttttgaatccgtccaagtaccaagacacccgcacgtggaagatgacgcctgccatgatcagggcccgtaaaccctttttcaaaggcaatatgctcggtctcacgctgctgctgggtgtcacgggctctgtttactactacacatatcattttctgcacaaggacaacgactttgcagacgtgcccattccacccatcgatccgcaggagctcgaggctctcaaaaaggagtacgaagccaagaagaaggcatga

SEQ ID NO: 154438 - protein, 85 aa, Saccharomyces cerevisiae
MVLNPSKYQDTRTWKMTPAMIRARKPFFKGNMLGLTLLLGVTGSVYYYTYHFLHKDNDFADVPIPPIDPQELEALKKEYEAKKKA

SEQ ID NO: 154439 - DNA, 246 bp, Magnaporthe grisea 70-15
  CDS (1)..(246)
atggcaggattccaaggcgaaggctactacgaccgccgctaccggcaaaacccagctctggtgcgcgctcgtcgcccatacctcgtcaagaacgccatcgccggcatcacgctcgccgcctttactgccggagtttacgcctacacaattcacgccatcggtcaagacgagtttgaggacgtcaaggtgcctgagaccccgcggcaaccctcaaacatcaaaatccagcaaccatcttcttcatga

SEQ ID NO: 154440 - protein, 81 aa, Magnaporthe grisea 70-15
MAGFQGEGYYDRRYRQNPALVRARRPYLVKNAIAGITLAAFTAGVYAYTIHAIGQDEFEDVKVPETPRQPSNIKIQQPSSS

SEQ ID NO: 154441 - DNA, 222 bp, Gibberella zeae PH-1
  CDS (1)..(222)
atggttaaaagcccgcactcaacttactatgatccccgcctgcgacagggcgctgcgctcgtgcgagcacgaagaccctatcttttcaagaacgccatcactggccttggtctcctaggcgtggttggaagtatctattggtataccctcaacgccgttggccaagacaatttcgaagatgtcaaggttcccgatgcgcccaagcccgccgcttccaagtaa

SEQ ID NO: 154442 - protein, 73 aa, Gibberella zeae PH-1
MVKSPHSTYYDPRLRQGAALVRARRPYLFKNAITGLGLLGVVGSIYWYTLNAVGQDNFEDVKVPDAPKPAASK

SEQ ID NO: 154443 - DNA, 267 bp, Kluyveromyces lactis NRRL Y-1140
  CDS (1)..(267)
atgttagaacctagtccataccaagaccacaagacatggaagatgactccggcaatgatccgtgccagacagccattcttcaagaagaacctaatgggattagttatacttcttggtgttactggtacgatatacacatatacatacaagatgttgaacaaagatagtgattttgcagatgttcctattcctcctattgacgaaaaagaactagaacagttgaagaaggagtacgagctcgagaaaatccgtcgtgctcaaaaataa

SEQ ID NO: 154444 - protein, 88 aa, Kluyveromyces lactis NRRL Y-1140
MLEPSPYQDHKTWKMTPAMIRARQPFFKKNLMGLVILLGVTGTIYTYTYKMLNKDSDFADVPIPPIDEKELEQLKKEYELEKIRRAQK

SEQ ID NO: 154445 - DNA, 273 bp, Debaryomyces hansenii CBS767
  CDS (1)..(273)
atggctgttttaggtaaaccaaaaggacataatcgttatcgtgatccaagaacatttgaaatgactccagcgttattacgagtcagagctccattttttgctagaaacatgattggtttggctttagctacttctattccactaggtgtctatttatacacggttgatatgttgagtaaagacgaattcagtgatattccaatccctccaattgcagatgacgaattagccaagttgaagaaagaatacgaagacaagaaaaattcatcttga

SEQ ID NO: 154446 - protein, 90 aa, Debaryomyces hansenii CBS767
MAVLGKPKGHNRYRDPRTFEMTPALLRVRAPFFARNMIGLALATSIPLGVYLYTVDMLSKDEFSDIPIPPIADDELAKLKKEYEDKKNSS

SEQ ID NO: 154447 - DNA, 321 bp, Yarrowia lipolytica CLIB122
  CDS (1)..(321)
atgtctcaggatccccataacggaaagggcacctttgaggtgcacaagcaaccccagcccggtctcaaagttttccgaaagggcaagtacattgaccccaagaccttccagatgtcccccgctctgattcgggcccgacgacccttctttgtgcgaaacatgctcgctctggccggcctcaccggttttgtcgccggtatctacggatacaccatgtactctctgcgtaccgacgactttggcgatgtgcctattcctcctcttgatcccgaagagatcaagaagctccagagcaagtacagcgacgactccaaggcctag

SEQ ID NO: 154448 - protein, 106 aa, Yarrowia lipolytica CLIB122
MSQDPHNGKGTFEVHKQPQPGLKVFRKGKYIDPKTFQMSPALIRARRPFFVRNMLALAGLTGFVAGIYGYTMYSLRTDDFGDVPIPPLDPEEIKKLQSKYSDDSKA

SEQ ID NO: 154449 - DNA, 25 bp, Artificial sequence
  primer
atggttttgaatccgtccaagtacc

SEQ ID NO: 154450 - DNA, 24 bp, Artificial sequence
  primer
tcatgccttcttcttggcttcgta

SEQ ID NO: 154451 - protein, 81 aa, Artificial sequence
  consensus sequence
  Variant (2)..(3): Xaa in position 2 to 3 is any amino acid
  Variant (4)..(12): Xaa in position 4 to 12 is any or no amino acid
  Variant (14)..(14): Xaa in position 14 is any amino acid
  Variant (16)..(21): Xaa in position 16 to 21 is any amino acid
  Variant (22)..(22): Xaa in position 22 is any or no amino acid
  Variant (25)..(26): Xaa in position 25 to 26 is any amino acid
  Variant (30)..(30): Xaa in position 30 is any amino acid
  Variant (32)..(35): Xaa in position 32 to 35 is any amino acid
  Variant (37)..(42): Xaa in position 37 to 42 is any amino acid
  Variant (44)..(50): Xaa in position 44 to 50 is any amino acid
  Variant (52)..(52): Xaa in position 52 is any amino acid
  Variant (55)..(60): Xaa in position 55 to 60 is any amino acid
  Variant (62)..(62): Xaa in position 62 is any amino acid
  Variant (63)..(63): Xaa in position 63 is any or no amino acid
  Variant (65)..(65): Xaa in position 65 is any amino acid
  Variant (68)..(69): Xaa in position 68 to 69 is any amino acid
  Variant (71)..(78): Xaa in position 71 to 78 is any amino acid
  Variant (79)..(80): Xaa in position 79 to 80 is any or no amino acid
PXXXXXXXXXXXYXDXXXXXXXPAXXRARXPXXXXNXXXXXXLXXXXXXXYXYTXXXXXXDXXFXDVXXPXXXXXXXXXXK

SEQ ID NO: 154452 - protein, 34 aa, Artificial sequence
  protein pattern
  Variant (3)..(3): Xaa in position 3 is Leu or Met
  Variant (4)..(4): Xaa in position 4 is Ile, Leu or Val
  Variant (6)..(7): Xaa in position 6 to 7 is any or no amino acid
  Variant (9)..(10): Xaa in position 9 to 10 is any or no amino acid
  Variant (12)..(12): Xaa in position 12 is Phe or Tyr
  Variant (13)..(13): Xaa in position 13 is Phe or Leu
  Variant (14)..(15): Xaa in position 14 to 15 is any amino acid
  Variant (17)..(17): Xaa in position 17 is any amino acid
  Variant (18)..(18): Xaa in position 18 is Ile, Leu or Met
  Variant (19)..(19): Xaa in position 19 is Ala or Gly
  Variant (20)..(20): Xaa in position 20 is Gly or Leu
  Variant (21)..(22): Xaa in position 21 to 22 is any amino acid
  Variant (23)..(23): Xaa in position 23 is Ala or Leu
  Variant (24)..(24): Xaa in position 24 is any amino acid
  Variant (25)..(25): Xaa in position 25 is Ala, Gly or Ser
  Variant (26)..(26): Xaa in position 26 is Phe, Ile or Val
  Variant (27)..(27): Xaa in position 27 is Pro, Thr or Val
  Variant (28)..(28): Xaa in position 28 is Ala, Gly or Leu
  Variant (29)..(29): Xaa in position 29 is Gly, Ser or Thr
  Variant (30)..(30): Xaa in position 30 is Ile or Val
  Variant (32)..(32): Xaa in position 32 is any amino acid
PAXXRXXAXXPXXXXNXXXXXXXXXXXXXXYXYT

SEQ ID NO: 154453 - protein, 14 aa, Artificial sequence
  protein pattern
  Variant (2)..(2): Xaa in position 2 is any or no amino acid
  Variant (4)..(4): Xaa in position 4 is Ala, Glu or Gly
  Variant (7)..(8): Xaa in position 7 to 8 is any or no amino acid
  Variant (10)..(10): Xaa in position 10 is any amino acid
  Variant (11)..(11): Xaa in position 11 is Ala, Pro or Thr
  Variant (13)..(13): Xaa in position 13 is any amino acid
  Variant (14)..(14): Xaa in position 14 is Asp, Pro or Gln
DXFXDVXXPXXPXX

SEQ ID NO: 154454 - DNA, 1185 bp, Saccharomyces cerevisiae
  CDS (1)..(1185)
atgtggacaaacactttcaaatggtgcagcaaaactgagaaggagaccactactgcagacgccaaggtgtgtgctagcgtgcagggcctgaaggccctgcagcagcaaattatggatagcaccactgtgcgtgggtccgttaataacacgatgactccaggcgggattaaccagtggcatttccacaataagcgtgcgaacaaagtgtgcacgcctacagtactaatccatggatacgctgcctcgtcgatggcgttctacaggacgtttgagaacctgtcagacaacattaaagatctatatgccatcgacttgccagccaatggtgcctcagaggcgccagcattgcaagtgaacaaaaccaagaagatcaagtctctcaggtttaagcatatagaagatgacgtagtaatccctgtgatagagaagcgccccccagcagaggacatcaagtcacacctggagcagtacgaaagctacttcgtagacaggatagagcaatggcggaaggataacaagcttcgcaaaataaacgtggtgggccattcattcggaggatatatttcattcaaatacgccctcaagtaccctgattccattgagaaactgtgtctcatatctcctcttggtgtggaaaacagtatacatgctatcacccacaaatgggagcccaacaccacctatccacttacgtttaccgacccatcgtcccgatattatacaagaaagctgaacgtaccgcggtttatctttgaaaaccagctaaacgttttgaagtggatgggacccataggctccaaattgtgctcgaactacatctccaccgcatacgtaaaagttccggatcagatatataaggactatcttttgcactcatttgtcgggaagaaccagacggtgcaaccacagacaatcaaggtgttcacccatttgtttgaaaggaatctgatcgctagagatccgataataaacaacgttcgttttttgaacccagcaacgcctgtcatgttcatgtatggcgagcacgattggatggataaatatgcgggctacttgactactgaatcaatgctaaaaaacaaggcaaaggctagctacgttgaagtccctgatgctggccataatcttttcctggacaacccgcagcactttgcctcttctttagtctcgttcctgtcaaagtaa

SEQ ID NO: 154455 - protein, 394 aa, Saccharomyces cerevisiae
MWTNTFKWCSKTEKETTTADAKVCASVQGLKALQQQIMDSTTVRGSVNNTMTPGGINQWHFHNKRANKVCTPTVLIHGYAASSMAFYRTFENLSDNIKDLYAIDLPANGASEAPALQVNKTKKIKSLRFKHIEDDVVIPVIEKRPPAEDIKSHLEQYESYFVDRIEQWRKDNKLRKINVVGHSFGGYISFKYALKYPDSIEKLCLISPLGVENSIHAITHKWEPNTTYPLTFTDPSSRYYTRKLNVPRFIFENQLNVLKWMGPIGSKLCSNYISTAYVKVPDQIYKDYLLHSFVGKNQTVQPQTIKVFTHLFERNLIARDPIINNVRFLNPATPVMFMYGEHDWMDKYAGYLTTESMLKNKAKASYVEVPDAGHNLFLDNPQHFASSLVSFLSK

SEQ ID NO: 154456 - DNA, 1257 bp, Arabidopsis thaliana
  CDS (1)..(1257)
atgaacttgagccgttttgcttcgagattaagaatggcggaagaaatctcaaagacgaaggtgggatcttcttctactgcttcggtggctgattcatctgctgctgcgtcggctgcaacgaatgcggccaaatcaagatggaaaattttgtggcctaattcgctccggtggattcctacgtccaccgattacatcatcgccgccgagaaacgtcttctctccatcctcaagacgccttatgtacaagagcaagtcagtattggttcaggaccaccaggttctaaaatcaggtggtttaggtctacgagcaatgagtcacgttacatcaacactgttacatttgatgccaaggagggagctcctacactcgtcatggttcatggttatggtgcttctcaagggtttttcttccgtaattttgatgctcttgccagtcgatttagagtgatcgctattgatcaacttgggtggggtggttcaagtaggcctgattttacatgtagaagcacagaagaaactgaggcatggtttatcgactcctttgaggaatggcgtaaagcccagaatctcagtaactttattctattaggacattcttttggaggctatgttgctgctaaatacgcgcttaagcatcctgaacatgttcaacacttaattctggtgggatctgctgggttctcagcagaagcagatgccaaatcagaatggctcactaaatttagagcaacatggaaaggtgcagtcctaaatcatttatgggagtcaaatttcactcctcagaagctggttagaggattaggtccttggggtccaggtcttgtaaatcggtatacaactgcaagatttggtgcacattcggagggaactgggctaacagaagaggaagccaaattgctaaccgattatgtgtaccatactttggctgcaaaggctagtggagagttatgcttgaaatacatcttctcatttggagcatttgctaggaagcccctcttacaaagtgcatcagagtggaaagtgccaacaacgtttatctatggaatgaatgattggatgaactatcaaggtgcggtggaagcgaggaaatccatgaaggtcccttgcgaaatcattcgggttccacagggtggtcattttgtgttcatagacaacccaattggttttcattctgcagtgctttatgcttgccgcaagtttatatctcaagactcctctcatgatcaacaactcctagatggtctacgattggtttag

SEQ ID NO: 154457 - protein, 418 aa, Arabidopsis thaliana
MNLSRFASRLRMAEEISKTKVGSSSTASVADSSAAASAATNAAKSRWKILWPNSLRWIPTSTDYIIAAEKRLLSILKTPYVQEQVSIGSGPPGSKIRWFRSTSNESRYINTVTFDAKEGAPTLVMVHGYGASQGFFFRNFDALASRFRVIAIDQLGWGGSSRPDFTCRSTEETEAWFIDSFEEWRKAQNLSNFILLGHSFGGYVAAKYALKHPEHVQHLILVGSAGFSAEADAKSEWLTKFRATWKGAVLNHLWESNFTPQKLVRGLGPWGPGLVNRYTTARFGAHSEGTGLTEEEAKLLTDYVYHTLAAKASGELCLKYIFSFGAFARKPLLQSASEWKVPTTFIYGMNDWMNYQGAVEARKSMKVPCEIIRVPQGGHFVFIDNPIGFHSAVLYACRKFISQDSSHDQQLLDGLRLV

SEQ ID NO: 154458 - DNA, 1272 bp, Candida glabrata CBS 138
  CDS (1)..(1272)
atggttagaaatagttcgcaggtcaggcacttcagtagctatttgagactgtgccagcaacaaaagaaccttgaaaccagggtgatttccagaatacttaaacctgccaatagcactgataacaatgaagcaagatcgggatggaagctttgggcaggtcatttgttcaagaccaagaaggagacttttgacaagctaaagatgctacagagtcgcatcatgggcgatattgaaattgcaggacatagcagcaacaaaattctcttcgatgagatcaatcagtggcatttccacaacaatttagcaaaaaaggtcaggacaccaacagtgcttatacatggttatgctgcaacttcaacagccttctttagaagcataccatacttgaacagagacatcaaggacttgtataccattgatctaccagggaatggtttgtcatttacaccttctcttgatttagaagttagtaaaccattaccattaaagatagaaaatattgatgatggcaacgagtttcagctgccttatgttattgattctgctcatcaccggtacgtattacagaaattgcttgactattatgtcgaccgaatcgagcaatggaggcttgataataagctaggcaagattaacgtggttgctcattcttatggcggttatttatctttcaattatgcactaaaataccctgctaatatcaacaccttaggattgatctctcctcttggtgttgagagaaatatttattcaattaacaatgagttccatagcagaacaatttacaaaagggaatggaacgattgtaactctatgttttatgatagaaaattcaagctcaacgactatcttttccagaaacaactgaaaccactaaggtggttaggccctataggtgcaaagctatgttggaactacatccggtctgcatacgccagagtaccttcaattgattacaaagactacaccttcgagacattctatggaaggggaggcttaccagaacagacttcccaaatttttacttcattattgacaagttccttactagcaagggatccattgcttgaccatgtatcgcaactacaagtcccgaaattaatcatgatgtatggccagtacgactggatgaataaaaacggtggaaagctcatgacccagatattcaacggtgaaacaaaatatatagatataccaaacgccggccacaacttattcctggataacccatccgactttgcttctcagttgacaacattcttggctgactaa

SEQ ID NO: 154459 - protein, 423 aa, Candida glabrata CBS 138
MVRNSSQVRHFSSYLRLCQQQKNLETRVISRILKPANSTDNNEARSGWKLWAGHLFKTKKETFDKLKMLQSRIMGDIEIAGHSSNKILFDEINQWHFHNNLAKKVRTPTVLIHGYAATSTAFFRSIPYLNRDIKDLYTIDLPGNGLSFTPSLDLEVSKPLPLKIENIDDGNEFQLPYVIDSAHHRYVLQKLLDYYVDRIEQWRLDNKLGKINVVAHSYGGYLSFNYALKYPANINTLGLISPLGVERNIYSINNEFHSRTIYKREWNDCNSMFYDRKFKLNDYLFQKQLKPLRWLGPIGAKLCWNYIRSAYARVPSIDYKDYTFETFYGRGGLPEQTSQIFTSLLTSSLLARDPLLDHVSQLQVPKLIMMYGQYDWMNKNGGKLMTQIFNGETKYIDIPNAGHNLFLDNPSDFASQLTTFLAD

SEQ ID NO: 154460 - DNA, 1161 bp, Candida glabrata CBS 138
  CDS (1)..(1161)
atgtggtgcaaaggcgatgacctcgagactttgcaatataaggtgatggaggaagtgcctgtcgagggccagcgggcggtgctgcggtgtggggtgaaccagtggtacttcagaggcggtgaccgggtggtgactccgacgctgctagtgcatgggtatggagcctcttctatggcgtaccaccgctgttttgcgccgctgtcgaggcacatacgggacctgtatgctatagacctcccggccaatgggctgagcgaggcaccgccgctggtggcagagggtgaggcgccaaaggccaagtttaagatcgaggagaacaagttcaccgtggtgcagggcgccagacgtgctgccgagccggtgacggatgcccaggtggatcaggagctgatgctgcgcacacaccgggagaagaggcggtacttgcagcagtacgaggactactatgtggagagcatcgagcagtggcgaaaggagaacaacctagacaagttcaaccttgtgggccactcgtttggcgggtacctgtcctacaagtacgccctgaagtaccctgagtccgtgaacaagctctgcctgctgtcaccgctgggtatggagcgcaacatacactcgataaataacacgtttgaggagaacgtggtctatgaactgcaggagtctgatccttcctcatacctgtacactagaaagcgcaaggctccaaagttcctgttcgagaaccagtttagcgtgctcaggtggatggggccaataggagacaagctgtgtctgtcctttatcaattccagttacgccaaggtacccagccaggcatacaaggactacttgttcgagtccttcctgggcaagaagcatttcgccaagcagaacgtccatgctctgaagcacttgttcacacgcagtctgctcgcaagagaccccatcatggacaccatagacaagttgaaagtgccagatgtatctgtattttacggtgaccacgactggatgaacagctacgctggttatctcatggtcgaacgcttgaagaagtttagagttgccagcacttcaggtggctctgcctcctatttggaagtacctgacgcaggacataacctgttcctagataacccagactacttcagcaagaaacttgtccagtttctcagcgagtaa

SEQ ID NO: 154461 - protein, 386 aa, Candida glabrata CBS 138
MWCKGDDLETLQYKVMEEVPVEGQRAVLRCGVNQWYFRGGDRVVTPTLLVHGYGASSMAYHRCFAPLSRHIRDLYAIDLPANGLSEAPPLVAEGEAPKAKFKIEENKFTVVQGARRAAEPVTDAQVDQELMLRTHREKRRYLQQYEDYYVESIEQWRKENNLDKFNLVGHSFGGYLSYKYALKYPESVNKLCLLSPLGMERNIHSINNTFEENVVYELQESDPSSYLYTRKRKAPKFLFENQFSVLRWMGPIGDKLCLSFINSSYAKVPSQAYKDYLFESFLGKKHFAKQNVHALKHLFTRSLLARDPIMDTIDKLKVPDVSVFYGDHDWMNSYAGYLMVERLKKFRVASTSGGSASYLEVPDAGHNLFLDNPDYFSKKLVQFLSE

SEQ ID NO: 154462 - DNA, 1230 bp, Kluyveromyces lactis NRRL Y-1140
  CDS (1)..(1230)
atgacagttcgcagaagcttggcattgaggctgttgaggaaaggaatgtcgcaaccagacgagctctctttgaagcgttctggctggaaacagtggtggaatagtttaaattacgatgcaaagggtagtttgaagcatttgcaacagaatcttatggaccaattgcagtttgattccgggatatctgtcgaaaattcgatgctattgggcgagatcaaccaatggcggatctcgaatcctacggcaaaagcagtgggggtacctactttgatgatccatgggtatgctgcatcgtcaatgacatttttcaggaatttcgagcagctttcgttgtccttgaaagatgtctacgctgtagatttgcccgggaacgggttgtcgaaagagttacctctctcagtagactctatgcaaaaacctgacagagtagagttcaacgaaactgtgaagggtcagtatttccgtttgcagaatccggttgatgaagagaaatataagaaacatttggctcattatgaggactattacgtcgatgccttggaaaaatggagaaaggaaaacaaattgtccaagattaatttggttggccactcgtacggtggctatctaactttcaaatactctttgaaatacccagataacgtccataaactatgtcttgtgtcaccacttggtgtggaaagaagcatattttctatccataaccatttggaaccggaaagagattatgaaatacaatccgaagaccctagcaaatcgaactactcgaataaaagaaatataccaaaacttatcttacaataccaaaataaagctctaagatggatgggtcccctgggagccaaagcttgttggggttatgtgaatagctcttatggtagagttccaagcgtcccttacagggagtacgtgtttcaattggttttcggtaagggaattatgactgatacctctatcagaatattcaaccaactattctcaagaagcctgttagcatatgatccgatcatggattctttggataaagttaaagtgtcaaaattgatgttggtttatggtgaacacgattggatgaataaagtcgctggaaggctggcgatagaggagttcaatagtataagaaaaagctacgatggaactttcgatatcgtgagtagagctggtcacaatttggttttggataacccatcagagttcaactccaaattggtcgactttctaagggattaa

SEQ ID NO: 154463 - protein, 409 aa, Kluyveromyces lactis NRRL Y-1140
MTVRRSLALRLLRKGMSQPDELSLKRSGWKQWWNSLNYDAKGSLKHLQQNLMDQLQFDSGISVENSMLLGEINQWRISNPTAKAVGVPTLMIHGYAASSMTFFRNFEQLSLSLKDVYAVDLPGNGLSKELPLSVDSMQKPDRVEFNETVKGQYFRLQNPVDEEKYKKHLAHYEDYYVDALEKWRKENKLSKINLVGHSYGGYLTFKYSLKYPDNVHKLCLVSPLGVERSIFSIHNHLEPERDYEIQSEDPSKSNYSNKRNIPKLILQYQNKALRWMGPLGAKACWGYVNSSYGRVPSVPYREYVFQLVFGKGIMTDTSIRIFNQLFSRSLLAYDPIMDSLDKVKVSKLMLVYGEHDWMNKVAGRLAIEEFNSIRKSYDGTFDIVSRAGHNLVLDNPSEFNSKLVDFLRD

SEQ ID NO: 154464 - DNA, 1224 bp, Arabidopsis thaliana
  CDS (1)..(1224)
atggcggaagaaatctcaaagacgaaggtgggatcttcttctactgcttcggtggctgattcatctgctgctgcgtcggctgcaacgaatgcggccaaatcaagatggaaaattttgtggcctaattcgctccggtggattcctacgtccaccgattacatcatcgccgccgagaaacgtcttctctccatcctcaagacgccttatgtacaagagcaagtcagtattggttcaggaccaccaggttctaaaatcaggtggtttaggtctacgagcaatgagtcacgttacatcaacactgttacatttgatgccaaggagggagctcctacactcgtcatggttcatggttatggtgcttctcaagggtttttcttccgtaattttgatgctcttgccagtcgatttagagtgatcgctattgatcaacttgggtggggtggttcaagtaggcctgattttacatgtagaagcacagaagaaactgaggcatggtttatcgactcctttgaggaatggcgtaaagcccagaatctcagtaactttattctattaggacattcttttggaggctatgttgctgctaaatacgcgcttaagcatcctgaacatgttcaacacttaattctggtgggatctgctgggttctcagcagaagcagatgccaaatcagaatggctcactaaatttagagcaacatggaaaggtgcagtcctaaatcatttatgggagtcaaatttcactcctcagaagctggttagaggattaggtccttggggtccaggtcttgtaaatcggtatacaactgcaagatttggtgcacattcggagggaactgggctaacagaagaggaagccaaattgctaaccgattatgtgtaccatactttggctgcaaaggctagtggagagttatgcttgaaatacatcttctcatttggagcatttgctaggaagcccctcttacaaagtgcatcagagtggaaagtgccaacaacgtttatctatggaatgaatgattggatgaactatcaaggtgcggtggaagcgaggaaatccatgaaggtcccttgcgaaatcattcgggttccacagggtggtcattttgtgttcatagacaacccaattggttttcattctgcagtgctttatgcttgccgcaagtttatatctcaagactcctctcatgatcaacaactcctagatggtctacgattggtttag

SEQ ID NO: 154465 - protein, 407 aa, Arabidopsis thaliana
MAEEISKTKVGSSSTASVADSSAAASAATNAAKSRWKILWPNSLRWIPTSTDYIIAAEKRLLSILKTPYVQEQVSIGSGPPGSKIRWFRSTSNESRYINTVTFDAKEGAPTLVMVHGYGASQGFFFRNFDALASRFRVIAIDQLGWGGSSRPDFTCRSTEETEAWFIDSFEEWRKAQNLSNFILLGHSFGGYVAAKYALKHPEHVQHLILVGSAGFSAEADAKSEWLTKFRATWKGAVLNHLWESNFTPQKLVRGLGPWGPGLVNRYTTARFGAHSEGTGLTEEEAKLLTDYVYHTLAAKASGELCLKYIFSFGAFARKPLLQSASEWKVPTTFIYGMNDWMNYQGAVEARKSMKVPCEIIRVPQGGHFVFIDNPIGFHSAVLYACRKFISQDSSHDQQLLDGLRLV

SEQ ID NO: 154466 - DNA, 1362 bp, Saccharomyces cerevisiae
  CDS (1)..(1362)
atgcttttaataaagaggtacttgatggaccctgaaagtttaaggaggcagataatgaatgtatataaatgttacatgtggaagagagcgttccacagtaatagaagcctactggaagttaaacgtcgtgaaaagagtctccagagaaaaattttggaaaggattcttagacccaaggaggaaaatgctgtcaaaaaatctggattcaagctatggtcaagccatttgaataacccacacaaaacttatatgcggctggaggaattacagagacgtattatggaagaggtacacgttgaaggtattaaaaagaatgataagttattcaacgaaataaatcaatggcatttccaaaatgaaaacacaagtactgttcgaacaccaacattgctgatacatggctatgccgcatcttcaatgtcttttttcagaaattatccaggtctgtccaagcacatccgaaatttatactcaattgacatgccagcgagcggattgtcttcagtaccgtctttagagatcaatacaacaacacctctgccgttagatatcaaatttattggagaaaataaatttaaggttccatatacaataaatgcaaatcacaataaatttgtgattcaaatgtacgaagatttctatctcgacagaatcgagcaatggcgcattgataacaaattgggcaaaatgaatgttgtggggcattcttttggcggatatttatcttttaaatatgctgttaaatatccaaactcggtaaacaaactttgcttggtatccccactaggagtggaaaggaatatctggtctgtaaataataatttccactccaacactctttatactatcgattttaaaaatccaaattccaagttttactccaaaagaaatatgattccaaaatacttatttgaacaacaatttcacattttgagaatgatgggaccattaggagctaagttatgttggaattacataatggcggcatatagccgagtcccatcgttggcatacaaagagtacatatttgaactgttttacggtaagggaggtataccggaggttacgacagatattttcaaagcgttattttcaagatgtatcctagcaaaggaccccttgatggattctctgcaatatttaaatgttaagaaattattgatagtatatgggcaatatgattggatgaataaaaaagccggtatgttcatggtcaaagagttgaacaatttaaagaactgtctagaaggagcaagttatttagaaataccttcttccggtcacaatctttttttagataacccagaatcattcaaccaatctatagtgtccttcttatcagacgaaactaaatcgccttga

SEQ ID NO: 154467 - protein, 453 aa, Saccharomyces cerevisiae
MLLIKRYLMDPESLRRQIMNVYKCYMWKRAFHSNRSLLEVKRREKSLQRKILERILRPKEENAVKKSGFKLWSSHLNNPHKTYMRLEELQRRIMEEVHVEGIKKNDKLFNEINQWHFQNENTSTVRTPTLLIHGYAASSMSFFRNYPGLSKHIRNLYSIDMPASGLSSVPSLEINTTTPLPLDIKFIGENKFKVPYTINANHNKFVIQMYEDFYLDRIEQWRIDNKLGKMNVVGHSFGGYLSFKYAVKYPNSVNKLCLVSPLGVERNIWSVNNNFHSNTLYTIDFKNPNSKFYSKRNMIPKYLFEQQFHILRMMGPLGAKLCWNYIMAAYSRVPSLAYKEYIFELFYGKGGIPEVTTDIFKALFSRCILAKDPLMDSLQYLNVKKLLIVYGQYDWMNKKAGMFMVKELNNLKNCLEGASYLEIPSSGHNLFLDNPESFNQSIVSFLSDETKSP

SEQ ID NO: 154468 - DNA, 25 bp, Artificial sequence
  primer
atgtggacaaacactttcaaatggt

SEQ ID NO: 154469 - DNA, 25 bp, Artificial sequence
  primer
ttactttgacaggaacgagactaaa

SEQ ID NO: 154470 - protein, 378 aa, Artificial sequence
  consensus sequence
  Variant (2)..(21): Xaa in position 2 to 21 is any amino acid
  Variant (22)..(25): Xaa in position 22 to 25 is any or no amino acid
  Variant (27)..(39): Xaa in position 27 to 39 is any amino acid
  Variant (40)..(41): Xaa in position 40 to 41 is any or no amino acid
  Variant (43)..(51): Xaa in position 43 to 51 is any amino acid
  Variant (53)..(57): Xaa in position 53 to 57 is any amino acid
  Variant (59)..(78): Xaa in position 59 to 78 is any amino acid
  Variant (80)..(124): Xaa in position 80 to 124 is any amino acid
  Variant (125)..(141): Xaa in position 125 to 141 is any or no amino acid
  Variant (143)..(146): Xaa in position 143 to 146 is any amino acid
  Variant (148)..(149): Xaa in position 148 to 149 is any amino acid
  Variant (151)..(151): Xaa in position 151 is any amino acid
  Variant (154)..(157): Xaa in position 154 to 157 is any amino acid
  Variant (159)..(164): Xaa in position 159 to 164 is any amino acid
  Variant (168)..(168): Xaa in position 168 is any amino acid
  Variant (172)..(174): Xaa in position 172 to 174 is any amino acid
  Variant (180)..(180): Xaa in position 180 is any amino acid
  Variant (182)..(186): Xaa in position 182 to 186 is any amino acid
  Variant (188)..(188): Xaa in position 188 is any amino acid
  Variant (190)..(193): Xaa in position 190 to 193 is any amino acid
  Variant (195)..(227): Xaa in position 195 to 227 is any amino acid
  Variant (228)..(230): Xaa in position 228 to 230 is any or no amino acid
  Variant (232)..(235): Xaa in position 232 to 235 is any amino acid
  Variant (236)..(242): Xaa in position 236 to 242 is any or no amino acid
  Variant (244)..(245): Xaa in position 244 to 245 is any amino acid
  Variant (248)..(248): Xaa in position 248 is any amino acid
  Variant (250)..(251): Xaa in position 250 to 251 is any amino acid
  Variant (253)..(255): Xaa in position 253 to 255 is any amino acid
  Variant (257)..(294): Xaa in position 257 to 294 is any amino acid
  Variant (295)..(299): Xaa in position 295 to 299 is any or no amino acid
  Variant (301)..(305): Xaa in position 301 to 305 is any amino acid
  Variant (307)..(308): Xaa in position 307 to 308 is any amino acid
  Variant (310)..(324): Xaa in position 310 to 324 is any amino acid
  Variant (325)..(326): Xaa in position 325 to 326 is any or no amino acid
  Variant (329)..(330): Xaa in position 329 to 330 is any amino acid
  Variant (335)..(354): Xaa in position 335 to 354 is any amino acid
  Variant (355)..(363): Xaa in position 355 to 363 is any or no amino acid
  Variant (365)..(366): Xaa in position 365 to 366 is any amino acid
  Variant (369)..(370): Xaa in position 369 to 370 is any amino acid
  Variant (372)..(372): Xaa in position 372 is any amino acid
  Variant (376)..(377): Xaa in position 376 to 377 is any amino acid
LXXXXXXXXXXXXXXXXXXXXXXXXIXXXXXXXXXXXXXXXPXXXXXXXXXSXXXXXRXXXXXXXXXXXXXXXXXXXXGXXXXXXXXXXXXXXXXXXXXXXXXXXXXXXXXXXXXXXXXXXXXXXXXXXXXXXXXXXXXXXEXXXXDXXEXWRXXXXLXXXXXXGHSXGGYXXXKYALKXPXXXXXLXLXXXXGXXXXXXXXXXXXXXXXXXXXXXXXXXXXXXXXXXXXPXXXXXXXXXXXRXXGPXGXXLXXXYXXXXXXXXXXXXXXXXXXXXXXXXXXXXXXXXXXXXXXXXXXXFXXXXXAXXPXXXXXXXXXXXXXXXXXYGXXDWMNXXXXXXXXXXXXXXXXXXXXXXXXXXXXXPXXGHXXFXDNPXXF

SEQ ID NO: 154471 - protein, 58 aa, Artificial sequence
  protein pattern
  Variant (2)..(3): Xaa in position 2 to 3 is any amino acid
  Variant (4)..(8): Xaa in position 4 to 8 is any or no amino acid
  Variant (10)..(10): Xaa in position 10 is any amino acid
  Variant (13)..(13): Xaa in position 13 is any amino acid
  Variant (14)..(14): Xaa in position 14 is Ala, Asp or Glu
  Variant (15)..(15): Xaa in position 15 is Asn or Gln
  Variant (16)..(16): Xaa in position 16 is any amino acid
  Variant (18)..(19): Xaa in position 18 to 19 is any amino acid
  Variant (20)..(20): Xaa in position 20 is Phe, Ile or Met
  Variant (21)..(21): Xaa in position 21 is any amino acid
  Variant (22)..(23): Xaa in position 22 to 23 is Leu or Val
  Variant (27)..(27): Xaa in position 27 is Phe or Tyr
  Variant (31)..(31): Xaa in position 31 is Ile, Leu or Val
  Variant (32)..(32): Xaa in position 32 is Ala, Ser or Thr
  Variant (33)..(33): Xaa in position 33 is any amino acid
  Variant (36)..(36): Xaa in position 36 is Ala or Ser
  Variant (37)..(37): Xaa in position 37 is Leu or Val
  Variant (39)..(39): Xaa in position 39 is His or Tyr
  Variant (41)..(41): Xaa in position 41 is Asp, Glu or Asn
  Variant (42)..(42): Xaa in position 42 is any amino acid
  Variant (43)..(43): Xaa in position 43 is Ile or Val
  Variant (44)..(44): Xaa in position 44 is any amino acid
  Variant (45)..(45): Xaa in position 45 is His or Lys
  Variant (47)..(47): Xaa in position 47 is any amino acid
  Variant (49)..(49): Xaa in position 49 is Ile, Leu or Val
  Variant (50)..(50): Xaa in position 50 is Gly or Ser
  Variant (51)..(51): Xaa in position 51 is Pro or Ser
  Variant (52)..(52): Xaa in position 52 is Ala or Leu
  Variant (54)..(54): Xaa in position 54 is Phe, Met or Val
  Variant (55)..(55): Xaa in position 55 is Glu or Ser
  Variant (56)..(56): Xaa in position 56 is any amino acid
  Variant (57)..(57): Xaa in position 57 is Glu, Asn or Ser
  Variant (58)..(58): Xaa in position 58 is Ala or Ile
EXXXXXXXEXWRXXXXLXXXXXXGHSXGGYXXXKYXXKXPXXXXXLXLXXXXGXXXXX

SEQ ID NO: 154472 - protein, 31 aa, Artificial sequence
  protein pattern
  Variant (3)..(3): Xaa in position 3 is any or no amino acid
  Variant (5)..(5): Xaa in position 5 is any amino acid
  Variant (6)..(7): Xaa in position 6 to 7 is any or no amino acid
  Variant (11)..(11): Xaa in position 11 is Ala or Gly
  Variant (14)..(14): Xaa in position 14 is Gln or Ser
  Variant (15)..(16): Xaa in position 15 to 16 is any amino acid
  Variant (17)..(17): Xaa in position 17 is Phe or Tyr
  Variant (18)..(18): Xaa in position 18 is Phe, His or Tyr
  Variant (20)..(20): Xaa in position 20 is Cys, Asn or Thr
  Variant (21)..(21): Xaa in position 21 is Phe or Tyr
  Variant (22)..(23): Xaa in position 22 to 23 is any amino acid
  Variant (25)..(25): Xaa in position 25 is Ala or Ser
  Variant (26)..(27): Xaa in position 26 to 27 is any amino acid
  Variant (28)..(28): Xaa in position 28 is Phe, Ile or Leu
  Variant (29)..(29): Xaa in position 29 is Lys or Arg
  Variant (30)..(30): Xaa in position 30 is Asp, Asn or Val
  Variant (31)..(31): Xaa in position 31 is Ile, Leu or Val
PTXLXXXHGYXASXXXXXRXXXXLXXXXXXX

SEQ ID NO: 154473 - protein, 25 aa, Artificial sequence
  protein pattern
  Variant (2)..(4): Xaa in position 2 to 4 is any or no amino acid
  Variant (7)..(7): Xaa in position 7 is any amino acid
  Variant (9)..(9): Xaa in position 9 is Ala, Asp, Pro or Ser
  Variant (10)..(10): Xaa in position 10 is any amino acid
  Variant (12)..(12): Xaa in position 12 is Cys or Val
  Variant (13)..(13): Xaa in position 13 is any amino acid
  Variant (14)..(14): Xaa in position 14 is Asn, Arg or Ser
  Variant (15)..(15): Xaa in position 15 is Phe or Tyr
  Variant (16)..(17): Xaa in position 16 to 17 is any amino acid
  Variant (18)..(18): Xaa in position 18 is Ala, Ser or Thr
  Variant (19)..(19): Xaa in position 19 is any amino acid
  Variant (20)..(20): Xaa in position 20 is Phe or Tyr
  Variant (21)..(21): Xaa in position 21 is Ala, Gly, Ser or Val
  Variant (22)..(23): Xaa in position 22 to 23 is any amino acid
  Variant (24)..(24): Xaa in position 24 is Pro or Ser
  Variant (25)..(25): Xaa in position 25 is Asp, Glu or Ser
LXXXGPXGXXLXXXXXXXXXXXXXX

SEQ ID NO: 154474 - protein, 18 aa, Artificial sequence
  protein pattern
  Variant (2)..(2): Xaa in position 2 is Asp, Asn, Gln or Ser
  Variant (3)..(3): Xaa in position 3 is Ala, Gly or Ser
  Variant (6)..(6): Xaa in position 6 is any amino acid
  Variant (7)..(7): Xaa in position 7 is Leu or Val
  Variant (9)..(9): Xaa in position 9 is Ile or Leu
  Variant (13)..(14): Xaa in position 13 to 14 is any amino acid
  Variant (16)..(17): Xaa in position 16 to 17 is any or no amino acid
PXXGHXXFXDNPXXFXXS

SEQ ID NO: 154475 - protein, 24 aa, Artificial sequence
  protein pattern
  Variant (2)..(4): Xaa in position 2 to 4 is any or no amino acid
  Variant (6)..(6): Xaa in position 6 is Glu, Ser or Thr
  Variant (7)..(7): Xaa in position 7 is any amino acid
  Variant (8)..(8): Xaa in position 8 is Cys, Gly, Asn or Ser
  Variant (9)..(9): Xaa in position 9 is Ala, Ile or Leu
  Variant (10)..(10): Xaa in position 10 is Phe, Ile or Leu
  Variant (12)..(12): Xaa in position 12 is any amino acid
  Variant (13)..(13): Xaa in position 13 is Asp or Lys
  Variant (15)..(15): Xaa in position 15 is Ile or Leu
  Variant (16)..(16): Xaa in position 16 is Ile, Leu or Met
  Variant (17)..(17): Xaa in position 17 is Asp, Asn or Gln
  Variant (18)..(18): Xaa in position 18 is Asn, Ser or Thr
  Variant (19)..(19): Xaa in position 19 is Ala, Ile, Leu or Val
  Variant (20)..(20): Xaa in position 20 is Asp, Gln, Arg or Ser
  Variant (21)..(23): Xaa in position 21 to 23 is any amino acid
  Variant (24)..(24): Xaa in position 24 is Pro or Val
LXXXFXXXXXAXXPXXXXXXXXXX

SEQ ID NO: 154476 - protein, 14 aa, Artificial sequence
  protein pattern
  Variant (3)..(3): Xaa in position 3 is any amino acid
  Variant (4)..(4): Xaa in position 4 is Leu or Pro
  Variant (5)..(5): Xaa in position 5 is Ala or Gly
  Variant (6)..(6): Xaa in position 6 is any amino acid
  Variant (8)..(8): Xaa in position 8 is Ala, Gly or Leu
  Variant (10)..(11): Xaa in position 10 to 11 is any amino acid
  Variant (13)..(13): Xaa in position 13 is Ala, Asp, Pro or Ser
  Variant (14)..(14): Xaa in position 14 is Phe or Leu
IDXXXXGXSXXPXX

SEQ ID NO: 154477 - DNA, 822 bp, Saccharomyces cerevisiae
  CDS (1)..(822)
atgtatgtttctaatgggaaagacacttgccagttgttggggcccgtgtctctttttgtccagacattgatgggtatgacagccgtgattgtgttattggtgaaaagaaactatgagcatccaaggagaaaaatgattgtgtggagttatgacattggaaaacaaatcatcggctctcttggaatccattttttgaatctaggcatcagcatactgaagaaaagacgaaggtcactcttcgcaatcactgcaaaaggcaatgatgatgaggatcaatgcgattggtattttcttaacttactcctggatactactgttgggattcccattctttggttgtgcttatacataattgaaaaagtgctaaaatccttacacttccaaaacattgaaagtggtaattattttccatctaaaaccgttgggagccaccccagaaaacccttattctctgccttcgtgaaacagctgcttatattcattgttgggctgggcgtgatgaagttctgcgtgtttctaatactaaactacttagaagacttggcatactggttcgccgatcttatccttggctggtcagattcatggccaaactttcaagtttttctggtcatgtttgtctttcctatcttactgaattgcttccagtacttttgtgtcgacaatgtcatcaggttacattctgagagcctaacgataaccaatgcagagaattttgaaacgaacacattcctaaatgacgaaattcctgatttatcggaagtctcaaatgaagtgcctaacaaggataacaacatttccagctatggtagcataatatag

SEQ ID NO: 154478 - protein, 273 aa, Saccharomyces cerevisiae
MYVSNGKDTCQLLGPVSLFVQTLMGMTAVIVLLVKRNYEHPRRKMIVWSYDIGKQIIGSLGIHFLNLGISILKKRRRSLFAITAKGNDDEDQCDWYFLNLLLDTTVGIPILWLCLYIIEKVLKSLHFQNIESGNYFPSKTVGSHPRKPLFSAFVKQLLIFIVGLGVMKFCVFLILNYLEDLAYWFADLILGWSDSWPNFQVFLVMFVFPILLNCFQYFCVDNVIRLHSESLTITNAENFETNTFLNDEIPDLSEVSNEVPNKDNNISSYGSII

SEQ ID NO: 154479 - DNA, 1153 bp, Anopheles gambiae str. PEST
  CDS (158)..(1153)
caaccaccgaaccagtgtgcgtcgtcgtcatacgacattataaatacgccttagcaacagggcttggaggacggcggcaaacgcaaggtggtgccgccgctgtgtttgcgcattcgtcagggtagcgatgaacggttccgcggcggtgctgggccagatggtcggtggtgccgatccgggcacggtcctggccggggaaggcaacaccgagtggcaaacgttgcactgcagcaaggatgcgctgacggatctgttcggctggtttctgcagggcatactggccaccctcgcctttacctgccttatcgctaaacgcttctgcgaaccacagtacaatcgccgctcatgggaaacctggtggtacgatacgtccaagcagggcatcggtgctctggtgatccacatggccaacgtttatttggccccactcttccaaggcgacccctgtacctggtacattatcaacttcctgctagattctaccatcgggctgttcattatttacatcggcatcaaaacctgtcagtatttagcgcggaagaaaaaatgggatgccatcaactttggtgaatatggtgccccgaaatcctggctctaccaaacgtgtatctacgtgtgcctgatggtggtcgttaagctgataacgacgctaatcattcagttcgatgtgtgggataacgtgaaaaacttcgtcctgtcgccgttccgggatccgcggatagagctggccgtcgtgatgctggtcattccgttcttcgtcaatatcctaatcttctgggtgacggataacttcctgatgaggcacacgcgcaagaagcgcaacacggcggccggcagctcgcaccacgcgcacggtcgggagcatagcttgctgcaaaaagtaaaatacaaaatgatacacaaaaccaaaccaaatgactcagaatctgatactcttttgtcaggcgatgaagaaattttaagcttcagtacgcccaacgtggtgccggcggcgtcctcgtcgatggcgggcagcagtggcagcagtgggggttcctcctccctgctgacgccgctcgacatggacacggccatcgtgctgacgcgaacatcacccgggccgacgaaccggcaaagcacagttcaacagcgcaccagtgtcattaacatttaa

SEQ ID NO: 154480 - protein, 331 aa, Anopheles gambiae str. PEST
MVGGADPGTVLAGEGNTEWQTLHCSKDALTDLFGWFLQGILATLAFTCLIAKRFCEPQYNRRSWETWWYDTSKQGIGALVIHMANVYLAPLFQGDPCTWYIINFLLDSTIGLFIIYIGIKTCQYLARKKKWDAINFGEYGAPKSWLYQTCIYVCLMVVVKLITTLIIQFDVWDNVKNFVLSPFRDPRIELAVVMLVIPFFVNILIFWVTDNFLMRHTRKKRNTAAGSSHHAHGREHSLLQKVKYKMIHKTKPNDSESDTLLSGDEEILSFSTPNVVPAASSSMAGSSGSSGGSSSLLTPLDMDTAIVLTRTSPGPTNRQSTVQQRTSVINI

SEQ ID NO: 154481 - DNA, 1626 bp, Aedes aegypti
  CDS (1)..(954)
atgaatacgacgctggacgacagtggcagtacggaatggtccactctgcactgcagcaaagatgcactgaccgactttttcggttggttcctgcagggcatcctggccacgctggccttcacgtgtctaatcggtaaacgattctgcgaaccactttacaacagacgatcatgggaaacgtggtggtacgatacatcgaagcaaggtatcggcgccatggtgatccacatgaccaacgtctacctggccccgctattccagggggatccctgtacctggtatataattaactttctactggattccactatcggcctattcataatttatatcggcattaaaacctgtcagtatttggcgcggaagaaaaaatgggatgcgatcaactttggcgagtatggggctcccaaatcgtggctttaccagacctggatctacgttggactgatggcgatcgttaagctaataacgactctattcattcagctcgacatctgggacaacgtgaaaaactttgtcctgtcacccttcaaggatcctcgcatcgaactggccgtggtgatgttggtgattcctttcttcgttaatattctcatcttttgggtaaccgataatttcctaatgaggcacacacgaaaaaagcgcaatacaggtactgcacatcaccacggaagggaacatagcctgttgcaaaaagtaaaatacaaaatgatacaaaaaaccaaacctaatgactcagaatctgatactcttttatcaggcgatgaagaaattttaagttttaaggcgtccaacagcgccacgacatcgtcgtcgcttctgcaggggtccgcaagctgttcctcgacggcgctggtcgtggacgatacggcaatcattctcacctcttcggcgacatcacctagcagtaagcaaacaactgtccagcagcgaacgagtgtgatcaatatttaacgaaggttttgtttagttttgcttatttgcaacaatttttacctatatcgtatctgtataagtcatgtatagtctgaacaacgcatcatcccccagccgggacgacacgaaccactttttcattgttgaaacagagggaaatccaaggcaatagattagctatgatttttttttcttgttgaaactgagagtaaaaacatgtgatatttgtgtgtctatatctacatatatacatatttacatacatattcaaggctacgtaaaccattcaggaagcttagaaattggaattgacggatatcaaaatatccctctccataccacaatgttgttgaacttaattacattcaagaaggtattgaaggagcaacgataggcaaacagtgattggatattagcgcaagagattggtaactgatgtgaaactgagcccacttacttaggcaagtcgagcagatgattagaattgagaaactgtagacgaaacacggatattgtattttgtagggcaatgataggctaagtcaatcaacaataaactattgagtaaccagcgaaaaagtcgaactaggaaggattggttttattttttttatatatacacaaacagacatcaaaagattatatcaacggcaggagaaaaattgaaagaataaaaattaccatttgaat

SEQ ID NO: 154482 - protein, 317 aa, Aedes aegypti
MNTTLDDSGSTEWSTLHCSKDALTDFFGWFLQGILATLAFTCLIGKRFCEPLYNRRSWETWWYDTSKQGIGAMVIHMTNVYLAPLFQGDPCTWYIINFLLDSTIGLFIIYIGIKTCQYLARKKKWDAINFGEYGAPKSWLYQTWIYVGLMAIVKLITTLFIQLDIWDNVKNFVLSPFKDPRIELAVVMLVIPFFVNILIFWVTDNFLMRHTRKKRNTGTAHHHGREHSLLQKVKYKMIQKTKPNDSESDTLLSGDEEILSFKASNSATTSSSLLQGSASCSSTALVVDDTAIILTSSATSPSSKQTTVQQRTSVINI

SEQ ID NO: 154483 - DNA, 714 bp, Aedes aegypti
  CDS (1)..(714)
atgaatacgacgctggacgacagtggcagtacggaatggtccactctgcactgcagcaaagatgcactgaccgactttttcggttggttcctgcagggcatcctggccacgctggccttcacgtgtctaatcggtaaacgattctgcgaaccactttacaacagacgatcatgggaaacgtggtggtacgatacatcgaagcaaggtatcggcgccatggtgatccacatgaccaacgtctacctggccccgctattccagggggatccctgtacctggtatataattaactttctactggattccactatcggcctattcataatttatatcggcattaaaacctgtcagtatttggcgcggaagaaaaaatgggatgcgatcaactttggcgagtatggggctcccaaatcgtggctttaccagacctggatctacgttggactgatggcgatcgttaagctaataacgactctattcattcagctcgacatctgggacaacgtgaaaaactttgtcctgtcacccttcaaggatcctcgcatcgaactggccgtggtgatgttggtgattcctttcttcgttaatattctcatcttttgggtaaccgataatttcctaatgaggcacacacgaaaaaagcgcaatacaggtactgcacatcaccacggaagggaacatagcctgttgcaaaaagcgatgaagaaattttaa

SEQ ID NO: 154484 - protein, 237 aa, Aedes aegypti
MNTTLDDSGSTEWSTLHCSKDALTDFFGWFLQGILATLAFTCLIGKRFCEPLYNRRSWETWWYDTSKQGIGAMVIHMTNVYLAPLFQGDPCTWYIINFLLDSTIGLFIIYIGIKTCQYLARKKKWDAINFGEYGAPKSWLYQTWIYVGLMAIVKLITTLFIQLDIWDNVKNFVLSPFKDPRIELAVVMLVIPFFVNILIFWVTDNFLMRHTRKKRNTGTAHHHGREHSLLQKAMKKF

SEQ ID NO: 154485 - DNA, 1173 bp, Gibberella zeae PH-1
  CDS (1)..(1173)
atggcttcctcagttattgctacggctacctccatgaccacctctacaaccgcgtcggctacatttgtctcgtctgccccaccaacaccttatagcgaaaatggctccggcggagagtgctcattactgggctcctttgctcttgtcgtacaaggcgcactcggcgctctggcgttgctctctctcgtgtacaaacgatggagagaacgtcctcagcgacctctaaagatctggtttttcgatgtctccaagcaggtctttggttctgtgcttgtgcacatcgccaatatcttcatgtccatgttgacaagcggtcgcttttcggttcaggtcgacccgtcagcagcagccgttactgcgcgttctgatgacgactacgctcccaacccatgctctttctacctcctcaatctcgccatcgatactaccctcggtattcccatccttatcattcttctcaaggttctgactggtctcgtccgttacacgcccgtcggccaacctcccgaatctgtccagtcaggaaactatggtagcccgcccaatgttgtatggtggttgaaacaatccgtcatctacttctgtggtctatttggcatgaaggtttgcgtcctcatcatcttcatcatgatgccctggatctccaaagccggtgactgggcgcttggctggacagaaggcaatgagaagctgcagatcgcgttcgtaatgatgatcttcccactcattatgaacgctctacagtactatattatcgactccttcatcaagctcaaggaaaccgactacgaaaatgtcaatgccgatgaatctgacgaggttcgacgcaggagatatgacgacagcgaggatgagattgcgcgcgccagactggtcgattcggagcacgagactgatagcgagtcggacgacgaggtcgataagcccgccgcgcgttctgggcatccttctcgccaacccaacaccaaaaactctggggaatacgatcctgaacgcgatggtgacgatcggacgatcataggaagcagctcgagtggccggggtccaaaggacaagctaacagcgagatctatgcttaaattgcccgtgggcatctcgccaaatagcgagaacaagaagtacatcattgggttcccaaccaaaaccgacagaggatttggacccgtatcctaa

SEQ ID NO: 154486 - protein, 390 aa, Gibberella zeae PH-1
MASSVIATATSMTTSTTASATFVSSAPPTPYSENGSGGECSLLGSFALVVQGALGALALLSLVYKRWRERPQRPLKIWFFDVSKQVFGSVLVHIANIFMSMLTSGRFSVQVDPSAAAVTARSDDDYAPNPCSFYLLNLAIDTTLGIPILIILLKVLTGLVRYTPVGQPPESVQSGNYGSPPNVVWWLKQSVIYFCGLFGMKVCVLIIFIMMPWISKAGDWALGWTEGNEKLQIAFVMMIFPLIMNALQYYIIDSFIKLKETDYENVNADESDEVRRRRYDDSEDEIARARLVDSEHETDSESDDEVDKPAARSGHPSRQPNTKNSGEYDPERDGDDRTIIGSSSSGRGPKDKLTARSMLKLPVGISPNSENKKYIIGFPTKTDRGFGPVS

SEQ ID NO: 154487 - DNA, 870 bp, Candida glabrata CBS 138
  CDS (1)..(870)
atgggaccgatcaaaccaggaatggataactgccagttgttggggcctgcatctttgctagttcagtgcttaatggggatttctgcactagctttgttgctatttaagagaaatcacgagcacccgaggagaaagatggagatatggctgttcgatattggcaagcaaatcatcggtgccttgggtatacattttattaatgttggcataagtgttttaaagagacatcatgaaaaaaaagcatatttatttatcagtataatagggaatctcatagagagcgtgtcttctaccagagaagatgatggttcagatgaacagtgtgactggtatttcttaaatctattactggatactaccgtggggataccaattctctggttggcgattaattgtatcacttatattctgcaatatctcaacatcaaaaacgttgaatcagggaactattttgccgaagaggagaatgatatagaatcacaagagtcagaacagccattaataactgcatttttcaaacagctaggtatttttaccagtagtttgatagttatgaaaatctgtgtatatttagtactcaactattttgaagatttagcatactggtttgctaatttaattttatcctggtcagatagatggcccgatttacaagtcactttggttatgtttgtgttccccataatattgaattgttttcaatatttttgcgtagacaacgttataaaattacattcagatgatgtaaacaactacaattcaaagagttttgaaccagaggaagtaatacaagaagaatacacaaatttgatatcgggagctcagaaaaaagataagaataaacaatcagcttacgaaaccatttcataa

SEQ ID NO: 154488 - protein, 289 aa, Candida glabrata CBS 138
MGPIKPGMDNCQLLGPASLLVQCLMGISALALLLFKRNHEHPRRKMEIWLFDIGKQIIGALGIHFINVGISVLKRHHEKKAYLFISIIGNLIESVSSTREDDGSDEQCDWYFLNLLLDTTVGIPILWLAINCITYILQYLNIKNVESGNYFAEEENDIESQESEQPLITAFFKQLGIFTSSLIVMKICVYLVLNYFEDLAYWFANLILSWSDRWPDLQVTLVMFVFPIILNCFQYFCVDNVIKLHSDDVNNYNSKSFEPEEVIQEEYTNLISGAQKKDKNKQSAYETIS

SEQ ID NO: 154489 - DNA, 831 bp, Kluyveromyces lactis NRRL Y-1140
  CDS (1)..(831)
atgcaaaatgacaacgaatgtaagctattaggtccagtttctattgccatacaactgctgatggcctttctgataatatgttcgttattattgaaaagacaatcagagcatcccaagagaacgtgggtagtttggtgctacgatgttggaaaacaaatccttggtgctttgagcatacatttcttgaatgtactgattagtgtgcttaaaggaagtaattcccttgaggatgctattattttcatttttagggccggattgaaattaatgactaaggatggtggatctgactctggggacgaatgtgactggttttttttgaacctattattagataccactgtcggaataccgattctttggtgctgtctcacattttacgagtacatactgacagctataggaattgagaatatcgaaagtggcaattacttctcagaatcagaatctcattcttctacagcgaaacgtgaaccgttgttttcagcatttttgaaacagttgacggttttcatcgttagcttagcttcaatgaaagggtgtttgtttctaatacttctatatttcgaaaatgtcgcagaatggttggccaactgggtgcttggctggtccgatccatggcctaacctgcaagtgtttttggtcatgttcgttttccccttacttctaaattgtttccagtgtttctgcgttgacactattatcaaattgccagcaacgaatattactgctcagaatgtagacaatttcgatcaagaatcgttaattgagagtgatggaatatatgtcacaagaactgtttcgaataaacggtatggaacaatagtatag

SEQ ID NO: 154490 - protein, 276 aa, Kluyveromyces lactis NRRL Y-1140
MQNDNECKLLGPVSIAIQLLMAFLIICSLLLKRQSEHPKRTWVVWCYDVGKQILGALSIHFLNVLISVLKGSNSLEDAIIFIFRAGLKLMTKDGGSDSGDECDWFFLNLLLDTTVGIPILWCCLTFYEYILTAIGIENIESGNYFSESESHSSTAKREPLFSAFLKQLTVFIVSLASMKGCLFLILLYFENVAEWLANWVLGWSDPWPNLQVFLVMFVFPLLLNCFQCFCVDTIIKLPATNITAQNVDNFDQESLIESDGIYVTRTVSNKRYGTIV

SEQ ID NO: 154491 - DNA, 957 bp, Debaryomyces hansenii CBS767
  CDS (1)..(957)
atgaaatcaatacccagcattttgctaacaacattcgtggcgatatctttacaaacaactggcaataggccaaagcaccctgatgatggtgatgatgatggcaaatgtgaactaataggtacattttcacttataacacaagcgtttttgggagtgctttgtttatcttcgttaatagttaaacgattttatgagtatccgttaagaagaacgtggccagtgtggttttttgacgtgatgaagcaattaattggtgcgtttggggttcatgtgttcaatgtatttttgtcgatattgaaatccaagaaagatccaggcgtgaagtgtgctagaaataaggatgaggacgatactggtgatattgatccatgtgattggtatttcttaaatatagtattcgattgtaccataggagttttggtcttatactttgtatttaatgccattaacaggttttgtcgaaactggcttaaaatcacgcagattgaatcaggccaatatgggccaaacctggagaagccatcggttagagcgtttttaaagcaattagctgtgtattttggatcgcttatgatcaccaagatttttttatacggaatagtcgaatgctttgaaactgaattattatggataactagtcacatactattggtgtggctagatgaatatcccgacgaatttgagatattcgtcgttatgttcgttgtaccggtagtgatgaattgtctacaattagtgttggttgataatatcattcaaaaccggattatcgggaaggtcaatggacgaatgcaccatgaatatgcgggtcaatcagaagcagacgaaggtcatatccgagatgaaatcgaagagttcaccagacacggcgaccataggcacaagcgaagccgtaggcaccactctcttcccaacaacgaaggaattaaaacgtacggtacatttaatgacgtctga

SEQ ID NO: 154492 - protein, 318 aa, Debaryomyces hansenii CBS767
MKSIPSILLTTFVAISLQTTGNRPKHPDDGDDDGKCELIGTFSLITQAFLGVLCLSSLIVKRFYEYPLRRTWPVWFFDVMKQLIGAFGVHVFNVFLSILKSKKDPGVKCARNKDEDDTGDIDPCDWYFLNIVFDCTIGVLVLYFVFNAINRFCRNWLKITQIESGQYGPNLEKPSVRAFLKQLAVYFGSLMITKIFLYGIVECFETELLWITSHILLVWLDEYPDEFEIFVVMFVVPVVMNCLQLVLVDNIIQNRIIGKVNGRMHHEYAGQSEADEGHIRDEIEEFTRHGDHRHKRSRRHHSLPNNEGIKTYGTFNDV

SEQ ID NO: 154493 - DNA, 747 bp, Yarrowia lipolytica CLIB122
  CDS (1)..(747)
atgtttggaaaacacccaaagaaccctcccgggtgcaaactgctcggtccgtttgccctgatagttcaggcatcgatgggcgtgttagcggtcctaaccctggttgtgaaacgtcaatatgaagtccctcgccgtccctggtgggtgtggttctttgacgtctcgaaacagctctgtggagcggccggcttgcattttctgaatctcttcctttcgattcttacctcttcgcgcacagacgtgcccgacacgagtgataatccgtgcgactactactttctcaacgtgctaatggacactacggtcggagtgcctgttctatggggcttcctggtgctggtgaccaacattgctgagagacagttcaaggtgacggagattgaatccggagtctacggccaccctccccaatggcgggcattctggaaacaggctgggatttatcttttggccatggttttaatgaaaattgtgcttgccacgtcgttcatcatcttcccctggctggattacatcggcgccttcctactaaagtggactgataacaatcccgatctccaggtggcgtttgtcatgctcatctttcctctcttcatgaatgctctgcaatattatctgatcgacaacattatagagagcaactcgttccgacaggactaccacagtgttcccaacattggcgaggtggatgcccccgagcgaattccccaacagctggcccagagtagttatcataccttcaagtaa

SEQ ID NO: 154494 - protein, 248 aa, Yarrowia lipolytica CLIB122
MFGKHPKNPPGCKLLGPFALIVQASMGVLAVLTLVVKRQYEVPRRPWWVWFFDVSKQLCGAAGLHFLNLFLSILTSSRTDVPDTSDNPCDYYFLNVLMDTTVGVPVLWGFLVLVTNIAERQFKVTEIESGVYGHPPQWRAFWKQAGIYLLAMVLMKIVLATSFIIFPWLDYIGAFLLKWTDNNPDLQVAFVMLIFPLFMNALQYYLIDNIIESNSFRQDYHSVPNIGEVDAPERIPQQLAQSSYHTFK

SEQ ID NO: 154495 - DNA, 1113 bp, Aspergillus nidulans FGSC A4
  CDS (1)..(1113)
atggcttatgcatccatcccgttgttttctgcggcgatcctcgtatccgccctcgacatcggggtaaatgctctggtctctccgaccggcgtcattacaacaccatcaccatctttgtcaacaccggccgcatcgtactccccaacgagttccagttcttccggacatgacgaagacaatggagaatgccggctacttgggccgttttcgctcgtcgtgcaggccgccctgggaatgctcgcgttattgtcgcttgtctacaagcgatggagagaacgccctcaacgcccggtgaaggtctgggcgttcgatgcctcgaagcaagttttcggttcatctatgctacatctctttaaccttttgatgtccatgttctctgccggacagtttgagatcacaagcaaatacaagccaaacccatgctcgttttacttgctaaatcttggcatcgataccaccctaggtatccctatcttgatcgttatactccatgtcttgaaccgcttggcgaaatacacccccctcgcaaatcctccggaatcgatcgaatctgggaattatgacgatcccccccgtgtcagctggtggtttaagcaatccatgatctactttctgggtcttctgggaatgaaaatttgtgtcttcttcctcatccagatggtgccgcttatcgttaaggtaggcgactgggctttgcgatggactgaaggcaacaccgccatccagatcatcttcgtgatgctcatcttccccgtcataatgaatgctattcagtattatattatcgatattttcataaagaagccactctccgtgtctcacgacctcgagagtgccgataccgcaagcgacaacgacgccgacgaccggcatgcattgctggccggattggaggatgatgatacatttgaccgtgatgggtcgctaggaagtgacgaaagaacgttacatagccccgtgcagtttaaggaagctctggaccatctgaatgctgctaaaagagatccggtgggttctctggactctgcatcaacgccaacctccagtagcgcacgcgaaaacgatgacacgactttgtctacagaaatcaatgtgcaaccgaaagatatgtaa

SEQ ID NO: 154496 - protein, 370 aa, Aspergillus nidulans FGSC A4
MAYASIPLFSAAILVSALDIGVNALVSPTGVITTPSPSLSTPAASYSPTSSSSSGHDEDNGECRLLGPFSLVVQAALGMLALLSLVYKRWRERPQRPVKVWAFDASKQVFGSSMLHLFNLLMSMFSAGQFEITSKYKPNPCSFYLLNLGIDTTLGIPILIVILHVLNRLAKYTPLANPPESIESGNYDDPPRVSWWFKQSMIYFLGLLGMKICVFFLIQMVPLIVKVGDWALRWTEGNTAIQIIFVMLIFPVIMNAIQYYIIDIFIKKPLSVSHDLESADTASDNDADDRHALLAGLEDDDTFDRDGSLGSDERTLHSPVQFKEALDHLNAAKRDPVGSLDSASTPTSSSARENDDTTLSTEINVQPKDM

SEQ ID NO: 154497 - DNA, 1023 bp, Candida albicans SC5314
  CDS (1)..(1023): transl_table=12
atgggttgtggagaactactatctgttccacttgtatttttatcattattttctcatgaaaatgtccctgttttaaacactggcacaacagatgatgatgggaaatgtgaattaattgggacattttcgttaatgactcaagccatattaggaatgttatgtctttcttcattattaattaaaagattttatgaatatcccatacgacgaacttggccagtttggatatttgatgtatcaaaacaattgattggagcattaggagttcatatatttaatgtgattttatcaatggttaaaactgccccagagatttggttaacccagaacaacaacaacagtagcgatcctgatgatgataacacgaaagatccttgtgattggtattttttgaatattgttcttgattgtactattggagtatatatcttatatcatgtatttaaaaccatgaataaaatatgtcgagattattggcatattacacagattgaaagtggtgaatatggaccaaatcccaataaaccatcaaccaaagcattcctcaagcaattaattgtttatttcacttctttgatgattacaaaaattatattatatggattagttgaatgttttgaaacgcaattattatggtttacatctcatgtattattaatttggttaaatgaataccctgatgaatttgaaatttttatcgtgatgtttattgtcccaataattatgaattgtttacaattaatacttattgataattttattagaaatcaaatgtggattaacattaataaacgaatgagaatagaatttcctaattttagtgatgaaacagaaagtgttcaacaacaagatattatccaagcacaaagagaagaggaagaggaagaagaacaaaggaaataccttttaatgaatgatagtactgaaggtggtaacaacaatcatagtagcagtagtagtaatgatactttactaggagaatctcacaataaaaacaattatggctcttataatgatgtatag

SEQ ID NO: 154498 - protein, 340 aa, Candida albicans SC5314
MGCGELLSVPLVFLSLFSHENVPVLNTGTTDDDGKCELIGTFSLMTQAILGMLCLSSLLIKRFYEYPIRRTWPVWIFDVSKQLIGALGVHIFNVILSMVKTAPEIWLTQNNNNSSDPDDDNTKDPCDWYFLNIVLDCTIGVYILYHVFKTMNKICRDYWHITQIESGEYGPNPNKPSTKAFLKQLIVYFTSLMITKIILYGLVECFETQLLWFTSHVLLIWLNEYPDEFEIFIVMFIVPIIMNCLQLILIDNFIRNQMWININKRMRIEFPNFSDETESVQQQDIIQAQREEEEEEEQRKYLLMNDSTEGGNNNHSSSSSNDTLLGESHNKNNYGSYNDV

SEQ ID NO: 154499 - DNA, 1326 bp, Ustilago maydis 521
  CDS (1)..(1326)
atgagcgcctccgacactggcttcgtcggtatggtcggtgtcgtacgtgacatgatgccgccaactgcatccatagcggctttggcgtccgacccgaccttgacccccacgcctacgccgatcatcggcgctccggaagtggacggagacaactgcaaacttatgggtccctttgcgctgttcgtacaggccgtcatgggcatcctcgtcataggctctctcgtttacaaacgacagagagaaaagccgaaacgcaaatggaaaatctgggcgctcgacgtttctaagcagatgctcggccaactctttgttcacatcctcaatatcgtcctttcggactttgttgccagcggaggaggtgaaaacccttgctcgctctactttctcaacatcctcgtcgataccactttgggcgtattcttcatctacatcgccttgaagtacgtcacgtatttcctcaccgaacgactcggcttggagggcttcatatccggtcaatacactccaccgctacctagcattgttcctgcatcatccaccggtcccagcacatcggcgcagtccggttcttcgcgcagggcattccgcagaggcagacccaggatcgagtactggttgaagcagctggcttcgtacctttttgtgctcttcctcatgaagatggcggtgcttgttgtctttggcttctttccattcctctttgacgtgggctcatggatcttgggcttctttggtagcaacaaggacttccaagtgctgttctcgatggccttattcccgctcgctatgaacgtattgcagttctggctcatcgattccctcctccgccacaatccttacacatcggcttactccaagatcaatccggacgaccaagaatttctcaacagctctgatagtatctctcacgagtctcgccaacctgccgaggatgtcggcggtcgcacacattcaataggggaagatagcgacgacgaaacaaacgacctagataaacagcacattcaaccgtacgcttctggcccaggccgatccagacgaaggccttccccacagaggtctgtcacctcggatcagccttacgactatcctccaccgacagatttgtacggctcagtgcacaagtcgcctcctctgaggccctctagacctacggacgacatgcgacgccaagctagcctgacgctttcggatgctggctcggatacagaatcgggtagtcagagcatacaccagactctgtttaatagcaaagcctctctacaaccgtctgagacgcaccatctcaaacaggtcagcagagacggcagcagcagcagcagctga

SEQ ID NO: 154500 - protein, 441 aa, Ustilago maydis 521
MSASDTGFVGMVGVVRDMMPPTASIAALASDPTLTPTPTPIIGAPEVDGDNCKLMGPFALFVQAVMGILVIGSLVYKRQREKPKRKWKIWALDVSKQMLGQLFVHILNIVLSDFVASGGGENPCSLYFLNILVDTTLGVFFIYIALKYVTYFLTERLGLEGFISGQYTPPLPSIVPASSTGPSTSAQSGSSRRAFRRGRPRIEYWLKQLASYLFVLFLMKMAVLVVFGFFPFLFDVGSWILGFFGSNKDFQVLFSMALFPLAMNVLQFWLIDSLLRHNPYTSAYSKINPDDQEFLNSSDSISHESRQPAEDVGGRTHSIGEDSDDETNDLDKQHIQPYASGPGRSRRRPSPQRSVTSDQPYDYPPPTDLYGSVHKSPPLRPSRPTDDMRRQASLTLSDAGSDTESGSQSIHQTLFNSKASLQPSETHHLKQVSRDGSSSSS

SEQ ID NO: 154501 - DNA, 825 bp, Tribolium castaneum
  CDS (1)..(825)
atgaattcgacaggaaacgtgctacagcccacccatgggggcttgcattgcagcaaagatgccctaactgacgttttcggctggtttctgcaagtcttactggcctgtttagccttcacctgcctcatagctaaaaggttctgtgagccaaggagcgagcggcgttcttggttgatttggttctatgacacttcaaagcaaggtatgggggctatggccattcacctggccaacgtatggctcgcggggcagtaccaaggcgatccgtgcacctggtacttgatcaatttcctcctggactcctccttggggctgcttattattttcgtagggattcgtttaagtcaatatttatcgagaaagaaaggctgggaagcgattaattttggggagtatgggaagccgccttcggcaaatgcgtggatggcgcagtgttgtctttacgtgggccttatggccattgttaaagtgtcaataacgttgtttatgcagcttgatttttgggatggcgttaaagattttattttatcgcctattaataatcccaaggtggagctggcgtttgttatgctcatcataccgtttttcgtaaacatgttgatgttttgggtcactgataactttctcatgcataaaagtcacagcaaaaggcaagcgagaaggacgagcgctgaaaactcacttttggcgcgcaccaaagtcaagtatcgaacaattaagaaaaaaattagaagacgcgactctgaaagcgatattctgctttcaggagatgatgaattgttggatcctgagtcagtacctataaatagacacgtgttaacttaa

SEQ ID NO: 154502 - protein, 274 aa, Tribolium castaneum
MNSTGNVLQPTHGGLHCSKDALTDVFGWFLQVLLACLAFTCLIAKRFCEPRSERRSWLIWFYDTSKQGMGAMAIHLANVWLAGQYQGDPCTWYLINFLLDSSLGLLIIFVGIRLSQYLSRKKGWEAINFGEYGKPPSANAWMAQCCLYVGLMAIVKVSITLFMQLDFWDGVKDFILSPINNPKVELAFVMLIIPFFVNMLMFWVTDNFLMHKSHSKRQARRTSAENSLLARTKVKYRTIKKKIRRRDSESDILLSGDDELLDPESVPINRHVLT

SEQ ID NO: 154503 - DNA, 26 bp, Artificial sequence
  primer
atgtatgtttctaatgggaaagacac

SEQ ID NO: 154504 - DNA, 25 bp, Artificial sequence
  primer
ctatattatgctaccatagctggaa

SEQ ID NO: 154505 - protein, 256 aa, Artificial sequence
  consensus sequence
  Variant (2)..(9): Xaa in position 2 to 9 is any amino acid
  Variant (11)..(15): Xaa in position 11 to 15 is any amino acid
  Variant (17)..(20): Xaa in position 17 to 20 is any amino acid
  Variant (22)..(23): Xaa in position 22 to 23 is any amino acid
  Variant (26)..(27): Xaa in position 26 to 27 is any amino acid
  Variant (29)..(31): Xaa in position 29 to 31 is any amino acid
  Variant (32)..(32): Xaa in position 32 is any or no amino acid
  Variant (34)..(37): Xaa in position 34 to 37 is any amino acid
  Variant (38)..(38): Xaa in position 38 is any or no amino acid
  Variant (40)..(41): Xaa in position 40 to 41 is any amino acid
  Variant (43)..(44): Xaa in position 43 to 44 is any amino acid
  Variant (47)..(48): Xaa in position 47 to 48 is any amino acid
  Variant (50)..(53): Xaa in position 50 to 53 is any amino acid
  Variant (55)..(56): Xaa in position 55 to 56 is any amino acid
  Variant (58)..(68): Xaa in position 58 to 68 is any amino acid
  Variant (69)..(97): Xaa in position 69 to 97 is any or no amino acid
  Variant (99)..(100): Xaa in position 99 to 100 is any amino acid
  Variant (102)..(103): Xaa in position 102 to 103 is any amino acid
  Variant (105)..(107): Xaa in position 105 to 107 is any amino acid
  Variant (109)..(109): Xaa in position 109 is any amino acid
  Variant (111)..(111): Xaa in position 111 is any amino acid
  Variant (113)..(137): Xaa in position 113 to 137 is any amino acid
  Variant (138)..(162): Xaa in position 138 to 162 is any or no amino acid
  Variant (164)..(164): Xaa in position 164 is any amino acid
  Variant (166)..(173): Xaa in position 166 to 173 is any amino acid
  Variant (174)..(188): Xaa in position 174 to 188 is any or no amino acid
  Variant (190)..(196): Xaa in position 190 to 196 is any amino acid
  Variant (197)..(199): Xaa in position 197 to 199 is any or no amino acid
  Variant (201)..(221): Xaa in position 201 to 221 is any amino acid
  Variant (222)..(223): Xaa in position 222 to 223 is any or no amino acid
  Variant (225)..(236): Xaa in position 225 to 236 is any amino acid
  Variant (237)..(238): Xaa in position 237 to 238 is any or no amino acid
  Variant (241)..(243): Xaa in position 241 to 243 is any amino acid
  Variant (245)..(247): Xaa in position 245 to 247 is any amino acid
  Variant (249)..(255): Xaa in position 249 to 255 is any amino acid
LXXXXXXXXQXXXXXLXXXXLXXKRXXEXXXXRXXXXXWXXDXXKQXXGXXXXHXXNXXXXXXXXXXXXXXXXXXXXXXXXXXXXXXXXXXXXXXXXCXXYXXNXXXDXTXGXXXXXXXXXXXXXXXXXXXXXXXXXXXXXXXXXXXXXXXXXXXXXXXXXXGXYXXXXXXXXXXXXXXXXXXXXXXXQXXXXXXXXXXMXXXXXXXXXXXXXXXXXXXXXXXLXXXXXXXXXXXXXXVMXXXPXXXNXXXXXXXD

SEQ ID NO: 154506 - protein, 25 aa, Artificial sequence
  protein pattern
  Variant (2)..(2): Xaa in position 2 is any amino acid
  Variant (3)..(3): Xaa in position 3 is Phe or Tyr
  Variant (5)..(5): Xaa in position 5 is any amino acid
  Variant (6)..(6): Xaa in position 6 is Gly or Ser
  Variant (9)..(10): Xaa in position 9 to 10 is any or no amino acid
  Variant (12)..(15): Xaa in position 12 to 15 is any amino acid
  Variant (16)..(17): Xaa in position 16 to 17 is any or no amino acid
  Variant (19)..(19): Xaa in position 19 is Phe, Ile, Leu or Met
  Variant (20)..(20): Xaa in position 20 is any amino acid
  Variant (22)..(22): Xaa in position 22 is Ile, Leu or Val
  Variant (23)..(23): Xaa in position 23 is any amino acid
  Variant (24)..(24): Xaa in position 24 is Ile, Leu or Met
  Variant (25)..(25): Xaa in position 25 is Ala or Ser
WXXDXXKQXXGXXXXXXHXXNXXXX

SEQ ID NO: 154507 - protein, 29 aa, Artificial sequence
  protein pattern
  Variant (2)..(2): Xaa in position 2 is Asp, Ser or Thr
  Variant (3)..(3): Xaa in position 3 is any amino acid
  Variant (5)..(5): Xaa in position 5 is Phe, Ile or Leu
  Variant (6)..(6): Xaa in position 6 is Ile or Leu
  Variant (8)..(9): Xaa in position 8 to 9 is any or no amino acid
  Variant (11)..(12): Xaa in position 11 to 12 is any or no amino acid
  Variant (14)..(14): Xaa in position 14 is Cys, Ser or Thr
  Variant (15)..(15): Xaa in position 15 is Ser or Thr
  Variant (16)..(16): Xaa in position 16 is Ile, Leu or Val
  Variant (18)..(18): Xaa in position 18 is Ile, Leu or Val
  Variant (19)..(19): Xaa in position 19 is any amino acid
  Variant (20)..(20): Xaa in position 20 is Phe, Ile or Val
  Variant (21)..(21): Xaa in position 21 is Ile or Leu
  Variant (22)..(24): Xaa in position 22 to 24 is any amino acid
  Variant (25)..(25): Xaa in position 25 is Phe, Ile or Leu
  Variant (26)..(28): Xaa in position 26 to 28 is any amino acid
  Variant (29)..(29): Xaa in position 29 is Glu, Asn, Gln or Thr
CXXYXXNXXLXXDXXXGXXXXXXXXXXXX

SEQ ID NO: 154508 - protein, 21 aa, Artificial sequence
  protein pattern
  Variant (3)..(3): Xaa in position 3 is Phe or Leu
  Variant (4)..(4): Xaa in position 4 is Ile or Val
  Variant (5)..(5): Xaa in position 5 is Phe, Ile or Val
  Variant (7)..(8): Xaa in position 7 to 8 is Phe, Ile, Leu or Val
  Variant (9)..(9): Xaa in position 9 is Leu, Met or Val
  Variant (11)..(11): Xaa in position 11 is any amino acid
  Variant (12)..(12): Xaa in position 12 is Phe, Ile or Leu
  Variant (13)..(17): Xaa in position 13 to 17 is any amino acid
  Variant (19)..(19): Xaa in position 19 is any amino acid
  Variant (20)..(20): Xaa in position 20 is Phe, Ile or Val
  Variant (21)..(21): Xaa in position 21 is Ile or Leu
VMXXXPXXXNXXXXXXXDXXX

SEQ ID NO: 154509 - DNA, 867 bp, ESCHERICHIA COLI
  CDS (1)..(867): transl_table=11
atggccgaaaaaaaacagtggcatgaaacgctacacgaccagtttgggcagtactttgcggtagataacgttctgtatcatgaaaagaccgatcaccaggatctgatcatttttgagaacgctgcatttggtcgcgtaatggcgctggatggcgtagtacaaaccaccgagcgcgacgagtttatctatcatgagatgatgacccatgttccgctactggcccatggtcacgcgaaacatgtgctgattatcggcggcggcgacggtgccatgctgcgtgaagtaacccgacataaaaacgttgagtcaatcacgatggtggaaatcgatgcgggtgtcgtatcgttctgccgtcagtatctacccaaccataacgccggtagctacgacgatccgcgctttaagctggtgatcgacgatggcgtcaatttcgttaatcaaaccagccagacctttgatgtcattatctccgactgcaccgatcctatcggtcccggcgaaagccttttcacttcggcattttatgaaggctgcaaacgttgcctgaatcctggcggtatcttcgtcgcacaaaacggcgtctgctttttacagcaggaagaagccatcgacagccatcgcaaactcagccattacttcagcgacgttggcttttatcaggcggcgatcccgacctattacggcggtatcatgacttttgcatgggcgacagataacgacgccttacgccatctctcaaccgaaattattcaggcgcgttttctcgcctctggcctgaaatgccgttattacaatccggcaatccatacggcagcttttgccttacctcagtatctgcaagacgcactggcttcacagccgtcctaa

SEQ ID NO: 154510 - protein, 288 aa, ESCHERICHIA COLI
MAEKKQWHETLHDQFGQYFAVDNVLYHEKTDHQDLIIFENAAFGRVMALDGVVQTTERDEFIYHEMMTHVPLLAHGHAKHVLIIGGGDGAMLREVTRHKNVESITMVEIDAGVVSFCRQYLPNHNAGSYDDPRFKLVIDDGVNFVNQTSQTFDVIISDCTDPIGPGESLFTSAFYEGCKRCLNPGGIFVAQNGVCFLQQEEAIDSHRKLSHYFSDVGFYQAAIPTYYGGIMTFAWATDNDALRHLSTEIIQARFLASGLKCRYYNPAIHTAAFALPQYLQDALASQPS

SEQ ID NO: 154511 - DNA, 957 bp, Zea mays
  CDS (1)..(957)
atggaagccgaggcggcggccaagaggacgcgggagagcggggaggacgccaccgcggcggggatctccgccgtcatcccgggatggttctccgagatcagccccatgtggcccggtgaggcgcactctttgaaggtggagaaggtgctgttccaagggaagtcagactaccaaaacgttatggtctttcagtcctctacgtacgggaaggtgctcgtccttgatggagttattcaggttacggagagggatgagtgtgcgtaccaagagatgatcactcacctgcccctttgctccatcaaagatcccaagaaggtgttggttattggagggggtgatggtggtgttctgcgtgaggtttcacggcattcctctgtggaacaaattgacatctgtgaaattgacaagatggtggtagatgtatccaaacaatttttccctcatttagctgttggatttgaagaccctcgtgtgtcattacacattggagatggggttgcctttttgaaaaatgctccagaaggtacttatgacgcagtaattgtggactcatctgatccgataggtcctgctcaagagctttttgagaagcctttcttccagttggtggccagagctttgcgtccaggtggagttgtatgcacccaagcagagagcatatggctacatatgcacattattgaagatattgttgtcaattgtcgacaagttttcaaaggctcggttaactatgcttggacaacggtgcctacataccctagcggagttattgggttcatgctttgctccaccgaagggcctgctgttgatttccagcaccctgttttcaacatcgaggaggatgaacatcctatgaaatcaaaaggaccccttaagttctacaactcggagatccacacggcatcattctgtttgccttcttttgcaaagagggtaatcgagtcaaaagcgaactag

SEQ ID NO: 154512 - protein, 318 aa, Zea mays
MEAEAAAKRTRESGEDATAAGISAVIPGWFSEISPMWPGEAHSLKVEKVLFQGKSDYQNVMVFQSSTYGKVLVLDGVIQVTERDECAYQEMITHLPLCSIKDPKKVLVIGGGDGGVLREVSRHSSVEQIDICEIDKMVVDVSKQFFPHLAVGFEDPRVSLHIGDGVAFLKNAPEGTYDAVIVDSSDPIGPAQELFEKPFFQLVARALRPGGVVCTQAESIWLHMHIIEDIVVNCRQVFKGSVNYAWTTVPTYPSGVIGFMLCSTEGPAVDFQHPVFNIEEDEHPMKSKGPLKFYNSEIHTASFCLPSFAKRVIESKAN

SEQ ID NO: 154513 - DNA, 1035 bp, Oryza sativa
  CDS (1)..(1035)
atggttggggccgtgcaggaagggatagtgcgtgagatgaacggaggattcgaggttatgagcgggtatgacaggtcgtccatggcgccgaagcagcagcagagggaggaggagagcaagtggtacgaggaggagatcgacgacgacctcaagctctgctacgctctcaacagtgtgttgcaccggggagcaagcaagtaccaggagatcgctctcattgatacaaagcattttggcaaggctctaataatcgatgggaagatgcagagtacagaggtggacgagttcatctaccatgagtccctcatacaccctcccctcctcttccatcccaacccaaagacggtgttcatcatgggaggcggcgagggttccgcggcgagggaggtgctccggcacaacaccgtccacagggtcgtcatgtgcgacatcgaccaggaggtggtggacttctgccggacgtacctgaccgtcaactgggacgccttcgccagcgacaagctctgcctcatcatcaacgacgccagggcggagctggagaagagtagggagaagttcgacgtgatagtgggagacttggctgacccagtggaggggggcccctgctaccagctctacaccaagtcattctaccaacacatcgtcaagcccaagctcaacgaccgcggcgtcttcgtcacccaggcagggccagccggcgttctgacccacaaggaggtcttctcctccatctacaacaccctcaggcatgtcttcaagtatgtcaaagcatacactgctcatgtgccatcctttgctgacacctggggctgggtcatggcatcagattatccatttagcatgaatgctcagcaaatcaatgagaggatcaaggagaggatagatggggagctggtgtacttgagtggggagtccctcatttcctctaccatattgaacaagagcgtttaccagtcgctgttgaatgagacgcatgtgtacaccgaggatgatgcaaggttcatctacggacatggaagggcacgttgtgcttga

SEQ ID NO: 154514 - protein, 344 aa, Oryza sativa
MVGAVQEGIVREMNGGFEVMSGYDRSSMAPKQQQREEESKWYEEEIDDDLKLCYALNSVLHRGASKYQEIALIDTKHFGKALIIDGKMQSTEVDEFIYHESLIHPPLLFHPNPKTVFIMGGGEGSAAREVLRHNTVHRVVMCDIDQEVVDFCRTYLTVNWDAFASDKLCLIINDARAELEKSREKFDVIVGDLADPVEGGPCYQLYTKSFYQHIVKPKLNDRGVFVTQAGPAGVLTHKEVFSSIYNTLRHVFKYVKAYTAHVPSFADTWGWVMASDYPFSMNAQQINERIKERIDGELVYLSGESLISSTILNKSVYQSLLNETHVYTEDDARFIYGHGRARCA

SEQ ID NO: 154515 - DNA, 1194 bp, Oryza sativa
  CDS (1)..(1194)
atggagggtggaggcgcaagaaatggctcgacgaccggggcggcgcggacaggggggagtgggggtgatgctgctgctggtggtggtggtggctccgccgggaacgggaagccgctgcccccttgctgcgtcaaggccagggcggcggcgcctgaatccgaggccaagtgccacgccaccgtggtgtccggatggttcaccgagccccgctcgcgcggcggtaaaacgagcaaagtgcagtattacaataacccgatgtggccaggagaggcccattcactgaaagttgagaagatcttgtatcaggggaagtcaccataccaagaagttttagtttttgagtcctcaacctatggaaaagttcttgtccttgatggtattgtccagttgactgataaggatgaatgtgcgtaccaggaaatgattactcaccttccgctttgctcaattccatccccaaagaaagttttggttattggaggtggtgatggtggagtccttcgggagatatgtagacatggttctgtggagtcaattgatatatgtgaaattgatcagctagttattgatgtttgtaaagatttcttcccagatttatctgttggattcaaagatcctcgtgttcggcttcatgttggtgatgctgtggagttcttaaggaatgctcctgaagggacatatgatgctattattgtcgattcatcagacccgattgggcctgcccaggaacttgtggagaagccattttttgacacaatcgcaagagctttgaggcctggtggtgttctttgtaatcaggctgagagcatgtggttgcatacgcatcttatccaggacatgctttcgatctgccgtgagacattcaagggttctgtccactatgcctggacgagtgtcccgacatatcccagtggtgtgattgggtttctgctatgtgccaaagaaggtccaccagtcaacttcctgactcctgcaaatccaattgaaaaactagaaggagctatggaagcaggaagggatattagattttataattcagagatgcatagagccgcatttgttctcccaacctttgcaaggagagagctagaggcgtattgtactaccgttgaaagggaacaacaagaagaaacaacggccgagcctctgaagatgaacattatgccgaacagtgaaattcttactgcttcctag

SEQ ID NO: 154516 - protein, 397 aa, Oryza sativa
MEGGGARNGSTTGAARTGGSGGDAAAGGGGGSAGNGKPLPPCCVKARAAAPESEAKCHATVVSGWFTEPRSRGGKTSKVQYYNNPMWPGEAHSLKVEKILYQGKSPYQEVLVFESSTYGKVLVLDGIVQLTDKDECAYQEMITHLPLCSIPSPKKVLVIGGGDGGVLREICRHGSVESIDICEIDQLVIDVCKDFFPDLSVGFKDPRVRLHVGDAVEFLRNAPEGTYDAIIVDSSDPIGPAQELVEKPFFDTIARALRPGGVLCNQAESMWLHTHLIQDMLSICRETFKGSVHYAWTSVPTYPSGVIGFLLCAKEGPPVNFLTPANPIEKLEGAMEAGRDIRFYNSEMHRAAFVLPTFARRELEAYCTTVEREQQEETTAEPLKMNIMPNSEILTAS

SEQ ID NO: 154517 - DNA, 1164 bp, Oryza sativa
  CDS (1)..(1164)
atggagggtggaggcgcaaaagatggttctgcagcggcagcgcaaacaagggggagtggggatgatggttcccacaagccgctgccgccttgctgtctcaaggcgaaggctgcggcagcagagtctgaggcaaaatgccatgccacagtggtgtcagggtggttcacggaaccccgctcgcactctggtaaaacaagcaaagtgcagtacttcaacaatccaatgtggcctggagaagctcattctctgaaagtagagaatattctgtatcaagggaaatcaccataccaagaaatcttagtttttgagtcctcaacctatgggaatgttctggtgcttgatggtattgtgcagctgaccgaaaaggatgaatgtgcataccaggaaatggttactcaccttccactgtgctcgattccatcccccaaaagtgttttggttgtcggaggtggtgatggtggtgtgctacgagaaatagccagacatgcctcagtggagaacatcgatatatgtgaaatagaccagctagttattgatgtctgtaaagatttcttcccacaactatctgttggattcaaagatccccgtgttcaacttcatgttggtgacgctgtggatttcttgagaaatgcccctgaagggaaatatgatgctatcattgttgattcatctgacccaattgggccagctcaggagcttgtggagaagcccttttttcagacaattgctagagctctaaagcctggtggagttctatgcaatcaagctgagagtatgtggctgcacacacatctaattcaagatatgctttctatctgtcgtgaaacattcaagggagctgtgcattatgcctggacaagcgttcctacctatcctagtggtgtcattggttttttgctatgtgcgaaagaaggtccagcagtgaacttcctttctcctgtgaatccaattgagaaactggaaggagctatggaagctggaagggaaatcagattttacaattcagaggttcatcgggctgcttttgttctgccaacatttgtaaggagagaactggaatcacacaatacttgtgctgaaaaggataaatcagaaaccaagccagtcgcgaaaccaaagaagatgaaaataatgccgaatagtgccattccgactgcttcctag

SEQ ID NO: 154518 - protein, 387 aa, Oryza sativa
MEGGGAKDGSAAAAQTRGSGDDGSHKPLPPCCLKAKAAAAESEAKCHATVVSGWFTEPRSHSGKTSKVQYFNNPMWPGEAHSLKVENILYQGKSPYQEILVFESSTYGNVLVLDGIVQLTEKDECAYQEMVTHLPLCSIPSPKSVLVVGGGDGGVLREIARHASVENIDICEIDQLVIDVCKDFFPQLSVGFKDPRVQLHVGDAVDFLRNAPEGKYDAIIVDSSDPIGPAQELVEKPFFQTIARALKPGGVLCNQAESMWLHTHLIQDMLSICRETFKGAVHYAWTSVPTYPSGVIGFLLCAKEGPAVNFLSPVNPIEKLEGAMEAGREIRFYNSEVHRAAFVLPTFVRRELESHNTCAEKDKSETKPVAKPKKMKIMPNSAIPTAS

SEQ ID NO: 154519 - DNA, 972 bp, Oryza sativa
  CDS (1)..(972)
atggaggccgaggcggcggcgaagagggcgcgggagagcggtgacgcggcggcggccggtgccggcgagcaggcgggtatctctgccgtcatccctggatggttctccgagattagccccatgtggcctggtgaggcacactcattgaaggtcgaaaaggtactattccaaggaaagtcggactaccaaaatgtgatggtgtttcagtcctccacgtacggcaaggtgcttgtgctggatggagtgattcaggtcactgagagggatgagtgtgcttaccaagagatgattacccacctccccctttgctctatcaaagatcccaagaaggtgttagttattggaggtggagatggtggtgttttgcgtgaagtttcacgacattcctcggtggagcaaattgacatatgtgaaattgataagatggtggtagatgtctccaaacaattttttcctcatctggctgttggatttgaagacccccgtgtgtcattacacattggagatggcgtggcctttttgaaaaatgctccagagggtacttatgatgcagttattgtggattcctctgatccaataggaccggctcaagagcttttcgagaagcctttcttccagtcagttgccagagctttgcgtcctggtggtgttgtatgtacccaggcagagagcatatggttgcatatgcatattattgaagatattgtagctaattgtcgccaagtttttaaaggctcagtgaattatgcttggacaacagtaccaacataccctagtggtgttattggttttatgctttgctccaccgaggggcctactgttgatttccagcatcctatttttaacattgaggataatgagttctcaacaaaatcgaaaggaccacttaagttctacaattccgagatccactcagcatcattttgtttgccgtcttttgcgaagagagtcattggatccaaggccaactag

SEQ ID NO: 154520 - protein, 323 aa, Oryza sativa
MEAEAAAKRARESGDAAAAGAGEQAGISAVIPGWFSEISPMWPGEAHSLKVEKVLFQGKSDYQNVMVFQSSTYGKVLVLDGVIQVTERDECAYQEMITHLPLCSIKDPKKVLVIGGGDGGVLREVSRHSSVEQIDICEIDKMVVDVSKQFFPHLAVGFEDPRVSLHIGDGVAFLKNAPEGTYDAVIVDSSDPIGPAQELFEKPFFQSVARALRPGGVVCTQAESIWLHMHIIEDIVANCRQVFKGSVNYAWTTVPTYPSGVIGFMLCSTEGPTVDFQHPIFNIEDNEFSTKSKGPLKFYNSEIHSASFCLPSFAKRVIGSKAN

SEQ ID NO: 154521 - DNA, 960 bp, Oryza sativa
  CDS (1)..(960)
atggaggccgaggcggcggcgaagagggcgcgggagagcggtgacgcggcggcggccggtgccggcgagcaggcgggtatctctgccgtcatccctggatggttctccgagattagccccatgtggcctggtgaggcacactcattgaaggtcgaaaaggtactattccaaggaaagtcggactaccaaaatgtgatggtgtttcagtcctccacgtacggcaaggtgcttgtgctggatggagtgattcaggtcactgagagggatgagtgtgcttaccaagagatgattacccacctccccctttgctctatcaaagatcccaagaaggtgttagttattggaggtggagatggtggtgttttgcgtgaagtttcacgacattcctcggtggagcaaattgacatatgtgaaattgataagatggtggtagatgtctccaaacaattttttcctcatctggctgttggatttgaagacccccgtgtgtcattacacattggagatggcgtggcctttttgaaaaatgctccagagggtacttatgatgcagttattgtggattcctctgatccaatagagcttttcgagaagcctttcttccagtcagttgccagagctttgcgtcctggtggtgttgtatgtacccaggcagagagcatatggttgcatatgcatattattgaagatattgtagctaattgtcgccaagtttttaaaggctcagtgaattatgcttggacaacagtaccaacataccctagtggtgttattggttttatgctttgctccaccgaggggcctactgttgatttccagcatcctatttttaacattgaggataatgagttctcaacaaaatcgaaaggaccacttaagttctacaattccgagatccactcagcatcattttgtttgccgtcttttgcgaagagagtcattggatccaaggccaactag

SEQ ID NO: 154522 - protein, 319 aa, Oryza sativa
MEAEAAAKRARESGDAAAAGAGEQAGISAVIPGWFSEISPMWPGEAHSLKVEKVLFQGKSDYQNVMVFQSSTYGKVLVLDGVIQVTERDECAYQEMITHLPLCSIKDPKKVLVIGGGDGGVLREVSRHSSVEQIDICEIDKMVVDVSKQFFPHLAVGFEDPRVSLHIGDGVAFLKNAPEGTYDAVIVDSSDPIELFEKPFFQSVARALRPGGVVCTQAESIWLHMHIIEDIVANCRQVFKGSVNYAWTTVPTYPSGVIGFMLCSTEGPTVDFQHPIFNIEDNEFSTKSKGPLKFYNSEIHSASFCLPSFAKRVIGSKAN

SEQ ID NO: 154523 - DNA, 1008 bp, Glycine max
  CDS (1)..(1008)
atggctgatgagagcgtcgttgagtccccagtgaagaggcagagagatgatgatgaagaaaatgaggtctctgtttccatggatgtggagggtggcaaagaccctcttagtaacggtttatcatctgtgattcctgggtggttctctgaaattagttcaatgtggcctggagaggctcactccttgaaggtggaaaagattttgtttcaaggaaagtctgaataccagaatgtcatggtcttccagtcatcaacatatggcaaggttcttgttttagatggagtaattcagctaacagaaagggatgaatgtgcctaccaagaaatgatcactcatcttcctctttgctctattccaaaccccaaaaaggttttggttatcggtggaggtgatggaggggtcatacgagaagtagcacaccattcttcagttgaaaagatagacatttgtgaaattgacaagatggttgttgatgtctccaaacaatacttccctgatgtagctgttgggtatgatgatcctcgtgtgacacttcatattggtgatggagttgcatttctgaaggaagttcctgaaggaacttatgatgctgttatagtggattcatccgatcctattggtcctgctcaagagctttttgaaaagcccttcttttcgtcagttgcaaaggctcttcgtccaggtggagttgtgtgcactcaggcagaaagcatatggcttcatatggatataattgaggacattgtggctaattgtcgccagatttttaaaggctctgtcaactatgcttggactactgttcctacatacccaagtgggatgattggttttatgctttgctcaactgagggaccacctgttgatttcaagcatccagtgaatcccatagatgaaaatgagagtcagaagtcagtaagaccgctgaaattttacaactctgagattcataccgcagctttctgcttgccgtcgtttgcgaagaggaagattggttctaaagcaaattaa

SEQ ID NO: 154524 - protein, 335 aa, Glycine max
MADESVVESPVKRQRDDDEENEVSVSMDVEGGKDPLSNGLSSVIPGWFSEISSMWPGEAHSLKVEKILFQGKSEYQNVMVFQSSTYGKVLVLDGVIQLTERDECAYQEMITHLPLCSIPNPKKVLVIGGGDGGVIREVAHHSSVEKIDICEIDKMVVDVSKQYFPDVAVGYDDPRVTLHIGDGVAFLKEVPEGTYDAVIVDSSDPIGPAQELFEKPFFSSVAKALRPGGVVCTQAESIWLHMDIIEDIVANCRQIFKGSVNYAWTTVPTYPSGMIGFMLCSTEGPPVDFKHPVNPIDENESQKSVRPLKFYNSEIHTAAFCLPSFAKRKIGSKAN

SEQ ID NO: 154525 - DNA, 1008 bp, Glycine max
  CDS (1)..(1008)
atggctgatgagagcgttgttgagtccccagtgaagaggcagagagatgatggtgaagaaaatggtgtctctgtttccatggacgcggagggtggcaaagaccctcttagtaacggtttatcatctgtgattcctgggtggttctctgaaatcagtgcaatgtggcctggagaggctcactccttgaaggtggaaaagattttgtttcaaggaaagtcagaataccaaaatgtcatggtcttccagtcatcaacatatggcaaggttcttgttttggatggagtaattcagctaacagaaagggatgaatgtgcctaccaagaaatgatcactcatcttcctctttgctctattccaaaccctaaaaaggttttggttatcggtggaggtgatggaggggtcatacgagaagtagcacgccattcttcagttgaaaagatagacatttgtgaaattgacaagatggttgttgatgtctccaaacaatacttccctgatgtagctgttgggtatgatgatcctcgtgtgacacttcatattggtgatggagttgcatttttgaaggaagttccagaaggaacttatgatgctgttatagtggattcatccgaccctattggtcctgctcaggagctttttgaaaagcccttctttgcgtcagttgcaaaggctctttgtcccggtggagttgtgtgtactcaggcagaaagcatttggcttcatatggatataattgaggacattgtggccaattgtcgccagatttttaaaggctctgtcaactatgcttggactactgttcctacatacccaagtgggatgattggttttatgctttgctcaactgagggaccacctgttgatttcaagcatccagttaatcccatagatgaaaatgagagtcagaagtcagtaagaccactgaaattttacaactctgagattcatacagcagctttctgtttgccgtcatttgcaaagaggaagattagttctaaagcaaattaa

SEQ ID NO: 154526 - protein, 335 aa, Glycine max
MADESVVESPVKRQRDDGEENGVSVSMDAEGGKDPLSNGLSSVIPGWFSEISAMWPGEAHSLKVEKILFQGKSEYQNVMVFQSSTYGKVLVLDGVIQLTERDECAYQEMITHLPLCSIPNPKKVLVIGGGDGGVIREVARHSSVEKIDICEIDKMVVDVSKQYFPDVAVGYDDPRVTLHIGDGVAFLKEVPEGTYDAVIVDSSDPIGPAQELFEKPFFASVAKALCPGGVVCTQAESIWLHMDIIEDIVANCRQIFKGSVNYAWTTVPTYPSGMIGFMLCSTEGPPVDFKHPVNPIDENESQKSVRPLKFYNSEIHTAAFCLPSFAKRKISSKAN

SEQ ID NO: 154527 - DNA, 1023 bp, Glycine max
  CDS (1)..(1023)
atggctgcggaaaacgttgtagagttcacagacttacccgtcaagagacctagagaagaagaagaagaagaacaaaccaatggagtctccaacgacgccgtttcaacgctacccaatgaccctcaataccctggtatctctgctgttattcccggttggttctcagaaatcagcccaatgtggcctggggaggcgcactccttgaaggtggaaaagattttgtttcaagggaagtctgactatcagaatgtcatggtcttccagtcatcaacatatggcaaggttcttgttttggatggagtcattcagctcacagaaagggatgagtgtgcctaccaagagatgatcactcatcttcctctttgctctatttcaaaccccaaaaaggttttggttattggtggaggagatggtggagtcctgcgggaagtagctcgtcatgcctcagtagagaagatagacatttgtgaaatagacaagatggttgtcgatgtctctaaacaatttttccctgatatagcagtaggttttgaggacccacgtgtaacacttactgttggtgatggagttgcattcttgaagaatgttccagaaggaacttacgatgcagttatagtggattcatccgaccctattggccctgctcaagagctgtttgaaaaacccttttttgcgtccgttgcaaaggctcttcgtcctggaggagttgtgtgtactcaagcagaaagtatatggcttcatatgcacatcattgaggacattgtggctaattgtcgccaaatattcaaaggttctatcaactatgcatggaccacagttcctacatacccaagtgggatgattggttttatgctttgctcaactgagggtcctcttgttgatttcaagcatccagtgaatcctataaatgagaatgatagtcagcaatcaagaccattgaaattttacaactctgagattcatacagcggctttctgtttgccatcttttgctaagaggaagattggttctaaaacaaattga

SEQ ID NO: 154528 - protein, 340 aa, Glycine max
MAAENVVEFTDLPVKRPREEEEEEQTNGVSNDAVSTLPNDPQYPGISAVIPGWFSEISPMWPGEAHSLKVEKILFQGKSDYQNVMVFQSSTYGKVLVLDGVIQLTERDECAYQEMITHLPLCSISNPKKVLVIGGGDGGVLREVARHASVEKIDICEIDKMVVDVSKQFFPDIAVGFEDPRVTLTVGDGVAFLKNVPEGTYDAVIVDSSDPIGPAQELFEKPFFASVAKALRPGGVVCTQAESIWLHMHIIEDIVANCRQIFKGSINYAWTTVPTYPSGMIGFMLCSTEGPLVDFKHPVNPINENDSQQSRPLKFYNSEIHTAAFCLPSFAKRKIGSKTN

SEQ ID NO: 154529 - DNA, 855 bp, Glycine max
  CDS (1)..(855)
atggccgaaaaagagacctggcatgagacgctgcatagcggctttggccaatatttcagcgtagacaatctgctataccgcgataaaaccgcgcatcaggatctggtgatctttgagaacgccgcgtttggccgcgtgatggcgctggacggcgtggtgcaaaccaccgagcgcgatgagtttatctatcacgaaatgatgacgcacgtgccgattctggcgcacggcaatgcccggcgcgtattgattatcggcggcggtgacggcgcgatgctgcgcgaggtcgcccggcatcagcgcgttgagcacatcaccatggtggaaattgatgccggcgtggtgaatttctgtcaaacctatctgcctaaccacagcgccggcgcctatgacgatccgcgtctgcagctggtgatcgacgatggtgttaacttcgtcagccagacgcaggaacggtttgatgtgatcatctccgactgtaccgatccaatcggtcccggcgagagtctgttcacctcggcgttttatgccggctgcaaacaggcgctcaatcccggtggcgtgtttgtcgcgcagaacggcgtctgcttcctgcagcaggatgaagcggtcaacagccaccgcaaactcagccactatttcgctgacgtcagcttttatcaggcggcgattccgacctactacggcggcatcatgacctttgcctgggcgagcgataatccggcgctgcgccagccggaccttgcgacgctgcagtcacgttttgccgcggccggactgccctgccgttactacacgccacagctgcacatcggcagctttgccctgccgcaatatcttttaaacgcgctcagctga

SEQ ID NO: 154530 - protein, 284 aa, Glycine max
MAEKETWHETLHSGFGQYFSVDNLLYRDKTAHQDLVIFENAAFGRVMALDGVVQTTERDEFIYHEMMTHVPILAHGNARRVLIIGGGDGAMLREVARHQRVEHITMVEIDAGVVNFCQTYLPNHSAGAYDDPRLQLVIDDGVNFVSQTQERFDVIISDCTDPIGPGESLFTSAFYAGCKQALNPGGVFVAQNGVCFLQQDEAVNSHRKLSHYFADVSFYQAAIPTYYGGIMTFAWASDNPALRQPDLATLQSRFAAAGLPCRYYTPQLHIGSFALPQYLLNALS

SEQ ID NO: 154531 - DNA, 1512 bp, Zea mays subsp. mays
  CDS (430)..(1281)
  misc_feature (262)..(262): r is g or a
  misc_feature (283)..(283): h is a, c or t
  misc_feature (284)..(284): n is a, g, c or t
  misc_feature (290)..(290): r is g or a
  misc_feature (304)..(304): r is g or a
  misc_feature (314)..(314): r is g or a
  misc_feature (345)..(345): n is a, g, c or t
  misc_feature (347)..(347): n is a, g, c or t
  misc_feature (354)..(354): r is g or a
  misc_feature (949)..(949): s is g or c
ctaccggacagtgaggcgccgcttgccctccacatacggccgcggcgaggaacccaaaaggccaaaaccctcccaaaagctactacacagtacacacacggaacggaatccgggcatccgggaaagcagccctaatctcaaggccgcggctgcgagcgctgcttcccacctcccaactccagaagtcctccctagacgccgccagccgcgcgcacacccaccgagagctcctcgggctttctttctccgttcctccctcgcrcgctcagggtttcacgatgghngccgargcggcggccaagarggcgcgggarggcggggaggacgccaccgcgccggtggcgngnggccgargcggtggtcgccggtgctggcgagcaggcgggaatctccgccgtcatcccaggatggttctccgagatcagccccatgtggcccggtgaggcgcactccttgaaggtggagaaggttctgttccagggcaagtcagactaccaaaatgtgatggtttttcagtcctccacgtacgggaaggtgcttgtcctcgacggagttattcaggtgacagagagggatgagtgcgcgtaccaagagatgattactcacctgcccctttgctccatcaaagaccccaagaaggtgttggttattggagggggggatggtggtgttttgcgtgaggtttcacggcatatctctgtggagcagattgacatctgtgaaattgataagatggtggtagatgtctccaagcaatttttccctcatctagctgttggatttgaagaccctcgtgtgtcattacacattggagatggggttgccttcttgaaaaatgttccagagggtacatatgatgcagtaattgtggattcttctgatccgataggtcctgctcaggagctttttgagaagcctttcttccagtcggtggccagagctttgcgtscaggtggagttgtatgcacccaggcagagagcatatggctacatatgcacatcattgaagatattttcgtcaattgccgccaagttttcaaaggctcagttaactatgcttggacaacagtacctacataccctagcggagttattgggttcatgctttgctccaccgaagggcctgctgttgatttccagcaccctgttttcaacatcgaggaggatgaacattctacgaaatcaaaaggaccccttaagttctacaactcggagatccacacggcatcattctgtttgccctcttttgcaaagagggtaattgagtcaaaggcaagctagacgtgaggatacttcaccaagtccagtcgattgggttaagtaccttaggcgcaacacaaaatttttgtcgtgtgaaaatgggatgcctccctcccccaccccccacttgatgaataagcacatgagatgagatgcaacggttatcggagttgtcagtctatacgattctgtctgttgtatgtgccggctgccaggtgcagctatgaaaacgttttgcaatagctgttttcg

SEQ ID NO: 154532 - protein, 283 aa, Zea mays subsp. mays
  misc_feature (174)..(174): The Xaa at location 174 stands for Ala, or Pro.
MWPGEAHSLKVEKVLFQGKSDYQNVMVFQSSTYGKVLVLDGVIQVTERDECAYQEMITHLPLCSIKDPKKVLVIGGGDGGVLREVSRHISVEQIDICEIDKMVVDVSKQFFPHLAVGFEDPRVSLHIGDGVAFLKNVPEGTYDAVIVDSSDPIGPAQELFEKPFFQSVARALRXGGVVCTQAESIWLHMHIIEDIFVNCRQVFKGSVNYAWTTVPTYPSGVIGFMLCSTEGPAVDFQHPVFNIEEDEHSTKSKGPLKFYNSEIHTASFCLPSFAKRVIESKAS

SEQ ID NO: 154533 - DNA, 1170 bp, Zea mays
  CDS (1)..(1170)
atggaggttggagacgcaagaaacggttctgcagcagcggcactgacaaagggaggtgcggatgatgccgcccgcaaaccgctccctccttgctgcgtcaaggccaaggcgcgggtgcctgaaaccgaggccaactgccatgatactgtggtttcagggtggttcacggaacccagatcgcgttttggtaaaacaagcaaagtgcagtacttcaataacccgatgtggcctggagaggcccattcattgaaagtggagaagatcttgtttcaagggaaatcgccttaccaagaaattttagtttttgagtcttcaacctatggaaatgttcttgtgcttgatggtatagttcagttgactgacaaggatgaatgcgcataccaggaaatggttactcaccttccactgtgctcaattcctgcaccgaagaatgttttggttgttggaggtggtgatggtggtgtactgcgcgaaatagccagacatgattcagtggaaactattgatatatgtgagattgatcaactagttattgatgtttccaaagaattctttccaaacttatccattggattcaaagatcctcgtgtccgacttcatgttggtgatgctgttgatttcctgaggaattctcccgaaggaaaatatgatgctattattgtagattcatcagatccaattgggccagcacaggcactcgtggagaaaccgtttattcagacaattgctagagctttgaagcctggtggtgttctttgtaatcttgctgagagcatgtggctgcacacacatctaatccaggatatgcttgctatctgtcgacagacattcaaaggtgctgtgcactatgcctggacaagtgttccaacatatcccagtggtgtcattggatttttgctatgtgcaaaagaaggtcgtgcagtgaacttcttgactcctgcgaatccaattgagaaaatagaaggagcagcaaaagctggaagggaactcagattttacaattccgagatccatagggctgcttttgttctgccaacatttgtaagaagagaactggaagcatataccactcctattagttctgctgaaaacgagaaaccgaaagaatcagtgtcagaaccgcagaagataaagatattgtcaaacaacgccattcttacagcttcctag

SEQ ID NO: 154534 - protein, 389 aa, Zea mays
MEVGDARNGSAAAALTKGGADDAARKPLPPCCVKAKARVPETEANCHDTVVSGWFTEPRSRFGKTSKVQYFNNPMWPGEAHSLKVEKILFQGKSPYQEILVFESSTYGNVLVLDGIVQLTDKDECAYQEMVTHLPLCSIPAPKNVLVVGGGDGGVLREIARHDSVETIDICEIDQLVIDVSKEFFPNLSIGFKDPRVRLHVGDAVDFLRNSPEGKYDAIIVDSSDPIGPAQALVEKPFIQTIARALKPGGVLCNLAESMWLHTHLIQDMLAICRQTFKGAVHYAWTSVPTYPSGVIGFLLCAKEGRAVNFLTPANPIEKIEGAAKAGRELRFYNSEIHRAAFVLPTFVRRELEAYTTPISSAENEKPKESVSEPQKIKILSNNAILTAS

SEQ ID NO: 154535 - DNA, 1002 bp, Zea mays
  CDS (1)..(1002)
atggaggccgaggcggcggccaagagggcgcgggagggcggggaggacgccaccgcgccggtggcgggggccgaggcggtggtcgccggtgctggcgagcaggcgggaatctccgccgtcatcccaggatggttctccgagatcagccccatgtggcccggtgaggcgcactccttgaaggtggagaaggttctgttccagggcaagtcagactaccaaaatgtgatggtttttcagtcctccacgtacgggaaggtgcttgtcctcgacggagttattcaggtgacagagagggatgagtgcgcgtaccaagagatgattactcacctgcccctttgctccatcaaagaccccaagaaggtgttggttattggagggggggatggtggtgttttgcgtgaggtttcacggcatatctctgtggagcagattgacatctgtgaaattgataagatggtggtagatgtctccaagcaatttttccctcatctagctgttggatttgaagaccctcgtgtgtcattacacattggagatggggttgccttcttgaaaaatgctccagagggtacatatgatgcagtaattgtggattcttctgatccgataggtcctgctcaggagctttttgagaagcctttcttccagtcggtggccagagctttgcgtccaggtggagttgtatgcacccaggcagagagcatatggctacatatgcacatcattgaagatattttcgtcaattgccgccaagttttcaaaggctcagttaactatgcttggacaacagtacctacataccctagcggagttattgggttcatgctttgctccaccgaagggcctgctgttgatttccagcaccctgttttcaacatcgaggaggatgaacattctacgaaatcaaaaggaccccttaagttctacaactcggagatccacacggcatcattctgtttgccctcttttgcaaagagggtaattgagtcaaaggcaagctag

SEQ ID NO: 154536 - protein, 333 aa, Zea mays
MEAEAAAKRAREGGEDATAPVAGAEAVVAGAGEQAGISAVIPGWFSEISPMWPGEAHSLKVEKVLFQGKSDYQNVMVFQSSTYGKVLVLDGVIQVTERDECAYQEMITHLPLCSIKDPKKVLVIGGGDGGVLREVSRHISVEQIDICEIDKMVVDVSKQFFPHLAVGFEDPRVSLHIGDGVAFLKNAPEGTYDAVIVDSSDPIGPAQELFEKPFFQSVARALRPGGVVCTQAESIWLHMHIIEDIFVNCRQVFKGSVNYAWTTVPTYPSGVIGFMLCSTEGPAVDFQHPVFNIEEDEHSTKSKGPLKFYNSEIHTASFCLPSFAKRVIESKAS

SEQ ID NO: 154537 - DNA, 1086 bp, Zea mays
  CDS (1)..(1086)
atggcgtggcgagcaaacccaaaaccctcgcaggcagaaggcaaacgcggctgcgagcgcggcgccccctcccactatccagccgccgccagcccgcacacccctccctcgcgcgctcagggtttcggaatggaggccgatgcggcggccaagaggacgcgggagagcggggaggacgccaccgcggcggggatctccgccgtcatcccgggatggttctccgagatcagccccatgtggcccggtgaggcgcactctttgaaggtggagaaggtgctgttccaagggaagtcagactaccaaaacgttatggtctttcagtcctctacgtacgggaaggtgctcgtccttgatggagttattcaggttacggagagggatgagtgtgcgtaccaagagatgatcactcacctgcccctttgctccatcaaagatcccaagaaggtgttggttattggagggggtgatggtggtgttctgcgtgaggtttcacggcattcctctgtggaacaaattgacatctgtgaaattgacaagatggtggtagatgtatccaaacaatttttccctcatttagctgttggatttgaagaccctcgtgtgtcattacacattggagatggggttgcctttttgaaaaatgctccagaaggtacttatgacgcagtaattgtggactcatctgatccgataggtcctgctcaagagctttttgagaagcctttcttccagttggtggccagagctttgcgtccaggtggagttgtatgcacccaagcagagagcatatggctacatatacacattattgaagatattgttgtcaattgtcgacaagttttcaaaggctcggttaactatgcttggacaacggtgcctacataccctagcggagttattgggttcatgctttgctccaccgaagggcctgctgttgatttccagcaccctgttttcaacatcgaggaggatgaacatcctatgaaatcaaaaggaccccttaagttctacaactcggagatccacacggcatcattctgtttgccttcttttgcaaagagggtaatcgagtcaaaagcgaactag

SEQ ID NO: 154538 - protein, 361 aa, Zea mays
MAWRANPKPSQAEGKRGCERGAPSHYPAAASPHTPPSRAQGFGMEADAAAKRTRESGEDATAAGISAVIPGWFSEISPMWPGEAHSLKVEKVLFQGKSDYQNVMVFQSSTYGKVLVLDGVIQVTERDECAYQEMITHLPLCSIKDPKKVLVIGGGDGGVLREVSRHSSVEQIDICEIDKMVVDVSKQFFPHLAVGFEDPRVSLHIGDGVAFLKNAPEGTYDAVIVDSSDPIGPAQELFEKPFFQLVARALRPGGVVCTQAESIWLHIHIIEDIVVNCRQVFKGSVNYAWTTVPTYPSGVIGFMLCSTEGPAVDFQHPVFNIEEDEHPMKSKGPLKFYNSEIHTASFCLPSFAKRVIESKAN

SEQ ID NO: 154539 - DNA, 1164 bp, Zea mays
  CDS (1)..(1164)
atggctggaggcgcaggaaatggttcgaacgaggcggtgcaggcaaaggggagtgggggtgatagctccgccgccaagccgctgcccccttgctgcgtcaaggcgagagcggcggcgcccgagtctgaggccaagtgccatgccaccgtggtttcgggatggttcaccgagccacgatcacactgcggtaaagccagcaaggttcagtattacaataacccaatgtggccaggagaggcccattccttgaaagtggagaacatattgtaccaggggaaatcaccataccaggaagtcctggtctttgagtcgtcaacctatgggaaagtccttgtgcttgatggtattgttcaattgactgataaggatgaatgtgcgtaccaggaaatgattactcacctcccactctgttcaattccatcccctaaaaaggttttggttattggtggtggtgatggaggtgtacttcgagagatttccagacacagttcagtggagtctattgacatatgtgaaattgatcagctggttattgatatctgcaaggaattcttcccacatttgtctgttggatttgaagatcctcgtgttcaacttcatgttggtgacgctgtggagttcttgagaaatgctcctgaagggacatatgatgctatcattgttgattcatctgacccaatagggcctgctcaggaacttgtggagaagcctttttttgagaccatcgctagagctttgaggcctggtggtgttctttgtaatcaagctgagagtatgtggttgcatacacatttgattcaggacatgctttcaatttgccgtgagactttcaagggttctgtccgctatgcatgggctagtgtcccaacatacccgagtggggtgattgggtttctgttatgcgccaaggatggcccaccggtcaactttctgactcctgtaaatccaattgaagaagtggaaggagctactaaagcgggaagggagatcaggttttataattcagagatgcatatggcagcgtttgttcttccgacatttgccaagagggagctagaagcatactgtgcttccacggaaacggagcaggcggaggaagtagcggccacggcaccacaaaagctaactgcggcgcccaagcgtggaattaccaccgcatcctag

SEQ ID NO: 154540 - protein, 387 aa, Zea mays
MAGGAGNGSNEAVQAKGSGGDSSAAKPLPPCCVKARAAAPESEAKCHATVVSGWFTEPRSHCGKASKVQYYNNPMWPGEAHSLKVENILYQGKSPYQEVLVFESSTYGKVLVLDGIVQLTDKDECAYQEMITHLPLCSIPSPKKVLVIGGGDGGVLREISRHSSVESIDICEIDQLVIDICKEFFPHLSVGFEDPRVQLHVGDAVEFLRNAPEGTYDAIIVDSSDPIGPAQELVEKPFFETIARALRPGGVLCNQAESMWLHTHLIQDMLSICRETFKGSVRYAWASVPTYPSGVIGFLLCAKDGPPVNFLTPVNPIEEVEGATKAGREIRFYNSEMHMAAFVLPTFAKRELEAYCASTETEQAEEVAATAPQKLTAAPKRGITTAS

SEQ ID NO: 154541 - DNA, 903 bp, Saccharomyces cerevisiae
  CDS (1)..(903)
atggttaataattcacagcatccttacatcaaagatggatggtttagagagattaatgataaaagttttccgggccaggcctttactatgaccgtggactcaatactttatgaagcccgcagtgaatttcaggacatcttaatcttccgtaacaaggtatacggtactgttttggtcctcgatggtattgtccaatgtacggaatttgatgagtttgcctatcaagagatgatcacccacattgccatgtttgcgcattctaatcccaagcgtgtacttatcattggcggtggggacggaggtgtcttaagggaagtagccaagcacagctgtgtagaagatatcactatggtagaaattgactcatcagtgatcgaattatcccgtaagttcttgcccacattgagtaatggtgctttcgatgacgaaaggttggacttgaaactttgcgatggcttcaagttcttacaagatataggtgcttccgacgtccataagaaatttgacgtcattattacagatagttctgatcctgaaggtccagctgaagcgttttttcaagagaggtatttcgaactattgaaagatgctttaaatcctaatggcgttgttattatgcaaagctctgaaaatttttggttaaatttaaaatacttacatgatttgaaaaatacagccaaaaaggtatttcctaatacagaatattgctataccatggttccaacctatacatctggccaattaggtttaattgtttgcagtaataacgccaatataccgttgaacattccgcaaagaaagatatctgagcaagaacaagggaagctgaagtactataatcctcaaatacattctagtgcgtttgttttgcctacttgggcagacaaggtcattaatgaatga

SEQ ID NO: 154542 - protein, 300 aa, Saccharomyces cerevisiae
MVNNSQHPYIKDGWFREINDKSFPGQAFTMTVDSILYEARSEFQDILIFRNKVYGTVLVLDGIVQCTEFDEFAYQEMITHIAMFAHSNPKRVLIIGGGDGGVLREVAKHSCVEDITMVEIDSSVIELSRKFLPTLSNGAFDDERLDLKLCDGFKFLQDIGASDVHKKFDVIITDSSDPEGPAEAFFQERYFELLKDALNPNGVVIMQSSENFWLNLKYLHDLKNTAKKVFPNTEYCYTMVPTYTSGQLGLIVCSNNANIPLNIPQRKISEQEQGKLKYYNPQIHSSAFVLPTWADKVINE

SEQ ID NO: 154543 - DNA, 882 bp, Saccharomyces cerevisiae
  CDS (1)..(882)
atggcacaagaaatcactcacccaactattgtagacggctggttcagagaaatttctgataccatgtggccaggccaggccatgactttaaaagtggagaaagttttacaccatgagaagtcaaaatatcaagacgttttgatcttcaaatccactacatatggtaatgttctagttttagataatgtaattcaagccaccgaaagggatgaatttgcctaccaagaaatgattgcccatcttgccttgaattcccatccaaatcctaagaaggttcttgttattggtgggggtgatggtggtgttttgagagaggttgtcaagcatgattccgttgaggaagcctggttatgtgacattgatgaagctgttattagactatcaaaggagtacctaccagaaatggctgcctcttattctcacccaaaggttaagacccacattggtgatggtttccaatttttaagagattaccaaaacacatttgacgtaatcattactgactcttctgacccagaaggtccagctgaaacccttttccaaaaggaatatttccaattgttgaacagtgcgttgacagaaaagggtgtaatcactacacaagcagaaagtatgtggattcacttgccaatcattaaggacttaaagaaagcctgttctgaagttttcccagttgcagaatactctttcgttactattccaacttacccaactggtacgattggttttatggtttgctccaaagataaaacttgcaatgtcaagaagccactacgtgaaatctctgatgagaaggaggctgaattatacagatactataacaagaaaattcacgaagcttcctttgttctaccaacctgggcagccaaggaattaaattag

SEQ ID NO: 154544 - protein, 293 aa, Saccharomyces cerevisiae
MAQEITHPTIVDGWFREISDTMWPGQAMTLKVEKVLHHEKSKYQDVLIFKSTTYGNVLVLDNVIQATERDEFAYQEMIAHLALNSHPNPKKVLVIGGGDGGVLREVVKHDSVEEAWLCDIDEAVIRLSKEYLPEMAASYSHPKVKTHIGDGFQFLRDYQNTFDVIITDSSDPEGPAETLFQKEYFQLLNSALTEKGVITTQAESMWIHLPIIKDLKKACSEVFPVAEYSFVTIPTYPTGTIGFMVCSKDKTCNVKKPLREISDEKEAELYRYYNKKIHEASFVLPTWAAKELN

SEQ ID NO: 154545 - DNA, 1023 bp, Arabidopsis thaliana
  CDS (1)..(1023)
atgtcttcaacacaagaagcgtctgttactgatttgcccgtgaagagacctagagaagcagaggaggacaataacggcggcgccatggaaacagagaacggtggaggagagataaaggagccttcttgtatgtcctctattattcctggatggttctctgagattagtcctatgtggccaggagaagcacattctctcaaggtagagaagattctattccaagggaaatcagattaccaggatgttattgttttccagtctgcaacatatggaaaggttttggttttggatggagtgattcaactcactgagagagatgaatgtgcgtatcaagaaatgatcactcatcttcctttgtgctctatctccaaccccaaaaaggtactggtgattggaggaggagatggaggagtcctgagggaagtggcacgtcatagttctgttgagcagattgacatttgtgaaatagataaaatggtggttgatgtggctaagcagtatttccctaatgtagcagttggatacgaggatcctcgtgtcaacctcatcattggcgatggtgttgctttcttgaagaacgctgctgaaggaacctatgatgcagttattgttgattcatctgatccaatcggtccagcaaaagagctatttgagaaacctttctttgagtcagtgaatagagctcttcgtcctggtggagttgtgtgcacacaagctgaaagcttgtggcttcacatggatatcattgaagacattgtttctaattgccgtgacatctttaaaggatctgttaactacgcttggaccagtgttccaacttacccgagtggagtcattggattcatgctttgttcatctgaaggaccacaagtcgatttcaagaagccagtgagtctaatcgatactgatgaaagctctatcaaatcacactgtcccttgaagtattacaacgctgagattcactcagctgctttctgcttgccctcttttgctaagaaggtgattgattcgaaagccaactag

SEQ ID NO: 154546 - protein, 340 aa, Arabidopsis thaliana
MSSTQEASVTDLPVKRPREAEEDNNGGAMETENGGGEIKEPSCMSSIIPGWFSEISPMWPGEAHSLKVEKILFQGKSDYQDVIVFQSATYGKVLVLDGVIQLTERDECAYQEMITHLPLCSISNPKKVLVIGGGDGGVLREVARHSSVEQIDICEIDKMVVDVAKQYFPNVAVGYEDPRVNLIIGDGVAFLKNAAEGTYDAVIVDSSDPIGPAKELFEKPFFESVNRALRPGGVVCTQAESLWLHMDIIEDIVSNCRDIFKGSVNYAWTSVPTYPSGVIGFMLCSSEGPQVDFKKPVSLIDTDESSIKSHCPLKYYNAEIHSAAFCLPSFAKKVIDSKAN

SEQ ID NO: 154547 - DNA, 843 bp, Aquifex aeolicus VF5
  CDS (1)..(843): transl_table=11
atgagggacattgttttcatagaaagggatccttacgctccgataagacactgctacaccgtttcaaaaatactctaccaaggaaagagtccctaccaggaaatacaggtaattgaaagtcctgagttcgggagaatgcttatcctcgacggagtggttcagctggacgagaagtacgaatttctctaccacgagtacctcgcacacgttccactccacgcacacccaaaccccagaaacgtgctcataatcggaggaggagacgggggaacattgagggaagttcttaaacacgatatcgtagaaagagccgtcctcgttgacatagataaagaagtaatagaagtttccaagaagtacctccccacgctatcggttggttttcaggacccgagagccatagtcgtgaacgaagacggctacaagtatgtccaagattacgagaacgagtttgatgtaatcatcgtagactcaacggatcccgtcggatttgcccacgtcctcaccacagaggacttcttcagacacgtctacaaggcgctaaaggaagacggaatattcgtggctcaaacggagtccatccactaccaccttgaaatggtgagtaacatacaacaaagactaaagaaagtgtttcctattgttgacctgtacacttccgtaattcccatatacgccggttactggtggaccttctcaatagcttccaagaagtatcctgtgaggactcccgctagggaggtaaaggtccaaacgaagatttacgacgcggacatgcacgagtacgccttccttcccgagagcttttacaacaagattgtaaacggagagtacaagtattaa

SEQ ID NO: 154548 - protein, 280 aa, Aquifex aeolicus VF5
MRDIVFIERDPYAPIRHCYTVSKILYQGKSPYQEIQVIESPEFGRMLILDGVVQLDEKYEFLYHEYLAHVPLHAHPNPRNVLIIGGGDGGTLREVLKHDIVERAVLVDIDKEVIEVSKKYLPTLSVGFQDPRAIVVNEDGYKYVQDYENEFDVIIVDSTDPVGFAHVLTTEDFFRHVYKALKEDGIFVAQTESIHYHLEMVSNIQQRLKKVFPIVDLYTSVIPIYAGYWWTFSIASKKYPVRTPAREVKVQTKIYDADMHEYAFLPESFYNKIVNGEYKY

SEQ ID NO: 154549 - DNA, 891 bp, Thermotoga maritima MSB8
  CDS (1)..(891): transl_table=11
atgagaacgttgaaggaactggaaagggaacttcagccaagacagcacctctggtacttcgagtactacacgggaaacaacgtgggtcttttcatgaagatgaaccgcgtgatttattcaggacagagcgatatacagaggatcgacatcttcgaaaaccccgatctcggtgtggtcttcgcactcgatggaatcacaatgacaacagagaaagacgagttcatgtaccacgagatgctcgcacacgttcccatgttccttcatcccaatccgaagaaggtgctcatcatcggtggtggagatgggggaacgctcagagaagtcctcaagcacgatagcgtagaaaaagccattctctgcgaggtcgatggcctcgtcatagaagcggcgaggaaatatctgaaacagacctcctgtggtttcgacgatcccagagcggagatcgtgatagcaaacggtgccgaatacgtgaggaagttcaaaaacgagttcgacgtcatcatcatagactccacggacccgacggcgggtcagggcgggcacctcttcaccgaggagttctaccaggcctgctacgacgcattgaaggaagacggagtcttctctgcagaaacggaggatccgttctacgacatcggatggttcaaactcgcctacaggaggatcagcaaggtctttccgattacaagggtttaccttggtttcatgaccacctatccctccggcatgtggtcctacactttcgcctccaagggaatagacccgataaaagacttcgacccggaaaaggtgagaaagttcaacaaagaactgaagtactacaacgaagaagtccacgttgcctcctttgccctcccgaatttcgtgaagaaagaactcggactgatgtga

SEQ ID NO: 154550 - protein, 296 aa, Thermotoga maritima MSB8
MRTLKELERELQPRQHLWYFEYYTGNNVGLFMKMNRVIYSGQSDIQRIDIFENPDLGVVFALDGITMTTEKDEFMYHEMLAHVPMFLHPNPKKVLIIGGGDGGTLREVLKHDSVEKAILCEVDGLVIEAARKYLKQTSCGFDDPRAEIVIANGAEYVRKFKNEFDVIIIDSTDPTAGQGGHLFTEEFYQACYDALKEDGVFSAETEDPFYDIGWFKLAYRRISKVFPITRVYLGFMTTYPSGMWSYTFASKGIDPIKDFDPEKVRKFNKELKYYNEEVHVASFALPNFVKKELGLM

SEQ ID NO: 154551 - DNA, 861 bp, Buchnera aphidicola str. APS (Acyrthosiphon pisum)
  CDS (1)..(861): transl_table=11
atggatcacaaaaaaacatggcatgaaaagctttattgtcatcttggacaatactttttaattgaaaaaatgctgtataaaaaaaaaacccctcatcatcaagtaatgatttttaagaattctgtttttggtaaaatcatggtaatagatgatattgttcaaacaactgaacgcgatgaatttatatatcatgaaatgctaactcatgttcctataatcgctcatggttcaataaaaagtgtattaataataggaggaggtgacggaggcatactacgtgaagtatgtagatataaaatgattgaaaatatcactatggttgaaatagacgtaaatatcattgatttgtgtaaaaaatattttccaaatcatagtaatcaggcctatcaagattctcgtttaaacttgattattgatgatggtttgaatttcataaaaagaacaaaagaaaagtttgatttaatcatatcagattccactgatcctattggctgcggaaagaatttatttcgatcagaattttattttaattgtaaaaatcatcttgaagaaaatggtatttttgtagcacagaacggtgttttttttcttcaaaaaaatgaaaccattcttacttataaaaatttaaaaaaatatttttatgatacaagattttatcaagcgaatgttccaacttattatgggggggtaatggttttcgcgtggggtactaataatatagaatatcgtaaaaatagtctagaaaaaatacaaatacgtataaaaaatacaaaattagattttaattactataatgctaaaattcatataagtagtttttatttacctcaatatattcttaatgaattaaatgaaagttaa

SEQ ID NO: 154552 - protein, 286 aa, Buchnera aphidicola str. APS (Acyrthosiphon pisum)
MDHKKTWHEKLYCHLGQYFLIEKMLYKKKTPHHQVMIFKNSVFGKIMVIDDIVQTTERDEFIYHEMLTHVPIIAHGSIKSVLIIGGGDGGILREVCRYKMIENITMVEIDVNIIDLCKKYFPNHSNQAYQDSRLNLIIDDGLNFIKRTKEKFDLIISDSTDPIGCGKNLFRSEFYFNCKNHLEENGIFVAQNGVFFLQKNETILTYKNLKKYFYDTRFYQANVPTYYGGVMVFAWGTNNIEYRKNSLEKIQIRIKNTKLDFNYYNAKIHISSFYLPQYILNELNES

SEQ ID NO: 154553 - DNA, 828 bp, Bacillus halodurans C-125
  CDS (1)..(828): transl_table=11
atggaattatggtatacggaaaagcagaccgaacattttggtattacggccaaaattaaacggacgctacatacagaaaagaccgactttcagcagctcgatgtcattgagacagaagagttcgggaacatgctcgttctcgatggaatggtcatgactacggaaaaggatgagttcgtttatcatgaaatggtggctcatgttccgctctttacccatccgaacccgaaacacgtccttgtcgtaggcggtggtgatgggggggttatccgtgaagtgttgaagcacccatcagtggaaaaagcgactcttgtagaaatcgacggaaaggtcattgagtactcgaaaaagtatttaccttccattgcgacggcgcttaatgacccgcgtgtcgatgttcaagtcgatgatggctttttgcatattgccaaggctgaaagtgcttatgatgtcattatggtcgattctacagaaccagtagggcctgcagttaaactttttgaaaaagggttttatcaaggaattgcgaaagccttaaaagaagacgggatttttgttgcgcaaaccgataacccgtggttccatggtgaactgatccgcaaagtctatgctgatgtgcaagagatttttccaatcacccgtttgtatacagcgaatattccaacctatccgagcggactctggacatttacaattgggtcgaaaacgtacgatccactacatgtggagccgagccgtttttatgatattgagacaaagtactttacaaaggatctccataaagccgcctttgctttgccgcgatttgtggatgatttgatcaagtaa

SEQ ID NO: 154554 - protein, 275 aa, Bacillus halodurans C-125
MELWYTEKQTEHFGITAKIKRTLHTEKTDFQQLDVIETEEFGNMLVLDGMVMTTEKDEFVYHEMVAHVPLFTHPNPKHVLVVGGGDGGVIREVLKHPSVEKATLVEIDGKVIEYSKKYLPSIATALNDPRVDVQVDDGFLHIAKAESAYDVIMVDSTEPVGPAVKLFEKGFYQGIAKALKEDGIFVAQTDNPWFHGELIRKVYADVQEIFPITRLYTANIPTYPSGLWTFTIGSKTYDPLHVEPSRFYDIETKYFTKDLHKAAFALPRFVDDLIK

SEQ ID NO: 154555 - DNA, 882 bp, Methanocaldococcus jannaschii DSM 2661
  CDS (1)..(882): transl_table=11
atgaatcaaaataatgattttaaatgccatatttggtttacagagtatcataacaacaatgtagctctttcagttagagttaaggatatcttatatagggagaaatcaggatttcaagagatagagattattgacacctatgattttgggaaggcattaattttagataacacttttcagacaacagagagagatgaatttatttatcatgaattaatatcccacatacctcttttcacccatccaaatccaaggaatgttttggttattggaggaggggatggagggactgttagggaagttgttaagcataaatcagttgaaacagtggattttgtagagttggatgaaaaggttattgaagcttgtaaaaagtatatgccaaaattgagctgtgaaattgataatgagaaggtaaatttgataataacagatggaattaagtatgttgctgaaacagagaagaagtatgatgtgattattgttgattgtccagaccctgttgggcctgctaaggggctttttgagaaagaattttataaaaatgtgtttaaatgtttaaatgatgatggaattatggttcagcaatcagagagtccattgtataacttagatttgatacaaaatatctgcagatatttaaaagatgctggatttaagataattatgccatacacctacccaatgccaacatatccaagtggattctggagctttacattagcatctaaaaaatacaacccattagaagttgatgaggcaagaataaaagaagctttaaaagatatggaaactaaatactatgatgaagaagtccataagggaatatttttagcagcacctaaatttttaaaagatgctgttaaaaaagctcttgaataa

SEQ ID NO: 154556 - protein, 293 aa, Methanocaldococcus jannaschii DSM 2661
MNQNNDFKCHIWFTEYHNNNVALSVRVKDILYREKSGFQEIEIIDTYDFGKALILDNTFQTTERDEFIYHELISHIPLFTHPNPRNVLVIGGGDGGTVREVVKHKSVETVDFVELDEKVIEACKKYMPKLSCEIDNEKVNLIITDGIKYVAETEKKYDVIIVDCPDPVGPAKGLFEKEFYKNVFKCLNDDGIMVQQSESPLYNLDLIQNICRYLKDAGFKIIMPYTYPMPTYPSGFWSFTLASKKYNPLEVDEARIKEALKDMETKYYDEEVHKGIFLAAPKFLKDAVKKALE

SEQ ID NO: 154557 - DNA, 861 bp, Pseudomonas aeruginosa PAO1
  CDS (1)..(861): transl_table=11
atgagcgattatcaggaaactctgtaccagggctacggccagcgcttcagcatcgacaacatgctgcatgaggtgcgcaccgagcaccagcacctggtgattttcgaaaacgcccggatgggccgggtgatggcgctcgatggagtgatccagaccaccgaggccgacgagttcatctaccacgagatgctcacccacgtgccgatcctcgcccacggcgcggcccggcgcgtgctgatcatcggcggcggcgacggtggcatgctgcgcgaggtggccaagcacaagagcgtcgagcggatcaccatggtcgagatcgacggcaccgtggtcgacatgtgcaaggagttcctgcccaaccactcccagggcgccttcgacgacccgcggctgaacctggtgatcgacgacggcatgcgcttcgtggctaccacggaagaacgcttcgacgtgatcatctccgactccaccgacccgatcggccctggcgaggtgctgttctccgagaacttctaccaggcctgccggcgctgcctgaacgagggtggcatcctggtcacccagaacggcacgccgttcatgcaactggaggaagtgcgcaccaccgccgcacgtaccgacgggctgtttgccgactggcatttctaccaggcggcggtgccgacctatatcggcggcgccatgaccttcgcctggggttcgacccacgaaggcctgcgtcgccttccgctggaaacgctgcgccagcgcttccgcgacagcggcatcgccacccgctactacaacgccgatatccacctgggcgcgtttgctctgccgcagtacgtgctgcaggccatcggcaagcaggacaacgactga

SEQ ID NO: 154558 - protein, 286 aa, Pseudomonas aeruginosa PAO1
MSDYQETLYQGYGQRFSIDNMLHEVRTEHQHLVIFENARMGRVMALDGVIQTTEADEFIYHEMLTHVPILAHGAARRVLIIGGGDGGMLREVAKHKSVERITMVEIDGTVVDMCKEFLPNHSQGAFDDPRLNLVIDDGMRFVATTEERFDVIISDSTDPIGPGEVLFSENFYQACRRCLNEGGILVTQNGTPFMQLEEVRTTAARTDGLFADWHFYQAAVPTYIGGAMTFAWGSTHEGLRRLPLETLRQRFRDSGIATRYYNADIHLGAFALPQYVLQAIGKQDND

SEQ ID NO: 154559 - DNA, 867 bp, Escherichia coli O157:H7 EDL933
  CDS (1)..(867): transl_table=11
atggccgaaaaaaaacagtggcatgaaacgctacacgaccagtttgggcagtactttgcggtagataacgttctgtatcatgaaaagaccgatcaccaggatctgatcatttttgagaacgccgcatttggccgcgtaatggcgctggatggcgtagtacaaaccaccgagcgcgacgagtttatctatcatgagatgatgacccatgttccgctactggcccacggtcacgcgaaacatgtgctgattatcggcggcggcgacggtgccatgctgcgtgaagtaacccgacataaaaacgttgagtcaatcacgatggtggaaatcgatgcgggtgtcgtgtcgttctgccgtcagtatctacccaaccataacgccggtagctacgacgatccgcgctttaaactggtgatcgacgatggcgtcaatttcgttaatcaaaccagccagacctttgatgtcattatctccgactgcaccgatcctatcggtcccggcgaaagtctgttcacctcagcattttatgaaggctgcaaacgttgcctgaatcctggcggtatcttcgtcgcacaaaacggcgtctgctttttacagcaggaagaggctatcgacagtcatcgcaaactcagccattacttcagcgacgttggcttttatcaggcggcgatcccgacctattacggcggcatcatgacctttgcatgggcgacagataacgacgccttacgccatctctcaaccgaaattattcaggcgcgttttctcgcttctggcctgaaatgccgttattacaatccggcagtccatacggcagcttttgccttaccccagtatctgcaagacgcactggcttcacagccgtcctaa

SEQ ID NO: 154560 - protein, 288 aa, Escherichia coli O157:H7 EDL933
MAEKKQWHETLHDQFGQYFAVDNVLYHEKTDHQDLIIFENAAFGRVMALDGVVQTTERDEFIYHEMMTHVPLLAHGHAKHVLIIGGGDGAMLREVTRHKNVESITMVEIDAGVVSFCRQYLPNHNAGSYDDPRFKLVIDDGVNFVNQTSQTFDVIISDCTDPIGPGESLFTSAFYEGCKRCLNPGGIFVAQNGVCFLQQEEAIDSHRKLSHYFSDVGFYQAAIPTYYGGIMTFAWATDNDALRHLSTEIIQARFLASGLKCRYYNPAVHTAAFALPQYLQDALASQPS

SEQ ID NO: 154561 - DNA, 861 bp, Clostridium acetobutylicum ATCC 824
  CDS (1)..(861): transl_table=11
atgttagatctttggtattcagaaagtcatgcagatgacacaaaattttcaataagagtaaaggaacatttatacagtgaaaaaacaccttttcagcaaatagatttttttaaaagtgaaacttttggaaccttttttacacttgatggctacataatgatgactgaaaaagatgaatttatatatcatgaaatgattactcacgttccaatggctgttaatcctaagataaaaaaagttttaatagttggtggcggtgatggaggaacttcaagagaaattttaagatacaacactatagaaaaagtagatatggttgaaatcgatgaaagagttgtacgactttgtcaaaaatatttaacccaaacttcctgcaaacttgataatgactctagacttactatgcattttgaggatggtaaggaatttgttaaaagagctgaaactggtttttacgacttgattcttgtagattcaacagatcctattggccctggcgaaggtctatttactaatgaattctatagagactgcgaaagaattcttagtgatgatggaattttaataaatcagcatgaaagcccatattataaggattactgccatgaaatgaagagagctcacagtaaaataaaagataaatttcctatttcaatggtttatcaatttcatatgccaacttatgcctctgggcactggctgtttggctttgcatccaaaaaatatcatcctttaaataatttaaacgctgatagttggaatagtcttggacttaaaacaaagtactataatacaaacttacataaaggtgcatttgcacttccaaactacgttattgatgagttagaaaaaactgagtaa

SEQ ID NO: 154562 - protein, 286 aa, Clostridium acetobutylicum ATCC 824
MLDLWYSESHADDTKFSIRVKEHLYSEKTPFQQIDFFKSETFGTFFTLDGYIMMTEKDEFIYHEMITHVPMAVNPKIKKVLIVGGGDGGTSREILRYNTIEKVDMVEIDERVVRLCQKYLTQTSCKLDNDSRLTMHFEDGKEFVKRAETGFYDLILVDSTDPIGPGEGLFTNEFYRDCERILSDDGILINQHESPYYKDYCHEMKRAHSKIKDKFPISMVYQFHMPTYASGHWLFGFASKKYHPLNNLNADSWNSLGLKTKYYNTNLHKGAFALPNYVIDELEKTE

SEQ ID NO: 154563 - DNA, 903 bp, Sulfolobus tokodaii str. 7
  CDS (1)..(903): transl_table=11
atgtatgaatggcattggcatatagaatggcaaactccatacgaatttcatggacacgctataactaaagtaattgcggaagaaaaaacaccttatcagagagctcttttagttgaattagctagattcgggaaagcactaatattagacggaaaaatacaatctacaataactgacgagttcatataccatgaggcattagtacatccattacttttatctataaataatccagaaaaaattctaatattaggagggggagaaggagcaacattaagagaagttcttaaacataaaactataaagaatgttactatggttgatatagatcctgtagtaatcgattttgccaaaaaatatttacaagaatggcatcaaggagctttcgataatcccaaaagtaaattagtcatagaggatggctataaatttattaaagaaacaaaagagaaatttgacgcagtagttattgatcttacagacccaataaaagattcgccttcccaaatgctatatactaaagagttttatgaagaagttaagagaataagtaaatggggtatagtaacacaagctacttctccatcatttagtttagaaaccttctccataatttataatacaataaaacatgttttcaaaaaagtaagtgctggaataacatatgtaccggcatttgacggcttatggggatttgtatatgcttcagatgaagttaatccagcagaatttagtaaagaagaaattaataatagaattaaagaaagaatagatggaagtcttagattttatgatggtgaaactcatattacaatgtttagtatcccgaaacatataagggaagtactagaaaaagaaaataaaatttcgactagagaaaatccagtagcagttccagcatag

SEQ ID NO: 154564 - protein, 300 aa, Sulfolobus tokodaii str. 7
MYEWHWHIEWQTPYEFHGHAITKVIAEEKTPYQRALLVELARFGKALILDGKIQSTITDEFIYHEALVHPLLLSINNPEKILILGGGEGATLREVLKHKTIKNVTMVDIDPVVIDFAKKYLQEWHQGAFDNPKSKLVIEDGYKFIKETKEKFDAVVIDLTDPIKDSPSQMLYTKEFYEEVKRISKWGIVTQATSPSFSLETFSIIYNTIKHVFKKVSAGITYVPAFDGLWGFVYASDEVNPAEFSKEEINNRIKERIDGSLRFYDGETHITMFSIPKHIREVLEKENKISTRENPVAVPA

SEQ ID NO: 154565 - DNA, 831 bp, Bacillus subtilis subsp. subtilis str. 168
  CDS (1)..(831): transl_table=11
ttgagcgaactttggtacacagagaagcagacgaaaaactttggcattacgatgaaggttaacaagacgttacatacagaacaaacggagtttcagcatttagaaatggtggaaacagaagagttcggcaacatgctttttttggacggcatggtgatgacatctgaaaaagacgaattcgtttatcacgaaatggtggcgcatgtcccattattcacgcacccaaatccggagcacgttctcgtagtcggcggcggtgacggcggcgttatcagagaaatcctgaagcacccaagcgtgaaaaaagcgacacttgtagatattgacggcaaggttatcgaatactctaaaaagttccttccttctatcgcaggcaaactggatgatccgcgcgttgacgtgcaggtagatgacggatttatgcacattgcaaaatctgaaaatcaatatgacgtcatcatggtagattcgactgaaccagtcggaccggctgtaaacctgtttacaaaaggattctacgcaggaatcgcaaaagcgctgaaagaagacggtattttcgttgcgcagacggacaacccatggtttacaccggaattaatcacaaatgtacagcgcgacgtgaaggaaatcttcccgattacgaagctgtatacggcgaacattccgacatatccaagcggtttgtggacatttacaattggctcgaaaaaatatgatccgcttgcagtggaagacagccgtttcttcgatattgagacgaaatattacacaaaagatattcataaagcggcgtttgttctgccgaaatttgtgagtgacctgattaaataa

SEQ ID NO: 154566 - protein, 276 aa, Bacillus subtilis subsp. subtilis str. 168
MSELWYTEKQTKNFGITMKVNKTLHTEQTEFQHLEMVETEEFGNMLFLDGMVMTSEKDEFVYHEMVAHVPLFTHPNPEHVLVVGGGDGGVIREILKHPSVKKATLVDIDGKVIEYSKKFLPSIAGKLDDPRVDVQVDDGFMHIAKSENQYDVIMVDSTEPVGPAVNLFTKGFYAGIAKALKEDGIFVAQTDNPWFTPELITNVQRDVKEIFPITKLYTANIPTYPSGLWTFTIGSKKYDPLAVEDSRFFDIETKYYTKDIHKAAFVLPKFVSDLIK

SEQ ID NO: 154567 - DNA, 822 bp, Thermoplasma acidophilum DSM 1728
  CDS (1)..(822): transl_table=11
atgaagctcatagagaattggttttcagaaagatattcagacaacctgcagctctccttcagggtaagcgatcagctgttatccataaagacagattaccagaggatcgatctattcgatacctatgattttggaaagctgctggccatagacggaacagtgcagctcacggagagggatgaattcatctatcatgaactgataacgatggttccttaccatctgacgccaagacctccagagaatgctctgataataggcggtggagacggaggcgcagctaggaggctcattgatctcggcctgaagcacatagtaaatgtggaaatagatgatcaggttgtggaggtttccaaaagattctttccctccctttcctcagccttcaacgacagccatgtcaagctgctgatccaggatggcataaagtatgtcaagaacacgagcgagaagttcgatctcataataatagattccactgatcctgaaggtccagcagagggcctcttctcaaaggatttctataacgatacgagaaagataatgaatgaaggcgccgtgatagtttcgcagtcaggatccccattctaccagccgaaggcaataaagcttgcatactctggaatgagggaggtcttcagcgacgttcgagtttatacaggcttcatacccacttatcccagtggattctggtcattcaccgtcgcatcgccctggacaatgaaaccaaggccggtgaacatgtctgggaaatacttcaacgcagatgtgatggaaggatcattcaggcttccacagttcgttaaagaactgatcacttaa

SEQ ID NO: 154568 - protein, 273 aa, Thermoplasma acidophilum DSM 1728
MKLIENWFSERYSDNLQLSFRVSDQLLSIKTDYQRIDLFDTYDFGKLLAIDGTVQLTERDEFIYHELITMVPYHLTPRPPENALIIGGGDGGAARRLIDLGLKHIVNVEIDDQVVEVSKRFFPSLSSAFNDSHVKLLIQDGIKYVKNTSEKFDLIIIDSTDPEGPAEGLFSKDFYNDTRKIMNEGAVIVSQSGSPFYQPKAIKLAYSGMREVFSDVRVYTGFIPTYPSGFWSFTVASPWTMKPRPVNMSGKYFNADVMEGSFRLPQFVKELIT

SEQ ID NO: 154569 - DNA, 891 bp, Yersinia pestis CO92
  CDS (1)..(891): transl_table=11
atgtcacagaaagaactatggtatgaaacattacatgccaacttcggccagtacttttctgttgagaatgtattgttccgcgaaaaaaccgagcatcaggacctggtgatttttgaaaacccagagttgggccgcgtaatggcattagatggtgtggtgcaaacgacagagcgtgatgagtttatctaccacgaaatgatgacacacgttcctttgctggcccacgggcaagcaaaaaaagtgctgatcatcggcggtggcgatggcgcaatgctgcgagaagtcagccgccacaagaatattgagcagattaccatggtggaaattgacgccggggtcgtagaattttgccgccagtatttgcctaatcatagcgcgggggcgtatgacgatcctcgtttcaagctagtcatcgacgatggtgtgaatttcgttaatcagaccactgaaaaattcgatgtcatcatttctgactgtaccgatcctatcggtcctggcgaaagcctgtttacctctgtattttatgagggatgcgcccgtagcctgaatgagggggggatcttcgttgcacaaaacggcgtctgtttcctacaacaggatgaagccgtcaatagccataacaaacttagccactatttcagtgacgttagtttttatcaggccgcaattccaacgtattacggcggtattatgacctttgcctgggcgacacagaacccggctctgcgccagttggatctcgccaccttgcaaaaccgctttgcccaagctggcttggcctgccgctactataacccagcgattcatgtcggcagctttgctttaccacagtatttgctagatgccttaacgacgatacccaaagtcattggcgtcgattcaagtgaataa

SEQ ID NO: 154570 - protein, 296 aa, Yersinia pestis CO92
MSQKELWYETLHANFGQYFSVENVLFREKTEHQDLVIFENPELGRVMALDGVVQTTERDEFIYHEMMTHVPLLAHGQAKKVLIIGGGDGAMLREVSRHKNIEQITMVEIDAGVVEFCRQYLPNHSAGAYDDPRFKLVIDDGVNFVNQTTEKFDVIISDCTDPIGPGESLFTSVFYEGCARSLNEGGIFVAQNGVCFLQQDEAVNSHNKLSHYFSDVSFYQAAIPTYYGGIMTFAWATQNPALRQLDLATLQNRFAQAGLACRYYNPAIHVGSFALPQYLLDALTTIPKVIGVDSSE

SEQ ID NO: 154571 - DNA, 861 bp, Salmonella enterica subsp. enterica serovar Typhi str. CT18
  CDS (1)..(861): transl_table=11
atggccgaaaatacgatgtggcatgaaacgctacacgaccagtttggtcagtactttgccgtagacaacgttctgtatcatgaaaaaaccgatcaccaggatttaatcatctttgaaaacgccgcttttggccgcgtgatggcgctggacggcgtggtacagaccaccgaacgcgacgagtttatttatcatgaaatgatgacccatgtcccgctgctggcgcacggtcatgcgaaacacgttctgattatcggcggcggcgacggcgcaatgctacgtgaagttacccggcataaaaacgtcgaaaccatcaccatggtagagatagacgctggcgtagtctcgttttgccgccagtatttacccaaccacaatgccggcagctacgacgatccgcgctttacgctggtgatcgacgacggcgtgaatttcgtcaatcagacccatcagacctttgatgtgatcatttccgactgtaccgatccgataggccccggcgaaagcctgtttacctccgccttttatgaaggctgtaagcgttgcctgaatccgggcggcatttttgtcgcccagaacggcgtgtgcttcctgcaacaggatgaagcgctcgacagccaccgcaagctgagtcattacttcagcgatgtcggcttctaccaggcggcgattccgacctattacggcggcattatgaccttcgcctgggcgacggacaacgacgctcttcgccacctgtcgagcgaaattattcaggcgcgttttcatgccgccggcctcaaatgccgctattacaactcggctattcatgccgctgcatttgcgctaccgcaatatctacatgacgcactgtccgcacagtga

SEQ ID NO: 154572 - protein, 286 aa, Salmonella enterica subsp. enterica serovar Typhi str. CT18
MAENTMWHETLHDQFGQYFAVDNVLYHEKTDHQDLIIFENAAFGRVMALDGVVQTTERDEFIYHEMMTHVPLLAHGHAKHVLIIGGGDGAMLREVTRHKNVETITMVEIDAGVVSFCRQYLPNHNAGSYDDPRFTLVIDDGVNFVNQTHQTFDVIISDCTDPIGPGESLFTSAFYEGCKRCLNPGGIFVAQNGVCFLQQDEALDSHRKLSHYFSDVGFYQAAIPTYYGGIMTFAWATDNDALRHLSSEIIQARFHAAGLKCRYYNSAIHAAAFALPQYLHDALSAQ

SEQ ID NO: 154573 - DNA, 861 bp, Salmonella enterica subsp. enterica serovar Typhimurium str. LT2
  CDS (1)..(861): transl_table=11
atggccgaaaatacgatgtggcatgaaacgctacacgaccagtttggtcagtactttgccgtagacaacgttctgtatcatgaaaaaaccgatcaccaggatttaatcatctttgaaaacgccgcttttggccgcgtgatggcgctggacggcgtggtacagaccaccgaacgcgacgagtttatttatcatgaaatgatgacccatgtcccgctgctggcgcacggtcatgcgaaacacgttctgattatcggcggcggcgacggcgcaatgctacgtgaagttacccggcataaaaacgtcgaaaccatcaccatggtagagatagacgctggcgtagtctcgttttgccgccagtatttacccaaccacaatgccggcagctacgacgatccgcgctttacgctggtaatcgacgacggcgtgaatttcgtcaatcaaacccatcagacctttgatgtgatcatttccgactgtaccgatccgataggccccggcgaaagcctgtttacctccgccttttatgaaggctgtaagcgttgcctgaatccgggcggcatttttgtcgcccagaacggcgtgtgcttcctgcagcaggatgaagcgctcgacagccaccgcaagctgagtcattacttcagcgatgtcggcttctaccaggcggcgattccgacctattacggcggcattatgaccttcgcctgggcgacggacaacgacgctcttcgccacctgtcgagcgaaattattcaggcacgttttcatgccgccggcctcaaatgtcgctattacaacccggctattcatgccgctgcatttgcgctaccgcaatatctacatgacgcactgtccgcacagtga

SEQ ID NO: 154574 - protein, 286 aa, Salmonella enterica subsp. enterica serovar Typhimurium str. LT2
MAENTMWHETLHDQFGQYFAVDNVLYHEKTDHQDLIIFENAAFGRVMALDGVVQTTERDEFIYHEMMTHVPLLAHGHAKHVLIIGGGDGAMLREVTRHKNVETITMVEIDAGVVSFCRQYLPNHNAGSYDDPRFTLVIDDGVNFVNQTHQTFDVIISDCTDPIGPGESLFTSAFYEGCKRCLNPGGIFVAQNGVCFLQQDEALDSHRKLSHYFSDVGFYQAAIPTYYGGIMTFAWATDNDALRHLSSEIIQARFHAAGLKCRYYNPAIHAAAFALPQYLHDALSAQ

SEQ ID NO: 154575 - DNA, 945 bp, Caenorhabditis elegans
  CDS (1)..(945)
atgaacaagctgcacaagggatggttcaccgagttctcgccggatgacctggaaaagatgaacggagcctccgacgaggagccaacgaaggtgctcaaatccgacggacaagagatgggcggcgcgtggccgggacaggcgttctcgttgcaggtgaagaaagtgcttttccacgagaagagcaagtatcaggatgtgctggtttttgagagcacaacctatggaaatgttctagttctagacggaattgttcaggcaactgaacgggatgagttctcctaccaggaaatgctggcccatctcccaatgtttgcccatccggacccgaaacgtgtacttatcattggtggaggagatggaggtattttgagagaggtcttgaagcacgagtccgtcgagaaggtcacaatgtgtgaaatagacgaaatggtgatcgatgtcgcgaaaaagttcctgcctggcatgtcgtgcggtttctcacacccgaaactcgacttattctgcggagatggcttcgaatttttgaaaaatcacaagaacgagttcgacgtaattatcacggacagttccgatccagttgggccggctgaatcgcttttcgggcaaagttattacgagttgctgagagatgcgttgaaggaggatggaattttgtcatcgcaaggagaatctgtgtggcttcacctcccactaatcgctcatctcgtcgccttcaatcgaaaaattttcccggccgtcacctacgcccagtcgatcgtctctacctacccgtctggaagcatgggatacctgatttgtgcaaaaaatgctaaccgtgacgtcacgactcctgctcgaaccctcactgctgaacagatcaaagccctgaacttgagattctacaactcggaagttcacaaggcggcttttgtgcttccgcaatttgtcaaaaatgctttggagtag

SEQ ID NO: 154576 - protein, 314 aa, Caenorhabditis elegans
MNKLHKGWFTEFSPDDLEKMNGASDEEPTKVLKSDGQEMGGAWPGQAFSLQVKKVLFHEKSKYQDVLVFESTTYGNVLVLDGIVQATERDEFSYQEMLAHLPMFAHPDPKRVLIIGGGDGGILREVLKHESVEKVTMCEIDEMVIDVAKKFLPGMSCGFSHPKLDLFCGDGFEFLKNHKNEFDVIITDSSDPVGPAESLFGQSYYELLRDALKEDGILSSQGESVWLHLPLIAHLVAFNRKIFPAVTYAQSIVSTYPSGSMGYLICAKNANRDVTTPARTLTAEQIKALNLRFYNSEVHKAAFVLPQFVKNALE

SEQ ID NO: 154577 - DNA, 852 bp, Clostridium perfringens str. 13
  CDS (1)..(852): transl_table=11
atggaattatggtacacagaagaacatacagacaaggtacgtttttcaatcaaagtagatgaacaactttatagtggaaagagcgatttccaaagaatagatgtttttaaatctcaagagtttggaactttctttacattagatggacttatgatggtaacagaaaaggatgaatttatttatcatgacatgatagttcatgttccaatggctacaaatcctaatataaaaaatgtactagttataggagcaggtgatggtggaactgtaagagaacttacaagatatgaaactatagaaaaaatagacatggttgaaattgataagttagttgttgatgtttgtagagaatatttacctcaaacagctaataaattagatgatcctagagtaagtttattctttgaagatggattaaaatttgtacgttcagttgaaaataaatatgatttaataatagttgattcaacagatccatttggacctggagaaggtttattcacaagagaattttatggaaattgctttaaggccttaaaagaagatggaatacttgtaaatcaacatgaaagcccatactatgaagagtatgcaaggggaatgaagagagctcataagagaataaaagaatgtttcccagtatgtagagtttatcaagctcatataccaacttacccatcaggacattggttatttggttttgcatcaaaaaaatatgatccactaaatgctgatatagaaaagtggaatgatttaggattaaaaactaaatattataacactgatttgcataaaggatgttttgcattacctaattatgttaaggagatgctagagaatgttgatgaatag

SEQ ID NO: 154578 - protein, 283 aa, Clostridium perfringens str. 13
MELWYTEEHTDKVRFSIKVDEQLYSGKSDFQRIDVFKSQEFGTFFTLDGLMMVTEKDEFIYHDMIVHVPMATNPNIKNVLVIGAGDGGTVRELTRYETIEKIDMVEIDKLVVDVCREYLPQTANKLDDPRVSLFFEDGLKFVRSVENKYDLIIVDSTDPFGPGEGLFTREFYGNCFKALKEDGILVNQHESPYYEEYARGMKRAHKRIKECFPVCRVYQAHIPTYPSGHWLFGFASKKYDPLNADIEKWNDLGLKTKYYNTDLHKGCFALPNYVKEMLENVDE

SEQ ID NO: 154579 - DNA, 1080 bp, Arabidopsis thaliana
  CDS (1)..(1080)
atggagggagacgtcggaataggtttggtatgccagaatactatggatgggaaggcgagtaatggaaatggtttagagaagactgtaccttcttgttgccttaaggctatggcatgtgtacctgaggatgatgctaagtgtcactccactgttgtttctgggtggttttcggaacctcaccctcgctctgggaaaaaaggcggcaaagcagtctatttcaacaaccctatgtggccaggagaagcacactcactgaaagttgagaaagttctgttcaaagacaagtcggattttcaggaagtcctagtgttcgagtcagccacgtacggaaaggtgcttgttctagatggtatcgtacagctgaccgaaaaagatgaatgtgcatatcaggagatgatagcccatctgcctttatgctctatatcttcccctaaaaatgttcttgttgttggtggaggtgatggtggtgttcttcgagagatttctcgccatagttctgttgaggttattgatatctgtgagatagacaagatggttatagatgtgtctaagaagttcttccccgagttagcggttgggtttgacgatcctcgtgttcaacttcacattggtgatgctgctgagttcctccgtaaatcccctgaagggaagtatgatgccatcattgttgattcttcagatcccgtaggtcctgctcttgcgcttgttgagaagcctttcttcgagacactggctagagcgttgaagcctgggggagttctttgtaacatggcagaaagtatgtggctccatactcatcttattgaagatatgatctccatttgccgtcaaacattcaaaagtgttcactatgcgtggagcagcgtccccacatatccaagcggcgtgattggtttcgtcttgtgctctactgaaggaccagctgttgacttcaagaacccaatcaaccctattgagaaactagacggtgcgatgacccataaaagagaattgaagttctataactctgatatgcacagagccgcatttgctttgcccacattcctgcggagagaagtagcttcacttctggcttcttga

SEQ ID NO: 154580 - protein, 359 aa, Arabidopsis thaliana
MEGDVGIGLVCQNTMDGKASNGNGLEKTVPSCCLKAMACVPEDDAKCHSTVVSGWFSEPHPRSGKKGGKAVYFNNPMWPGEAHSLKVEKVLFKDKSDFQEVLVFESATYGKVLVLDGIVQLTEKDECAYQEMIAHLPLCSISSPKNVLVVGGGDGGVLREISRHSSVEVIDICEIDKMVIDVSKKFFPELAVGFDDPRVQLHIGDAAEFLRKSPEGKYDAIIVDSSDPVGPALALVEKPFFETLARALKPGGVLCNMAESMWLHTHLIEDMISICRQTFKSVHYAWSSVPTYPSGVIGFVLCSTEGPAVDFKNPINPIEKLDGAMTHKRELKFYNSDMHRAAFALPTFLRREVASLLAS

SEQ ID NO: 154581 - DNA, 897 bp, Schizosaccharomyces pombe
  CDS (1)..(897)
atgtctgttcaagaactttctcatcctcttattaaagatggttggtttcgtgagatcaacaacatgtggcctggtcaagccatgaccttgaaggttaaaaaggttttatatgcaggaaaatcaaagtatcaagatgttttggtctttgagagtgaaacttatggacatgttttggttttggatggtgctattcaagccactgagcgcgacgagttttcttaccaagaaatgattgctcatcttgctctaaacagtcaccccaacccaaagaaagttctcgttattggtggtggtgatggcggtgtacttcgtgaggtggtcaaacacgaatgtgtcgaagaggctatcttgtgcgatattgatgaagatgtcattaaagtctccaagcaataccttcctgagatgtccgcaggtttcaatcatcccaaggttaaggtacacattggtgacggttttaaatttttgcaagattatcaaaatacttttgatgtgattattacagactcttccgatcctgacggtcctgccgaagccttgttccaaaaaccttactttcaacttctttccgatgctcttcgtggaggcggtgtcattactactcaagctgagtgtatgtggattcatttgggtgtcatcagcaatgtcttgactgccgttaaaacagttttccccaatgttcgttacgcatacactactatccccacctatccctctggatctatcggcttcgttgtagcctccaaggatgcttccatcgaccttagcaagcctcttcgcaagtggtctcccgaagaagagaataagctttgtaagtactataacagtgaaattcatgctgcttcctttgttcttcctacctttgctcgtgatgtcgttgacaaggctacctcctcttaa

SEQ ID NO: 154582 - protein, 298 aa, Schizosaccharomyces pombe
MSVQELSHPLIKDGWFREINNMWPGQAMTLKVKKVLYAGKSKYQDVLVFESETYGHVLVLDGAIQATERDEFSYQEMIAHLALNSHPNPKKVLVIGGGDGGVLREVVKHECVEEAILCDIDEDVIKVSKQYLPEMSAGFNHPKVKVHIGDGFKFLQDYQNTFDVIITDSSDPDGPAEALFQKPYFQLLSDALRGGGVITTQAECMWIHLGVISNVLTAVKTVFPNVRYAYTTIPTYPSGSIGFVVASKDASIDLSKPLRKWSPEEENKLCKYYNSEIHAASFVLPTFARDVVDKATSS

SEQ ID NO: 154583 - DNA, 834 bp, Thermoanaerobacter tengcongensis MB4
  CDS (1)..(834): transl_table=11
atggaactttggtttacagaacatcaagatgaaaatttgaggttttctattaaggtaaaggagacgctagttgttgaaaaaactccttatcagcatctagcaattttggacagctatcaatttgggagggttttagtactggatggaatcctccagactacggaaaaagacgaatttgtgtaccatgaaatgatagtccatgtgcctttatttacccataaaaatcctaaagatgtgcttataataggaggaggagatggaggctcagtaagggaggttttgaagcattcatctgttgagagggttgttttggctgaaattgatgaggcagttataagaaactcaaaaaaatatttgcctaccataagcagtgctctagatgaccccagagtagaaataatgattggagatgggataaaatatgtcaatgagcataaaaacgaatttgatgtagtaattgttgactccactgacccaatagggcctgcagtaggactttttacttcagacttttacagagctgtatacgagtgcctcagagaagatggaattattgtagctcaaacagaatcgccttttatatacggaaaactgattaacaaaataagcaagatgttcaaggagatttatccgataacaaaagcttacattgctacagttcccacatatcccggtagcttgtggacatttacaatgggttctaaaaaatatgacccagaggaagtcgatataaattctatacctagaattcaaaccaagtattatacaccggaaatccataaggcggcttttgtgcttcctaaatttgtaaaagatatttttgatgaggtgtaa

SEQ ID NO: 154584 - protein, 277 aa, Thermoanaerobacter tengcongensis MB4
MELWFTEHQDENLRFSIKVKETLVVEKTPYQHLAILDSYQFGRVLVLDGILQTTEKDEFVYHEMIVHVPLFTHKNPKDVLIIGGGDGGSVREVLKHSSVERVVLAEIDEAVIRNSKKYLPTISSALDDPRVEIMIGDGIKYVNEHKNEFDVVIVDSTDPIGPAVGLFTSDFYRAVYECLREDGIIVAQTESPFIYGKLINKISKMFKEIYPITKAYIATVPTYPGSLWTFTMGSKKYDPEEVDINSIPRIQTKYYTPEIHKAAFVLPKFVKDIFDEV

SEQ ID NO: 154585 - DNA, 861 bp, Buchnera aphidicola str. Sg (Schizaphis graminum)
  CDS (1)..(861): transl_table=11
atgattaacgaaaaaatatggcatgaaaaacttcatcgtcatgttggacaatatttttcaattgataaaatattatatcaaaaaaaaaataaataccatgatattatcatttttcaaaattcgattatgggacgaattatggcaatagatggtgtcgttcaaacaacagaaaaagatgaatttatatatcatgaaatgttaactcatgtgcctatattttatcacgggttgataaaaaatgtactaatagtaggtggaggagacggcggtatactacgagaaatatgtcgacataagagtattgaaaatatcactatggttgaaattgacttaaatattattgatttatgtaaacaattttttcccaaacataacaataatgcatataaagatccacgtctaaaaatagttatagataatggattaaacttcgtacaaaaaacaaaagaaaaatttgatcttattatatcagattccactgatccaattggttgtggaaaagatttatttttatcagatttttactttcattgtaagaattgtcttgttaaaaacggtatatttgtaggacaaaatggcgttttttttcttcaaaaaaatgatattaatcaaagctataaaaatttaaaaaaaaactttcatgacgtaagtttttatcaagcaactattcctagttattatggtggaacaatgatgttttcttggggtactgataatatagattttcgtcaaataaatattaaaaatttagaaaaacgtataaaagataaaaaattaacttttaattactataattccaatattcatataagcagtttttatttacctcaatatataattaatacattagataaaagttaa

SEQ ID NO: 154586 - protein, 286 aa, Buchnera aphidicola str. Sg (Schizaphis graminum)
MINEKIWHEKLHRHVGQYFSIDKILYQKKNKYHDIIIFQNSIMGRIMAIDGVVQTTEKDEFIYHEMLTHVPIFYHGLIKNVLIVGGGDGGILREICRHKSIENITMVEIDLNIIDLCKQFFPKHNNNAYKDPRLKIVIDNGLNFVQKTKEKFDLIISDSTDPIGCGKDLFLSDFYFHCKNCLVKNGIFVGQNGVFFLQKNDINQSYKNLKKNFHDVSFYQATIPSYYGGTMMFSWGTDNIDFRQINIKNLEKRIKDKKLTFNYYNSNIHISSFYLPQYIINTLDKS

SEQ ID NO: 154587 - DNA, 867 bp, Shigella flexneri 2a str. 301
  CDS (1)..(867): transl_table=11
atggccgaaaaaaaacagtggcatgaaacgctacacgaccagtttgggcagtactttgcggtagataacgttctgtatcatgaaaagaccgatcaccaggatctgatcatttttgagaacgctgcatttggtcgcgtaatggcgctggatggcgtagtacaaaccaccgagcgcgacgagtttatctatcatgagatgatgacccatgttccgctactggcccacggtcacgcgaaacatgtgctgattatcggcggcggcgacggtgccatgctgcgtgaagtaacccgacataaaaacgttgagtcaatcacgatggtggaaatcgatgcgggtgtcgtgtcgttctgccgtcagtatctgcccaaccataacgccggtagctacgacgatccgcgctttcaactagtgatcgacgatggcgtcaatttcgttaatcaaaccagccagacctttgatgtcattatctccgactgcaccgatcctatcggtcccggcgaaagcctgttcacctcagcattttatgaaggctgcaaacgttgcctgaatcctggcggtatcttcgtcgcacaaaacggcgtctgctttttacagcaggaagaagccatcgacagccatcgcaaactcagccattacttcagcgacgttggcttttatcaggcggcgatcccgacctattacggcggtatcatgacttttgcatgggcgacagataacgacgccttacgccatctctcaaccgaaattattcaggcgcgttttctcgcttctggcctgaaatgccgttattacaatccggcaatccatacggcagcttttgccttacctcagtatctgcaagacgcactggcttcacagccgtcctaa

SEQ ID NO: 154588 - protein, 288 aa, Shigella flexneri 2a str. 301
MAEKKQWHETLHDQFGQYFAVDNVLYHEKTDHQDLIIFENAAFGRVMALDGVVQTTERDEFIYHEMMTHVPLLAHGHAKHVLIIGGGDGAMLREVTRHKNVESITMVEIDAGVVSFCRQYLPNHNAGSYDDPRFQLVIDDGVNFVNQTSQTFDVIISDCTDPIGPGESLFTSAFYEGCKRCLNPGGIFVAQNGVCFLQQEEAIDSHRKLSHYFSDVGFYQAAIPTYYGGIMTFAWATDNDALRHLSTEIIQARFLASGLKCRYYNPAIHTAAFALPQYLQDALASQPS

SEQ ID NO: 154589 - DNA, 846 bp, Leptospira interrogans serovar Lai str. 56601
  CDS (1)..(846): transl_table=11
ttgatggaactttggttagacgaagcattagaacttaaaaacggacgtgcgcttaaaatcaaggtaaaggagttcctgcattcaaggaccactccttttcaaaaaatagacgtattcgaatctgttggtttcggaagaatgttcactctagatggagtagtcatgatgaccgaagcggatgaatttgcgtatcatgagatgatcgttcatgttcctatgatgagtcatccaaatccggaaaaggttttggtgattggaggtggggacggaggaacggttcgcgaggttctcaaacacccttcggtaaaagaagttcatctttgtgaaattgataagggtgtaatcgatgtatgttacgagtattttcctgaaatcgcaaacgcgatgaaagatcctcgcgtaaaacacgcctatgaagacggggctaaatacgtaaaagattatcagaattatttcgattgtatcatggtagattcttctgatccggttggtcctgcagaggttctttttaaaagaccattctatgaaactatggctaactgtttaaaagaaggcggaatttgcacgactcaaggggaaagcttttactatcacgggtcgattattcgcgaactatttaattttattccagagatttttaaacattgtggttactactacacagtagttccgacctatccttctgggatcattggatttacctactgttccaaaggtcctgatccgtacactgtagttcctgatccccaaagagttccgcagggattaaagtattattctgcagaaatgcacaaagcggcgtttgtacttccacaatttgcgcagaaacatatcgttcgaaaataa

SEQ ID NO: 154590 - protein, 281 aa, Leptospira interrogans serovar Lai str. 56601
MMELWLDEALELKNGRALKIKVKEFLHSRTTPFQKIDVFESVGFGRMFTLDGVVMMTEADEFAYHEMIVHVPMMSHPNPEKVLVIGGGDGGTVREVLKHPSVKEVHLCEIDKGVIDVCYEYFPEIANAMKDPRVKHAYEDGAKYVKDYQNYFDCIMVDSSDPVGPAEVLFKRPFYETMANCLKEGGICTTQGESFYYHGSIIRELFNFIPEIFKHCGYYYTVVPTYPSGIIGFTYCSKGPDPYTVVPDPQRVPQGLKYYSAEMHKAAFVLPQFAQKHIVRK

SEQ ID NO: 154591 - DNA, 864 bp, Drosophila melanogaster
  CDS (1)..(864)
atggattcccttaacaacggatggttcagcgaactgcaggccgatctctggcccggtcagtcattctccctgaaagtcaaggaggtcatccacaaggagaagtcccggttccaagacatccagatcgttgaaaccgaaacctatggacggtgcctaattctggacggaatcattcagtgcacggccagggatgagttctcgtaccaggagatgatatctttcctgccgctctgcgcccatcccaatcccaaaaaggtcctgatcgtgggcggtggcgatggcggcgttgctcgcgaggtggtaaagcatccactggtcgaggaagtgcatcaggtggaaatcgacgaccgtgtcgtcgagctgtccaagcaatatctcccagcgatggcctgtggtttcgccaacgagaagttgaagcttaccattggcgatggattcgactatatgaagaaacacaagaacgaatttgatgtcatcatcaccgacagctcggatcccattggtccggcagtgagcctgtttcaggaaagctactacgagctaatgaaacacgcgctgaaggatgacggaatcgtgtgctcccagggcggtagcttctggctggacctggactacatcaagaagaccatgtccggctgcaaggagcactttgctaaggtggcctatgccgtcacctccgttccgtcctatccctgcggccacattggcttcgtcatgggctccctgaacaaaaaccaggacttcgctactcccaagcttggaaagtccgaaatcgattctatagacctaaggtactactcctccgaggttcactccgccgcctttgccttgcctcgatgggtgcagaagcacttttacgaatga

SEQ ID NO: 154592 - protein, 287 aa, Drosophila melanogaster
MDSLNNGWFSELQADLWPGQSFSLKVKEVIHKEKSRFQDIQIVETETYGRCLILDGIIQCTARDEFSYQEMISFLPLCAHPNPKKVLIVGGGDGGVAREVVKHPLVEEVHQVEIDDRVVELSKQYLPAMACGFANEKLKLTIGDGFDYMKKHKNEFDVIITDSSDPIGPAVSLFQESYYELMKHALKDDGIVCSQGGSFWLDLDYIKKTMSGCKEHFAKVAYAVTSVPSYPCGHIGFVMGSLNKNQDFATPKLGKSEIDSIDLRYYSSEVHSAAFALPRWVQKHFYE

SEQ ID NO: 154593 - DNA, 846 bp, Clostridium tetani E88
  CDS (1)..(846): transl_table=11
ttggatttatggctaaaagaaggtcaaatttcagatgctgttatgacctataaaataaaagaaacccttgttaggaaaaagactgaatatcaagacttggctatagtagatacttatgcccttggaagaatgcttgttttagatggcatagttcaaacttctattaaggatgaatatgtataccatgaaatgataacacatatacctctttacactcacccaaatcctaaaaaagttttagttgttggtggtggagacggtggtactataagagaaatactaaagcacccatctgtagaaaaagctgtgctttgtgaaatagatgaagaagtagttaaagaatgcaaaaaacatcttcctgaaataagcaataatgctttagaagatagccgttgtgaagttttcataggagatggaataaagtatgtaaatgaacataaaaatgaatttgatgtagtaataatagactctactgaccccttcggagcagctgaaggactttttggtggaagcttttatggtaaaatatcagaatgtctaacagaagatggtatatttgtagctcaaacagaaactcctttctatttacctgaaatagtaaaaagagtttatgatgattctaaagcagtatttccagttacaaaactgtttatggctgctattcctacttatccatcagggtattggagcttcactattggatctaagaaacacgatcctgaaaaggcaccagttccagaagttttaccttttgaaaccaaatattacactccaagactacattcagcatcatttgttttacctaaatttgtagaaaaccttatattcgctaatattagcgaataa

SEQ ID NO: 154594 - protein, 281 aa, Clostridium tetani E88
MDLWLKEGQISDAVMTYKIKETLVRKKTEYQDLAIVDTYALGRMLVLDGIVQTSIKDEYVYHEMITHIPLYTHPNPKKVLVVGGGDGGTIREILKHPSVEKAVLCEIDEEVVKECKKHLPEISNNALEDSRCEVFIGDGIKYVNEHKNEFDVVIIDSTDPFGAAEGLFGGSFYGKISECLTEDGIFVAQTETPFYLPEIVKRVYDDSKAVFPVTKLFMAAIPTYPSGYWSFTIGSKKHDPEKAPVPEVLPFETKYYTPRLHSASFVLPKFVENLIFANISE

SEQ ID NO: 154595 - DNA, 861 bp, Pseudomonas syringae pv. tomato str. DC3000
  CDS (1)..(861): transl_table=11
atgagcgattatcaggaaacgttgtacgaaggctacggccagcgctttcgtatggaaaaaatgctgcacgaagtacgcaccgagcatcagcacctggttattttccagaacccgcgcatgggccgggtcatggcgctggatggcgtgatccagaccaccgaagcggatgagttcatctatcacgaaatgctcactcacgtgccgattctggcccatggcgctgccaaacgcgtactgatcattggcggcggcgatggcggtatgctgcgcgaagtcgccaagcacctgaccgtcgagcacatcaccatggtcgagatcgacgccacggtagtcgagatgtgcaaggagttcctgcccaatcactccagtggcgcttttgatgattcgcgtctgaacctggtcatcgacgatggcatgcgctttgtagcgaccaccgaagaaaaattcgacgtgatcatttccgattccaccgacccgatcggtccaggtgaagtgctgttctcggaaaacttctatcaggcctgccatcgctgcctgaacgagggcggcattctggtcacccagaacggcacgcctttcatgcagttgagcggcgtgcaaaccacggccgggcgcatgaacggtctgtttgccgattggcatttctatcaggcggccatcccgacctacatcggcggggcaatgaccttcgcgtggggcgctaccgacaagagctatcgcaaactgccgctggaaactctgcgtcagcgcttctcgggcagcggtattgttacgcgctattacaatccggaagttcacatcggcgcattcgccttgccacagtacgtgctgcacgctgtgaacaaggccagtaacgactga

SEQ ID NO: 154596 - protein, 286 aa, Pseudomonas syringae pv. tomato str. DC3000
MSDYQETLYEGYGQRFRMEKMLHEVRTEHQHLVIFQNPRMGRVMALDGVIQTTEADEFIYHEMLTHVPILAHGAAKRVLIIGGGDGGMLREVAKHLTVEHITMVEIDATVVEMCKEFLPNHSSGAFDDSRLNLVIDDGMRFVATTEEKFDVIISDSTDPIGPGEVLFSENFYQACHRCLNEGGILVTQNGTPFMQLSGVQTTAGRMNGLFADWHFYQAAIPTYIGGAMTFAWGATDKSYRKLPLETLRQRFSGSGIVTRYYNPEVHIGAFALPQYVLHAVNKASND

SEQ ID NO: 154597 - DNA, 828 bp, Bacillus cereus ATCC 14579
  CDS (1)..(828): transl_table=11
atggaactatggttcactgaaaaacaaacaaaacattttgggattacggcgcgtattaaccgcacattacatacggagcaaacagaattccaaaaacttgatatggttgaaacggaagagttcggaaacatgcttattttagatggcatggttatgacaacagaaaaggacgagttcgtttatcacgaaatggtagcgcacgtacctttatttacacatccaaaccctgaaaacgtattaattgttggtggcggtgatggtggtgttattcgtgaagtgttaaaacacccaagtgtaaagaaagcaactcttgttgaaatcgatggaaaagtaattgagtactctaaacaatacttaccatcaattgcaggcgcattagataatgagcgtgtagaagtaaaagtaggagacggtttcctacatatcgcagaaagcgaaaatgaatacgatgtaattatggtagattctactgagccagtaggaccagcagtaaacctatttacaaaaggcttctacgctggaatttcaaaagcgttaaaagaagatggtattttcgttgcacaaacggacaacccttggttcacaccagagttaattacaactgtgtttaaagacgtaaaagagatcttcccaatcactcgtttatacacagcaaacattccaacttacccaagtggtctttggacgttcacaattggatctaaaaaacatgatccattagaagtaattgaagagcgtttccacgaaatcgaaacgaaatactacacaaaagaattacacaatgcagcattcgcattaccgaaatttgttggcgatttaattaagtaa

SEQ ID NO: 154598 - protein, 275 aa, Bacillus cereus ATCC 14579
MELWFTEKQTKHFGITARINRTLHTEQTEFQKLDMVETEEFGNMLILDGMVMTTEKDEFVYHEMVAHVPLFTHPNPENVLIVGGGDGGVIREVLKHPSVKKATLVEIDGKVIEYSKQYLPSIAGALDNERVEVKVGDGFLHIAESENEYDVIMVDSTEPVGPAVNLFTKGFYAGISKALKEDGIFVAQTDNPWFTPELITTVFKDVKEIFPITRLYTANIPTYPSGLWTFTIGSKKHDPLEVIEERFHEIETKYYTKELHNAAFALPKFVGDLIK

SEQ ID NO: 154599 - DNA, 828 bp, Bacillus anthracis str. Ames
  CDS (1)..(828): transl_table=11
atggaactatggttcactgaaaaacaaacaaaacattttgggattacggcgcgtattaaccgcacattacatacggagcaaacagaattccaaaaacttgatatggttgaaacggaagagttcggaaacatgcttattttagatggcatggttatgacgacagaaaaagatgagtttgtgtaccatgaaatggtagcacacgtacctttatttacacatccaaaccctgaaaacgtattagttgttggtggcggtgatggcggtgttattcgtgaagtgttaaaacacccaagcgtaaagaaagcaactcttgttgaaatcgatggaaaagtaattgagtactctaaacaatacttaccatcaattgcaggtgcattagataatgagcgtgtagaagtgaaagtaggagacggtttcctacatatcgcagaaagcgaaaatgaatatgacgtaattatggtagattctactgagccagtaggaccagcagtaaacctatttacaaaaggcttctacgctggaatttcaaaagcgttaaaagaagatggtattttcgttgcacaaacggacaacccttggtttacaccagaattaattacaactgtgtttaaagacgtaaaagagatcttcccaattactcgtttatacacagcgaacattccaacttacccaagtggtctttggacgttcacaattggatctaaaaaacatgatccattagaagtaagtgaagagcgtttccacgaaatcgaaacgaaatactatacaaaagaattacacaatgcagcattcgcattaccgaaatttgttggcgatctaattaagtaa

SEQ ID NO: 154600 - protein, 275 aa, Bacillus anthracis str. Ames
MELWFTEKQTKHFGITARINRTLHTEQTEFQKLDMVETEEFGNMLILDGMVMTTEKDEFVYHEMVAHVPLFTHPNPENVLVVGGGDGGVIREVLKHPSVKKATLVEIDGKVIEYSKQYLPSIAGALDNERVEVKVGDGFLHIAESENEYDVIMVDSTEPVGPAVNLFTKGFYAGISKALKEDGIFVAQTDNPWFTPELITTVFKDVKEIFPITRLYTANIPTYPSGLWTFTIGSKKHDPLEVSEERFHEIETKYYTKELHNAAFALPKFVGDLIK

SEQ ID NO: 154601 - DNA, 882 bp, Ashbya gossypii ATCC 10895
  CDS (1)..(882)
atgtcggacgaaattacccaccccacgatcaaagacggatggttcagagagatctcggacaccatgtggcccgggcaggcgatgaccctacgggttgagaaggtcctacaccacgagaagtcgaagtaccaagacgtgctggttttcaagtcgaccaaccacggcaacgtgctggtgcttgacaacgtagtgcaatgcagcgagcgcgacgagtttgcgtaccaggagatgatcacccatctggccatgaacctgcacgccaacccgaagaaggtgctcgtgatcggcggcggcgacggcggtgtgctgcgcgaggtgctcaaacacgagtctgtcgaggaggcgtggctctgcgacatcgacgaagcggtcatccgcgtgtccaagcaatacttgccggagatgtcgcgttcgtacgaacaccccaaggttaagacgcacatcggcgacggcttccagttcctgcgcgactacccgaacacgtttgatgtcatcatcacagactcgtcggaccccgagggccctgcagaggcgctgttcgagcagccctacttctcgctgctgaaccaggcgctgacagagaacggtgtcatcacgacgcaccccgagtcgctcttcattcacatggagatcatcaagcagctgaagggcacatgctcccaattgttccccaacgtggggtacgcctatgcatctgtccctacctacccctcgggccagatcggcttcatggtgtgcagcaagaacgcagacattgagctcagcaagccattgagaaccatttccgacgagcaagagcgcgaactgtacaaatactacagcaagaagatgcacgaagcctgcttcgtgctcccaaccttcgctgctaaagaactaaactag

SEQ ID NO: 154602 - protein, 293 aa, Ashbya gossypii ATCC 10895
MSDEITHPTIKDGWFREISDTMWPGQAMTLRVEKVLHHEKSKYQDVLVFKSTNHGNVLVLDNVVQCSERDEFAYQEMITHLAMNLHANPKKVLVIGGGDGGVLREVLKHESVEEAWLCDIDEAVIRVSKQYLPEMSRSYEHPKVKTHIGDGFQFLRDYPNTFDVIITDSSDPEGPAEALFEQPYFSLLNQALTENGVITTHPESLFIHMEIIKQLKGTCSQLFPNVGYAYASVPTYPSGQIGFMVCSKNADIELSKPLRTISDEQERELYKYYSKKMHEACFVLPTFAAKELN

SEQ ID NO: 154603 - DNA, 843 bp, Methanococcus maripaludis S2
  CDS (1)..(843): transl_table=11
atgaaattcgatgcatggtatacggaaccacaaactgaaaatttaagcctttcaaccaaattaaaagacatactctatgttgggcaatcagaataccaagaaattcaagttcttgacacttacgagtttggaagagtcttgattttagaaaacacgtaccaaactactgaaagagatgaatttatataccacgaattgatttcacaccctgcactctttacgcacggaaaccctaaaaaagttcttgtcatcggtggaggagatggcggatctgtcagggaagttttaaaacataaaagcgttgaaaaaatagattttgttgaactcgatggacaggttgtagaggttgcaaaaaaattccttccaaccctaagctgcgaaatagacaacgagaaagtaaacacgataattacggatggaattaaatacgttgcagaaacttctgaaaaatacgatgtaatcctcgtagactgcccagacccagttggccctgctgcaggattattcgaaaaagaattctacaacaacctctacaagtgcttaaatgatgatggaatcatggtacagcagacagaaagcccgcttttacatgaaaaattgataaataaaatcaaaggacacttaaaagatgctggcttttcaacgatccgcccactcgtatgtagtattccaacatacccaagcggattctggagctttacactagcttcaaagaaaaacgatccattaaattccgatgtttcagaaattgaaaacaaattaaaagatatgactacaaaatactacgatcaggacgttcacaagggagtatttttagcaacacctagatacttaaaagaataa

SEQ ID NO: 154604 - protein, 280 aa, Methanococcus maripaludis S2
MKFDAWYTEPQTENLSLSTKLKDILYVGQSEYQEIQVLDTYEFGRVLILENTYQTTERDEFIYHELISHPALFTHGNPKKVLVIGGGDGGSVREVLKHKSVEKIDFVELDGQVVEVAKKFLPTLSCEIDNEKVNTIITDGIKYVAETSEKYDVILVDCPDPVGPAAGLFEKEFYNNLYKCLNDDGIMVQQTESPLLHEKLINKIKGHLKDAGFSTIRPLVCSIPTYPSGFWSFTLASKKNDPLNSDVSEIENKLKDMTTKYYDQDVHKGVFLATPRYLKE

SEQ ID NO: 154605 - DNA, 882 bp, Apis mellifera
  CDS (1)..(882)
atggatgcgatcaaacctggatggttcagtgaaattaacgatctgtggccaggtgtatcattgtccctcgaggtcgtcaaggtactccatcgagaacgatcgcagtatcaggacgtgatggtgctcgaaacgaaatcacatggaaggaccctaattttagatggtatcattcagtgcacggagagagacgagttttcgtatcaggagatgattgctttcctaccattgtgcagccatccaaatccaaaaactgttttgatagttggaggtggagatggcggagttgctcgcgaagtagctaaacatccacaggtggaacggatcgtgcaagtcgagatcgatccaaaagtgttagaggtatcgaaaaaatacttgccctcgatgggtgtcgggctggatcaccctaaagtcacgcttaacataggcgatggttttcaattcttgaagcaacacagtggccaatttgacgttataatcaccgatagcagtgacccggtcggtccggcagagtgcctatttcaagaatcatactttaatctaatgaaaagtgcgttgaaaccagatggaatcgtttgcagtcaagcggggactgcgtggttgaacctcgatcacgtgacgcaaacattgcaacgttgcaaatctttgttcccagttgcgtcttatggcgttgtttccgtgcctacttatcctacaggtcaaattggattcgtgctcgggggattaaatcctgaaacgaatttcaaggagccaacaaaagttttcaacgacaccgagcttgaccagatgaatatgaaatactataacgatcaagtgcatcgggcagcatttattctcccaaggtttataacaaaggcattggacaagtcactcgctaaaaactag

SEQ ID NO: 154606 - protein, 293 aa, Apis mellifera
MDAIKPGWFSEINDLWPGVSLSLEVVKVLHRERSQYQDVMVLETKSHGRTLILDGIIQCTERDEFSYQEMIAFLPLCSHPNPKTVLIVGGGDGGVAREVAKHPQVERIVQVEIDPKVLEVSKKYLPSMGVGLDHPKVTLNIGDGFQFLKQHSGQFDVIITDSSDPVGPAECLFQESYFNLMKSALKPDGIVCSQAGTAWLNLDHVTQTLQRCKSLFPVASYGVVSVPTYPTGQIGFVLGGLNPETNFKEPTKVFNDTELDQMNMKYYNDQVHRAAFILPRFITKALDKSLAKN

SEQ ID NO: 154607 - DNA, 900 bp, Strongylocentrotus purpuratus
  CDS (1)..(900)
atggatgcgctgaagaaaggctggttcagtgaactaggaacactgtggccaggagaagccgcgtcgctggaagtggaggaagttttgtttcatgagcgatccaaatttcaagatgttcttgttttcaagagtaagacatatggcaatgttttggtactcgatggtgtcattcagtgtacggagagagatgagtttagctaccaagaaatgatcacctttcttccactgaactctcatccatgccctaagaaggtgctagtcattggtggaggtgatggaggggtcatccgtgaggtcgtcaaacatcctgatgtcgagtctgtgacacaatgtgagatagatgggtgtgttgtagaagtgtccaagaagtacctgccaaacatgtcaaagggatacgacagtccgaagctcacccagcatataggtgacgggttcgcctatatgaaggagaacaagaatgcctttgatgtcatcataacagattcttcagatcctgtagggcctgctgaaatgctcttcgagaaggagtactttgagttaatgaggagtgcgcttaaaccaggaggcatcatctgtacacaaggagaatcattatggcttcatctagaccttatcaagtcaatgcagaagttctgccggacactgtacccagtggtagagtatgctttcacaacgataccaacctatccatctggtcagattggttttaccctctgcagtacaagttcggacactgacttcagagatcctgtacataaactctcggatgagcagatcaaagagctgggactgaagtattacaactccgacgttcataaagctgcttttgtgctaccccagttcgccaaagaggtacagatatgtgtcccctttgatattgacctcctcaccccctcctaa

SEQ ID NO: 154608 - protein, 299 aa, Strongylocentrotus purpuratus
MDALKKGWFSELGTLWPGEAASLEVEEVLFHERSKFQDVLVFKSKTYGNVLVLDGVIQCTERDEFSYQEMITFLPLNSHPCPKKVLVIGGGDGGVIREVVKHPDVESVTQCEIDGCVVEVSKKYLPNMSKGYDSPKLTQHIGDGFAYMKENKNAFDVIITDSSDPVGPAEMLFEKEYFELMRSALKPGGIICTQGESLWLHLDLIKSMQKFCRTLYPVVEYAFTTIPTYPSGQIGFTLCSTSSDTDFRDPVHKLSDEQIKELGLKYYNSDVHKAAFVLPQFAKEVQICVPFDIDLLTPS

SEQ ID NO: 154609 - DNA, 876 bp, Aspergillus terreus NIH2624
  CDS (1)..(876)
atgtccgacatcactcaccccactatcaaggatggctggttctccgagcagtccgacatgtggcccggccaggccatgaacctcaaggtcaaccagatcctgcaccacgaaaagtccaagtaccaggatgtcctcgtcttcgagagcagcgactacggcactgtcctggtcctcgacaacgtcatccagtgcaccgagcgcgacgagttctcctaccaggagatgatcacccacctggccatgaactcccaccccgaccccaagaaggtcctggtcattggcggtggtgatggcggtgtcctccgtgaggtcgtcaagcacgaatgcgtcgaggaggccatcctgtgcgacattgacgaggccgtcatccgcgtctccaagaagtacctccccggcatgagcgtcggcttccagcaccccaaggtcaaggtccacgtcggcgacggcttcgagttcctcaagaaccgccagaacgagttcgacgttatcatcaccgacagctccgaccccgagggccccgccgagtccctcttccagaagccctacttcgagctcctccgcgatgctctccgtgacggcggtgtgatcaccacacaagccgaaaaccaatggctgcacctgtccctgatcaccgacctcaagaaggcctgcaaggaggtcttccccgtcgccgaatacgcctacaccaccatccccacctacccctccggccagatcggcttcatggtctgctgcaaggacgcctcccgcaacgtccgcgagcccgtccgctcctggtcgcgcgaggaggaggagcgtctctgccgctactacaaccaggacatccaccgcgccagcttcgtcctgcccaacttcgcccgcaaggccctgaactaa

SEQ ID NO: 154610 - protein, 291 aa, Aspergillus terreus NIH2624
MSDITHPTIKDGWFSEQSDMWPGQAMNLKVNQILHHEKSKYQDVLVFESSDYGTVLVLDNVIQCTERDEFSYQEMITHLAMNSHPDPKKVLVIGGGDGGVLREVVKHECVEEAILCDIDEAVIRVSKKYLPGMSVGFQHPKVKVHVGDGFEFLKNRQNEFDVIITDSSDPEGPAESLFQKPYFELLRDALRDGGVITTQAENQWLHLSLITDLKKACKEVFPVAEYAYTTIPTYPSGQIGFMVCCKDASRNVREPVRSWSREEEERLCRYYNQDIHRASFVLPNFARKALN

SEQ ID NO: 154611 - DNA, 852 bp, Chaetomium globosum CBS 148.51
  CDS (1)..(852)
atgaatgggtggttccgcgagatctcggagatgtggcccggccaggccatgaccctccgggtcaagaaggtgttgcatcacgagaagagcaagttccaggacgtcctgatcttcgagtccaccaaccatggaaacgtgctcgtcctcgacaatgtcattcagtgcaccgagcgggatgagttctcgtaccaggagatgatcacccacctggctatgaactcgcatcccaaccccaagaaggtcctcgtcatcggtggtggcgacggcggtgtcctgcgcgaggttgtcaagcacgagtgcgtggaggaggccaccctctgcgacattgatgaggccgtcatccgcctctccaagaagtacctcccccacatgtcggctggcttcaaccactccaaggtcaaggtccacatcggcgacggcttcaagttcctcgacgactacaagaacaccttcgacgtcatcatcacggactcttctgaccccgagggcccggccgagtcgcttttccagaagccctacttcaagctccttcacgatgctctccgcgagggcggcgttattaccacccaaggttccgagaaccaatggctccacctgccgctgatcaccaagctcaagaaggactgcggcgagatcttccccgtggccgagtacgcttacaccaccatcccgacatacccgtcgggccagatcggcttcatggtctgctgcaaggacgccaaccgcaacgtgcgcgagcctgtccgctcgtggagcaaggaggaggagcgcaagctgtgccggtactacaacgccgacatccacaaggccagcttcgtccttcccacctttgcgcaggaggccctggaataa

SEQ ID NO: 154612 - protein, 283 aa, Chaetomium globosum CBS 148.51
MNGWFREISEMWPGQAMTLRVKKVLHHEKSKFQDVLIFESTNHGNVLVLDNVIQCTERDEFSYQEMITHLAMNSHPNPKKVLVIGGGDGGVLREVVKHECVEEATLCDIDEAVIRLSKKYLPHMSAGFNHSKVKVHIGDGFKFLDDYKNTFDVIITDSSDPEGPAESLFQKPYFKLLHDALREGGVITTQGSENQWLHLPLITKLKKDCGEIFPVAEYAYTTIPTYPSGQIGFMVCCKDANRNVREPVRSWSKEEERKLCRYYNADIHKASFVLPTFAQEALE

SEQ ID NO: 154613 - DNA, 879 bp, Coccidioides immitis RS
  CDS (1)..(879)
atgacggaaatcacacatcctaccatcaaagatggatggttctccgagatctctgatatgtggcccggccaggccatgactctccgggttaaccagatcctccaccacgagaaatccaagtatcaagatatcctcatttttgagagcaccgaccatggcacctgcttggttttggacaatgtgatccagtgcacagagcgcgatgaattctcctaccaggagatgatcactcaccttgccatgaactcccacccaaaccccaagaaggtcctcgtcattggcggaggtgacggtggtgtcctccgtgagatcgtcaagcacgaatcagtcgaggaggccattctctgcgatatcgatgaagccgtcattcgtgcatctaagaaatatcttcctggcatgagcataggcttccagcaccctaacgtcaaggtccacatcggagacggcttcaagttcctcgaggagagaaagaacgaattcgacgttatcattaccgacagctctgaccctgagggccctgctgaggttctgttccagaagccttacttcgaattgctctacggctctctccgagagggcggtgtcatcagtactcaaggttctgagaaccaatggcttcacattaagctcatcaccgacctcaagaagctcatgaaggaagtcttccccgtcgttgaatacgcctacaccagcatccctacctatccatccggccagatcggattcctcgtcgcctgcaaggaccccaaccgcaatatccgtgagcccgtgcggtcatggaccagagaggaggaggacaagctgtgcagatactacaaccaggacatccaccgcgccagcttcgttctgccaggcttcgccagaaaggctctggagtaa

SEQ ID NO: 154614 - protein, 292 aa, Coccidioides immitis RS
MTEITHPTIKDGWFSEISDMWPGQAMTLRVNQILHHEKSKYQDILIFESTDHGTCLVLDNVIQCTERDEFSYQEMITHLAMNSHPNPKKVLVIGGGDGGVLREIVKHESVEEAILCDIDEAVIRASKKYLPGMSIGFQHPNVKVHIGDGFKFLEERKNEFDVIITDSSDPEGPAEVLFQKPYFELLYGSLREGGVISTQGSENQWLHIKLITDLKKLMKEVFPVVEYAYTSIPTYPSGQIGFLVACKDPNRNIREPVRSWTREEEDKLCRYYNQDIHRASFVLPGFARKALE

SEQ ID NO: 154615 - DNA, 879 bp, Neosartorya fischeri NRRL 181
  CDS (1)..(879)
atgtccgagatcactcaccccactatcaaggatggctggttctccgagcagtcggatatgtggcccggccaggccatgaacctcaaggtcaaccagatcctgcaccacgagaagtccaagtaccaggatgtgcttgtcttcgagagcaccgactacggcaccgttctcgttctggacaacgtcatccagtgcaccgagcgggatgagttctcgtaccaggagatgattactcacctggccatgaactcccaccccaaccccaagaaggttctggtcatcggtggtggagatggtggtgtcctccgtgaggttgtcaagcacgagtccgtcgaggaggccatcctgtgcgacattgacgaggctgtcatccgtgtctccaagaagtacctccccggcatgagcatcggcttccagcaccccaacgtcaaggtccacattggcgacggcttccagttcctcaaggagcgcaagaacgagttcgacgtcatcatcaccgacagctctgaccctgagggacccgccgagagtctcttccagaagccctacttcgagctcctgcgcgatgctctccgtgacggaggtgtcatcactacacaagccgagaaccaatggctgcatctgtctctcatcaccgacctcaagaaggcctgcaaggaggtcttccccgtcgccgaatacgcctacaccacaatccccacctacccctccggccagatcggcttcatggtctgctgcaaggacgccaaccgcaatgtccgtgagcccgtccgcacttggtcccgcgaggaggaggagcgtctctgccgctactacaaccaggacattcaccgggccagcttcgttctgcccaactttgcccgcaaggctctggatgcgtga

SEQ ID NO: 154616 - protein, 292 aa, Neosartorya fischeri NRRL 181
MSEITHPTIKDGWFSEQSDMWPGQAMNLKVNQILHHEKSKYQDVLVFESTDYGTVLVLDNVIQCTERDEFSYQEMITHLAMNSHPNPKKVLVIGGGDGGVLREVVKHESVEEAILCDIDEAVIRVSKKYLPGMSIGFQHPNVKVHIGDGFQFLKERKNEFDVIITDSSDPEGPAESLFQKPYFELLRDALRDGGVITTQAENQWLHLSLITDLKKACKEVFPVAEYAYTTIPTYPSGQIGFMVCCKDANRNVREPVRTWSREEEERLCRYYNQDIHRASFVLPNFARKALDA

SEQ ID NO: 154617 - DNA, 882 bp, Aspergillus clavatus NRRL 1
  CDS (1)..(882)
atgtccgagatcactcaccccactatcaaggatggctggttctccgagcagtcgggcatgtggcccggccaggccatgaacctcaaggtgaaccagatcctgcaccacgagaagtccaagtaccaggatgtcctcgtcttcgagagcaccgactatggtaccgttctcgttctcgacaacgtcatccagtgcaccgagcgtgatgagttctcgtaccaggagatgatcacccacctggccatgaactcccaccccaaccccaagaaggttctggttatcggtggtggtgacggtggtgtcctccgtgaggtcgtcaagcacgagaccgtcgaggaggccatcctctgcgatatcgatgaggctgtcatccgtgtctccaagaagtacctccccggcatgagcatcggcttccagcaccccaacgtcaaggtccacgtcggcgatggtttccagttcctcaaggagcgccgcaacgagttcgacgtcatcatcaccgacagctctgaccccgagggtcccgccgagagcctcttccagaagccctacttcgagcttctccgtgacgctcttcgcgaaggaggtgtcatcaccacacaaggttccgagaaccaatggcttcaccttcctctcatcaccgacctcaagaagtcgtgcaaggaggtcttccccgtcgccgaatacgcctacaccaccatccctacctacccctccggccagatcggcttcatggtctgctgcaaggatgccacccgcaacgtccgcgagcccgtccgctcttggtcccgcgaggaggaggagcgtctctgccgctactacaaccaggacatccaccgtgccagcttcgtcctgcccaactttgcccgcaaggctctggatgcgtaa

SEQ ID NO: 154618 - protein, 293 aa, Aspergillus clavatus NRRL 1
MSEITHPTIKDGWFSEQSGMWPGQAMNLKVNQILHHEKSKYQDVLVFESTDYGTVLVLDNVIQCTERDEFSYQEMITHLAMNSHPNPKKVLVIGGGDGGVLREVVKHETVEEAILCDIDEAVIRVSKKYLPGMSIGFQHPNVKVHVGDGFQFLKERRNEFDVIITDSSDPEGPAESLFQKPYFELLRDALREGGVITTQGSENQWLHLPLITDLKKSCKEVFPVAEYAYTTIPTYPSGQIGFMVCCKDATRNVREPVRSWSREEEERLCRYYNQDIHRASFVLPNFARKALDA

SEQ ID NO: 154619 - DNA, 879 bp, Drosophila pseudoobscura pseudoobscura
  CDS (1)..(879)
atggatacgatatcttgcggctggtttagtgaaattcaggccgagctatggcctggacaggcattttccttgaaagtaaaaaatgtcattcataaagaaaagtcaaaataccaagatattcaaataattgaaactgaaacatatgggaagtgcttaatattggatggaataatacaatgcacgtcaagagatgaattttcgtaccaggaaatgatagcatttctacctcttttttctcatccgaatccaaaaaaagtcttgattgttggtggcggcgatggtggcgtggcgcgtgaagttgtaaaacatcccttggtagaagaagtacatcaaatagaaatagacgaacgcgttgtggaactttcaaaacaacatttacctgaaatggcatgcgggtttaagagcgaaaaattaaagctaactattggcgatggttttgagtacatgaaaaaacataaaaatgaatttgatgtcattataacggatagctcggatccaattggtccagcagtaagcttgttcaatgaaagctattataaattaatgaaacatgctttaaaagaagatggaatcgtgtgctctcaaggaggtagtttttggttagacttgagttacataaaaaaaacaatgtctggttgcaaagagcacttcccaaaagtttcctatgccataacttcagttccctcttatccttgtggtcatataggttttgttatcggttctttgaacaaaaatcaaaagttcattaactctgtaaataaaataaaaaattttgatatcgaagcgctaaatttaaaatactatacaccggaagtacatgatgcagcttttgcattgccacgatgggtacagaaaagcttaatgtcggacataatttaa

SEQ ID NO: 154620 - protein, 292 aa, Drosophila pseudoobscura pseudoobscura
MDTISCGWFSEIQAELWPGQAFSLKVKNVIHKEKSKYQDIQIIETETYGKCLILDGIIQCTSRDEFSYQEMIAFLPLFSHPNPKKVLIVGGGDGGVAREVVKHPLVEEVHQIEIDERVVELSKQHLPEMACGFKSEKLKLTIGDGFEYMKKHKNEFDVIITDSSDPIGPAVSLFNESYYKLMKHALKEDGIVCSQGGSFWLDLSYIKKTMSGCKEHFPKVSYAITSVPSYPCGHIGFVIGSLNKNQKFINSVNKIKNFDIEALNLKYYTPEVHDAAFALPRWVQKSLMSDII

SEQ ID NO: 154621 - DNA, 951 bp, Pichia stipitis CBS 6054
  CDS (1)..(951): transl_table=12
atgtctagcacagatctcgacttggaaaacatacccagcatagacttgcaaactttcacccatgcctctgtgtccaagcagggcgacaagtactggttctttgagaaaagcgaggaatccttccctggacagacgtttgggttggaaatctcgcggatcttgtaccataccgagtctcccttccaggacattcttatctttgagtccaccacttttggcaatgtgttggttctcaacggcatagttcagtgcacagaaaaggacgagtttgcctaccaggagttgataacccatttgcctatcatgtcccaccctagccccaagaaggtattggtcattgggggaggagactgtggagtcatcagagaacttgtgaagcatgtcgaggacaacaccgtcgaatctatcaccatggtagagatcgatgacatggtgatcaagttgtcgaccaaatttttgcccaacatggccaagtaccacaaccaccccaaagtgaacttgagaatcgaagacggcttcaagttcttgaaggaaaccaccgagaagttcgatgttattatcaccgattcgtcggatcccgaaggtcccgcagaggaattcttccaggtcaactactttaagttattgttaaacgcattggccaaaaagggcattgtcatcatgcagagcagcgagaatatctggctcaatatcgactacttgaaagacttgcttgttaaggcacgaattgtgtttaaaaacgttgcatacagtcagtgctacatgcctagttataccagtggacagttgggtttagttatagctactaatgatgaagaaaagacattgcaaaccccattgagacggttcctggaggagaaggagagccagatttttcagtattacagcctggaaattcatagtgcatcgtttgtgttgccaaaatgggctaagaataagttggatctatag

SEQ ID NO: 154622 - protein, 316 aa, Pichia stipitis CBS 6054
MSSTDLDLENIPSIDLQTFTHASVSKQGDKYWFFEKSEESFPGQTFGLEISRILYHTESPFQDILIFESTTFGNVLVLNGIVQCTEKDEFAYQELITHLPIMSHPSPKKVLVIGGGDCGVIRELVKHVEDNTVESITMVEIDDMVIKLSTKFLPNMAKYHNHPKVNLRIEDGFKFLKETTEKFDVIITDSSDPEGPAEEFFQVNYFKLLLNALAKKGIVIMQSSENIWLNIDYLKDLLVKARIVFKNVAYSQCYMPSYTSGQLGLVIATNDEEKTLQTPLRRFLEEKESQIFQYYSLEIHSASFVLPKWAKNKLDL

SEQ ID NO: 154623 - DNA, 879 bp, Aspergillus niger CBS 513.88
  CDS (1)..(879)
atgagcgacatcactcaccccaccatcaaggatggctggttctccgagcagtctgacatgtggcccggccaggccatgaaccttaaggttaaccagatcctccaccacgagaagtccaagtaccaggatgttcttgttttcgagagcagcgactacggcaccgtcctcgtcctcgacaatgtcatccagtgcactgagcgcgatgagttctcctaccaggagatgatcacccacctcgccatgaactcccaccccaaccccaagaaggtcctggtcatcggtggtggtgatggtggtgtcctccgtgaggtcgtcaagcacgagaccgtcgaggaggccaccctgtgcgacattgatgaggctgtcatccgtgtctccaagaagtaccttcctggcatgagcattggcttccagcaccccaacgtcaaggtccacgttggcgatggtttccagttcctcaaggagcgccagaacgagttcgatgttatcatcactgacagctctgaccccgagggtcccgctgagagcctcttccagaagccctactttgagcttctgcgcgatgcgctccgtgagggaggtgtcatcaccacacaagccgagaaccaatggctgcacctgtctctgatcaccgacctcaagaaggcctgcaaggaggttttccccgttgccgaatacgcctacaccaccatccccacctacccctccggccagatcggcttcatggtctgctgcaaggatgccactcgtaacgtcaaggagcccgttcgcagctggacccgtgaggaggaggagaagctctgccgctactacaaccaggacatccaccgtgccagcttcgttctccccaacttcgcccgcaaggctctggatgcttag

SEQ ID NO: 154624 - protein, 292 aa, Aspergillus niger CBS 513.88
MSDITHPTIKDGWFSEQSDMWPGQAMNLKVNQILHHEKSKYQDVLVFESSDYGTVLVLDNVIQCTERDEFSYQEMITHLAMNSHPNPKKVLVIGGGDGGVLREVVKHETVEEATLCDIDEAVIRVSKKYLPGMSIGFQHPNVKVHVGDGFQFLKERQNEFDVIITDSSDPEGPAESLFQKPYFELLRDALREGGVITTQAENQWLHLSLITDLKKACKEVFPVAEYAYTTIPTYPSGQIGFMVCCKDATRNVKEPVRSWTREEEEKLCRYYNQDIHRASFVLPNFARKALDA

SEQ ID NO: 154625 - DNA, 987 bp, Ostreococcus lucimarinus CCE9901
  CDS (1)..(987)
atggcggacgccgagccgagcgcgtacggcgccgagacgttcgccgaggggcactggtaccacgaactcctcgaggatgggctcgcgctgagctatcgggtcgaggaggtgctgtatcaggggacgtcgaagtttcaagaggtcgaggtcgtgcggacggtgccgttcgggtcgcttctcatcacggatgggttgatgcagtcgagcgagcacgacgagtacgtgtatcacgagtcgctggcgcatccggcgctggtggcgcacgcgaacccgaagcgggtgttcatcggtggcggtggcgagggagcgacgctgcgcgaggtgttgaggcacgagagcgtggaggagtgcgtgatggtggacatcgacggcgacgtggtgaacatgtgccgagagcacacgccgttttacagcgcgggggcgtacggggataaacgaacgcgtttgatcatcggcgacgcgaaggaaggattggcgaacgagcccgatgggagctttgacgtgatcatcatggatttgagcgacccgctcgatggggggccgtgctatcaactgtacacgacggatttctatcgattgctgagcaagaagctcgcgccgggaggaatcttcgtcacgcagagcggatgcgcgtccgtgcgcgatgcgcatcacgtcttctcaccgattcatcacactctgacgcaagtgttcccgaaagtttacggttacaccatgtgcgtgccgtcgttcacgtcagagtggggtttcaatctcgccgtaaacgacacgagcatcgacttgagcggcgtcgacgcggacgagactttgaaaaagcgtggattagagatgaagttttacgacaccgtgtcgcacaggcgcatgtttgcgctgcccaagccgctgcgcacgctcatcgataacgaaaagcgcgtgatgacggtggaaaatccgctcttcatgtgctcgacggatactcacgctggtatttttgaccaagagagctaa

SEQ ID NO: 154626 - protein, 328 aa, Ostreococcus lucimarinus CCE9901
MADAEPSAYGAETFAEGHWYHELLEDGLALSYRVEEVLYQGTSKFQEVEVVRTVPFGSLLITDGLMQSSEHDEYVYHESLAHPALVAHANPKRVFIGGGGEGATLREVLRHESVEECVMVDIDGDVVNMCREHTPFYSAGAYGDKRTRLIIGDAKEGLANEPDGSFDVIIMDLSDPLDGGPCYQLYTTDFYRLLSKKLAPGGIFVTQSGCASVRDAHHVFSPIHHTLTQVFPKVYGYTMCVPSFTSEWGFNLAVNDTSIDLSGVDADETLKKRGLEMKFYDTVSHRRMFALPKPLRTLIDNEKRVMTVENPLFMCSTDTHAGIFDQES

SEQ ID NO: 154627 - DNA, 960 bp, Ostreococcus lucimarinus CCE9901
  CDS (1)..(960)
atgaataaatacgccgacgacgcgccgcagagcgcggacaagtgcatcggcgcgtgcggtgagggatggttgtgcgaggtgagcgaaatgtggaaaggccaggcgatgtcgctgaagatcgacgaggagctgttccgcggacggagcgagtttcaagacgtgtacgtgtttaaaaactcggcgtacgggaacgtgctggtgctggacggggtgattcaggcgacggagcgggacgagttcgcgtaccaggagatgataacgcacctgccgctgtgcgcgctgaacgaggaaccgaaacgcgtgctcgtcgtcggtggcggcgatggaggcgtgctcagggaggtgacgcgacacggatcgatcgaaaggatcgagatcgcggagatcgatgggatggtggtggagatgtcgaagaaattcttgccgtcgatggcggtggggttcgacgacgcgcgagtggaggtgaatatttgcgatgggatcaagtacgtcggggacgcggaggaggggacgtacgacgccatcatcgtcgactcgagcgatccgatcggaccggcgagcgttttgttcgaggaggcgttctttaaaaagatgcaccgcgcgctcaagcccggcggcgtcgtgtgcacgcaagccgagtgcgtgtggttgcacatcgatttgatcgaggacttggcgaagatgtgcaagggtattttcgtcggtgggtccatggcgtacgggtacaccacgataccgacttacccgagcggacaaatcggtttcatgatgtgcagcaaacccgcggcggacgggtcgacggtggatttcaccaaggccaagcgatttccgcgacccgccgatgaaagcgcgctgaaaccgatgcgctattataacccgcaagtgcacgccgcggcgttcgtgctgcccgagttcgctcgcgccgcgctcgagccgcacctcgtgccgggttccgagtaa

SEQ ID NO: 154628 - protein, 319 aa, Ostreococcus lucimarinus CCE9901
MNKYADDAPQSADKCIGACGEGWLCEVSEMWKGQAMSLKIDEELFRGRSEFQDVYVFKNSAYGNVLVLDGVIQATERDEFAYQEMITHLPLCALNEEPKRVLVVGGGDGGVLREVTRHGSIERIEIAEIDGMVVEMSKKFLPSMAVGFDDARVEVNICDGIKYVGDAEEGTYDAIIVDSSDPIGPASVLFEEAFFKKMHRALKPGGVVCTQAECVWLHIDLIEDLAKMCKGIFVGGSMAYGYTTIPTYPSGQIGFMMCSKPAADGSTVDFTKAKRFPRPADESALKPMRYYNPQVHAAAFVLPEFARAALEPHLVPGSE

SEQ ID NO: 154629 - DNA, 915 bp, Pichia guilliermondii ATCC 6260
  CDS (1)..(915): transl_table=12
atggatccaaaaaaaatatcgcatcccgccattgtggagctcgacggggcgtactggttccaagaaaagtcagaagaatcgtttcctggtcaaagattttgccttgaagtcgacgagattttgcaccattcgcactctgagtttcaagatattctcatattcaagtccaagacgtttggaaatgtgttggttttgaatggcattatccagtgcaccgagaaggacgagtttgcataccaagagttgattacccacactgccatcatgtctcatgaaaaaccttcgaatgtgttggtgattggaggtggagactgtggagtagtcagagagttggtcaagcatttggatcgtggtgttgataccattactatggtggagatcgatgatatggtgatcaaattgctggctcagtacttgccgcacatggcaaagttccatgaccatcctcgggtcaatattgtcattgacgatgggttcaaattcttgcgtgaaaataagagtaaattcgacgttataatcactgactcgtcggatccagagggtcctgccgaggagtttttccgaaccagctactttgagcttctttccaatgcacttagtccaaacggggtggttataatgcagagcagtgagaacgtatggctcaatattgacaaactcaaagaacttgtttcgctgtcgcgccatgttttcgaaaacgtcaagtactgccagtgctatatgccatcctacaccagcggtcagcttggtttgattgtggctacacacaatacttcccttaatctcacccaaccacttcgcacttttgcagccgatgaagaaaaaaagttgttccagtactattcggcttccgtgcaccaggcggcgtttgtgcttccacggtgggcggctgatattaatgaggtggacacttga

SEQ ID NO: 154630 - protein, 304 aa, Pichia guilliermondii ATCC 6260
MDPKKISHPAIVELDGAYWFQEKSEESFPGQRFCLEVDEILHHSHSEFQDILIFKSKTFGNVLVLNGIIQCTEKDEFAYQELITHTAIMSHEKPSNVLVIGGGDCGVVRELVKHLDRGVDTITMVEIDDMVIKLLAQYLPHMAKFHDHPRVNIVIDDGFKFLRENKSKFDVIITDSSDPEGPAEEFFRTSYFELLSNALSPNGVVIMQSSENVWLNIDKLKELVSLSRHVFENVKYCQCYMPSYTSGQLGLIVATHNTSLNLTQPLRTFAADEEKKLFQYYSASVHQAAFVLPRWAADINEVDT

SEQ ID NO: 154631 - DNA, 894 bp, Lodderomyces elongisporus NRRL YB-4239
  CDS (1)..(894)
atggctcaagaattatcacacccttcaatccaagatggttggtttgctgagaaatcagccaccatgtggccaggtcaagccatgtccttggaagtggacaaagttctccacgttgagaaatccaaataccaagatgtccttgtattcaagtccaagacatatggtaacgttttggttttggacaactgtatccaagtcactgagcgtgatgaattttcataccaagaaatgattactcacttggccatgaactcccacccaaacccaaagaaggcattggtcattggaggtggtgatggtggtgttttgagagaaatcttgaaacacagctcaattgaagaagcatggttgtgcgacattgacgaaactgttattgaagtatccaagaagtacttgccagacatggctgtttcttaccaagacccaagaaccaaagtgcacattggtgacggattcaaattcttagaggagtacaagaaccaattcgacgttattatcactgattcttcagacccagaaggtccagcagagtctttgttccaaaagccatactttgagttgttgaagaatgcattgactgaaaagggtgtcatcaccacacaagccgaaaacatgtggatccacatggacattatttccaaattaaagaaagattgttcagatatcttcccagttgttgaatacgcctacaccatgatcccaacatacccatctggatcaattggtttcatggtttgttctaaagatgcaaacgccaacgtgaaaaaaccactcagattcgaatgggacgacgagtttgttgctaagaacttgaaatactacaacaaacaaatccacgaggctgcctttgtgttgccaaactgggcagaccaaaaattgaacaaaaacctataa

SEQ ID NO: 154632 - protein, 297 aa, Lodderomyces elongisporus NRRL YB-4239
MAQELSHPSIQDGWFAEKSATMWPGQAMSLEVDKVLHVEKSKYQDVLVFKSKTYGNVLVLDNCIQVTERDEFSYQEMITHLAMNSHPNPKKALVIGGGDGGVLREILKHSSIEEAWLCDIDETVIEVSKKYLPDMAVSYQDPRTKVHIGDGFKFLEEYKNQFDVIITDSSDPEGPAESLFQKPYFELLKNALTEKGVITTQAENMWIHMDIISKLKKDCSDIFPVVEYAYTMIPTYPSGSIGFMVCSKDANANVKKPLRFEWDDEFVAKNLKYYNKQIHEAAFVLPNWADQKLNKNL

SEQ ID NO: 154633 - DNA, 879 bp, Ajellomyces capsulatus NAm1
  CDS (1)..(879)
atgagcgaacccactcaccccactatcaaagatggctggttctcagaaatttccgatatgtggccaggccaggcgatgacgttaaaagtcaatcagattcttcaccatgaaaaatccaaataccaagatgttctggtattcgagagcagcgaccatggcactgtccttgtgctggacaatgtcatccaatgtacagaacgtgatgaattttcataccaagagatgatcacacatctcgcgatgaactcccatcctaaccccaagaaagtactcgtcattggtggaggtgacggaggcgtcctgcgcgaagttgtcaagcacgaaaccgtcgaggaggctatcctctgcgacatcgacgaggccgtcatccgcgtctccaaaaaatacctcccaggaatgagcgtcggcttccagcaccctaatgtaaaggtgcacgtggccgatggattcaagttcctcgcagaccgcaagaacgaatttgacgtcatcatcactgacagttcggacccagaaggaccagcagaggccctgttccagaaaccctatttcgagctgctgttcaacgccctgcgtgaaggcggtgtcgttaccactcaagccgaaaaccaatggctgcacctctctctcatcacagatttgaagcgaaacatccgcgagatcttccccgtggtggagtacgcctacacgacgatccccacctacccctcgggccagatcgggttcatggtctgctgcaaggacgcgagcagggacgtgcgcgagcctgtgcgcagctggacgcgtgcggaggaggagaaattgtgccggtattataataaggagattcaccgcgcgagctttgttctgccgaatttcgcccggaaggcgttggatatgtag

SEQ ID NO: 154634 - protein, 292 aa, Ajellomyces capsulatus NAm1
MSEPTHPTIKDGWFSEISDMWPGQAMTLKVNQILHHEKSKYQDVLVFESSDHGTVLVLDNVIQCTERDEFSYQEMITHLAMNSHPNPKKVLVIGGGDGGVLREVVKHETVEEAILCDIDEAVIRVSKKYLPGMSVGFQHPNVKVHVADGFKFLADRKNEFDVIITDSSDPEGPAEALFQKPYFELLFNALREGGVVTTQAENQWLHLSLITDLKRNIREIFPVVEYAYTTIPTYPSGQIGFMVCCKDASRDVREPVRSWTRAEEEKLCRYYNKEIHRASFVLPNFARKALDM

SEQ ID NO: 154635 - DNA, 933 bp, Botryotinia fuckeliana B05.10
  CDS (1)..(933)
atgtctgagtattttcattctattcttctgtttttccctgatatcggagtgttctacgaaggacatgatcgcaatgctatctcaaatggctggttccgcgaaatctccgagatgtggcctggacaggcaatgaccctcaaggtcaagaacgtccttcaccacgagaagagcaaatatcaagatgttttgatcttcgaatctaccgattatggcaccgtcttggtcctcgacaacgtcatccaatgcactgagcgcgatgagttctcataccaagagatgatcactcacttggctatgaactctcacccaaacccaaagaaggtcttggttattggtggaggagatggaggtgtcttgcgtgaggttgtcaagcacgactgtgtggaggaagctattctctgcgacatcgatgaggctgtcattcgtctttccaagaaatatctccctggaatggctatcagctaccaacatcctaaggtcaagactcacatcggtgatggattcaagtttttggatgactacaagaacgaatttgatgttattatcaccgattcctccgacccagagggacctgctgaaagcttgttccaaaagccatactttgagttgctattcggtgctcttaaggagggtggcgtcattaccacacaaggttccgagaaccaatggctccacctcccattgattaccaagctcaagaaggactgcaaggaagttttccctaacgtcgaatacgcctatactaccattcctacctacccatctggccaaattggattcatggtctgctgcaaggacgccaaccgcgatctcagcaagccactccgcaaatggtccccagaagaggaagagaagttgtgccgttactacaacgctgctattcacgaggccagctttgttttgccaactttcgcccgtgctgccttgaagtaa

SEQ ID NO: 154636 - protein, 310 aa, Botryotinia fuckeliana B05.10
MSEYFHSILLFFPDIGVFYEGHDRNAISNGWFREISEMWPGQAMTLKVKNVLHHEKSKYQDVLIFESTDYGTVLVLDNVIQCTERDEFSYQEMITHLAMNSHPNPKKVLVIGGGDGGVLREVVKHDCVEEAILCDIDEAVIRLSKKYLPGMAISYQHPKVKTHIGDGFKFLDDYKNEFDVIITDSSDPEGPAESLFQKPYFELLFGALKEGGVITTQGSENQWLHLPLITKLKKDCKEVFPNVEYAYTTIPTYPSGQIGFMVCCKDANRDLSKPLRKWSPEEEEKLCRYYNAAIHEASFVLPTFARAALK

SEQ ID NO: 154637 - DNA, 879 bp, Sclerotinia sclerotiorum 1980
  CDS (1)..(879)
atgtcagagatcacccaccccactatcaaggatggctggttccgcgaaatttccgagatgtggcctggccaggcaatgaccctcaaggttaagaacgtccttcaccacgagaagagcaaatttcaagatgttttaattttcgagtccactgattatggcaccgtcttggtcctcgacaatgtcattcaatgcactgagcgcgatgaattctcataccaggagatgatcacccacttggctatgaactcccaccccaacccaaagaaggtcttggtcattggtggaggggatggaggtgtcttgcgtgaggtggtcaaacacgattgtgtagaggaagcaatcctctgcgacattgatgaggccgtcatccgtctttccaagaaataccttcctggaatggctatcagctatcaacaccccaaggtcaagactcacatcggtgacggattcaaattcctggacgattacaagaacgaatttgatgttatcatcaccgattcttccgacccagagggacctgccgaaagtttgttccagaagccatactttgagttgctatttggtgctcttaaggagggtggcgtcattaccacacaaggttccgagaaccaatggctccacctcccattgatcactaagctcaagaaggactgcaaagaagtattccccaacgtcgaatacgcctataccaccattcctacatacccatctggccaaattggattcatggtatgctgtaaggacgccgatcgcgatctcagcaagcctgtccgcaaatggtccccagaagaggaggagaagttgtgccgctactacaacgctgctatccacgaagcaagctttgtcttgccaactttcgcccgtgctgcattgaagtag

SEQ ID NO: 154638 - protein, 292 aa, Sclerotinia sclerotiorum 1980
MSEITHPTIKDGWFREISEMWPGQAMTLKVKNVLHHEKSKFQDVLIFESTDYGTVLVLDNVIQCTERDEFSYQEMITHLAMNSHPNPKKVLVIGGGDGGVLREVVKHDCVEEAILCDIDEAVIRLSKKYLPGMAISYQHPKVKTHIGDGFKFLDDYKNEFDVIITDSSDPEGPAESLFQKPYFELLFGALKEGGVITTQGSENQWLHLPLITKLKKDCKEVFPNVEYAYTTIPTYPSGQIGFMVCCKDADRDLSKPVRKWSPEEEEKLCRYYNAAIHEASFVLPTFARAALK

SEQ ID NO: 154639 - DNA, 867 bp, Nasonia vitripennis
  CDS (1)..(867)
atgaatgctttgaaacaaggatggttcagtgaaattaatggattgtggcctggaatcgcccaatcattggaagtcgaaaaaattctgtacgaaggacaatcggaatatcaacacgttttagttctacaaacaaaatcttacggtaaagctttggtacttgacggcatcattcaatgtaccgagaaagatgagttttcctatcaagaaatgatctcgttcctaccgttgtgttctcatcccaatcccaaaacggttttgatagtaggcggtggcgacggcggtgtagcccgagaagtagctaagtttcctggcgttgagaaaatttaccaagtcgagatcgacaacaaggtcgtcgaagtctccaaacaatttctgccattcatggccaagggtttctctgacccaaaggtaaatttacacatcggggacggcttcgaattcatgaagcagcacagcaacgagttcgacgttattataaccgatagcagcgatccagtgggacctgcaatatcgctgtttcaagagccttacttcgcattgctgaagaaggcgttaaaacctaatggaattgtttgctgccaagctggaaccgtttggtctaatctcgatcaagttcaggatactttgacccactgcagatcgatatttccaaaagtggcgtatggagtttcgtccgtgcctacgtatccgactggacagatcggctatatgcttggaagtctcaaccccgaaacaaatttcaacgaacctctgaagactttcagcgaagatgaactcgataaaatggaattaagatattacagcgacaagattcatcgagctagttttgaattgcctagatttgctaagaagagcttgaaattataa

SEQ ID NO: 154640 - protein, 288 aa, Nasonia vitripennis
MNALKQGWFSEINGLWPGIAQSLEVEKILYEGQSEYQHVLVLQTKSYGKALVLDGIIQCTEKDEFSYQEMISFLPLCSHPNPKTVLIVGGGDGGVAREVAKFPGVEKIYQVEIDNKVVEVSKQFLPFMAKGFSDPKVNLHIGDGFEFMKQHSNEFDVIITDSSDPVGPAISLFQEPYFALLKKALKPNGIVCCQAGTVWSNLDQVQDTLTHCRSIFPKVAYGVSSVPTYPTGQIGYMLGSLNPETNFNEPLKTFSEDELDKMELRYYSDKIHRASFELPRFAKKSLKL

SEQ ID NO: 154641 - DNA, 867 bp, Nematostella vectensis
  CDS (1)..(867)
atggatagaatacataatggatggttttctgagataaataaacagtggccaggtcaagccatgtctatagaggttgaggaagtcatctatgagggaaagtcaaaatttcaagaaattctagtattcaaaagtaaaagctttggcactgtgcttgtcttggatggagtcatccagtgcactgacagagatgagttttcttatcaggagatgatctcaatgcttccacttaactctcacccaaatcccaagaaggttcttgttataggtggtggtgatggtggtgtaatccgtgaagccagtaaacacccatccgtggagtctattgttcagtgtgaaattgatgaggatgttataaatatcagtaaaaaatacttacccaacatggctgttggttataccagccctaagcttacacaacacattggagatggatttgagtacatgaagaatcacgaaaacgagtttgatgtgattataaccgactcatcggacccagttggtcctgcagaggctttgttccaacagtcatactatgaactaatgaagagagcactcaaacctgatggcctactctgttgtcaaggggagtgtcaatggattcatttaccactgatcaagtcaatggtggaattttgcaagaccttgttctcagttgtttcttatggttatacaaccattcctacatatccatgtgggcaaataggatttatgctttgcagtaaagataagaatacaagatttgaaaaccccaaaatcgtgctaagtgaccagcaagtggaagatttagggtttcgatactacaactctgatatccacaaagctgcctttgtgctgccacaatttgcaaagaagggtcttggtttatga

SEQ ID NO: 154642 - protein, 288 aa, Nematostella vectensis
MDRIHNGWFSEINKQWPGQAMSIEVEEVIYEGKSKFQEILVFKSKSFGTVLVLDGVIQCTDRDEFSYQEMISMLPLNSHPNPKKVLVIGGGDGGVIREASKHPSVESIVQCEIDEDVINISKKYLPNMAVGYTSPKLTQHIGDGFEYMKNHENEFDVIITDSSDPVGPAEALFQQSYYELMKRALKPDGLLCCQGECQWIHLPLIKSMVEFCKTLFSVVSYGYTTIPTYPCGQIGFMLCSKDKNTRFENPKIVLSDQQVEDLGFRYYNSDIHKAAFVLPQFAKKGLGL

SEQ ID NO: 154643 - DNA, 882 bp, Vanderwaltozyma polyspora DSM 70294
  CDS (1)..(882)
atgtctcaagaaattactcacccaacaattgttgatggctggttcagagaaatctctgatactatgtggccaggtcaagccatgactttgaaagttgaaaaggttttacatcatgaaaagtccaaataccaagatgttttgattttcaagtctactacttatggtaacgtcttggttttagataatgttattcaagctactgaacgtgatgaattttcttaccaagaaatgatcactcatttggctatgaactcacatccaaatccaaaaaaagttttagtcattggtggtggtgatggtggtgtcttgagagaagttgtcaagcatgaatctgttgaagaagcttggttatgtgacattgatgaagccgttattagattgtccaaggaatacttaccagatatggccaaggcttactcccatccaaaggttaaaactcacatcggtgatggtttccaattcttgagagactaccaaaacactttcgatgttattataacagattcttctgacccagaaggtccagctgaatccttattccaaaaggcttatttcgaattattgagtagcgctttaactgaaaagggtgttattactactcaagctgaaagtatgtggattcacttgccaataattaaggatttgaaaaaagcctgtggtgaagttttccctgttgctgaatacgcctacaccactattccaacctacccatctggtcaaattggtttcatggtttgttctaaggacaaatctgctaacgttaagaaaccaattcgtgaaatttctgaagaaaaggaacgtgaattatacagatactacaacaagagaattcatgaaacttctttcgttttaccaacttgggttgacaaagaattgaactaa

SEQ ID NO: 154644 - protein, 293 aa, Vanderwaltozyma polyspora DSM 70294
MSQEITHPTIVDGWFREISDTMWPGQAMTLKVEKVLHHEKSKYQDVLIFKSTTYGNVLVLDNVIQATERDEFSYQEMITHLAMNSHPNPKKVLVIGGGDGGVLREVVKHESVEEAWLCDIDEAVIRLSKEYLPDMAKAYSHPKVKTHIGDGFQFLRDYQNTFDVIITDSSDPEGPAESLFQKAYFELLSSALTEKGVITTQAESMWIHLPIIKDLKKACGEVFPVAEYAYTTIPTYPSGQIGFMVCSKDKSANVKKPIREISEEKERELYRYYNKRIHETSFVLPTWVDKELN

SEQ ID NO: 154645 - DNA, 861 bp, Aedes aegypti
  CDS (1)..(861)
atgaatccaagcgaatggtttagcgaaatttcggaacagctatggccgaatcaatgcttttcgctgaaggtgaaaagggttctccacgaagagcgctccaagttccaggatattaaattgttggatacctactcccatggcatcgtcttggttcttgacggtatcattcaatgtacggaacgggatgagttcgcctaccaggagatgatttcgtttcttccactgtgctgccatccgaaccccaagaaggtgttgatcgtcggtggaggagacggaggcgttgcccgggaagtggtaaaacatccactagtggaagaggttcaccaggtggaaatcgatgaccgtgtggttgagctgtcgaaaaaatatctccccttcatggcatgtggattcgattcgccaaagctgaagcttacgattggtgatggtttcgagtacatgaagcagcgggaaggcgaattcgatgttatcatcacggatagtagcgatccgattggtcctgccgagtcacttttccaggaatcgtatttcgctttggccaagaaagcgctacgaccgaacggaataatttgctcacaggggggcaccttctggattgatatggatcacattaaaagtacactagatcactgcaggaaacatttccctgttgtgggatacggagtggcatcggtgccgtcctacccaacgggccaaataggatttttcatcgccagttcaaatgagaataccaagctgaacgaaccagcaaagacattcaccgatgaggaaatcgacgaaatgaaattgcgctactatacaacggatatccacaaggctgcattcacgttgccaagatatgccgccaagaagctttactga

SEQ ID NO: 154646 - protein, 286 aa, Aedes aegypti
MNPSEWFSEISEQLWPNQCFSLKVKRVLHEERSKFQDIKLLDTYSHGIVLVLDGIIQCTERDEFAYQEMISFLPLCCHPNPKKVLIVGGGDGGVAREVVKHPLVEEVHQVEIDDRVVELSKKYLPFMACGFDSPKLKLTIGDGFEYMKQREGEFDVIITDSSDPIGPAESLFQESYFALAKKALRPNGIICSQGGTFWIDMDHIKSTLDHCRKHFPVVGYGVASVPSYPTGQIGFFIASSNENTKLNEPAKTFTDEEIDEMKLRYYTTDIHKAAFTLPRYAAKKLY

SEQ ID NO: 154647 - DNA, 1128 bp, Chlamydomonas reinhardtii
  CDS (1)..(1128)
atgcatcggctccgttcatgtgtcgcgcttgcgcatccacgcgtgtttgcgaataggcgcattccttcaggccaacagcgcagaatcgacagggaccgcagcaatgaaggcctcgcggcgctggtacaaagtggtttaggccgccgcccaaaagttaccgtttgtttctacgccttgtacataatggccaactacgccaagcgattatggctggaggaggacctgggagatgactaccgctggtcgtaccgcgtgagtgaggtgctgttcagcggccggtccgagttccaggagattgacctggtggacacgcccacctggggcaaggtgctgctgctggacggcaagatgcagagcacggaggcggacgagcaggtgtaccacgagctgctggtgcacccgccgctgctgcaccacgcctgccccaagcgcgtctacatcatgggcggcggcgagggcgccaccgctcgtgaggtgctgcgccacaagacagtggagcaggtggtcatggtggacattgacaaggtggtgacggacttctgctccaagcacctggagcgcaacacccaggccttcgccgacccgcgcctcacgctcatcaacgacgacgcgcgcacgcagctggagcaggcgcccgacggctcgttcgacgtggtgatcggcgacctggcggacccgctggacggcgggccctgctaccagctgtacacgcaggagttttaccgcaacgtggtgctgaagaagctggcgccgggtggcatcttcatcacgcagtcgggtccggcgggcttcctgtcgtgcaaggaggtgttcaccgccatccactccaccgtgcgctccgtgttcccggtggtggtgccgtacgcgcagcacatcccctccttctgcgacatctggggctacaacatggccttcagcgacgccgcgcaggctccgctcagccccgaggagctggactcgcggataggcgcccggctggacggcgtgccgctgcacttcctggacggcgtcacgttccagggcctgcgccacctgaacaagatggtgcgggtggcgctgcaggaggagaaggaggtgtacacggtggacagcgcgcgcttcatccacggagccggcgtcaaggcgtag

SEQ ID NO: 154648 - protein, 375 aa, Chlamydomonas reinhardtii
MHRLRSCVALAHPRVFANRRIPSGQQRRIDRDRSNEGLAALVQSGLGRRPKVTVCFYALYIMANYAKRLWLEEDLGDDYRWSYRVSEVLFSGRSEFQEIDLVDTPTWGKVLLLDGKMQSTEADEQVYHELLVHPPLLHHACPKRVYIMGGGEGATAREVLRHKTVEQVVMVDIDKVVTDFCSKHLERNTQAFADPRLTLINDDARTQLEQAPDGSFDVVIGDLADPLDGGPCYQLYTQEFYRNVVLKKLAPGGIFITQSGPAGFLSCKEVFTAIHSTVRSVFPVVVPYAQHIPSFCDIWGYNMAFSDAAQAPLSPEELDSRIGARLDGVPLHFLDGVTFQGLRHLNKMVRVALQEEKEVYTVDSARFIHGAGVKA

SEQ ID NO: 154649 - DNA, 957 bp, Chlamydomonas reinhardtii
  CDS (1)..(957)
atggcgtccaagccctcccctggctccgcagatcaggcgatcaacgatggctggtacacagagctgtcgccaatgtggcctgggcagggcctctccctgaaagttaaggagattctgtaccggggcaagtccgacttccaggacgtgtgcgtgttcgagtcggagtccatgggcacggtactgctactggacggtgtgatccaggccactgaccgggacgagttctcctaccaggagatgattgcgcacatccccatgtgcgccctggagcgccccgccaagaaggtgctggtggtgggcggcggcgacggcggcgtgctgcgtgagctggcgcggtacccggacgtggaggaaatccacatggccgagatcgacaagatggtgccggacgtgtccaagcagtacttccctgagatggccgtgggcttcagcgacccgcgcgtgacgctgcacatttgcgacggcatcaagtacgtggaggactcgccggagcacagctacgacctcatcgtggtggacagcagcgacccggtggggccggcggaggtgctgtttgagaagccgttcttcgaggccctgcaccgggcagtgcgccccggcggcatcgtgtgcacacaggccgagtcgctctggctgcacctggacatcatcaaggcgctggcgggcatgtgcaaggaggtgttcgcgggcggctcggtcagctacgccaccaccaccatcccaacctacccctccggacagatcggcatgctggtgtgcgccaaggcgcggacggagcagggtgagggtggcagtgctcccctggacccgcgcatcccgcgccaggcggagccggggccgctgccgcagctgggcgtgcccgagctcaagtactacagccacgaggtccacacggcggcgttcgtgttgccagtgtttgcaaagaaggggctggagggctgcctcaccttccaatga

SEQ ID NO: 154650 - protein, 318 aa, Chlamydomonas reinhardtii
MASKPSPGSADQAINDGWYTELSPMWPGQGLSLKVKEILYRGKSDFQDVCVFESESMGTVLLLDGVIQATDRDEFSYQEMIAHIPMCALERPAKKVLVVGGGDGGVLRELARYPDVEEIHMAEIDKMVPDVSKQYFPEMAVGFSDPRVTLHICDGIKYVEDSPEHSYDLIVVDSSDPVGPAEVLFEKPFFEALHRAVRPGGIVCTQAESLWLHLDIIKALAGMCKEVFAGGSVSYATTTIPTYPSGQIGMLVCAKARTEQGEGGSAPLDPRIPRQAEPGPLPQLGVPELKYYSHEVHTAAFVLPVFAKKGLEGCLTFQ

SEQ ID NO: 154651 - DNA, 1026 bp, Physcomitrella patens subsp. patens
  CDS (1)..(1026)
atggccctgggacgtggagacgacgagcaggcggcgcccgaaagcggccgcaacgccgcggagcttatcgcgcaagacaatgccgcgcccgcgccctcgactgcgcgcgccaatttgtccagcatcatgcccggatggttctcggagattagtcccatgtggccaggtgaagcgcattctttgaaggtagagaaatttttatttgaaggcaagtcagactatcaagacgttgttgtcttcgagtcagctacctacgggagggttctcgttctggacggtgtgattcagctcacccagcgcgacgagtgcgcctaccaggagatgattactcatctacccctttgttcaatcccgaatcctaagaaggtgctagtggttggcggaggtgacggaggggtgctaagggagattgctcgacacaaatctgttgaacagattgatatttgtgagatcgacaagttagttgttgacgtagcgaaagaattcttccctgatgttgctgtaggattcgaggaccctcgagtgaaccttcatattggagatggagtagcatttttgaaggcagttccagaagggacgtatgacgccatcatcgtcgattcttctgatcctgttggtcctgctcaggctttattcgagaggccattttacaagacattggatcgagcgttacgaccaggaggtgttatttgcacacaggcagagagcctttggctgcacatgcccattatcaaagatattgttggagcttgccgtcacacctttaagggttctatcaactatgcatggactagtgttccaacctatccaagtggggtgattggttttatgctttgctctactgccggtccagctgttaattttcgaaagccatgcaacccaatagatcaagctgtggatcccaatcattattccaagcgtccactcaagttctataactcagctatgcatgaggcagcgttctcgttgcctcaatttgccagggaagaattggaacatttgctcacaccacccccaacctcttaa

SEQ ID NO: 154652 - protein, 341 aa, Physcomitrella patens subsp. patens
MALGRGDDEQAAPESGRNAAELIAQDNAAPAPSTARANLSSIMPGWFSEISPMWPGEAHSLKVEKFLFEGKSDYQDVVVFESATYGRVLVLDGVIQLTQRDECAYQEMITHLPLCSIPNPKKVLVVGGGDGGVLREIARHKSVEQIDICEIDKLVVDVAKEFFPDVAVGFEDPRVNLHIGDGVAFLKAVPEGTYDAIIVDSSDPVGPAQALFERPFYKTLDRALRPGGVICTQAESLWLHMPIIKDIVGACRHTFKGSINYAWTSVPTYPSGVIGFMLCSTAGPAVNFRKPCNPIDQAVDPNHYSKRPLKFYNSAMHEAAFSLPQFAREELEHLLTPPPTS

SEQ ID NO: 154653 - DNA, 1053 bp, Physcomitrella patens subsp. patens
  CDS (1)..(1053)
atgggaggacacaacaactccgacgtaggcgagcagcagcagcaagcggcgaagaagcccgcaggcagcagcctcaatgctgcggagctcattgcgcagtcagccaatgcgacgcccgcgccctccacagcgcgcgccaatttgtccagcatcgtgccgggatggttctcggagattagtgccatgtggccaggggaagctcattctttgaaggtggagaaagttctattcgaaggcaagtccgactatcaagacgttgttgtttttgagtcagctacgtatgggagggttctcgttctggacggtgtaattcagctcactcagcgcgacgaatgtgcttaccaagaaatgattactcatcttcctctttgctcaattcctaaccctaagaaggtgctagtggttggtggaggtgatggaggagtgctgagggagatcgctcggcacaagtctgttgatcaaattgatatttgtgagattgataagatggttgttgacgttgcgaaagagttttttccggatgttgctgtaggatttgaagaccctcgagtgaaccttcatatcggggatggagtggcattcttgagagaagttccagagggaacatatgatgccatcatagttgattcttccgatcccgtgggccctgctcaagcattatttgagaggccattttacaggactttggatcaagcattgcgaccaggcggtgttatttgtacacaagcagagagtttatgggtgcacatgcccatcattaaaaatattgtgtcagcctgccgtcataccttcaagggttccatcaactatgcttggactagtgttcctacctatccaagtgggttgattgggttcatgctctgctctaaggcaggtcctgctgtcaatttcctagagccatgcaaccctattgatcaagcgattgatcccgagaaatcttctaggcgtcctatgaagttctataattcagcgatgcacgcggcagcattttcgctacctcaattcgctaaagtggagttagagcatttactgaccccacccccatcatcttaa

SEQ ID NO: 154654 - protein, 350 aa, Physcomitrella patens subsp. patens
MGGHNNSDVGEQQQQAAKKPAGSSLNAAELIAQSANATPAPSTARANLSSIVPGWFSEISAMWPGEAHSLKVEKVLFEGKSDYQDVVVFESATYGRVLVLDGVIQLTQRDECAYQEMITHLPLCSIPNPKKVLVVGGGDGGVLREIARHKSVDQIDICEIDKMVVDVAKEFFPDVAVGFEDPRVNLHIGDGVAFLREVPEGTYDAIIVDSSDPVGPAQALFERPFYRTLDQALRPGGVICTQAESLWVHMPIIKNIVSACRHTFKGSINYAWTSVPTYPSGLIGFMLCSKAGPAVNFLEPCNPIDQAIDPEKSSRRPMKFYNSAMHAAAFSLPQFAKVELEHLLTPPPSS

SEQ ID NO: 154655 - DNA, 1068 bp, Physcomitrella patens subsp. patens
  CDS (1)..(1068)
atggtggaatgcttcgaagtggagtgcagcaatgctgcgtatggaaatggcacatctcgtcaaacggctgtatctaacggggcatctcatcaatcatccgttaccaagacagtgttgcctgccgaagcggaacacaagaagcgctgcttgtggtttgaagaagagctggaagaggacttgcgctgggtgttcggcgtgtctaagatcctgcatactggcgttagcgaatttcaggatatcgagttggtggagagtgggccattcggcaaggtcttgattttggacggcaagcttcaaagcgcagaggcagacgagttcgtttaccacgaatccatcgtccatgccgctttgctttatcaccccaatcccaagaatgtgttcatcatgggtggtggcgagggttcaactgcgcgtgaggctcttaaacacagaagtgtggagaaggtcgtcatgtgtgacattgacgaggaagtcgtcaatttttgcagaaaacatctcactgtcaatgccgaagcatttcgcagcaagagactggaccttattatcaactgtgctagggcagagctggaaaagaaaacggaaaaatttgatattattgtcggagacttagcagatccagtggcaggaggtccttgttatcagctgtatacaaaatcgttctatgaacgcgtcctcaagccaagtttgaaagacggtggtattctggtcacacaaggaggacctgcaggtatactaacgcacacagaggtctactcctctatctacaatactttgagacaaacatttaaatatgtagttccatatgcagcgcatgtgccgtcttacgctgatacttggggctggataatggcctcagacgaacccatcccaacaatcagtgctgaaacgactgataacaggataaaggaaaggattgatggggaactcaagtttctggatgggcaaactctgtctgcagcaatcgcccttaataagcatgttcgtagaagcttagcagcagagcgacacgtgtacacagaggagacggcacggttcatacatggacatggtactgctttgaagaattga

SEQ ID NO: 154656 - protein, 355 aa, Physcomitrella patens subsp. patens
MVECFEVECSNAAYGNGTSRQTAVSNGASHQSSVTKTVLPAEAEHKKRCLWFEEELEEDLRWVFGVSKILHTGVSEFQDIELVESGPFGKVLILDGKLQSAEADEFVYHESIVHAALLYHPNPKNVFIMGGGEGSTAREALKHRSVEKVVMCDIDEEVVNFCRKHLTVNAEAFRSKRLDLIINCARAELEKKTEKFDIIVGDLADPVAGGPCYQLYTKSFYERVLKPSLKDGGILVTQGGPAGILTHTEVYSSIYNTLRQTFKYVVPYAAHVPSYADTWGWIMASDEPIPTISAETTDNRIKERIDGELKFLDGQTLSAAIALNKHVRRSLAAERHVYTEETARFIHGHGTALKN

SEQ ID NO: 154657 - DNA, 1068 bp, Physcomitrella patens subsp. patens
  CDS (1)..(1068)
atggtagaattctttgaagagagctccagcaatggtgtgcatgtcaatggcactactcatcaaacgtcagcatccaacaggacatctcatcaaccatccgccaccaagacagcagcagctgccgaagcggagcctaaaaagcgatgtttgtggttcgaggaggagctggaagaggacctgcgttgggtgttcggtgtctccaagatcctgcacactggcgtcagcgaatttcaggatattgagttggtggagagtgggcctttcggcaaggtcttgatattagacggcaaacttcagagcgcagaggcagatgagttcgtctaccacgagtccattgtgcatccagctctgctatatcattccaaccccaaaagtgtgttcataatgggtggtggtgagggatcaactgcacgtgaggctcttcgacacagaagcgtagaggaggttgtcatgtgtgacatcgacgaggaagttgttaatttttgtaggaagcatctcaccgtcaacgctgaagcttttcgcagcaacagactggaactcgttatcaactgtgccagggcagagctggaaaacagaaccgagcagtttgatattataatcggtgacttagcagatccagttgcaggaggcccttgttaccagctttatacgaaatctttttatgaacacgttctcaagccaaggttgaaagacggtggtattttggtcacacaaggagggcctgcaggtatcttaacacacacagaggtctactcctctatttacaacacattaagacaaacatttaaatacgtagtaccgtatgcagcacatgtaccgtcttatgctgatacttggggctggattatggcttcagaccagcctatcccggcgatcagtgctgaggagactaacctcagaataaaacaacggattaatggggaactcaagttcctagatgggcaaaccctgtctgcaacccatgccctaaataagcatgtccgaaatagcttagcagcagagcgacatgtatacaccgaggagacggcacgattcatccatggacatggtactgcttcgaagaactaa

SEQ ID NO: 154658 - protein, 355 aa, Physcomitrella patens subsp. patens
MVEFFEESSSNGVHVNGTTHQTSASNRTSHQPSATKTAAAAEAEPKKRCLWFEEELEEDLRWVFGVSKILHTGVSEFQDIELVESGPFGKVLILDGKLQSAEADEFVYHESIVHPALLYHSNPKSVFIMGGGEGSTAREALRHRSVEEVVMCDIDEEVVNFCRKHLTVNAEAFRSNRLELVINCARAELENRTEQFDIIIGDLADPVAGGPCYQLYTKSFYEHVLKPRLKDGGILVTQGGPAGILTHTEVYSSIYNTLRQTFKYVVPYAAHVPSYADTWGWIMASDQPIPAISAEETNLRIKQRINGELKFLDGQTLSATHALNKHVRNSLAAERHVYTEETARFIHGHGTASKN

SEQ ID NO: 154659 - DNA, 879 bp, Phaeosphaeria nodorum SN15
  CDS (1)..(879)
atgccaaacattgagcaccccactatcaaggatggctggttccgcgagatctccaacatgtggcccggccaggccatgaccctcaaggtcaaggaggtcatccaccacgagaagagcaagtaccaggacgtcctcatcttcgagtcgaccgactacggcatggtccttgttctcgacaacgtcatccaatgcaccgagcgcgacgagttctcctaccaggagatgatcactcacttggccatgaacgcccaccccaaccccgagaaggtcttggtcatcggcggtggtgacggtggcgtcctccgtgaggtcgtcaagcacgactgtgttaaggaggctgtcctctgcgacattgacgaggctgtcatccgtctctccaagcagtacctgcctggcatgtccgttggcttcgagcaccccaagacccagaccattgttggtgacggcttcaagttccttgaggacaagaagggcgaattcgacgtcatcatcaccgactccagcgacccagaaggtcccgccgaggccctcttccagaaggcgtactttgagctcctcaacggcgccctccgcgagggcggtgtcattagcacacaaggttccgagaaccagtggctgcacatgcctctcattgccaatctcaagaaggcttgcaaggaggtcttccccaacgtcgagtacggctacaccacgatccccacctacccatccgggcaaatcggcttcatggtttgcagcaaggacgccgatcgcgacttgaagaagcctctccgcacctgggctcccgaggaggaggagcagctgtgcaggtactacagcaaggagatccacgaggcggcctttgtccttcccacattcgcccgcaaggccctccgatga

SEQ ID NO: 154660 - protein, 292 aa, Phaeosphaeria nodorum SN15
MPNIEHPTIKDGWFREISNMWPGQAMTLKVKEVIHHEKSKYQDVLIFESTDYGMVLVLDNVIQCTERDEFSYQEMITHLAMNAHPNPEKVLVIGGGDGGVLREVVKHDCVKEAVLCDIDEAVIRLSKQYLPGMSVGFEHPKTQTIVGDGFKFLEDKKGEFDVIITDSSDPEGPAEALFQKAYFELLNGALREGGVISTQGSENQWLHMPLIANLKKACKEVFPNVEYGYTTIPTYPSGQIGFMVCSKDADRDLKKPLRTWAPEEEEQLCRYYSKEIHEAAFVLPTFARKALR

SEQ ID NO: 154661 - DNA, 870 bp, Culex quinquefasciatus
  CDS (1)..(870)
atgaatccatcggagtggttcagcgaggtctccgacgtgctgtggccaggccagtgcttctcggtcaagatcaagaaggttctccacgaggaacggtccaagttccaggatatcaaagtgttcgaatcggaatctcacggaactgttctcgtgctcgatggcatcatccagtgtacggagcgggatgaatttgcgtaccaggagatgatctcctttctgccactatgctgccatccaagcccgaaaaaggtcctcatcgtgggcggtggcgacggtggtgtggctcgcgaggtggtcaagcatccgctggtggaagaagtccatcaggttgagatcgatgaccgggtggtcgagctgtcgaaaaagtatctcccgtttatggcgtgcggattcgaatctcccaagctaaagctcacgatcggcgatgggttcgagtacatgaagcaacgcgagggagagttcgacgtgatcatcacggacagtagcgatccgatcggaccggcggcgtctctcttccaggaatcgtactttgggctagcgaagagggcactgaagcccaacggaataatttgctcacagggtggcaccttttggatcgaccagaaacacgtgcgagaaacgctggaccattgccggaagcacttccccgtggtcggatatggggtggccaacgttccgtcgtatccgtcgggacagattgggttctttattgcgagcaccaacgatcaaacaaaactgagcgagccagccacaactttcaccgataaggaagtggacgagatgaagcttcgatactacacgaccgagatccaccggactgcatttacgctgccgagatatgcggccaaatatctgtacgacgaaaagtga

SEQ ID NO: 154662 - protein, 289 aa, Culex quinquefasciatus
MNPSEWFSEVSDVLWPGQCFSVKIKKVLHEERSKFQDIKVFESESHGTVLVLDGIIQCTERDEFAYQEMISFLPLCCHPSPKKVLIVGGGDGGVAREVVKHPLVEEVHQVEIDDRVVELSKKYLPFMACGFESPKLKLTIGDGFEYMKQREGEFDVIITDSSDPIGPAASLFQESYFGLAKRALKPNGIICSQGGTFWIDQKHVRETLDHCRKHFPVVGYGVANVPSYPSGQIGFFIASTNDQTKLSEPATTFTDKEVDEMKLRYYTTEIHRTAFTLPRYAAKYLYDEK

SEQ ID NO: 154663 - DNA, 954 bp, Brugia malayi
  CDS (1)..(954)
atgaatgtctttcgagatggctggtttacggaattaccaccgtcattaaaaaatgacgatccagaaatggcgaacaaagacgatgatttggacagttttgataaccatatttggtctgggcaagcattctcattgaaggttgataaagtgcttgctcatgaaagaagcaaatatcaggatatcttaatttttaaaagcagcacacatggtaacgtgttagtgcttgatggcgtaattcaatgtacagagcacgacgaattcgcttatcaagaaatggttactcatttagcattgttttctcatccaatgcctcggaaagtattagttattggtggtggcgatggtgctgttttgagagaagtgctgaaacatgaatgtgtagaatcagtaaccatatgtgaaattgatgaaacagtaatcaatctttcaaagaaatttctccctcatatgtctctcgcatttagtagttcgaaattaaaacttgctgtccaagatggatttgatttcttaaaggaacacaaaggagaatttgatgtgatcataaccgattcatctgacccaattggaccagcaaagaagcttttcagtaaaacttattacgatttaatcaaagaagcgctaacggaaaaaggagtgctttcttctcaaggtgaatgtccttggcttgacatgaagttgattaaaaacgtcattaaacatgtgtcaactttatatcctcgtgtagcttatgcagttgggtttgtacctacatatccctctgggcaaatgggttatttgttatgcagcaaagatgagaagcatgatcttacgataccacaaaaaatgttatcagaatctgaagtcaggcggatgaatttgaaatattataattcagatatacatcgttcagcttttatacttcctcagttcataaaagaagtaattgctttcatcccttcttttttgagcttttag

SEQ ID NO: 154664 - protein, 317 aa, Brugia malayi
MNVFRDGWFTELPPSLKNDDPEMANKDDDLDSFDNHIWSGQAFSLKVDKVLAHERSKYQDILIFKSSTHGNVLVLDGVIQCTEHDEFAYQEMVTHLALFSHPMPRKVLVIGGGDGAVLREVLKHECVESVTICEIDETVINLSKKFLPHMSLAFSSSKLKLAVQDGFDFLKEHKGEFDVIITDSSDPIGPAKKLFSKTYYDLIKEALTEKGVLSSQGECPWLDMKLIKNVIKHVSTLYPRVAYAVGFVPTYPSGQMGYLLCSKDEKHDLTIPQKMLSESEVRRMNLKYYNSDIHRSAFILPQFIKEVIAFIPSFLSF

SEQ ID NO: 154665 - DNA, 879 bp, Podospora anserina DSM 980
  CDS (1)..(879)
atgggtgacattacacactctaccatcaaggatggctggttccgcgagatctccaacatgtggcctggccaggccatgactctcaaggtcgagaaggtcctccaccacgagaagtccaagtaccaggatgtcttgatcttcaagtctactgactacggcaacgtcctcgtcctggacaacgtcatccaggccaccgagcgtgatgagtttgcctaccaggagatgatcaccaaccttgccatgatgtcccaccctgagcccaagaaggtcctcgtcattggcggtggtgatggcggtgtcctccgtgaggtcgtcaagcacgactgtgttgaggaggctatcctctgcgacatcgacgaggccgtcatccgcctctccaagcagtacctcccccacatgtccgctggcttcaaccaccccaaggtcaaggtccacgtcggcgacggcttcaagttccttgatgactacaagaacaccttcgacgtcatcatcaccgactcctccgaccccgagggtcccgccgagtctctcttccagaagccttacttcaagcttctccacgacgccctccgtgagggcggtgtcattaccactcaaggttctgagaaccaatggctccaccttcccctgatcaccaagctcaagcaggactgcaaggagatcttccccgtggccgagtacgcctacaccaccatccccacctacccctcgggccagatcggcttcatggtctgcaccaaggacgccaaccgcaacgtcaaggttcccctccgctcctggaccaaggaggaggaggagaagcactgccgctactacaactccgagatccacaaggccagcttcgtccttcctacctttgccgccaaggctctccaatag

SEQ ID NO: 154666 - protein, 292 aa, Podospora anserina DSM 980
MGDITHSTIKDGWFREISNMWPGQAMTLKVEKVLHHEKSKYQDVLIFKSTDYGNVLVLDNVIQATERDEFAYQEMITNLAMMSHPEPKKVLVIGGGDGGVLREVVKHDCVEEAILCDIDEAVIRLSKQYLPHMSAGFNHPKVKVHVGDGFKFLDDYKNTFDVIITDSSDPEGPAESLFQKPYFKLLHDALREGGVITTQGSENQWLHLPLITKLKQDCKEIFPVAEYAYTTIPTYPSGQIGFMVCTKDANRNVKVPLRSWTKEEEEKHCRYYNSEIHKASFVLPTFAAKALQ

SEQ ID NO: 154667 - DNA, 879 bp, Pyrenophora tritici-repentis Pt-1C-BFP
  CDS (1)..(879)
atgccttccattgagcaccccaccatcaaagatggctggttccgcgagatctccggcatgtggcctggtcaggccatgaccctccaggtcaaggaagttcttcaccacgagaagagcaagtaccaggatgtcctcatcttcgagtctaccaactacggaaccgtccttgttctcgacaacgtcattcagtgcactgaacgcgatgagttctcctaccaggagatgatcactcacctcgccatgaacgcccaccccaaccctgagaaggttttggtcattggtggcggtgatggtggtgtcctccgtgaggtcgtcaagcacgactgcgtcaaggaggctgtcctctgcgacattgatgaggctgtcatccggctttccaagcagtatctccccggcatgtctgtcggcttcgagcaccccaagaccaccaccattgttggtgacggcttcaagttcctcgaggacaagaagggcgagttcgacgtcatcattaccgactccagcgacccggaaggtcccgctgaggctcttttccagaagtcatactttgagttgctcaacggcgcgctccgagaaggcggtgtcattaccacccaaggttctgagaaccaatggcttcacatgcccctcattgtcgagctcaagaaggcttgcaaggaggtcttccccaacgtcgaatacggctacaccaccatccccacttacccctccggccagattggcttcatggtctgcagcaaggacgccaaccgcgacctcaagaagccgctccgcacatggtccactgaagaggaggagcagctgtgcaggtactacagcaaggagatccacgaggccgcctttgtgctgcctacctttgctcgcaaggctctccaataa

SEQ ID NO: 154668 - protein, 292 aa, Pyrenophora tritici-repentis Pt-1C-BFP
MPSIEHPTIKDGWFREISGMWPGQAMTLQVKEVLHHEKSKYQDVLIFESTNYGTVLVLDNVIQCTERDEFSYQEMITHLAMNAHPNPEKVLVIGGGDGGVLREVVKHDCVKEAVLCDIDEAVIRLSKQYLPGMSVGFEHPKTTTIVGDGFKFLEDKKGEFDVIITDSSDPEGPAEALFQKSYFELLNGALREGGVITTQGSENQWLHMPLIVELKKACKEVFPNVEYGYTTIPTYPSGQIGFMVCSKDANRDLKKPLRTWSTEEEEQLCRYYSKEIHEAAFVLPTFARKALQ

SEQ ID NO: 154669 - DNA, 879 bp, Acyrthosiphon pisum
  CDS (1)..(879)
atggatcacttacaacaaggttggttcactgagtccgatacatggccaggtgctggactttcattacaagtagaagaagtccttcataaagaaaaatccccgtatcaagatataatggtgttgcaaactaaatcatttggaaaagctttaattttggataatataatccaatgtacagagtttgatgaattttcataccaagagatgataagtttcttgccactttgtagccatcctaatccagaaagagttttggtggtgggtggtggcgatggtggtgttgcacgtgaaactgttaaacatccaaaagttcttagcgttgatgttgttgaaattgatgaaagagtagtgaaactttcagaacaatatttaccatttatggcttgtggatttaaacacgacaaggttacactgcatattgaagacgggtttgagtttatgaaaaacaatgcccaacgatttgacatcatcataacagactcttcagaccccgttggtccaaatgagtcattatttcagaaaacttatatcgaatcattgaaaagatcattaaaacctggtggtatcatatgttcccaagttggatcaatttggataaaagaagatcaggatacaatgatcagattgtccaaagactgttcagcaaactttaaaaaggtcactctagccactatatctatcccatcttatccaactggaaacatcagtttcattttggctacagacaatgagctagtaaatttcaaaataccagcatatagtttcacactagaagaaatgaataaacacaaactcaagcattactcaccagatgtacattctgcttcatttagtattcctaggtttgctcgtatgattattccacatattaattgttaa

SEQ ID NO: 154670 - protein, 292 aa, Acyrthosiphon pisum
MDHLQQGWFTESDTWPGAGLSLQVEEVLHKEKSPYQDIMVLQTKSFGKALILDNIIQCTEFDEFSYQEMISFLPLCSHPNPERVLVVGGGDGGVARETVKHPKVLSVDVVEIDERVVKLSEQYLPFMACGFKHDKVTLHIEDGFEFMKNNAQRFDIIITDSSDPVGPNESLFQKTYIESLKRSLKPGGIICSQVGSIWIKEDQDTMIRLSKDCSANFKKVTLATISIPSYPTGNISFILATDNELVNFKIPAYSFTLEEMNKHKLKHYSPDVHSASFSIPRFARMIIPHINC

SEQ ID NO: 154671 - DNA, 888 bp, Acyrthosiphon pisum
  CDS (1)..(888)
atggacaagttgaagaccggatggttcagcgaactcacggacctgttgccgggcagaagtttttccatggaagtggaacaggtcttgcaccaggaacagtccaagtaccaggagatattagtattgaaaacgaaatcacacggtgttgtactggtactcgatggcatgattcaatgcacggagttcgatgagtattcttatcaagaaatgatttcatttttgccattattcagtcacccaaaaccacagagggtactcatcgtgggcggcggcgatggtggggtcgctagggaagtagccaaacacccattggtcgaaaccattgaccaagtggaaatcgacgatcgcgttatcgaattgtccaagaaatatttaccgttcatggctgaaggattcaacagccccaaagtcaacctgcacgtagctgacggattcaagtttatggaagaacactttcagtactacgacgtcattataactgactcttctgatcctattggcccagctgtttcgctattccaaaagtcgtactttgaattgatgaaacgcgcactgcggcccggcggcatcgtgtgttcacaagccgatactttctggggacatttgaaaaatgcagcgtcgatgcgcaaccattgcaaagcagtattcgccaaggcggcgtacgctacgtcttacgtgtccacttacccagcgggtcagatcggtttcgcacttggcagtcttgacgagaatacagacttcaaaaatcccgtgtaccagttgactgacaaacaacgaaaagacatgaagctacgttactacaccactgacattcacaaagcggcgtttgcactgcccgcttttgtcgtcgatgctcttgacgaggcggacgccgaaaacaattcgtaa

SEQ ID NO: 154672 - protein, 295 aa, Acyrthosiphon pisum
MDKLKTGWFSELTDLLPGRSFSMEVEQVLHQEQSKYQEILVLKTKSHGVVLVLDGMIQCTEFDEYSYQEMISFLPLFSHPKPQRVLIVGGGDGGVAREVAKHPLVETIDQVEIDDRVIELSKKYLPFMAEGFNSPKVNLHVADGFKFMEEHFQYYDVIITDSSDPIGPAVSLFQKSYFELMKRALRPGGIVCSQADTFWGHLKNAASMRNHCKAVFAKAAYATSYVSTYPAGQIGFALGSLDENTDFKNPVYQLTDKQRKDMKLRYYTTDIHKAAFALPAFVVDALDEADAENNS

SEQ ID NO: 154673 - DNA, 864 bp, Drosophila ananassae
  CDS (1)..(864)
atggattccctaaacaacggatggttcagcgaactgcaggctgatctatggcctggacagtccttctccttgaaagtaaaggaagtcattcacaaggagaagtcaaagtttcaggacattcaaatcgtcgaaacggagacatacggaagatgcttgattctggatggaattatacagtgcactgctcgagatgagttctcgtaccaggaaatgatatccttcctgcctctttgcgcccacccgaatcccaaaaaggttctcattgtaggcggtggcgacggaggcgtggcacgcgaagtggtgaagcatcctttggtcgaggaagtgcatcaggtggagatcgacgaccgagtggtggagctctccaagcaatatttaccagctatggcgtgcggattcgaaaacgaaaagttaaagctgaccattggagacggcttcgactatatgaagaatcacaagaacgaatttgacgttatcatcaccgacagctcggatccaattggtccggcagtgagtttgttccaagagagctactacgagctaatgaagcacgctcttaaagaagacggaatcgtgtgctcccagggtggaagtttctggctggacctcgactatatcaagaaaaccatgtcgggatgcaaggaacactttgccaaagtggcctatgctgtcacctcggtgccttcttatccttgtggccacattggctttgtcatgggctctctgaacaaaaatcaagactttgttactcctaaactgggaagctctgagattaatgccttagatttaaaatactactcctctgacattcattcggcggcttttgccctgccccgatgggttcaaaaccatttttacaattga

SEQ ID NO: 154674 - protein, 287 aa, Drosophila ananassae
MDSLNNGWFSELQADLWPGQSFSLKVKEVIHKEKSKFQDIQIVETETYGRCLILDGIIQCTARDEFSYQEMISFLPLCAHPNPKKVLIVGGGDGGVAREVVKHPLVEEVHQVEIDDRVVELSKQYLPAMACGFENEKLKLTIGDGFDYMKNHKNEFDVIITDSSDPIGPAVSLFQESYYELMKHALKEDGIVCSQGGSFWLDLDYIKKTMSGCKEHFAKVAYAVTSVPSYPCGHIGFVMGSLNKNQDFVTPKLGSSEINALDLKYYSSDIHSAAFALPRWVQNHFYN

SEQ ID NO: 154675 - DNA, 864 bp, Drosophila erecta
  CDS (1)..(864)
atggattcccttaacaacggatggtttagcgaactgcaggccgatctctggcctggtcagtccttctccctgaaagtcaaggaggtcatccacaaggagaagtcccagttccaggacatccagatcgttgaaaccgaaacctatggaaggtgcctgattctggacggaatcatccagtgcacggccagggatgagttctcgtaccaggaaatgatatccttcctgcccctctgcgcccatccgaatcccaagaaggttttgatcgttggcggtggggatggcggcgttgctcgcgaagtggtgaagcatccactggtcgaggaagtgcatcaggtggaaatcgatgaccgtgtcgtcgagctgtccaaacaatatctcccggcgatggcctgtgggttctccaacgagaagttgaagctgaccattggcgatggattcgactacatgaagaagcacaagaatgaatttgatgtcatcatcaccgacagctcggatccaattggtccggcagtgagcctgttccaggaaagctactacgagctaatgaaacacgcactgaaggacgacggaatcgtgtgctcccagggcggtagcttctggctggacctggactacataaagaagacaatgtcgggctgcaaggagcatttcgctaaagtggcctatgccgtcacctccgttccatcctatccctgtggccacattggcttcgtcatgggctccctgaacaaagaccaggatttcgctactcccaaactgggaaagtccgaaatcaatgccttagatttgaggtactactcctctgaagttcattccgccgcctttgccttgcctcgatgggtgcagaagcacttttacgaatga

SEQ ID NO: 154676 - protein, 287 aa, Drosophila erecta
MDSLNNGWFSELQADLWPGQSFSLKVKEVIHKEKSQFQDIQIVETETYGRCLILDGIIQCTARDEFSYQEMISFLPLCAHPNPKKVLIVGGGDGGVAREVVKHPLVEEVHQVEIDDRVVELSKQYLPAMACGFSNEKLKLTIGDGFDYMKKHKNEFDVIITDSSDPIGPAVSLFQESYYELMKHALKDDGIVCSQGGSFWLDLDYIKKTMSGCKEHFAKVAYAVTSVPSYPCGHIGFVMGSLNKDQDFATPKLGKSEINALDLRYYSSEVHSAAFALPRWVQKHFYE

SEQ ID NO: 154677 - DNA, 870 bp, Drosophila grimshawi
  CDS (1)..(870)
atggatcgaatttcgaaaggctggttcagtgaaatccaggatgatttatggccgggacaatctttttctttgaaagtaaaagaggttcttcatgcagaaaaatctcaattccaagatattcaaatagttgagacagaaacctatggaaggtgcctcattctcgatggaatcattcaatgtacttcccgagatgagttctcttatcaggaaatgatatctttcttgccactgtgttgccatccaaatccacaaaaggttttaattgtgggcggcggggatgggggtgtggcacgggaggttgtcaagcatccgttggttaaagaagtccaccaagtagaaatcgatgacagagttgtggaattatccaaaaagtatctaccttcgatggcgtgtggcttcgacagcgaaaaggtaaagcttacaattggcgatggatttgagtacatgaaacaacacaagaacgaattcgatgtcatcataacggatagctcggatccagttggtccggcagtgaatttgttcctcgaaagctattttgagctgctgaagaatgcactgaaagatggcggaattatttgctcgcaggcgggcagtttttggctggactttgatcacgccaagaaaacaatgaaaggatgtggaattcattttccaaaagttggatatgccgttacctcagtgccgtcttatccatgcggtcacatcggatttattgtcgcatctctcaatgcaagccgggatctgaaggagcctgtgaaaaagtttgaaaaatccgaaatagatgcgttaaatttaaaatactattccagtgaagttcattccgctgcttttagcctaccccgttgggttgagaagcacttttacgaataa

SEQ ID NO: 154678 - protein, 289 aa, Drosophila grimshawi
MDRISKGWFSEIQDDLWPGQSFSLKVKEVLHAEKSQFQDIQIVETETYGRCLILDGIIQCTSRDEFSYQEMISFLPLCCHPNPQKVLIVGGGDGGVAREVVKHPLVKEVHQVEIDDRVVELSKKYLPSMACGFDSEKVKLTIGDGFEYMKQHKNEFDVIITDSSDPVGPAVNLFLESYFELLKNALKDGGIICSQAGSFWLDFDHAKKTMKGCGIHFPKVGYAVTSVPSYPCGHIGFIVASLNASRDLKEPVKKFEKSEIDALNLKYYSSEVHSAAFSLPRWVEKHFYE

SEQ ID NO: 154679 - DNA, 870 bp, Drosophila mojavensis
  CDS (1)..(870)
atggatttaatttcaaaaggctggttcagtgaaatccaagacgacttatggcctggacaatcattttctttaaaagttaaagaagttcttcataaagagaagtctgaatttcaagatattcaagtggttgagactgaaacatatggaagatgtctgatactggatggaatcattcagtgcactaccagagacgagttctcctaccaggaaatgatatccttcttgccactttgctctcatccgaaccctcaaaaggttttgattgttggtggcggtgatggaggcgtagcacgcgaagtggtaaagcatccactagttaaggaggtccaccaagtggaaattgacgatcgtgttgtccaagtttctaagaagtacttgccctctatggcatgtggattcgacagcgagaagctagttttaactattggcgatggatttgagtatatgaaaaatcacaaaaatgaatttgatgtaatcataactgacagctcggatccagttggacctgccgtaagcttgttccatgaaagctatttcgaattgttgaagcaagccctgaaggaaggcggcgttgtatgctctcaagcgggcagcttctggctagacttcgactatgtcaagaaaacaatgaagggctgttctctccactttccaaaagtgggctatgccgtcacatcagttccatcttatccatgtggccatattggctttattataggctcactggatgcaaaccgaaagctcgaaaaaccagcaaagagatttgaaaaatctgaaattgacgctctcaatttaaaatactattcaagtaatatccatgaggctgcctttacattgcctcgatgggttgagaaacacttttacgagtga

SEQ ID NO: 154680 - protein, 289 aa, Drosophila mojavensis
MDLISKGWFSEIQDDLWPGQSFSLKVKEVLHKEKSEFQDIQVVETETYGRCLILDGIIQCTTRDEFSYQEMISFLPLCSHPNPQKVLIVGGGDGGVAREVVKHPLVKEVHQVEIDDRVVQVSKKYLPSMACGFDSEKLVLTIGDGFEYMKNHKNEFDVIITDSSDPVGPAVSLFHESYFELLKQALKEGGVVCSQAGSFWLDFDYVKKTMKGCSLHFPKVGYAVTSVPSYPCGHIGFIIGSLDANRKLEKPAKRFEKSEIDALNLKYYSSNIHEAAFTLPRWVEKHFYE

SEQ ID NO: 154681 - DNA, 864 bp, Drosophila sechellia
  CDS (1)..(864)
atggattcccttaacaacggatggttcagcgaactgcaggccgatctctggcccggtcagtcattctccctgaaagtcaaggaggtcatccacaaggagaagtcccgcttccaggacatccagatcgttgaaaccgaaacctatggacggtgcctgattctggacggaatcatccagtgcacggccagggatgagttctcgtaccaggagatgatatccttcctgccgctctgcgcccataccaatcccaagaaggtcctgatcgtgggcggtggcgatggcggcgttgctcgcgaggtggtaaagcatccactggtcgaggaagtgcatcaggtggaaatcgacgaccgtgtcgtcgagctgtccaagcaatatctcccggcgatggcctgtggcttcgccaacgagaagttgaagctgaccattggcgatggattcgactatatgaagaaacacaagaacgaatttgatgtcatcatcaccgacagctcggatcccattggtccggcagtgagcctgttccaggaaagctactacgagctaatgaaacacgcgctgaaggaagacggaatcgtgtgctcccagggcggtagcttctggctggatctggactacatcaagaagaccatgtccggctgcaaggagcactttgctaaggtggcctatgccgttacctccgttccgtcctatccctgcggccacattggcttcgtcatgggctccctgaacaaaaaccaggatttcgctactcccaagctcggaaagtccgaaatcgatgccatagacctaaggtactactcctccgaagttcactccgtcgcctttgccttgcctcgatgggtgcagaagcacttttacgaatga

SEQ ID NO: 154682 - protein, 287 aa, Drosophila sechellia
MDSLNNGWFSELQADLWPGQSFSLKVKEVIHKEKSRFQDIQIVETETYGRCLILDGIIQCTARDEFSYQEMISFLPLCAHTNPKKVLIVGGGDGGVAREVVKHPLVEEVHQVEIDDRVVELSKQYLPAMACGFANEKLKLTIGDGFDYMKKHKNEFDVIITDSSDPIGPAVSLFQESYYELMKHALKEDGIVCSQGGSFWLDLDYIKKTMSGCKEHFAKVAYAVTSVPSYPCGHIGFVMGSLNKNQDFATPKLGKSEIDAIDLRYYSSEVHSVAFALPRWVQKHFYE

SEQ ID NO: 154683 - DNA, 870 bp, Drosophila willistoni
  CDS (1)..(870)
atggatttgatttcaaacggatggttcagtgaagttcagaatgaactctggcctggacaatctttttcgctgaaagttaaaaaagtcctgcataaggaagattcgaaattccaaaatattcaaattgttgaaactgaaaactatggaatgtgcttgatactggatggaatcatacaatgcacattaagagatgaattttcctatcaggaaatgatttcatttctgcctctctgcttacatccgaacccaaagaaggtccttattgttggcggcggcgatggtggcgtagccagagaagttgtcaagcatccccaggttgaggaagtccatcaggtggaaatcgacgatcgcgttgtagaactttccaagcaatatttaccctcgatggcatgtggatttgaaaacccaaaattgaagctgactatcggcgatggattcgagtacatgaagaatcattcaaatgaattcgatgttatcataacagatagctcagatccagttggcccagctgtttccttgttccaggaaagctattatgaattaatgaagaacgcccttaaggatggcggtattgtttgctcgcaaggaggcagcttttggctggatatcgcacacattaagaaaactatggatggctgtggacagcattttgcaaaagttgcctatgcagtgacatcggttccatcttatccttgcggccatattggttttgtcataggttctttgaataagaatcaagttttcaaaactcccacaaagaaatttgagaattccgaaattgattccttgaacctaaaatactactcgagtgaagttcatgcttctgcctttgctctaccccgttgggtcgagaaacatttatacgaataa

SEQ ID NO: 154684 - protein, 289 aa, Drosophila willistoni
MDLISNGWFSEVQNELWPGQSFSLKVKKVLHKEDSKFQNIQIVETENYGMCLILDGIIQCTLRDEFSYQEMISFLPLCLHPNPKKVLIVGGGDGGVAREVVKHPQVEEVHQVEIDDRVVELSKQYLPSMACGFENPKLKLTIGDGFEYMKNHSNEFDVIITDSSDPVGPAVSLFQESYYELMKNALKDGGIVCSQGGSFWLDIAHIKKTMDGCGQHFAKVAYAVTSVPSYPCGHIGFVIGSLNKNQVFKTPTKKFENSEIDSLNLKYYSSEVHASAFALPRWVEKHLYE

SEQ ID NO: 154685 - DNA, 864 bp, Drosophila yakuba
  CDS (1)..(864)
atggattcccttaacaacggatggttcagcgaactgcaggccgatctctggcctggtcagtccttctccctgaaagtcaaggaggtcatccacaaggagaagtccaagtttcaggacatccagatcgttgaaaccgaaacgtatggaaggtgcctgattctggacggaatcatccagtgcactgccagggatgagttctcgtaccaggaaatgatatccttcctgcccctctgcgcccatccgaatcccaagaaggtcctgatcgtgggcggtggcgatggcggcgttgctcgcgaagttgtcaagcatcccctggtcgaggaagtgcatcaggtggaaatcgacgaccgtgtcgtcgagctgtccaaacaataccttccggcgatggcctgtgggttcgccaacgagaagttgaagctgaccattggcgatggatttgactacatgaagaagcataagaacgaatttgatgtcatcataaccgatagctcggatccaattggtccggcagtgagcctgttccaggaaagctactacgagctaatgaaacacgccctgaaggatgacggaatcgtgtgctcccagggcggtagcttctggctggatctggactacataaagaagacaatgtcgggctgcaaggagcacttcgctaaggtggcctatgccgtcacctccgttccgtcctatccctgcggccacattggcttcgtcatgggttccctgaacaaggaccaggactttgctactcccaaacttggaaagtccgaaatcgatgccttagatcttaggtactactcctcagaggttcattccgccgcctttgccttgcctcgatgggtgcagaagcacttttacgaatga

SEQ ID NO: 154686 - protein, 287 aa, Drosophila yakuba
MDSLNNGWFSELQADLWPGQSFSLKVKEVIHKEKSKFQDIQIVETETYGRCLILDGIIQCTARDEFSYQEMISFLPLCAHPNPKKVLIVGGGDGGVAREVVKHPLVEEVHQVEIDDRVVELSKQYLPAMACGFANEKLKLTIGDGFDYMKKHKNEFDVIITDSSDPIGPAVSLFQESYYELMKHALKDDGIVCSQGGSFWLDLDYIKKTMSGCKEHFAKVAYAVTSVPSYPCGHIGFVMGSLNKDQDFATPKLGKSEIDALDLRYYSSEVHSAAFALPRWVQKHFYE

SEQ ID NO: 154687 - DNA, 924 bp, Ciona intestinalis
  CDS (1)..(924)
atggacgaactaaaacttaactggtttagtgaattgaattccttatggccaggacaatgtatgtcattggaggtagaagaagttttatttcacgaacgctcaaagtatcaagatgttttagtttttaaaagcaaaacttacggcaacgtattagtcctcgatggagtgattcaatgcactgaaagagatgagttcgcttaccaggagatgatcgcccatcttcctttgttctctcatcccaatcctaagaatgttcttgtaatagggggtggtgatggcggagttatcagggaagttcttaaacattcatctgtggtttctataactcagtgcgagattgatcaggttgtgatagatgtttcacgtaagtttcttccatcaatgtctaaaagcatggacgaccctcgtgttacacaatttgttggtgatggtctggcgtttatgagggaacacaaagctgagtttgatgtcataatcactgattcatctgacccacaaggtcctgctgaagctttattcgagaaaccatattaccaactgatgcagaaagcacttaaagatggtgggattatatgcgcacaaggagaatgtgtttggttgcatcttagtcttatttgtaacatgaagaagttttgtgaaaccgtgttcccatccgttgcatatggttattgtacaataccaacgtatccaagcgggcagatagggttcatgttgtgcagccagaataaggagaccaactttaaagagccttgcagagtattaagttgtgatgaagtgaataaaatggaattgaaatattacaactcagatgtccacaaagctgcattcgttttacctcaatttgctaaatcagcattggaaaacaattgtgttccacctggccgattcaacttttctaaaattgaccaagattatgacgcataa

SEQ ID NO: 154688 - protein, 307 aa, Ciona intestinalis
MDELKLNWFSELNSLWPGQCMSLEVEEVLFHERSKYQDVLVFKSKTYGNVLVLDGVIQCTERDEFAYQEMIAHLPLFSHPNPKNVLVIGGGDGGVIREVLKHSSVVSITQCEIDQVVIDVSRKFLPSMSKSMDDPRVTQFVGDGLAFMREHKAEFDVIITDSSDPQGPAEALFEKPYYQLMQKALKDGGIICAQGECVWLHLSLICNMKKFCETVFPSVAYGYCTIPTYPSGQIGFMLCSQNKETNFKEPCRVLSCDEVNKMELKYYNSDVHKAAFVLPQFAKSALENNCVPPGRFNFSKIDQDYDA

SEQ ID NO: 154689 - DNA, 903 bp, Schizosaccharomyces japonicus yFS275
  CDS (1)..(903)
atgtcttctgaatcccaagagcttactcacccctccatcaaggatggatggttccgtgaaatcaacaagatgtggcctggtcaggctatgaccttgaaggtcaagaaggttctccatgctaaacgttccaagttccaggatgttttgatattcgagagcgaaacttatggccgtgttctcgtcttggacggtgtcattcaagctactgagcgtgatgagttttcataccaagaaatgattgctcacttggctctgaacagtcatgccaaccccaagaaggtgctggtcatcggtggtggtgatggaggtgtcttgcgtgaggttgtgaaacacgaaagtgtagaggaggttgtcttgtgtgacattgatgccgatgtcattgactactctaaaaagttcattcccagtatggctgtgggatatgaacaccccaaggtgaagactcatgtcggtgacggattccagttcttgaaggactacaccaacacctttgatgtgattatcaccgattcctctgaccctgacggtcctgctgaggctcttttcgaggctccttacttccagctgttgcacggtgctcttcgcgagaacggtgttatcacgacacaggctgagtgcatgtggcttcacttaagtgtgatcgagaatgtgcttaaggccgctcgtaaggcgttccccaacgtccgttacgcttacaccacaatccccacatatccctctggctctattggattcgtcgtcgctagcaagaacactgccattgacttgtctaagcccctgcgtacttggactgccgaggaggaggccaagttgtgccgctactacaacaaggagatccatgaggctgctttcatcttgcccaactttgcccgtgctgtggtcaacaaggctctttctgagtaa

SEQ ID NO: 154690 - protein, 300 aa, Schizosaccharomyces japonicus yFS275
MSSESQELTHPSIKDGWFREINKMWPGQAMTLKVKKVLHAKRSKFQDVLIFESETYGRVLVLDGVIQATERDEFSYQEMIAHLALNSHANPKKVLVIGGGDGGVLREVVKHESVEEVVLCDIDADVIDYSKKFIPSMAVGYEHPKVKTHVGDGFQFLKDYTNTFDVIITDSSDPDGPAEALFEAPYFQLLHGALRENGVITTQAECMWLHLSVIENVLKAARKAFPNVRYAYTTIPTYPSGSIGFVVASKNTAIDLSKPLRTWTAEEEAKLCRYYNKEIHEAAFILPNFARAVVNKALSE

SEQ ID NO: 154691 - DNA, 921 bp, Branchiostoma floridae
  CDS (1)..(921)
atggacgccattagaaacggctggttcagtgagttgagtccgttgtggcccggccaggccatgagtctggaagtggaagaagtgctctaccacggcaggtccaagtaccaagatgtgctcgtcttcaaaagtaagacctatgggaacgtgctggtgttggatggggtgatccagtgcacggagagagatgagtactcctatcaggagatgatcgcacacctgccactcatgagccatcccaaccccaaaaaggtgctgttaatcggaggaggggatggaggagtgctgagggagattgccaaacattcctgtgtggagtcagtggtgcagtgtgagatagacgataaagtgattgaggtgtccaagaagtacctgccaaagatggcgtgtggctacgacaaccccaaactgactgtaaacatcggggatggcttcgacttcatgaagaagaacaaagggtcgtttgacatcatcattacagactcttctgaccccattggtcctgcggaagcattgttccaaaagtcgtactatgagctgatgaaggaagcgctgaggcctggtgggattgtctgcacacagggagagtgcatgtggcttcacctggacctgatccgtgacatgcaggatttctgcggcagcctgtacccccacgtggcctatagttactgcaccattccaacctaccccagcggacagataggctttgtgctctgcagtacaaaccctgacactaattttatggatcctgtgagaaaattcacagaagagcagctggaggagctcaacatccggtactacaatgcagatatccacagagcatcctttgttcttcctcagtttgttaagaaggcactgaaggctccaaaaacggaggcaaataatcaacctgaagaggatggccagaatggagaaaaatga

SEQ ID NO: 154692 - protein, 306 aa, Branchiostoma floridae
MDAIRNGWFSELSPLWPGQAMSLEVEEVLYHGRSKYQDVLVFKSKTYGNVLVLDGVIQCTERDEYSYQEMIAHLPLMSHPNPKKVLLIGGGDGGVLREIAKHSCVESVVQCEIDDKVIEVSKKYLPKMACGYDNPKLTVNIGDGFDFMKKNKGSFDIIITDSSDPIGPAEALFQKSYYELMKEALRPGGIVCTQGECMWLHLDLIRDMQDFCGSLYPHVAYSYCTIPTYPSGQIGFVLCSTNPDTNFMDPVRKFTEEQLEELNIRYYNADIHRASFVLPQFVKKALKAPKTEANNQPEEDGQNGEK

SEQ ID NO: 154693 - DNA, 942 bp, Vitis vinifera
  CDS (1)..(942)
atggctgaacataccagagagggcgaagagaatggggtcagcggttgcatgtcttctgtgattcctgggtggttttcggagattagcccaatgtggcctggagaggcacattccttaaaggtagaaaagatcttatttcaggagaaatctgactaccagaatgtaatggtctttcagtcagcaacatatggaaaggttctcgttttggatggggtgattcaactcacagagagggatgaatgcgcatatcaagaaatgatcactcacctgccactttgctcaattccaaacccaaagaaggttttggtcattggcggaggagatggtggtgtcctgcgagaagtggcccgacattcttctgttgagcagatagatatctgtgaaattgatgggatggttgtcgatgtttctaaaaaatttttccctgacgtagcaattgggtatgatgatccccgtgtgaatctccatattggcgatggggttgcatttatgaagaatgcacctgaaggaacttatgatgctgttatagtagattcttctgacccaataggtcctgcacaggagctttttgagaagcctttctttgcgtcagtggcaagggctcttcgtccagggggagttgtgtgtactcaggcagaaagtatatggcttcatatgcacattattgaagacattgtcacaaactgccgccagatattcaaaggctctgtcaactatgcatggacaacagttcctacatacccaagtggggtgattggattcatgctgtgctctactgagggacctgctgttgatttcaagcatcctgtcaatcccattgatgcaaatgagagtgcttgcaagtcaagtcgacctttgaaattttacaactcagagattcacgctgcagctttctgtttgccatcttttgcaaagaaggtgattgattcaaaaactacatga

SEQ ID NO: 154694 - protein, 313 aa, Vitis vinifera
MAEHTREGEENGVSGCMSSVIPGWFSEISPMWPGEAHSLKVEKILFQEKSDYQNVMVFQSATYGKVLVLDGVIQLTERDECAYQEMITHLPLCSIPNPKKVLVIGGGDGGVLREVARHSSVEQIDICEIDGMVVDVSKKFFPDVAIGYDDPRVNLHIGDGVAFMKNAPEGTYDAVIVDSSDPIGPAQELFEKPFFASVARALRPGGVVCTQAESIWLHMHIIEDIVTNCRQIFKGSVNYAWTTVPTYPSGVIGFMLCSTEGPAVDFKHPVNPIDANESACKSSRPLKFYNSEIHAAAFCLPSFAKKVIDSKTT

SEQ ID NO: 154695 - DNA, 1110 bp, Vitis vinifera
  CDS (1)..(1110)
atggagggcggcgcaggaaaaggtttggaatgcccgaagattatggatgggaaggcgagtaacgggaagggtttgaagaaggccattccttcttgttgcctaaaagctaaggcttcggcccctgagaatgatgcaaaatgccattcaactgttgtttctgggtggttctcagaacctcagtcatgctctgataaagctggcaatctgatgtatttcaacaacccgatgtggcctggagaagcacattcactgaaagttgaaaatattttattccagggaaagtctgagtttcaagagatactggtttttgagtcgtcagcatatggcaaagtgcttgtgcttgatggcattgttcagttgagcgagaaagatgaatgtgcctatcaggagatgattgctcaccttcccctttgttcaattgaatcccccaagagagttctggttgttggtggtggtgatggtggggttcttagggaaatttctcgtcatagctctgttgagcttattgatatttgtgagatagataagatggttatagatgtgtgtaagaagtttttcccacagttatacgttgggtttgaagaccctcgtgtccagcttcatgttggggatgctgttgaatttcttagacatgtacctgaagggaagtatgatgcaattattgttgattcatcagatcctgtgggtcctgctcaagaacttgtcgagagaccattttttgagacaacagccagagctttgcgtcctggtggtgttctttgtaacatggctgaaagcatgtggctccacacacatcttattcaggatatgctttctatttgtcgtgaaacattcaagggttcggtccattatgcatgggcaagtgttcctacatatccaagtggtgtgattggatttctattgtgctcaactgaggggccacctgtggatttcttgcatcctgttaacccaattgagaagttagaaggcaatctcaagtgtggtagagaacttaggttttataactcggagattcactcggctgcttttgcattaccttcatttgtgaggagggaggtgagcattctgcacaattctccaaccccagcacaacgaatctgtgtttcttag

SEQ ID NO: 154696 - protein, 369 aa, Vitis vinifera
MEGGAGKGLECPKIMDGKASNGKGLKKAIPSCCLKAKASAPENDAKCHSTVVSGWFSEPQSCSDKAGNLMYFNNPMWPGEAHSLKVENILFQGKSEFQEILVFESSAYGKVLVLDGIVQLSEKDECAYQEMIAHLPLCSIESPKRVLVVGGGDGGVLREISRHSSVELIDICEIDKMVIDVCKKFFPQLYVGFEDPRVQLHVGDAVEFLRHVPEGKYDAIIVDSSDPVGPAQELVERPFFETTARALRPGGVLCNMAESMWLHTHLIQDMLSICRETFKGSVHYAWASVPTYPSGVIGFLLCSTEGPPVDFLHPVNPIEKLEGNLKCGRELRFYNSEIHSAAFALPSFVRREVSILHNSPTPAQRICVS

SEQ ID NO: 154697 - DNA, 1125 bp, Vitis vinifera
  CDS (1)..(1125)
atggccaaagttagtggtgttgtctccgctgtattcatggctaaggcaaatggtaatggtgttgcctctgctgaattcaaggctaatgggaatggttcacctgagttccatgcaaatttgcatagaaaggagacagtgggagatggggttatggctgagcatggaaacaccattgtctcatcagtttctttattgcctcctgaaactgagaacagcagcaatggggatgtttgtttctcgtctgcaattcctggatggtatgctgatgctcccccactctggccaggagaggcacatgtttataaggtggagaaggtgttatttcgaggaaaatctgaataccaggagcttttcatatttgagtcagcaacatcagggaagattgttatcttggatgggtatctccaactctcagaaaaggatgagtttgtataccaagagatgctcactcaccttgccctttgctccattcccaaccccaagaaggtactgctcgtaggaggaggagatggaggcattttacgggaggcttctcgtcattcctcccttgagcagattgatatatgtgaaatagacaaaatggtgattgatgtttataaacaattcttccctgacatagcagttgggtttgaggatccccgggtgtctgtctacattggtgatggagttgaatttctgaagtctgttcctgaagctacttatgatgccatcatattggatgcattccaagaaatggggcctagtgcacaagagcttgctgataaacacatcttggagtcggttgcaagggctcttcggccggggggagtcctgtctactcaggcagaaagcatgtggaataaaaacttcatcctcgaagacatcattgcagattgtcgcaagatattcaaaggctctgtcaactatgcctggacaacagttcctgtgtactcaagtggggtagttggattcattctttgcgccaccgaggggccaccggttgacttcaagcacccgataaacccaatagatgcagtgccgaatcatggtgtagcaaaagggccccctaaattttacaactcagaggtccatactgctgcattctgtcttccatcatttctgaaagggggaagctccaagaattaa

SEQ ID NO: 154698 - protein, 374 aa, Vitis vinifera
MAKVSGVVSAVFMAKANGNGVASAEFKANGNGSPEFHANLHRKETVGDGVMAEHGNTIVSSVSLLPPETENSSNGDVCFSSAIPGWYADAPPLWPGEAHVYKVEKVLFRGKSEYQELFIFESATSGKIVILDGYLQLSEKDEFVYQEMLTHLALCSIPNPKKVLLVGGGDGGILREASRHSSLEQIDICEIDKMVIDVYKQFFPDIAVGFEDPRVSVYIGDGVEFLKSVPEATYDAIILDAFQEMGPSAQELADKHILESVARALRPGGVLSTQAESMWNKNFILEDIIADCRKIFKGSVNYAWTTVPVYSSGVVGFILCATEGPPVDFKHPINPIDAVPNHGVAKGPPKFYNSEVHTAAFCLPSFLKGGSSKN

SEQ ID NO: 154699 - DNA, 990 bp, Vitis vinifera
  CDS (1)..(990)
atgggtgatatttcatgctccaatggcaatgaagttaatggaaaaagccattcactggctggttataggaagagttgttggtatgaggaagagattgaagagaacttgagatggtgctttgcgctcaatagcattttgcataccggagctacgcagtaccaggacattgcactgctggacacgaagccctttgggaaggctttagtcattgatggaaagcttcaaagtgctgagattgatgaattcatctaccatgaatcccttgtccatcctgcacttcttcatcatccaaatccaaagagcatcttcatcatggggggaggtgaaggttccactgcaagagaaatactgagacataagactgtagagaaggttgtcatgtgtgacattgatgaggaggtggtggatttctgcaaatcatacttggtggtaaacagagaagctttctgtgatcccagacttgagcttgtcatcaacgatgccagggccgagctagagagcagagaagagtgtttcgacgtaatcataggtgacctggctgacccaatagaaggaggcccatgttatcagctctacaccaaatccttttatgagtccactgtcaaacctaggctaagtccgggtggcatctttgtcacacaggcaggaccagcaggggttttcagccatacagaggttttctcttgcattcacaacaccctaaggcaggtcttcaaacatgttgtggcttattcagcccatattccttcctttgctgatatttggggatgggttatggcatcagattcgccatttttgctgaatgctgaagagttggacctgagaatgaaacagaggatcaaaggggagaacagatacattgatgggaagacattttcatcagcctctaccctgagcaaagttgttcgaacttcattggacaatgagactcaagtgtacacagagggaacagcaaggtttatatatggccatggtactgccctcaaataa

SEQ ID NO: 154700 - protein, 329 aa, Vitis vinifera
MGDISCSNGNEVNGKSHSLAGYRKSCWYEEEIEENLRWCFALNSILHTGATQYQDIALLDTKPFGKALVIDGKLQSAEIDEFIYHESLVHPALLHHPNPKSIFIMGGGEGSTAREILRHKTVEKVVMCDIDEEVVDFCKSYLVVNREAFCDPRLELVINDARAELESREECFDVIIGDLADPIEGGPCYQLYTKSFYESTVKPRLSPGGIFVTQAGPAGVFSHTEVFSCIHNTLRQVFKHVVAYSAHIPSFADIWGWVMASDSPFLLNAEELDLRMKQRIKGENRYIDGKTFSSASTLSKVVRTSLDNETQVYTEGTARFIYGHGTALK

SEQ ID NO: 154701 - DNA, 1008 bp, Populus trichocarpa
  CDS (1)..(1008)
atggctgaagagagttttgttggagatttgccagtgaagaggccaagagaagatgaagagaacggggcctttgctgccactgaagccatggagacagagaccaacagtagcgattatatttcctctgttattcctggctggttctctgagattagcccaatgtggcctggagaagcacattccttgaaagtagagaagatcttatttcaagggaagtctgactatcagaatgtcatggtctttcagtcatcaacgtatggaaaggttctagttttagatggggtgattcagctaacagagagggatgaatgtgcatatcaagaaatgatcactcaccttcctctttgctcaattgtaaacccaaagaaggttttggttattggtggaggagatggtggggtcctacgggaagtggctcggcactcttctgttgagcagattgacatatgtgaaatagataagatggttgttgatgtttctaaaaaattcttccctgacgtagcaatcgggtatgaggatccccgagtgactctccgtgtcggtgatggagttgcattcttaaaggctgttcctgaaggtacttatgatgcaatcatagtagattcttccgacccaataggtcctgctcaagagctttttgagaagcccttttttgagtcagtagcaaaggctctccgtccaggaggagttgtgagcacacaggcagaaagtatatggcttcacatgaacatcattgaggatattgtggcaaactgccgtcagatcttcaaaggctctgtcaactatgcttggactactgttcctacttacccaagcgggatgattggtttcatgctttgctctaccgagggaccccctgttgatttcaagcatccagttaatcctatagatgtcgatgatagtcaaagaaaatcaaaacctttgaaattctacaactcagagttgcatacagcggctttctgtttgccttcttttgcaaagaaagtgattgattcaggggctgaatga

SEQ ID NO: 154702 - protein, 335 aa, Populus trichocarpa
MAEESFVGDLPVKRPREDEENGAFAATEAMETETNSSDYISSVIPGWFSEISPMWPGEAHSLKVEKILFQGKSDYQNVMVFQSSTYGKVLVLDGVIQLTERDECAYQEMITHLPLCSIVNPKKVLVIGGGDGGVLREVARHSSVEQIDICEIDKMVVDVSKKFFPDVAIGYEDPRVTLRVGDGVAFLKAVPEGTYDAIIVDSSDPIGPAQELFEKPFFESVAKALRPGGVVSTQAESIWLHMNIIEDIVANCRQIFKGSVNYAWTTVPTYPSGMIGFMLCSTEGPPVDFKHPVNPIDVDDSQRKSKPLKFYNSELHTAAFCLPSFAKKVIDSGAE

SEQ ID NO: 154703 - DNA, 1008 bp, Populus trichocarpa
  CDS (1)..(1008)
atggctgaagagagtgttgttactgatttgccagtgaagaggccaagagaagatgaagagaatggagcctctgctgccactgaagccatggagacagagaccaacaataacgattatatctcctccgttattactggctggttctctgagattagcccaatgtggcctggagaggcgcattccttgaaagtagagaagatcttatttcaagggaagtctgactatcagaatgttatggtctttcagtcatcaacatatggaaaggttctagttttagatggggtaattcaactcactgagagggatgaatgtgcatatcaagaaatgatcactcaccttccactttgctcaattgctaacccaaagaaggttttggttattggtggaggagatggtggggtcctgcgggaagtggctcgacactcttctgttgagcagattgacatatgtgaaatagataagatggttgttgatgtttctaaaaaattcttccctgacgtatcagtcgggtatgaggatccccgtgtgtctctccatattggtgatggagttgcatttttaaaagctgttcctgaaggtacttatgatgcagttatagtagattcttccgatccaataggtcctgctcaagagctttttgagaagcccttttttgagtcagtagcaaaggctctccgtccaggaggagttgtgagcacacaagcagaaagtatatggcttcacatgaacatcattgaagatattgtggcaaactgccgtcagatcttcaaaggctccgtcaactatgcatggactactgttcctacgtacccaagtggaatgattggtttcatgctttgctcgactgagggacctgccgttgatttcaagcatccagttaatcctatagattccaatgatagtcaaagcaaatcaaaacccttgaagttttacaactcagagttgcatacagcggctttctgtttgccttcttttgcaaagaaggtgattgattcaaaagctaaatga

SEQ ID NO: 154704 - protein, 335 aa, Populus trichocarpa
MAEESVVTDLPVKRPREDEENGASAATEAMETETNNNDYISSVITGWFSEISPMWPGEAHSLKVEKILFQGKSDYQNVMVFQSSTYGKVLVLDGVIQLTERDECAYQEMITHLPLCSIANPKKVLVIGGGDGGVLREVARHSSVEQIDICEIDKMVVDVSKKFFPDVSVGYEDPRVSLHIGDGVAFLKAVPEGTYDAVIVDSSDPIGPAQELFEKPFFESVAKALRPGGVVSTQAESIWLHMNIIEDIVANCRQIFKGSVNYAWTTVPTYPSGMIGFMLCSTEGPAVDFKHPVNPIDSNDSQSKSKPLKFYNSELHTAAFCLPSFAKKVIDSKAK

SEQ ID NO: 154705 - DNA, 1044 bp, Populus trichocarpa
  CDS (1)..(1044)
atggatgggaaggcgaataatgggaatggttcagagaaggctattccttcttgttgcctgaaggctagggcttctgcccctgagcttgacgcaaaatgccattctactgttgtttctgggtggttctcggaatctcattcttgcgctggcaaaactagcaaaaaggtttacttcaacaaccccatgtggcctggagaagcacatacactggaagtgaaagaggttttatacaagggaaagtcagagtatcaagaggtcttggtttttgagtcaacatcatatgggaaagtgcttgttcttgatggtattgttcaattgactgagaaagatgaatgcgcataccaggagatgatcgcccatcttcccctttgttcgattccatctcccaaaactgttttggttgttggtggtggtgatggtggtgttcttagggaaatttctcgccatagttctgtggaacatattgatatttgtgaaatagatcagatggttatagatgtgtctaagaagttttttccacaattggctgttggatttgaggatcctcgggtccgacttcatgtgggtgatgctgtagattttctccggtcaactcctgaagggaagtatgatgctattattgttgattcctcagaccctgtaggtcctgctcaagagctagtagagaagccatttttcgagacaatagctagagcattaaggcctggtggtgtcctctgtaacatggcagaaagtatgtggcttcatacacatcttattgaggatatgatctctatttgccgtgaaacatttaagggttctgttcattatgcctgggcaagtgttccaacatatccaagtggcctgatcgggtttgtcctatgctcaacagagggcccgcctgttgagttcttgaatcctgtcaatcctattgagaagttagaaggtgctaccaagtataaaagagaactcaagtactataactctgaggttcactcagctgcctttgcattgccaacatttttgaagaaggaggtgagcttgctccaagatcaagggaggtga

SEQ ID NO: 154706 - protein, 347 aa, Populus trichocarpa
MDGKANNGNGSEKAIPSCCLKARASAPELDAKCHSTVVSGWFSESHSCAGKTSKKVYFNNPMWPGEAHTLEVKEVLYKGKSEYQEVLVFESTSYGKVLVLDGIVQLTEKDECAYQEMIAHLPLCSIPSPKTVLVVGGGDGGVLREISRHSSVEHIDICEIDQMVIDVSKKFFPQLAVGFEDPRVRLHVGDAVDFLRSTPEGKYDAIIVDSSDPVGPAQELVEKPFFETIARALRPGGVLCNMAESMWLHTHLIEDMISICRETFKGSVHYAWASVPTYPSGLIGFVLCSTEGPPVEFLNPVNPIEKLEGATKYKRELKYYNSEVHSAAFALPTFLKKEVSLLQDQGR

SEQ ID NO: 154707 - DNA, 1023 bp, Aspergillus flavus NRRL3357
  CDS (1)..(1023)
atgaacccccacttggctcgcgcatcttcttcgctttctctttcttctctcctcttctcttccttctcttcttctctctctcgacgtttaccttctcgtgcttttcgtcataccctttttcgttcgcacttctcccactccatcaccatgtccgagaaaactcaccccactatccaggatggctggttctccgagaagtccaacatgtggcctggtcaggccatgagcctcaaggtcaaccagatcctgcaccacgagaagtctaagtaccaggatgtcctcgtcttcgagagcagcgactacggcactgtcctcgttctggacaatgtcatccagtgcactgagcgggatgagttctcctaccaggagatgatcacccacctcgccatgaactctcaccccaaccccgagaaggtcctggtcatcggtggtggagacggcggtgttctccgtgaggtcgtcaagcacgataccgtcaagaaggccatcctgtgcgatatcgatgaggccgtcatccgtgtctctaagaagtacctccccggcatgagcatcggcttccaacaccccaacgtcgaggagttcgtcggcgatggctttgagttcctcaaaacccacaagaacgagttcgacgtcatcatcaccgacagctccgaccctgagggtcctgctgagagtctcttccagaagccctactttgagctcctgcgcgatgcgctccgtgacggaggtgtcatcaccacacaagccgagaaccagtggctgcacctttctctcatcaccgacctcaagaaggcctgcaaggaagtcttccccgtcgccgaatacgcctacaccaccatccccacctacccctccggccagattggcttcatggtctgctgcaaggacgccaaccgcaacgtgcgtgagcccgtccgcagctggactcgcgaggaggaggagcgtctctgccgctactacaaccaggatatccaccgggctagcttcgttcttcccaactttgcccgtaaggctttgaactag

SEQ ID NO: 154708 - protein, 340 aa, Aspergillus flavus NRRL3357
MNPHLARASSSLSLSSLLFSSFSSSLSRRLPSRAFRHTLFRSHFSHSITMSEKTHPTIQDGWFSEKSNMWPGQAMSLKVNQILHHEKSKYQDVLVFESSDYGTVLVLDNVIQCTERDEFSYQEMITHLAMNSHPNPEKVLVIGGGDGGVLREVVKHDTVKKAILCDIDEAVIRVSKKYLPGMSIGFQHPNVEEFVGDGFEFLKTHKNEFDVIITDSSDPEGPAESLFQKPYFELLRDALRDGGVITTQAENQWLHLSLITDLKKACKEVFPVAEYAYTTIPTYPSGQIGFMVCCKDANRNVREPVRSWTREEEERLCRYYNQDIHRASFVLPNFARKALN

SEQ ID NO: 154709 - DNA, 1005 bp, Magnaporthe grisea 70-15
  CDS (1)..(1005)
atgctttccccggtgcctttgagagtttgctcgcgcggcttccgggcgttgtctgttattggcctccttgacaaacgccaagtcttctcagcacttcgcagcccacattcgcatcggtcactagggctaacgggttcatatcaccattcgattgcagatggatggttccgcgagatctcggacatgtggccaggccaggccatgaccctcaaggtcgagaaggtcctgcaccacgagaggagcaagtaccaggatgtgctcatcttccagtcgactgactacggcaaggtcttggtcctggacaacgtgatccagtgcacggagcgcgatgagttctcgtaccaggagatgatcacccacctcgccatgaactcgcaccccaaccccaagaaggtgctcgtcatcggtggtggtgacggtggtgttctccgcgaggtcgtcaagcacgactgcgtcgaggaggccatcctctgcgacattgacgaggctgtcatccgcctgtccaaggagtacctccccaacatgtcggctggctttaaccaccccaaggtcaaggtccacgttggcgacggcttcaagttccttgccgactaccaaaacacctttgacgtcatcatcaccgactcgtccgaccccgagggccccgccgagagcctgttccagaagccctacttccagcttctcttcaatgccctcaccgagggcggtgttatcaccacacaagccgagaaccaatggctccacctgcccctgatcaccaagctccgcaaggactgcaaggagatcttccccgtggccgagtacgcctacacgaccatcccgacctacccctcgggacagattggcttcatggtctgcagcaaggaccccaaggccaacctcaaggagccgctgaggtcgtggacccaggaggaggagctcgagaagtgccgctactacagctcagacatccacaaggccagcttcgtgctgcccaactttgcccgcaaggctctccaggactaa

SEQ ID NO: 154710 - protein, 334 aa, Magnaporthe grisea 70-15
MLSPVPLRVCSRGFRALSVIGLLDKRQVFSALRSPHSHRSLGLTGSYHHSIADGWFREISDMWPGQAMTLKVEKVLHHERSKYQDVLIFQSTDYGKVLVLDNVIQCTERDEFSYQEMITHLAMNSHPNPKKVLVIGGGDGGVLREVVKHDCVEEAILCDIDEAVIRLSKEYLPNMSAGFNHPKVKVHVGDGFKFLADYQNTFDVIITDSSDPEGPAESLFQKPYFQLLFNALTEGGVITTQAENQWLHLPLITKLRKDCKEIFPVAEYAYTTIPTYPSGQIGFMVCSKDPKANLKEPLRSWTQEEELEKCRYYSSDIHKASFVLPNFARKALQD

SEQ ID NO: 154711 - DNA, 885 bp, Gibberella zeae PH-1
  CDS (1)..(885)
atgtctaacgaggagatcacccaccccaccatcgtcgatggctggttccgagagatctcggacatgtggcccggccatgccatgaccctccgagttgagaaggtcctcgtccacgagaagagcaagtaccaagacgtcctcatcttcaagtccaccgacttcggcaacgttctcgtcctcgacaacgtcatccagtgcaccgagcgtgatgagttctcctaccaggagatgattgctcaccttgccctcaactcccaccccaaccccaagaaggttcttgtcattggtggtggcgatggtggtgttctccgtgagatcgtcaagcacgactgtgtcgaggaggccaccctctgcgacattgacgaggctgtcatccgtctctccaaggagcacctcccctccatggcctgtggcttcgaccaccccaagtccaagacccacgttggcgatggcttcaagttcctcaacgactacaagaacgagttcgacgtcatcatcaccgactcctccgaccccgatggtcccgccgaggctctcttccagaagagctacttccagctcctccacgacgctctccgtgagggcggtgtcatcactactcaaggttctgagagcccctggcttcacctccccctcatcgctcgtctcaagaaggactgcggtgccatcttccccgtcgccgagtacgcctacaccaccatccccacctacccctctggccagatcggcttcatggtctgctccaaggaccccaaggccgacgtcaagaaccccatccgatcctggaccaaggaggaggaggacgagaagctccgatactactcttctgagatccacaaggccagctttgtccttcccaagttcgctgccaaggctcttgagtaa

SEQ ID NO: 154712 - protein, 294 aa, Gibberella zeae PH-1
MSNEEITHPTIVDGWFREISDMWPGHAMTLRVEKVLVHEKSKYQDVLIFKSTDFGNVLVLDNVIQCTERDEFSYQEMIAHLALNSHPNPKKVLVIGGGDGGVLREIVKHDCVEEATLCDIDEAVIRLSKEHLPSMACGFDHPKSKTHVGDGFKFLNDYKNEFDVIITDSSDPDGPAEALFQKSYFQLLHDALREGGVITTQGSESPWLHLPLIARLKKDCGAIFPVAEYAYTTIPTYPSGQIGFMVCSKDPKADVKNPIRSWTKEEEDEKLRYYSSEIHKASFVLPKFAAKALE

SEQ ID NO: 154713 - DNA, 882 bp, Candida glabrata CBS 138
  CDS (1)..(882)
atgagcgagattacacaccctactattgttgatggatggttcagagagatctctgacaccatgtggcctggtcaagccatgactttgaaagtcgagaaggtcttgcaccatgagaagtccaagtaccaggacgtcttgatcttcaagtccaccaactacggtaacgttcttgttttggacaatgttatccaggccactgagcgtgacgagttctcctaccaggagatgatcacccatttggccatgaactctcacccaaacccaaagaaggttcttgtcattggtggtggtgatggtggtgttcttagagaagttgtcaagcatgagtgtgttgaagaagcttggctgtgtgacattgacgaagctgttatcagattgtccaaggaatacttgccagacatggccggtgtttactctcatccaaaggtcaagacccacatcggtgatggtttccaattcttgagagactatcaaaacacattcgatgttatcatcactgactccagtgatccagaaggtccagctgagactttgtttcaacaatcttacttcgagttgttgagaagtgctttgacagacaagggtgttattaccactcaagccgaaagtatgtggttgcacttgccaatcatcaaggacttgaagaaggcctgctcccaagtgttcccagttgctgagtacgcttacaccaccatcccaacttacccatctggtaccatcggtttcatggtctgctctaaggacgcctccgctaacgtcaagaaaccactgcgtgaaatgactgaagaacaagagaagaagttgctaagatactacaacaagagaatccacgagtcctctttcgttctaccaacctgggttgccaaggaattggaactttaa

SEQ ID NO: 154714 - protein, 293 aa, Candida glabrata CBS 138
MSEITHPTIVDGWFREISDTMWPGQAMTLKVEKVLHHEKSKYQDVLIFKSTNYGNVLVLDNVIQATERDEFSYQEMITHLAMNSHPNPKKVLVIGGGDGGVLREVVKHECVEEAWLCDIDEAVIRLSKEYLPDMAGVYSHPKVKTHIGDGFQFLRDYQNTFDVIITDSSDPEGPAETLFQQSYFELLRSALTDKGVITTQAESMWLHLPIIKDLKKACSQVFPVAEYAYTTIPTYPSGTIGFMVCSKDASANVKKPLREMTEEQEKKLLRYYNKRIHESSFVLPTWVAKELEL

SEQ ID NO: 154715 - DNA, 897 bp, Candida glabrata CBS 138
  CDS (1)..(897)
atggcagaacagaaatatattaaggatgggtggttctatgagatgagcgatgagcatttccccggacaagcgttggctttgaaagttaagcaagtgttataccagtccaagagtgagtttcaagatatcttggtgtttgagagtacaaatcatggagtttgtcttgtgttagatgggattatccagtgctcggagagggatgaatttgcctaccaggaaatgatagcccatatcccattgtattgccatgcgaatcctaagaaagttttggtcattggtggaggtgatggtggtgttgtcagagaggtagtcaagcatgacaaggtagagtctgttacaatggtggagattgacaagacagttattgagttggccaaaaaatatttacctggaatgtcctgtgcaatggaccacccaaagctgaagttgaatttatgcgatgggtttaagtttcttaaggaagcatctatgttatctaatgatgacaaatatgatgttatcatcactgacagctcagatccagatggacctgctgaggcatttttccagaaggagtattttgaattattgcaaaatgcattaaaaccagatggcattgtcattgcacaggcatcagagaatgtttggttagacattaattacttggctagccttagaaaaactgccaacgaggtgtttacaaatacgatgatatcgtacactaccgttccaacttatacgtcaggccagttaggtttgattgtatgtactaattctaatgattacgatttgacaactccacaaagacaaccttcagtatcagagcaaaatcaattaagatattataatagccagatacattcagcatcattcgttctaccaaactgggctgacatgcttatctatgataagaaatga

SEQ ID NO: 154716 - protein, 298 aa, Candida glabrata CBS 138
MAEQKYIKDGWFYEMSDEHFPGQALALKVKQVLYQSKSEFQDILVFESTNHGVCLVLDGIIQCSERDEFAYQEMIAHIPLYCHANPKKVLVIGGGDGGVVREVVKHDKVESVTMVEIDKTVIELAKKYLPGMSCAMDHPKLKLNLCDGFKFLKEASMLSNDDKYDVIITDSSDPDGPAEAFFQKEYFELLQNALKPDGIVIAQASENVWLDINYLASLRKTANEVFTNTMISYTTVPTYTSGQLGLIVCTNSNDYDLTTPQRQPSVSEQNQLRYYNSQIHSASFVLPNWADMLIYDKK

SEQ ID NO: 154717 - DNA, 891 bp, Kluyveromyces lactis NRRL Y-1140
  CDS (1)..(891)
atgtcatctaaacatccttgcatcaaagatgggtggtttaatgaagttagtgataagagtttcccaggtcaagcattctcattgaaggtcaacaagatcctatttcacgagaagacgcaatttcaggatatactgatatttgaatcgtcaaattatggtaatgtcttagtgttggatggtatcattcaggtaagtgagaaagatgaatttgcgtaccaagaactgatctctcacgttccactgtattcacacgagaacccaaagaaaattctagttataggaggtggagatggtggggttttgagagaagtggtgaaacattcttgtgtagaggaagctacactggttgaaattgatgctaaagtcatagagttatcaaagaagtacttgccaaacatggcgtgctctttcaagcatcccaaggtaaatgtgaagctgtgcgatgggttccaattcttacgagatgtcgcagaatcgggtacaaagtacgacgtaataattactgattcgtctgatccggaagggcctgcagaagcatttttccagaaggaatactttgagctgttgtacaaagcgttgactgaaaatggtgttgttattgcacaggcttctgaaaatgtctggctgaatttagaatatttgaagacgcttctgaatacgtctcgttcagtttttccagtagctgagtattgttacactatgctacccacttatacctccggtcaattagggttgatcgcatgctgtaagaatccaaacacaaatctcattgacccctgtcgtgctccaactgaggatgagcaatctcagatgagatattataataacaagatgcattccgctgcttttgtcttacctacatgggctagaaaggtactaaatccattgtga

SEQ ID NO: 154718 - protein, 296 aa, Kluyveromyces lactis NRRL Y-1140
MSSKHPCIKDGWFNEVSDKSFPGQAFSLKVNKILFHEKTQFQDILIFESSNYGNVLVLDGIIQVSEKDEFAYQELISHVPLYSHENPKKILVIGGGDGGVLREVVKHSCVEEATLVEIDAKVIELSKKYLPNMACSFKHPKVNVKLCDGFQFLRDVAESGTKYDVIITDSSDPEGPAEAFFQKEYFELLYKALTENGVVIAQASENVWLNLEYLKTLLNTSRSVFPVAEYCYTMLPTYTSGQLGLIACCKNPNTNLIDPCRAPTEDEQSQMRYYNNKMHSAAFVLPTWARKVLNPL

SEQ ID NO: 154719 - DNA, 945 bp, Debaryomyces hansenii CBS767
  CDS (1)..(945): transl_table=12
atgctgatagaagccccccaaatcgatttgaaatcgttccaacatgcatgcattaatgttatagacaataaatactggtttcacgagacatctgctgaagggtttcccgggcaagcatttgcattggaaatcgaccagatattgtatcacgtccattctcagtaccaggacatattgatattcaaatcaaccacgtttggcaatgtgttagtgttgaatggcataatccaatgtaccgaaagagacgaatttgcatatcaggagcttattacccatttgccaataatgtgccatgcaagcccaagaagggtcttggtaatcggcggaggagactgcggagtggtccgagagctcattaaacacctcgacgagggagtagatgaaataacaatggtcgaaatcgacgacatggttattaaattgctggctaaattcttaccagagatggccaagtttcatgatcaccctcgagttaagatgatcatcgatgatgggtttaagtatttgaaatcactctctgcacaggcccatgagaagtacgatgtcataatcaccgactcgtccgacccagatggccctgcagaggactttttccaaacaaattacttcaaattgttgtctaacgcattgaatccggacggaattgtcattatgcaaagcagtgaaaatatatggttaaacataaactacttgagtcaattgatgcaaaaggctaatcgggtgtttaacaacgttgcctacagtcaatgctacatgcccagctacaccagtggccaattgggattaatagttgctaccaacgacacgtcgaatgtccttagcattccgtccagaaagttttccccggaaaaggaactccatttgttcaagtactactcgagcagcgtccaccaagcgtcgtttgtgttacctacatgggctcacaaaaccctaaataataattag

SEQ ID NO: 154720 - protein, 314 aa, Debaryomyces hansenii CBS767
MLIEAPQIDLKSFQHACINVIDNKYWFHETSAEGFPGQAFALEIDQILYHVHSQYQDILIFKSTTFGNVLVLNGIIQCTERDEFAYQELITHLPIMCHASPRRVLVIGGGDCGVVRELIKHLDEGVDEITMVEIDDMVIKLLAKFLPEMAKFHDHPRVKMIIDDGFKYLKSLSAQAHEKYDVIITDSSDPDGPAEDFFQTNYFKLLSNALNPDGIVIMQSSENIWLNINYLSQLMQKANRVFNNVAYSQCYMPSYTSGQLGLIVATNDTSNVLSIPSRKFSPEKELHLFKYYSSSVHQASFVLPTWAHKTLNNN

SEQ ID NO: 154721 - DNA, 879 bp, Yarrowia lipolytica CLIB122
  CDS (1)..(879)
atgaccgagctcactcacccttccatcgtcgacggctggttccgagaaatcagtgacaccatgtggcctggccaggccatggccctgcgtgtcaaccagattctccacgttgagaagtccaagtaccaggacgttctggttttcgagtccaccgactacggcaacgttctcgtccttgacggagccatccaggccaccgagcgagacgagtacgcctaccaggagatgattgcgcatcttgctctcaactcccaccccaaccccaagaaggtgcttgttattggaggtggtgacggtggtgtcctgcgagagattgtcaagcacgactgtgtcgaggaggctgtcctctgtgacattgatgaggccgtgccccgtgtttccaagcagtacctccccaccatgtctgtcggattcaaccaccccaagaccaaggtccacattggtgacggcttcaagttcctccaggagtaccagaacaccttcgatgtcatcatcaccgactcctccgaccccgagggtcccgccgcctctctcttccagaagccctactttgagctcctctccggtgctctgaccgagaagggtgttatcaccactcagggagagtccatctggctgcacatgaagatcattaaggagctgcgacaggcttgcaagcaggtcttcccctccgccgactacgcttactgcaccatccccacctacccctccggccagattggtttcatggtctgctccaaggacaaggacgccaacctccgaaagccccttcgatccgtctctcccgaggaggagtccaagctctaccgatactacaacaaggacatccactctgcttccttcgttctccccacctgggctcgagacgatcttgcttaa

SEQ ID NO: 154722 - protein, 292 aa, Yarrowia lipolytica CLIB122
MTELTHPSIVDGWFREISDTMWPGQAMALRVNQILHVEKSKYQDVLVFESTDYGNVLVLDGAIQATERDEYAYQEMIAHLALNSHPNPKKVLVIGGGDGGVLREIVKHDCVEEAVLCDIDEAVPRVSKQYLPTMSVGFNHPKTKVHIGDGFKFLQEYQNTFDVIITDSSDPEGPAASLFQKPYFELLSGALTEKGVITTQGESIWLHMKIIKELRQACKQVFPSADYAYCTIPTYPSGQIGFMVCSKDKDANLRKPLRSVSPEEESKLYRYYNKDIHSASFVLPTWARDDLA

SEQ ID NO: 154723 - DNA, 879 bp, Aspergillus nidulans FGSC A4
  CDS (1)..(879)
atgagcgagatcactcaccccactatcaaggatggctggttctccgagcagtctgaaatgtggcctggtcaggccatgaacctcagagtcaaccaaattctccaccacgagaagtccaagtatcaggacgttcttgtcttcgagagcagcgactatggcaccgttcttgttcttgacaacgtcatccaatgcaccgagcgtgatgagttctcctaccaggaaatgattacccacctggccatgaactcccaccccaaccccaagaaggtcctcgttatcggaggtggagatggcggtgtcctccgcgaggtagtcaagcacgagaccgtcgaggaggccatcttgtgcgacattgatgaggccgtcatccgtgtctccaagaagtaccttcccggcatgagcatcggcttccagcaccccaacgtcaaggtccacgtcggcgacggctttgagttcctcaagcagcgccagaacgaatttgatgtcatcattaccgatagctctgaccccgagggtcccgccgagagcctcttccagaagccctactttgagctcctcagagacgctctacgtgatggaggtgtcatcaccacccaagccgaaaaccaatggcttcaccttcctctgattgccgacctcaagaaggcctgcaacgaggtcttccctgtcgccgaatacgcgtacaccacaatccctacgtacccatccggtcaaattggtttcatggtttgttgcaaggatgccaaccgcaatgttaaggagcccgtccgcacctggtctcgtgaagaggaggagcgtctctgccgctactacaaccaggatatccaccgcgccagcttcgtgctgcccaactttgctcgcaaggctttgggaaattag

SEQ ID NO: 154724 - protein, 292 aa, Aspergillus nidulans FGSC A4
MSEITHPTIKDGWFSEQSEMWPGQAMNLRVNQILHHEKSKYQDVLVFESSDYGTVLVLDNVIQCTERDEFSYQEMITHLAMNSHPNPKKVLVIGGGDGGVLREVVKHETVEEAILCDIDEAVIRVSKKYLPGMSIGFQHPNVKVHVGDGFEFLKQRQNEFDVIITDSSDPEGPAESLFQKPYFELLRDALRDGGVITTQAENQWLHLPLIADLKKACNEVFPVAEYAYTTIPTYPSGQIGFMVCCKDANRNVKEPVRTWSREEEERLCRYYNQDIHRASFVLPNFARKALGN

SEQ ID NO: 154725 - DNA, 894 bp, Candida albicans SC5314
  CDS (1)..(894): transl_table=12
atggctcaagaattaactcatcctgcaatcaaagatggttggtttgctgaaatctccgataccatgtggccaggtcaagccatgtctttaaaagttgaaaaggttcttcacgttgaaaaatccaaataccaagatgttttggttttcaaatctaccacttatggtaatgttttagttttggataattgtattcaagtcactgaacgtgatgaattctcttatcaagaaatgattactcatttggccttgaactctcacccaaacccaaagaaagctcttgtcattggtggtggtgatggtggtgttttaagagaaatcttgaaacacgaatcaattgaagaagcttggctttgtgacattgatgaaactgtcattgaagtttccaaaaaatacttgccaaacatggctaaatcttacgatgatccaagaactagagttcatattggtgatggtttcaaattcttggaagaatacaaaaatcaattcgatgttattatcaccgattcttctgatccagaaggtccagctgaatcacttttccaaaaaccatatttccaattattgaaagatgctttaactgaaaaaggtgttatcactactcaagcagaaaacatgtggattcatatggatatcatttctaaattgaagaaagattgtaacgaaatcttcccagttgctgaatacgcttacactatgatcccaacttatccatctggttcaattgggttcatggtttgttctaaagatccaaatgctaatgtatcaaaaccaatcagatttgattggagtgatgaatttgtggccaagaacttgaagtactacaacaaaaagatccatgaagctgcatttgttttaccaacctgggccgatcaagttttgaacaaaaaggactaa

SEQ ID NO: 154726 - protein, 297 aa, Candida albicans SC5314
MAQELTHPAIKDGWFAEISDTMWPGQAMSLKVEKVLHVEKSKYQDVLVFKSTTYGNVLVLDNCIQVTERDEFSYQEMITHLALNSHPNPKKALVIGGGDGGVLREILKHESIEEAWLCDIDETVIEVSKKYLPNMAKSYDDPRTRVHIGDGFKFLEEYKNQFDVIITDSSDPEGPAESLFQKPYFQLLKDALTEKGVITTQAENMWIHMDIISKLKKDCNEIFPVAEYAYTMIPTYPSGSIGFMVCSKDPNANVSKPIRFDWSDEFVAKNLKYYNKKIHEAAFVLPTWADQVLNKKD

SEQ ID NO: 154727 - DNA, 1035 bp, Candida albicans SC5314
  CDS (1)..(1035): transl_table=12
atgtcaccatccacccaacaacaagtccatgaactgaaccaatcccaatcaaatgattcttcctccatcgggttgaggttgaacgacaataatattcaaccgattgagattgaattgtcaagttttaaacatgattcaataactttccataaacaagattcttcttattggttttatgaaaaactgaaacaatcatttcctggtcaatcatttggattacaagtggaaaaaatcttgtatcataccaaatcatcattccaagatattttaatatttaaaagtacaaattttggtaatgttttagtcttaaatgggattatacaatgtacagaaaaggatgaatttgcttatcaagaattaatcactcatttaccaattatgtcgcatccatcacctaaaaaagtcttagttattggtggtggtgattgtggcgtcattagagaattaatcaaacatgtaaatgatcaaacgatacaagaaatcaccatggtggaaatcgatgatatggtgattaaattactgacgaaatttttaccagaaatggctaaatatcataatcatcctaaagttaatttaattattggtgatggatttgaatttttgaaaaatagtagtaaagagaagaaatatgatgttattatcactgattcttctgatcctgatgatggtcccgccgaagaattttttcaaatcaattatttcaaattattattgaatgcattgaatgaaaaaggtattgttattatgcaatcactggaaaatatatggttaaatttaccttatttgaaagaattgaaatcaaaagccgccacagtgttttctaatgtcaaatattgtcaatgttatatgccaagttatacttctggtcaattaggtttgataattgctactatggatactggaaaagatttggttaatccattacggaaatttgatcatgataaagaattgaaattgtttaaatattacaatcaacacattcataccaattcatttgttttacctacatgggcagatgattatttgaataattga

SEQ ID NO: 154728 - protein, 344 aa, Candida albicans SC5314
MSPSTQQQVHESNQSQSNDSSSIGLRLNDNNIQPIEIELSSFKHDSITFHKQDSSYWFYEKSKQSFPGQSFGLQVEKILYHTKSSFQDILIFKSTNFGNVLVLNGIIQCTEKDEFAYQELITHLPIMSHPSPKKVLVIGGGDCGVIRELIKHVNDQTIQEITMVEIDDMVIKLSTKFLPEMAKYHNHPKVNLIIGDGFEFLKNSSKEKKYDVIITDSSDPDDGPAEEFFQINYFKLLLNALNEKGIVIMQSSENIWLNLPYLKELKSKAATVFSNVKYCQCYMPSYTSGQLGLIIATMDTGKDLVNPLRKFDHDKELKLFKYYNQHIHTNSFVLPTWADDYLNN

SEQ ID NO: 154729 - DNA, 882 bp, Aspergillus fumigatus Af293
  CDS (1)..(882)
atgtccgagatcactcaccccactatcaaggatggctggttctccgagcagtcggatatgtggcccggccaggccatgaacctcaaggtcaaccagatcctgcaccacgagaagtccaagtaccaggatgtgcttgtcttcgagagcaccgactacggcaccgttctcgttctggacaacgtcatccagtgcaccgagcgggatgagttctcgtaccaggagatgatcactcacctggccatgaactcccacccgaaccccaagaaggttctggtcatcggtggtggagatggtggtgtcctccgtgaggtcgtcaagcacgagtccgtcgaggaggccatcctgtgcgacattgacgaggctgtcatccgtgtctccaagaagtatcttcccggcatgagcatcggcttccagcaccccaacgtgaaggtccacattggcgacgggttccagtttctcaaggagcgcaagaacgagttcgatgtcatcatcactgacagctctgaccctgagggccctgccgagagcctcttccagaagccttactttgagctcctgcgcgatgctctccgtgatggaggtgtcatcaccacacaaggttccgagaaccaatggctgcatctgtccctcatcaccgacctcaagaaggcctgcaaggaggtcttccccgtcgccgaatacgcctacaccacaattcccacctacccctccggccagatcggcttcatggtctgctgcaaggacgccacccgcaatgtccgtgagcccgtccgcacttggtcccgtgaggaggaggagcgtctctgccgctactacaaccaggacattcaccgggccagcttcgttctgcccaactttgcacgcaaggctctggatgtgtga

SEQ ID NO: 154730 - protein, 293 aa, Aspergillus fumigatus Af293
MSEITHPTIKDGWFSEQSDMWPGQAMNLKVNQILHHEKSKYQDVLVFESTDYGTVLVLDNVIQCTERDEFSYQEMITHLAMNSHPNPKKVLVIGGGDGGVLREVVKHESVEEAILCDIDEAVIRVSKKYLPGMSIGFQHPNVKVHIGDGFQFLKERKNEFDVIITDSSDPEGPAESLFQKPYFELLRDALRDGGVITTQGSENQWLHLSLITDLKKACKEVFPVAEYAYTTIPTYPSGQIGFMVCCKDATRNVREPVRTWSREEEERLCRYYNQDIHRASFVLPNFARKALDV

SEQ ID NO: 154731 - DNA, 876 bp, Neurospora crassa OR74A
  CDS (1)..(876)
atgtccgaaattgctcaccccacgatccaggatggctggttccgcgagatctccaacatgtggcctggccaggccatgaccctcaaggtcgagaaggtccttcaccacgagaagagcttgtatcaggatgtcctgatcttcaagtccactgaccatggcaacgtcctcgtcctcgacaacgtcatccagtgcaccgagcgcgatgagttctcctaccaggagatgatcacccacctcgccatgaactcccaccccaaccccaagaaggtcctcgttatcggcggtggtgatggtggtgtcctgcgtgaggtcgtcaagcacgactgcgttgaggaggccatcctctgcgacatcgatgaagctgtcatccgtctctccaagcagttcctcccccacatgtctgctggcttcgagcaccccaaggtcaaggtccacgttggcgatggcttcaagttcctcgaggacttcaagaacacctttgatgtcatcatcaccgactcctccgaccccgagggtcccgccgagtctctcttccagaagccctacttccagcttctccacgacgccctccgcgagggtggtgttattaccacacaagctgagaaccagtggctccaccttcctctcatcaccaagctcaagaaggactgcaaggaggtcttccctgtcgccgagtacgcatacaccaccattcccacctacccctccggtcagattggcttcatggtctgctccaaggaccccaacgccaatgtcaaggttcctcttcgttcctggtctcaggaggaggaggagaagctctgccgctactacaactccgagattcacaaggccagcttcattctccccaccttcgccaagaaggccctcgagtaa

SEQ ID NO: 154732 - protein, 291 aa, Neurospora crassa OR74A
MSEIAHPTIQDGWFREISNMWPGQAMTLKVEKVLHHEKSLYQDVLIFKSTDHGNVLVLDNVIQCTERDEFSYQEMITHLAMNSHPNPKKVLVIGGGDGGVLREVVKHDCVEEAILCDIDEAVIRLSKQFLPHMSAGFEHPKVKVHVGDGFKFLEDFKNTFDVIITDSSDPEGPAESLFQKPYFQLLHDALREGGVITTQAENQWLHLPLITKLKKDCKEVFPVAEYAYTTIPTYPSGQIGFMVCSKDPNANVKVPLRSWSQEEEEKLCRYYNSEIHKASFILPTFAKKALE

SEQ ID NO: 154733 - DNA, 861 bp, Tribolium castaneum
  CDS (1)..(861)
atggaccagatcaagaacggatggttcagtgaaatcaacgatttatggcccggccagtgcatgagcctccaagttgaggaggttctataccacgaaaaatccgactaccaggatgtcatggtcgtaaaaacaaaacaccacggacgcgcacttatcctcgacggcataatccagtgcaccgaacacgacgaattctcctaccaggagatgatctccttcctgcccctgtgcgcgcaccccgcccccagcaacgtgctcatcgtcgggggcggcgacgggggcgtggcccgcgaatgccacaaacacccccttgttaaaaaaatcgtccaagtcgaaatcgactccaaagtcgttgacgctagcaaacgctacctcccgttcatggccacaggtttcgcctccgataaactcaccctcaacatttgcgacggtttcaaatacatggaacaacacaagaacgccttcgacgttattattaccgattcaagcgacccgattggtccagctgagaatcttttcaccgaatcgtatttcaaactactgaagggggcgttaaaagaaggcggggttatctgtagccagaacgggaccgtatgggcggggcttgatcacgtcaaacaaacgatgaatcattgtaagaaattctttgatacggtcaagtatgccgtgactagcgttccgacctatccttcgggacagatcgggtttgtggtggctggggggcggagcgatttgacggttccccaattcagggtgggggagaaggaggtgcgtgagttggggctaaagtattacaacgccgaggtgcataccgcagcttttgtgcttccgaattttgtcaaaaaagtattgtacgagtaa

SEQ ID NO: 154734 - protein, 286 aa, Tribolium castaneum
MDQIKNGWFSEINDLWPGQCMSLQVEEVLYHEKSDYQDVMVVKTKHHGRALILDGIIQCTEHDEFSYQEMISFLPLCAHPAPSNVLIVGGGDGGVARECHKHPLVKKIVQVEIDSKVVDASKRYLPFMATGFASDKLTLNICDGFKYMEQHKNAFDVIITDSSDPIGPAENLFTESYFKLLKGALKEGGVICSQNGTVWAGLDHVKQTMNHCKKFFDTVKYAVTSVPTYPSGQIGFVVAGGRSDLTVPQFRVGEKEVRELGLKYYNAEVHTAAFVLPNFVKKVLYE

SEQ ID NO: 154735 - DNA, 864 bp, Yersinia enterocolitica subsp. enterocolitica 8081
  CDS (1)..(864): transl_table=11
atgtcacagaaagaactatggtatgaaacattacatgccaacttcggccagtatttttcagtagaaaatgtactgtaccgcgagaaaaccgagcaccaggatttggtgatttttgagaaccctgtgctgggtcgggtaatggcgttggatggcgtggtgcagaccaccgaacgcgatgagtttatctatcacgaaatgatgacacacgtccctttgttggcccacggtcaggcaaagaaagtgcttatcatcggtggcggcgatggcgcgatgctacgcgaagttagccgtcacaaaaatatcgaacagattaccatggtagaaattgacgccggtgtggtcgagttctgccgccagtatctgcccaatcatagcgcgggagcctatgatgacccccgtttcaagctggttattgatgatggcgtcaacttcgttaatcaaacgacggaaaagttcgatgtcattatctctgactgtactgaccccattgggccaggggaaagcctgttcacatcggctttctatgaaggatgtgcccgtagcttgaatgaaggcggcatctttgttgcacaaaacggcgtgtgcttcctgcaacaagatgaagcggttgatagccataataagcttagccattattttaaagatgtcagtttttatcaggcagccattccgacatattacggcggtatcatgaccttcgcctgggcgacgcaaaaccgacagttgcgccagttggatatcaccacgctacaacagcgttttgtcgaagcgggtctgacctgccgctactataacccagccattcatgtcggcagctttgctttgccgcagtatctgctggatgccttaacgaccaaacgttga

SEQ ID NO: 154736 - protein, 287 aa, Yersinia enterocolitica subsp. enterocolitica 8081
MSQKELWYETLHANFGQYFSVENVLYREKTEHQDLVIFENPVLGRVMALDGVVQTTERDEFIYHEMMTHVPLLAHGQAKKVLIIGGGDGAMLREVSRHKNIEQITMVEIDAGVVEFCRQYLPNHSAGAYDDPRFKLVIDDGVNFVNQTTEKFDVIISDCTDPIGPGESLFTSAFYEGCARSLNEGGIFVAQNGVCFLQQDEAVDSHNKLSHYFKDVSFYQAAIPTYYGGIMTFAWATQNRQLRQLDITTLQQRFVEAGLTCRYYNPAIHVGSFALPQYLLDALTTKR

SEQ ID NO: 154737 - DNA, 828 bp, Clostridium thermocellum ATCC 27405
  CDS (1)..(828): transl_table=11
atggaactttggtttacagagtatcagacccctacattgggaatcacttgcaagacaaaaaagactttgcacagtgaaaaaacagagtatcaggaactggcagttatagaaacggaacagtttggcagaatgctccttttagacggaataattcagactacggttgcggacgaatttgtctatcatgaaatgatagcccatgttccgctgtttactcataaaaatccgaaaaaagcgctggttgtcggaggtggagacggaggctcaataagagaaatagtaaagcatccatccattgaaaaggcagttttatgcgaaatagacaggcgtgttattgaggtgtcgaaagagtatcttccggaaatcagctgcgctttggataatgaaaaagttgaggtagttgtaggcgacggtatcaaatatgtaaaagaacataaaaatgaatttgatgttataataattgattccacagacccgataggacctgctgaaggcctgtttgccattgatttttacagggctgtatacgattgtttgaaggaagacggtatatttgttgcacaaaccgaatctcctttcatcgataaagagcttataacaaggataattagagatgtgaaatcattgttcccgataacaaggctttacacatgtgcaattcctacatatcctacaggatattggtgctttaccatgggatcaaagaagtatgatcctttagaaaccgacatagactccataccggatatcgatacgaaatattactgtccgcagattcacagagctgcattcatactgccgaagtttgcaaaagaattaataaaataa

SEQ ID NO: 154738 - protein, 275 aa, Clostridium thermocellum ATCC 27405
MELWFTEYQTPTLGITCKTKKTLHSEKTEYQELAVIETEQFGRMLLLDGIIQTTVADEFVYHEMIAHVPLFTHKNPKKALVVGGGDGGSIREIVKHPSIEKAVLCEIDRRVIEVSKEYLPEISCALDNEKVEVVVGDGIKYVKEHKNEFDVIIIDSTDPIGPAEGLFAIDFYRAVYDCLKEDGIFVAQTESPFIDKELITRIIRDVKSLFPITRLYTCAIPTYPTGYWCFTMGSKKYDPLETDIDSIPDIDTKYYCPQIHRAAFILPKFAKELIK

SEQ ID NO: 154739 - DNA, 852 bp, Clostridium difficile 630
  CDS (1)..(852): transl_table=11
atggaactttggtatacagaagaatggacagaaaatgtaagattttctataaaagtaaataaacatctatttgaaggaaagtctcaatttcaaaggatagatgtgtttgatagtgatgaatttggaaaatttctaacaatagatggattaatgatggtaacatataaagatgaatttatataccatgagatgataactcatgttcctatggctacaaatttaaacataaagaaagtattagtcataggtggaggtgatggaggtacagtaagagaattaagccgttatcctcaaatagaaaagattgacatggttgaaatagataaaatggttgtagatgtatctaaagagtatatggatatatgctcatgtaaattagatgataaaagagtgagtttatattttgaagatggtgttaattttgttaagtgtgcacatgataaatcatatgacctgataatagtagattcaactgacccaataggaccaggtgaagggcttttctcaactgatttttataaggattgttatagaatactgactgatgatggaattttagtaaatcaaagtgaaagtccgtattttgactttaatgctaaagagatgaaaagagctaataaaaaattaaaacagatatttccaatatcagaagtttatcaagcacatataccaacatatccatctggtcactggttgtttggatttgcttcaaaaaaacttaatccagtaaaaaatcaagatagaaatggatgggagaaattaagtttaaaaactaaatattataatagtgatatacatttaggttcgtttatgttacctcaatatgtgaaggagatgctagatgaagaataa

SEQ ID NO: 154740 - protein, 283 aa, Clostridium difficile 630
MELWYTEEWTENVRFSIKVNKHLFEGKSQFQRIDVFDSDEFGKFLTIDGLMMVTYKDEFIYHEMITHVPMATNLNIKKVLVIGGGDGGTVRELSRYPQIEKIDMVEIDKMVVDVSKEYMDICSCKLDDKRVSLYFEDGVNFVKCAHDKSYDLIIVDSTDPIGPGEGLFSTDFYKDCYRILTDDGILVNQSESPYFDFNAKEMKRANKKLKQIFPISEVYQAHIPTYPSGHWLFGFASKKLNPVKNQDRNGWEKLSLKTKYYNSDIHLGSFMLPQYVKEMLDEE

SEQ ID NO: 154741 - DNA, 843 bp, Methanococcus maripaludis C5
  CDS (1)..(843): transl_table=11
atgaaatttgatgcatggtatacagaaccacaaactgaaaatttaagcctttcaactaaattaaaagatatcctttacgttggacagtccgaataccaagaaattcaggttcttgacacttacgaatttggaagggtcttgatcttagaaaacacgtaccaaactagtgaaagagatgaattcatataccacgaattgatttcacaccctgcactttttactcacggaaaccctaaaagagttcttgttatcggcggtggagatggcggaaccgttagggaagttttgaaacataaaagtgttgaaaaaatagacttcgttgaactcgatggacaggttgtggaggttgctaaaaaattccttccaacattaagctgcgaaatagacaacgaaaaagtaaacacgatcatcacggatggaataaaatacgttgcagaaactactgaaaaatacgatgtaatccttgtagactgccctgacccagtaggccctgctgcaggattatttgaaaaagagttttacaacaacctcttcaaatgcttaaatgaagacggaatcatggtacagcagactgaaagcccgcttttacatgaaaaattgataaataaaatcaaaggacacttaaaagatgctggcttttcaacgatcagaccactcgtctgcagcattccaacatacccgagcggattctggagctttactttggcttcaaagaaaaacgacccattaaattcagatatttcagaaattgaaaacaaattaaacgacatggctacaaaatactacgaccaggacgttcacaaaggagtatttttagctacacctagatacttaaaagattaa

SEQ ID NO: 154742 - protein, 280 aa, Methanococcus maripaludis C5
MKFDAWYTEPQTENLSLSTKLKDILYVGQSEYQEIQVLDTYEFGRVLILENTYQTSERDEFIYHELISHPALFTHGNPKRVLVIGGGDGGTVREVLKHKSVEKIDFVELDGQVVEVAKKFLPTLSCEIDNEKVNTIITDGIKYVAETTEKYDVILVDCPDPVGPAAGLFEKEFYNNLFKCLNEDGIMVQQTESPLLHEKLINKIKGHLKDAGFSTIRPLVCSIPTYPSGFWSFTLASKKNDPLNSDISEIENKLNDMATKYYDQDVHKGVFLATPRYLKD

SEQ ID NO: 154743 - DNA, 834 bp, Desulfotomaculum reducens MI-1
  CDS (1)..(834): transl_table=11
atggaattatggtactcagaaagaggaatagtccccggattagcactaagtgttgaagtaagcaaagtgttgcacgaagagcaaacagattttcagcatttggcagttgtggatacacccctttgtggtcgtatgctctggttggacaacattattatgacgagtattaaggatgaatttatttatcatgaaatgattagccacgtggctttaaatactcatgaaaaccccaagaaggtattagttatcggtggtggcgacggtggcgccattcgtgaaattattaagcaccccagtgttgagaaggctgtgttggtggagatcgaccgtagagtagtggaagtctctaaagaatatctgccggagattgcctgtgcactggatgatccgaaagtagaagttcactgcgtggatggtatccagtatgtaagggatcacaaaaatgaatttgatgttattcttgtggactccaccgatcctatcggtcctgctgttggtttatttgaaggcagcttctataagaattgttatgacgcattaaaggaagatggtatctttgttgctcaaaccgaatctccctattataatgaggaattgattcctaaggtaaacaaagatattcggtccctatatcctattactaacatttacctagcctatgtgcctacatatcccagtggctgctggacctttaccatgggttccaagaaatacgatcccaaggcggtagattttagtaccagacccagctacaaaacccgttactataatcatgatgtgcataaagcagcctttgcgctccctaattttgtacaagaattaattaataaataa

SEQ ID NO: 154744 - protein, 277 aa, Desulfotomaculum reducens MI-1
MELWYSERGIVPGLALSVEVSKVLHEEQTDFQHLAVVDTPLCGRMLWLDNIIMTSIKDEFIYHEMISHVALNTHENPKKVLVIGGGDGGAIREIIKHPSVEKAVLVEIDRRVVEVSKEYLPEIACALDDPKVEVHCVDGIQYVRDHKNEFDVILVDSTDPIGPAVGLFEGSFYKNCYDALKEDGIFVAQTESPYYNEELIPKVNKDIRSLYPITNIYLAYVPTYPSGCWTFTMGSKKYDPKAVDFSTRPSYKTRYYNHDVHKAAFALPNFVQELINK

SEQ ID NO: 154745 - DNA, 870 bp, Francisella tularensis subsp. tularensis WY96-3418
  CDS (1)..(870): transl_table=11
atgatagctaatattaataataaaaaaatatttcatgaaactttgtaccatagctatcatcaaagtatagcaatttctgaaatattgtatgaacataaaacagattaccaacatctagtaatttttaataatccaatttttggtaatgtcatggtcttggatggtattgtacagactactgaaaaagatgagtttatttatcatgaaatgttagtgcatgtaccagttatcgcgcatgggaatgttaaaaacatattaattattggtggcggcgatggtggtatgcttagggaagctcttagtcataaagctgtcgaatctgtaacactagttgaaattgaccaagctgttatagatatgtgccaagagtactttccagggcattcaaaaggtgcttttgatcatcctaaagcgaaaatagttattcaagatggttgtgaatttgtcaaaaatccgcctaggaaatatgatttgattatttgtgatagtactgatccgattggtccaggagaggttttatttacctcaaaattttataaagactgtaaagaagctctaaatccagatggtataatggtaacccaaaatggagtgatctactttcaaatagatgagttaaagaaaactcttgagcgctttgaaccattatataaagatgtttctttttatactgcagcagttccaacatatgtcggtggaagtatggcatttggttggggcactgatgaattatcctatcgtaatcacgatattcaagtaattgcacagagatttcttaagagcggtattaaaacaagatactacaatccagctatacatattgctgcttttgctttaccacaatatgttatagatactctaaagaagtaa

SEQ ID NO: 154746 - protein, 289 aa, Francisella tularensis subsp. tularensis WY96-3418
MIANINNKKIFHETLYHSYHQSIAISEILYEHKTDYQHLVIFNNPIFGNVMVLDGIVQTTEKDEFIYHEMLVHVPVIAHGNVKNILIIGGGDGGMLREALSHKAVESVTLVEIDQAVIDMCQEYFPGHSKGAFDHPKAKIVIQDGCEFVKNPPRKYDLIICDSTDPIGPGEVLFTSKFYKDCKEALNPDGIMVTQNGVIYFQIDELKKTLERFEPLYKDVSFYTAAVPTYVGGSMAFGWGTDELSYRNHDIQVIAQRFLKSGIKTRYYNPAIHIAAFALPQYVIDTLKK

SEQ ID NO: 154747 - DNA, 828 bp, Geobacillus thermodenitrificans NG80-2
  CDS (1)..(828): transl_table=11
atggaactatggtttactgaaaagcagacagaacattttggcatcactgcacgtattatccgcactttacatacagaacaaacgccgtttcaaaaacttgatatggtcgaaacggcagagttcggtaatatgctcattttagacggcatggtgatgacgacgcaaaaagatgaatttgtctaccatgagatggttgctcatgtgccgttgtttacccatccaaatccggaaaacgtgcttgtcgttggcggtggcgacggcggcgtaatccgcgaagtgttgaaacacccgagcgtcaaaaaagcgacgcttgtcgaaattgacggcaaagtgatcgagtgctcgaaaaagtatttgccggaaatcgctggccaacttgacgatccgcgcgtcgaagtgaaagtcgatgacgggtttatgcatatcgcccaaagtgaaaacgagtatgacgtcattatggttgactcgaccgaaccggtcggaccggcggtgaacttgtttacaaaagggttttacgccggcattgcgaaagcgttgaaagaagacggtattttcgtcgcccaaacggacaacccttggtttaaagcggatctgattcgcaatgtttaccgtgatgtgaaggaaattttcccggtcacgcgcctatatacggcgaacattccaacctacccaagcgggctgtggacgtttacgctcggctcgaaaaaatacgatccgctcgcggtaagcgatgaccggttccacgacatcgatacaaaatattacacaaaagaactgcataaagcatgcttcgtattaccgaaatttgtcgcggacttggtgaaataa

SEQ ID NO: 154748 - protein, 275 aa, Geobacillus thermodenitrificans NG80-2
MELWFTEKQTEHFGITARIIRTLHTEQTPFQKLDMVETAEFGNMLILDGMVMTTQKDEFVYHEMVAHVPLFTHPNPENVLVVGGGDGGVIREVLKHPSVKKATLVEIDGKVIECSKKYLPEIAGQLDDPRVEVKVDDGFMHIAQSENEYDVIMVDSTEPVGPAVNLFTKGFYAGIAKALKEDGIFVAQTDNPWFKADLIRNVYRDVKEIFPVTRLYTANIPTYPSGLWTFTLGSKKYDPLAVSDDRFHDIDTKYYTKELHKACFVLPKFVADLVK

SEQ ID NO: 154749 - DNA, 861 bp, Pseudomonas stutzeri A1501
  CDS (1)..(861): transl_table=11
atgagcgactttcaggaaactctctacgagggatacgggcagcggttccagatcgacaagctgctgcatgaagtgcgcaccgaacgccagcatctggtgatcttcgaaaacgcccgcatgggccgcgtcatggccctcgacggcgtgatccagaccaccgaagccgacgagttcatctaccacgaaatgcttgcccatgtgccgatcctggcccatggcctggcacgccgggtgttgatcatcggtggcggcgacggcggcatcctgcgtgaggtggcgcgccatcgtgatatcgagagcatcaccatggtcgagaccgaccgcaccctggtggagctgtgcaaggaattcctgccgaaccactcggccggcaccttcgatgatccgcgattgaacctggtgttcgatgacggcatgcacttcgtggcgaccactgaagagcggttcgatgtcatcatctgcgattccaccgatcccatcggctcgggcgaggcgctgttctccgagcacttctaccaggcttgccgccgttgcctgaacgagggcggcatcctggtcgcgcagaacggcacgccattcatgcagctgggcgagctgcagaccaccgccaaacgcatgcaggggctgttcgccgactggcacttctacctggccgcggtgccgacctacatcggcggcgcgatgagcttcgcctggggcgcctgtaacgccgagagtcgcaagttgccgctggaaaccctgatgcagcgctacagcggcagcgggattgtgacccgttattacaacccgcacgtgcacattggcgcctttgcgctgccgcagtacctgctgcacgcgattgccaagcccagcaacgactga

SEQ ID NO: 154750 - protein, 286 aa, Pseudomonas stutzeri A1501
MSDFQETLYEGYGQRFQIDKLLHEVRTERQHLVIFENARMGRVMALDGVIQTTEADEFIYHEMLAHVPILAHGLARRVLIIGGGDGGILREVARHRDIESITMVETDRTLVELCKEFLPNHSAGTFDDPRLNLVFDDGMHFVATTEERFDVIICDSTDPIGSGEALFSEHFYQACRRCLNEGGILVAQNGTPFMQLGELQTTAKRMQGLFADWHFYLAAVPTYIGGAMSFAWGACNAESRKLPLETLMQRYSGSGIVTRYYNPHVHIGAFALPQYLLHAIAKPSND

SEQ ID NO: 154751 - DNA, 870 bp, Enterobacter sp. 638
  CDS (1)..(870): transl_table=11
atgaccgataacacagtgtggcacgaaacgctgcatgaccagtttggtcagtactttgccgtggataacgtgctctatcacgagaaaaccgatcatcaggatttgatcattttcgagaacgccgcatttggccgcgtgatggcgctggatggcgtggtgcaaaccaccgagcgtgatgagtttatttatcacgaaatgatgacccatgtgccgttactggcgcacggacacgcaaaacatgtgctgattatcggcggtggcgacggcgcaatgctgcgcgaagtgtctcgccataaatctatcgaaacgatcaccatggtggaaatcgacgccggtgtcgtctcgttctgccgccagtatctgcccaatcacaacgctggcagctatgacgatccgcgctttacgctggtgatcgacgacggcgtcaactttgtgaatcagagccatcaaacgtttgacgtgatcatctccgattgcaccgatccgattggtcctggcgcaacgcttttcacctcgtcgttctacgaaggctgcaaacgctgcctgaatcctggcgggattttcgttgctcagaacggcgtctgcttcctgcaacaggacgaagcgatcgacagccatcgcaaactgagccattacttcggtgatgtcagtttctatcaggctgcgattccaacctattacggcgggatcatgactttcgcgtgggcaacggacaacgacgtattgcgccatctctccaccgagatcattgctgcacgctttcatcagacccacctgaaatgccgttattacaatccggccgtccacacggcagcgttcgccttaccgcaatatttgcaagacgcactgtcccctaaggaggtgagctaa

SEQ ID NO: 154752 - protein, 289 aa, Enterobacter sp. 638
MTDNTVWHETLHDQFGQYFAVDNVLYHEKTDHQDLIIFENAAFGRVMALDGVVQTTERDEFIYHEMMTHVPLLAHGHAKHVLIIGGGDGAMLREVSRHKSIETITMVEIDAGVVSFCRQYLPNHNAGSYDDPRFTLVIDDGVNFVNQSHQTFDVIISDCTDPIGPGATLFTSSFYEGCKRCLNPGGIFVAQNGVCFLQQDEAIDSHRKLSHYFGDVSFYQAAIPTYYGGIMTFAWATDNDVLRHLSTEIIAARFHQTHLKCRYYNPAVHTAAFALPQYLQDALSPKEVS

SEQ ID NO: 154753 - DNA, 837 bp, Caldicellulosiruptor saccharolyticus DSM 8903
  CDS (1)..(837): transl_table=11
ttggctgagatggaattgtggtttaccgagcaacaaacaccagatttagggtttacatgtaagataactaagaccatatacacagcaaagacaaagtatcaagatttagcaatacttgagacaaaacaatttggcaaaatgcttgttttggacggggctgtgcagacaacaattgttgatgagttttgttatcatgagttgattgcacatgttccattgtttactcatcctaatcccaaaaaggttgcagttattggtggaggggatggtggagttataagagagatattaaaacatgaagaggttgaaaaagcatatttgatagagattgaccaagaggtgattgaagcgagcaagaaatatcttcctgagataagctgtgcacttgatgacaagagggcagaggttataatcacagatggaataaagtttgtttctgaaaacaaaaatatgttcgatgtcataatagtagattcaactgatcctgttggaccggcagtgggattatttgaaagcaacttttaccaagcagtatatgagtgtctaaaagaagatggactttttgttgcacaaacagagtctccattttatgaccaagatttaattagaaatgtatttcattcaataaaatctatttttccaataacaagactgtatcttggttttattccaacatatccaagtggactttggagctttacaatgggttctaaaaaatatgatccgcttgagattgacacctcaaagataaagagaattgatacgagatattacaaccctgaacttcacaaggcactttttgcattgcctacatttgttcagaaaatcattgagtag

SEQ ID NO: 154754 - protein, 278 aa, Caldicellulosiruptor saccharolyticus DSM 8903
MAEMELWFTEQQTPDLGFTCKITKTIYTAKTKYQDLAILETKQFGKMLVLDGAVQTTIVDEFCYHELIAHVPLFTHPNPKKVAVIGGGDGGVIREILKHEEVEKAYLIEIDQEVIEASKKYLPEISCALDDKRAEVIITDGIKFVSENKNMFDVIIVDSTDPVGPAVGLFESNFYQAVYECLKEDGLFVAQTESPFYDQDLIRNVFHSIKSIFPITRLYLGFIPTYPSGLWSFTMGSKKYDPLEIDTSKIKRIDTRYYNPELHKALFALPTFVQKIIE

SEQ ID NO: 154755 - DNA, 912 bp, Metallosphaera sedula DSM 5348
  CDS (1)..(912): transl_table=11
atggaattcggttggagctggcatatagagtggcaatcctcctatgaatttcatggtcatcacatagaccaagtattggaagatgttactacccagtttcaaagggtaatggttgctaagttaactaggtttgggaagtcgcttattatagatgggaaagttcaatccaccgtatctgacgagtatatatatcacgaaactctagtccatccccttcttctctccctagacaaacctaagagtgtgctaatactaggtggaggcgaaggggccacattacgtgaggtgctcaagcatgagtctgtgaatagggcagtcatggtggatatagaccaggcggtcatagacttcgcgaggaaacaccttactgagtggcataccggatcctttgatgatcctaggactacgctggttattgatgatgctctgagatatgtggaaaaaacacaggaaaagtttgatgctattgttctagatcttacggatcctataatgggtaactcatcgtataaattatacacgaaagagttttatgaaaaactttccagactggttggtgatgacggaggtatcgtaacccaagccacttcgccatcctttagtctggacacgttctctgtaatatataacacacttagatctatattcaggaaggtttcagcatcgataacctacgttccatcattcgatggactctggggattcgtttatgcatccaataaggttacgccaagccaactgtctcctgagagtataaactcactgatagcgcagagaataaggggaaaactaaggtactacgatggggaaacccactcgatgctgtttagcattcccaagaacataagggaaaagttatcttcagagaaaaggatatcgacggagtctaacccagttactgtccctgcttga

SEQ ID NO: 154756 - protein, 303 aa, Metallosphaera sedula DSM 5348
MEFGWSWHIEWQSSYEFHGHHIDQVLEDVTTQFQRVMVAKLTRFGKSLIIDGKVQSTVSDEYIYHETLVHPLLLSLDKPKSVLILGGGEGATLREVLKHESVNRAVMVDIDQAVIDFARKHLTEWHTGSFDDPRTTLVIDDALRYVEKTQEKFDAIVLDLTDPIMGNSSYKLYTKEFYEKLSRLVGDDGGIVTQATSPSFSLDTFSVIYNTLRSIFRKVSASITYVPSFDGLWGFVYASNKVTPSQLSPESINSLIAQRIRGKLRYYDGETHSMLFSIPKNIREKLSSEKRISTESNPVTVPA

SEQ ID NO: 154757 - DNA, 852 bp, Pelotomaculum thermopropionicum SI
  CDS (1)..(852): transl_table=11
atggaccaaaaactgcagttatggtttacggaattgcagacggacgacatggccctgtcgtgccgggtgaagaaaacccttcatcaggaggagactccgtttcaaagcctggccgttttggatacggagcagttcgggcggatgcttgttctggacaacgtgatccagaccaccgtcagggacgaattcgtgtaccacgagatgatggcccacgttgccctgaatacccatgccctgccgaaaaaggtgcttgttatcggcggcggcgacggcggagtggtgagagaggtggttaagcaccggtctgttgaaaaggtcgtccactgcgagattgacggggcggtaatagaagcctcgcggaaatacctgccggaaataagctgtgccctggacgaccccagggtggatattgtaatagacgacggcatcaagcatgtcagggaacataaaaagacttacgatgtaatcatagtcgattcgaccgacccggtagggccggccgagggccttttcagcgcttcgttctacaggagcatttacgaagccttgaatgaagacggcctgtttgtggcgcagacggaatcgccctttttcaaccgcgacctgatcccgcggctgtataaggacatatccgcagtctttcccgttaccaggctgtttttggcctgcgttccgacctatcccggcgggctgtggacctttaccatgggctccaagcgatatgacccgctggaagttgacatagccgggatacctcaaatggatacgaaatattacagccccgccgtgcaccggtcctgcttcgtgctgccgccgtttgttgaagaactgctggtccagggcggcaggtaa

SEQ ID NO: 154758 - protein, 283 aa, Pelotomaculum thermopropionicum SI
MDQKLQLWFTELQTDDMALSCRVKKTLHQEETPFQSLAVLDTEQFGRMLVLDNVIQTTVRDEFVYHEMMAHVALNTHALPKKVLVIGGGDGGVVREVVKHRSVEKVVHCEIDGAVIEASRKYLPEISCALDDPRVDIVIDDGIKHVREHKKTYDVIIVDSTDPVGPAEGLFSASFYRSIYEALNEDGLFVAQTESPFFNRDLIPRLYKDISAVFPVTRLFLACVPTYPGGLWTFTMGSKRYDPLEVDIAGIPQMDTKYYSPAVHRSCFVLPPFVEELLVQGGR

SEQ ID NO: 154759 - DNA, 864 bp, Acidiphilium cryptum JF-5
  CDS (1)..(864): transl_table=11
atgaccgacatgtgggtgaacgagacgctgtatccgttctggggccagcgcttcggggtgacgcgcgagctggcgcggacgaagagcgacttccaggacatcgcgatcttcgagagcgagttccacggacgggtgatgatgctggacggcatcgtgcagatcaccgagggcgacgagttcgtctaccaggagatgctgacgcatgtgccgctgctggcgcatggggcggcgcgatcggtgctgatcatcggcgccggcgatggcggcgtgctgcggcgggtgctgatgcacaagggcgtcgagcgggcggtgatggtcgagatcgacggcgaggtgatccggctggcgaaggagttcctgccgaagatcgcgggcgaggcctgggacgatccgcgcgcggaggtgatcgtcggcgacgggatcgactatgtgaagaaggcgccggatgcgagtttcgacgtcatcatcgtcgattcgaccgatccgatcggggtgggcgaggtgctgttcaccgatgatttctatgccaattgcgcgcgcatcctgaccgcgcgggggctggtggtgaaccagtgcggcgtgccgttcatgcaggcggacgagctgcgcgagacctcggcgcggcggcggaaattctttccgcacgtgaccgcctatgtcgccgcggtgccgacctatgtcggcgggttcatgacgctgggctgggccggcaaggaccccgaactcacccgtctgccggcggcgacgatccgcgcgcgggcggaagcggcggggattctcgggaccacggaatactggtcgccggagatgcacgcggcgagcttcgtgctgccgccctatatcgcgaagcacctgccgggctga

SEQ ID NO: 154760 - protein, 287 aa, Acidiphilium cryptum JF-5
MTDMWVNETLYPFWGQRFGVTRELARTKSDFQDIAIFESEFHGRVMMLDGIVQITEGDEFVYQEMLTHVPLLAHGAARSVLIIGAGDGGVLRRVLMHKGVERAVMVEIDGEVIRLAKEFLPKIAGEAWDDPRAEVIVGDGIDYVKKAPDASFDVIIVDSTDPIGVGEVLFTDDFYANCARILTARGLVVNQCGVPFMQADELRETSARRRKFFPHVTAYVAAVPTYVGGFMTLGWAGKDPELTRLPAATIRARAEAAGILGTTEYWSPEMHAASFVLPPYIAKHLPG

SEQ ID NO: 154761 - DNA, 891 bp, Thermotoga petrophila RKU-1
  CDS (1)..(891): transl_table=11
atggaaaagttgaaagaatttgaaagagatctccagccaagacagcacctgtggtacttcgagtactatacaggaaacaacgtgggactcttcatgaagataaaccgcatgatctactccggacagagcgacattcagaggatagatatcttcgagaatcccgatcttggcgtggttttttcgctcgacggcatcacgatgaccacggaaaaggacgagttcatgtaccacgaaatgctcgcacacgttcccatgttcctccatccgaacccgaagaaggtgctcatcatcggcggtggagacggcggaacgctcagagaagtcctgaaacacgacagcgtggagaaggcggttctctgcgaagtggacggactcgtcatagaagccgcaaggaagtatttgaagcagacttcgtgcggtttcgacgatccaaggacagagatcgtgatcgcaaacggtgccgaatacgtgaggaagttcaagaacgagttcgatgtcatcatcatagactccacggacccgacggcgggccagggtgggcacctcttcaccgaagagttctaccaggcctgttacgatgccctcaaggaagacggagtcttctccgccgagacggaagacccgttctacgacatcggatggttcaagctcgcttacaagaggatcagcaaggtctttcctatcacgaaggtttaccttggattcatgaccacctatccctccggcatgtggtcctacaccttcgcctccaagggaatagacccgataaaagacttcaaccccgaaaaggtgaaaaacttcaacaaagagctgaagtactacaacgaagaagttcacgtcgcgtccttcgcccttccgaacttcgtgaagaaagaactcggactgatgtga

SEQ ID NO: 154762 - protein, 296 aa, Thermotoga petrophila RKU-1
MEKLKEFERDLQPRQHLWYFEYYTGNNVGLFMKINRMIYSGQSDIQRIDIFENPDLGVVFSLDGITMTTEKDEFMYHEMLAHVPMFLHPNPKKVLIIGGGDGGTLREVLKHDSVEKAVLCEVDGLVIEAARKYLKQTSCGFDDPRTEIVIANGAEYVRKFKNEFDVIIIDSTDPTAGQGGHLFTEEFYQACYDALKEDGVFSAETEDPFYDIGWFKLAYKRISKVFPITKVYLGFMTTYPSGMWSYTFASKGIDPIKDFNPEKVKNFNKELKYYNEEVHVASFALPNFVKKELGLM

SEQ ID NO: 154763 - DNA, 909 bp, Thermosipho melanesiensis BI429
  CDS (1)..(909): transl_table=11
atgagtgaaaatatagaaaaaaagataatgaaagattttcaatatggttttgttccaaacagacatctttggtattttgaatactatacaccaggtaatacgggaatatttatgaaaattaataagccattgtattctgcacaaagcaaatatcaaagaatagatatctttgaaacggacttttttggaagggtattttcgttggatggaataaccatgacaacggaaaaagatgattttttctatcatgagatgcttgttcatgttcctatgtttatgcatccaaacccaaagaaggtattggtaattggtggaggcgatggtggaagcgttagagaagtactaaaacataaaagtgttgaaaaagttgttatgtgtgaaattgatgagatggtggttgaagcagctaaaaaatatttaccagtaactgcttctaaattggatgatccaagggtagaattggtatttgaagatggctcacaatttgtaagaaaatttaaaaatgaatttgatgtaataataatagattctacagatccaactgcaggtgaaggtggtcatttatttactgaagaattttacaaagcatgttttgacgcattaactgaaaatggaactctttctgcggaatctgaagattggttatatgatggtgcatggatgagattggcattttctagaatcaaaaaggtatttccgattaccaaactttatcttggatttatgccaacatatccaagtggaatgtggtcatatacatttgcatcaaaaggaattgatccattaaaggattttgagcctgaaaaagttaaaaacttttctgaagaattaaaatattacaatgaagaaattcacagagcagcttttgcactaccaacatttctaaaaaaagaattagaagaattataa

SEQ ID NO: 154764 - protein, 302 aa, Thermosipho melanesiensis BI429
MSENIEKKIMKDFQYGFVPNRHLWYFEYYTPGNTGIFMKINKPLYSAQSKYQRIDIFETDFFGRVFSLDGITMTTEKDDFFYHEMLVHVPMFMHPNPKKVLVIGGGDGGSVREVLKHKSVEKVVMCEIDEMVVEAAKKYLPVTASKLDDPRVELVFEDGSQFVRKFKNEFDVIIIDSTDPTAGEGGHLFTEEFYKACFDALTENGTLSAESEDWLYDGAWMRLAFSRIKKVFPITKLYLGFMPTYPSGMWSYTFASKGIDPLKDFEPEKVKNFSEELKYYNEEIHRAAFALPTFLKKELEEL

SEQ ID NO: 154765 - DNA, 855 bp, Clostridium beijerinckii NCIMB 8052
  CDS (1)..(855): transl_table=11
atggagttatggtatacagaacaacacacagaaaatgtaagattttcaattaaagttgaaaaagaaatacatactgaaaaaactgaattccaaagaatagatgtacttgaagctaaggaattcggaaggttttttacattagatggattaatgatggtaactgaaaaagatgaatttatttaccatgatatgatagttcatgtaccaatggcaactaatccaaatattaagaatgttttagttataggtgctggtgacggtggaacaataagagaacttacaagatacagcacagttgaaaagatagatatggttgaaattgataaaagagttgttgatatttgtagagagtattttccgctaacatcatgtaagcttgatgataaaagagttaatgtattctatgaagatggtttgaaatttatacgtgataaagaagatgaatatgacttaataatagttgattcaacagatccttttggaccaggagaaggattatttactaaggagttttatggaaattgctataaagcactaagagaagatggaattttagttaatcaacatgaaagtccatactatgataatgatgcggctgcaatgaaagaagctcatgaaaaaataacgaaattttttccaatcattagggtctatcaagcacatattccaacatatccatcaggacattggttatttggatttgcttcaaaaaagtatcaccctataaaggattttgatgcagaagcttggaataagttagggataaaaacaaaatattataatacagatcttcatgtagggtgctttgcacttccaacttacgttagagatatgttaaatggacttactgattag

SEQ ID NO: 154766 - protein, 284 aa, Clostridium beijerinckii NCIMB 8052
MELWYTEQHTENVRFSIKVEKEIHTEKTEFQRIDVLEAKEFGRFFTLDGLMMVTEKDEFIYHDMIVHVPMATNPNIKNVLVIGAGDGGTIRELTRYSTVEKIDMVEIDKRVVDICREYFPLTSCKLDDKRVNVFYEDGLKFIRDKEDEYDLIIVDSTDPFGPGEGLFTKEFYGNCYKALREDGILVNQHESPYYDNDAAAMKEAHEKITKFFPIIRVYQAHIPTYPSGHWLFGFASKKYHPIKDFDAEAWNKLGIKTKYYNTDLHVGCFALPTYVRDMLNGLTD

SEQ ID NO: 154767 - DNA, 855 bp, Alkaliphilus metalliredigens QYMF
  CDS (1)..(855): transl_table=11
atggaactttggtatactgaagaacaaactcagcacgtaagattatcttttaaggtgaaggaacatttgttttctgaacaaagtgaatttcaaaaagtagatgtattagatacctatgagttcggaaaattaatgacattagatggattagtgatggtaactgaaaaggatgagttcatttaccatgacatgattgtacatgttcctatggcggtgaaccctaatattaaaaacgttttgatcattggtggtggagatggtggtacagctagggagttaatgcgctatcaaagcattaaacatgttgacatggttgaaatcgacaaaatggtctgtgatgttgcccgagattactttcccacgatatcatctgagttagagaatccacgtgtttcactttactatgaagatggtgtcgcctttatcaaagataaagaaaataaatatgacctcatcattattgattctactgatcccgttggtcctggagaaggtttattctctcaagaattctacaccaactgttttaaggctttaacagaacaaggaatcttggttaatcaaaatgaaagcccagtttatgagcaatttgcccgagaagccattcgagcaaatagtaaactgaaaaagatttttcctatcgtagaagtctatcaagcacagatccctacgtacccatcgggttattggttattcggttttgcttctaagtcattacacccagtgaaggacttgaaaagtagtgtttggaatcaactaaatctcaatactaaatattataatacgcagttacatgtaggggcttttgccttacctagctatgttaaggagcagattgaaaatggaaatgtttaa

SEQ ID NO: 154768 - protein, 284 aa, Alkaliphilus metalliredigens QYMF
MELWYTEEQTQHVRLSFKVKEHLFSEQSEFQKVDVLDTYEFGKLMTLDGLVMVTEKDEFIYHDMIVHVPMAVNPNIKNVLIIGGGDGGTARELMRYQSIKHVDMVEIDKMVCDVARDYFPTISSELENPRVSLYYEDGVAFIKDKENKYDLIIIDSTDPVGPGEGLFSQEFYTNCFKALTEQGILVNQNESPVYEQFAREAIRANSKLKKIFPIVEVYQAQIPTYPSGYWLFGFASKSLHPVKDLKSSVWNQLNLNTKYYNTQLHVGAFALPSYVKEQIENGNV

SEQ ID NO: 154769 - DNA, 840 bp, Methanococcus vannielii SB
  CDS (1)..(840): transl_table=11
atgaaattcgatgcatggtatactgaacctcaaactgaaaatttaagcctttcaactaagttaaaaaatattttatacgttggacagtcaaaatatcaagaaatccaaattcttgatacttacgagtttggtaaagtattgattttagaaaacacgtaccaaactaccgaaagggacgaatttatatatcacgaacttatttcacaccctgcactattcacgcatgaaaaccctaaaaaagttctcgtaattggcggaggggatggcggaacagtaagggaagtagtaaaacatgaaagcgttgaaaaaattgatttcgttgaacttgatggaatggttgtagaagtttctaaacaattcttaccttcattaagctgtgaaatcgataacccgaaagtaaacacgattattacggatggaatagaatatgttgctaaaaccaaggaaaaatacgatgtaattttggtagactgcccagatccagttggtccagctgcaggattatttgaaaaagagttttacaacaacctatttaaatgtctaaatgacgacggaattatggttcagcagactgaaagcccactcttgcatgaaactttaataaataaaattaaagggcacttaaaagacgccggttttccagttataaggcctcttgtatgcagtattcccacatacccaagtggattttggagttttacacttgcttcaaagaaaaacgacccattaacatcagatgttaatgaaattcaagacaaattgaagaatatgcctacaaagtactacgatcaagatgtgcataaaggcgtatttttagcgactcctagatacttaaaataa

SEQ ID NO: 154770 - protein, 279 aa, Methanococcus vannielii SB
MKFDAWYTEPQTENLSLSTKLKNILYVGQSKYQEIQILDTYEFGKVLILENTYQTTERDEFIYHELISHPALFTHENPKKVLVIGGGDGGTVREVVKHESVEKIDFVELDGMVVEVSKQFLPSLSCEIDNPKVNTIITDGIEYVAKTKEKYDVILVDCPDPVGPAAGLFEKEFYNNLFKCLNDDGIMVQQTESPLLHETLINKIKGHLKDAGFPVIRPLVCSIPTYPSGFWSFTLASKKNDPLTSDVNEIQDKLKNMPTKYYDQDVHKGVFLATPRYLK

SEQ ID NO: 154771 - DNA, 861 bp, Klebsiella pneumoniae subsp. pneumoniae MGH 78578
  CDS (1)..(861): transl_table=11
atggccgataatccactgtggcatgaaacgctgcatgaccattttggtcagtattttagcgttgataacgtgctgtaccacgaaaaaaccgatcatcaggatctgatcatctttgataaccgcgcctttggccgggtgatggcgctggatggcgtcgtacaaaccaccgaacgcgacgagttcatctatcacgaaatgatgacccatgtgccgctgctggctcacggcaacgcgaagcatgtgttgatcattggcggcggcgatggcgcgatgctgcgcgaagtctctcgtcaccgtagcatcgaaaccatcaccatggtggaaatcgacgccggggtagtttcattctgccgccagtacctgccgaaccataacgccggcgcctatgacgatccgcgctttacgctggtgattgatgatggcgtcaattttgttaatcagacgacgcaaacgtttgacgtgatcatttcggactgtaccgaccctatcggcccgggagaaagcctgttcacctcggctttttatgaaggctgcaaacgctgcctgaacccgggtgggatctttgttgcccagaatggcgtctgcttcctgcaacaggatgaagcggtaggcagccatcgcaagctaagccactattttcgcgacgtcagcttctaccaggcggcaattccaacctattacggcgggatcatgacctttgcctgggcgagcgacaatgaggcgctgcgccatctctccagcgaaatcattcaggcgcgctttcacaaagccaacctgacctgccgttactacaatccggcaatccatacggcggccttcgccttaccacaatatctgcatgatgctctgtccgcaccgtga

SEQ ID NO: 154772 - protein, 286 aa, Klebsiella pneumoniae subsp. pneumoniae MGH 78578
MADNPLWHETLHDHFGQYFSVDNVLYHEKTDHQDLIIFDNRAFGRVMALDGVVQTTERDEFIYHEMMTHVPLLAHGNAKHVLIIGGGDGAMLREVSRHRSIETITMVEIDAGVVSFCRQYLPNHNAGAYDDPRFTLVIDDGVNFVNQTTQTFDVIISDCTDPIGPGESLFTSAFYEGCKRCLNPGGIFVAQNGVCFLQQDEAVGSHRKLSHYFRDVSFYQAAIPTYYGGIMTFAWASDNEALRHLSSEIIQARFHKANLTCRYYNPAIHTAAFALPQYLHDALSAP

SEQ ID NO: 154773 - DNA, 840 bp, Nitratiruptor sp. SB155-2
  CDS (1)..(840): transl_table=11
atgtggttcgaagaggttcataacgatttttttaaacagggcgtaaaagtagaatcgaaaatctatgagacaaagagtaaatatcagactatcgaggtgtatgagagtaaagagtttggcaagattttggtaatagacgggcatgggatgctctgtgaaaaagatgagtttatctaccatgagatgatggcgcatgtaccggcgtgtacccataaagagccaaaaagagcgttggtaatcggtggtggtgatggaggtgtggcgaaagagctgctcagacaccctgaactccaagtagacttggtagagatcgatgaagaagtagtcaatgtttgcaaggagtattttccaaatataggcgattgggacaatccaagactcaatctcctgatagaagatgggatcgagtatattaaaaatgtaccggcagatacatatgatttgattttggtggattccaccgatcctgaaggaccggctgaagggctttttaatagaaccttttatgctcatgtttttaaagcgttgaaagaggatggtatcgtcgtggcccaaggagagagttggtggatcgatatgccgctgcataaagagattatgggtgtgattggagagttcttcaagatcgtcatgccctatcggtttgagatgtatatgtatccaggatgcaactggaattttattctgggaagcaaactctaccatccaacagcggatatgatattgcagcgagcagacttgattgaaggactcaaatattacaactcagatatccataaagcctcttttgtccttccaaattacgtaaaacaagaacttggagatctgtataagtggtag

SEQ ID NO: 154774 - protein, 279 aa, Nitratiruptor sp. SB155-2
MWFEEVHNDFFKQGVKVESKIYETKSKYQTIEVYESKEFGKILVIDGHGMLCEKDEFIYHEMMAHVPACTHKEPKRALVIGGGDGGVAKELLRHPELQVDLVEIDEEVVNVCKEYFPNIGDWDNPRLNLLIEDGIEYIKNVPADTYDLILVDSTDPEGPAEGLFNRTFYAHVFKALKEDGIVVAQGESWWIDMPLHKEIMGVIGEFFKIVMPYRFEMYMYPGCNWNFILGSKLYHPTADMILQRADLIEGLKYYNSDIHKASFVLPNYVKQELGDLYKW

SEQ ID NO: 154775 - DNA, 828 bp, Bacillus cereus subsp. cytotoxis NVH 391-98
  CDS (1)..(828): transl_table=11
atggaactatggttcactgagaaacaaacaaaacattttggaattacggcgcgtattaaccgcacattacatacggagcaaacagaatttcaaaagcttgatatggtagaaacagaagagttcggaaacatgctgattttagatggtatggtaatgacaacagaaaaagatgagtttgtctatcatgaaatggtagcgcatgttcctttatttacacatccaaaccctgagaacgtattagttgttggtggtggcgatggtggtgtcattcgcgaagtactaaaacacccaagcgtgaagaaagcaacacttgttgaaatcgatgggaaagtaattgagtattctaagaaatatttgccatctattgcaggagcattagatcatgaacgtgtggaagtaaaagtaggagatggtttcctacatatcgcagaaagtgaaaatgaatacgatgtaattatggttgactctacagagccagtcggaccagcagttaacttatttacaaaaggattctacgctggaatctctaaagcgttaaaagaagatgggattttcgttgcacaaacggacaacccttggtttacaccagaattaattacaaatgtagtgaaagatgtgaaagaaattttcccaattactcgtttgtatacagcaaacattccaacgtacccaagtggactttggacatttacaattggatctaaaaagtatgatccactagaagtaagtgaagaccgtttccatgatatcgaaacgaagtattatacaaaagaacttcataaagcatcatttgctttaccgaagtttgttggagatttaattaagtaa

SEQ ID NO: 154776 - protein, 275 aa, Bacillus cereus subsp. cytotoxis NVH 391-98
MELWFTEKQTKHFGITARINRTLHTEQTEFQKLDMVETEEFGNMLILDGMVMTTEKDEFVYHEMVAHVPLFTHPNPENVLVVGGGDGGVIREVLKHPSVKKATLVEIDGKVIEYSKKYLPSIAGALDHERVEVKVGDGFLHIAESENEYDVIMVDSTEPVGPAVNLFTKGFYAGISKALKEDGIFVAQTDNPWFTPELITNVVKDVKEIFPITRLYTANIPTYPSGLWTFTIGSKKYDPLEVSEDRFHDIETKYYTKELHKASFALPKFVGDLIK

SEQ ID NO: 154777 - DNA, 828 bp, Clostridium kluyveri DSM 555
  CDS (1)..(828): transl_table=11
atggatttatggttaagagaaggtcaaattgaagatgctgctatgacctataagataaaagagactttagttacaaagaaaaccaagtatcaggagttggctatagtagatacctatgcattaggaagaatgttggttttagatggtatagtacagactacagttaaagatgagtatgtataccatgaaatgataactcatatacctttatttacccatcctaatccccaaaaagtacttatagttggtggaggagatggagggactgtaagagaagtattgaaacatgaaactgtagaaaaagttgtactttgtgaaattgatgaacaggttgtttatgagtgtaaaaaatatcttccagaaataagctgtgagcttgataatccaaaatgtgaagtttttattggcgacggaataaaatatgtccaccagcatagaaatgaatttgatgttataatagtggattctacagatccttttggtgctgcagagggattgtttggaggaagcttttataaggaaatatataactgtttaacagaagatggaatattcatagctcagactgaaacacctttttatttgccagaagtggtaaaacaggtatacaaggatgctaaggaaatttttcctattaccagattgtttatggcaggcatacctacatacccgagtggattctggagttttaccataggctctaaaaagtatgatcctaaagaagtggatttatcttctaccttgaatataaatacaaagtattatactaaagaattacataaggcatgttttgtactcccaaagtttgtggaagatttaactagatag

SEQ ID NO: 154778 - protein, 275 aa, Clostridium kluyveri DSM 555
MDLWLREGQIEDAAMTYKIKETLVTKKTKYQELAIVDTYALGRMLVLDGIVQTTVKDEYVYHEMITHIPLFTHPNPQKVLIVGGGDGGTVREVLKHETVEKVVLCEIDEQVVYECKKYLPEISCELDNPKCEVFIGDGIKYVHQHRNEFDVIIVDSTDPFGAAEGLFGGSFYKEIYNCLTEDGIFIAQTETPFYLPEVVKQVYKDAKEIFPITRLFMAGIPTYPSGFWSFTIGSKKYDPKEVDLSSTLNINTKYYTKELHKACFVLPKFVEDLTR

SEQ ID NO: 154779 - DNA, 873 bp, Parvibaculum lavamentivorans DS-1
  CDS (1)..(873): transl_table=11
atgaccgaggccccgaaaggccgctggatcgtggaaaccctctatgaaaaagagggtttcacctgcgccttccgcgccgacaaggttttccacgaagagaacacggccgaacagaatctcgtgattttcgagaacgcgctgttcggacggatgatggcgctcgacggcatcacgcaggtaacggagcgcgacgagttcatctatcacgagatgatgacccatgtgccgatcctggcgcatgggcgcgtgcgccgcgtgctcatcatcggcggcggcgacggcggcatcctgcgcgaagtgctccgccacaagaaggtcgataaggtcacgatggtcgaaatcgatccggccgtgaccgacttctgcaaaaagcagctcccgaaaatttcggacggtgctttcgacgatccgcgtctcgatctcgtcttcgcggatggtgcgaaattcgtggaggaaacgaccgaaaaatacgatgtgattatcgtggattcgaccgacccgatcgggccgggcgaagttttgtttcgcgagagcttctatcgcgcggcgagcggcgtgctgacgccgggcggcgtgatcgtgacgcagaacggcgtaccgttcatgcaaggcagcgaactgaaagccacgatggaaaaattccgccgcctcttcaaagaggcgacctgctatctggccaccatccccacctatgtcggcggaccgatggcgatgggatggggcacggatgacgcgacactgacctccctgccgcttgaggaaatcgaacggcggtttgcggaggagggtttcgcgacccgctactacacgcctgaggttcacaaggccgccttcgccttgccgcgctacgtcctcgattgcgtggctccctga

SEQ ID NO: 154780 - protein, 290 aa, Parvibaculum lavamentivorans DS-1
MTEAPKGRWIVETLYEKEGFTCAFRADKVFHEENTAEQNLVIFENALFGRMMALDGITQVTERDEFIYHEMMTHVPILAHGRVRRVLIIGGGDGGILREVLRHKKVDKVTMVEIDPAVTDFCKKQLPKISDGAFDDPRLDLVFADGAKFVEETTEKYDVIIVDSTDPIGPGEVLFRESFYRAASGVLTPGGVIVTQNGVPFMQGSELKATMEKFRRLFKEATCYLATIPTYVGGPMAMGWGTDDATLTSLPLEEIERRFAEEGFATRYYTPEVHKAAFALPRYVLDCVAP

SEQ ID NO: 154781 - DNA, 831 bp, Bacillus amyloliquefaciens FZB42
  CDS (1)..(831): transl_table=11
ttgagcgagctttggtatacggagaagcagacgaagaatttcggcattacattaaaggtgaaacaaacattacatacggaacagacggaatttcagcatctggaaatggtggagacagaagaattcggcaacatgctgttcttagacggaatggtcatgacttctgaaaaagacgaatttgtctatcatgaaatggttgcgcacgtcccgttatttacgcacccgaatccggaaaacgtcctcgttgtcggcggcggagacggcggtgtcatcagagagattctgaagcacccaagcgtaaaaaaagcgacgcttgtcgacattgacggcaaggttattgaatactctaaaaaattccttccgtccattgcgggcaagcttgatgatccgcgcgtcgacgtgagagtcgatgacggtttcatgcacatcgcgaaatcagagaatgagtatgacgtcatcatggttgattcaacagaaccggtcggaccggccgtcaatctgttctcaaaaggcttctatgccggaatttccaaggcgttaaaagaagacggcatcttcgtcgcgcagacggacaacccgtggtttacaccggagctgattacaaacgtacagcgtgacgtgaaagaaatcttcccgatcacccgcctgtatacggctaatatcccgacgtacccaagcggcttgtggacatttacgatcggttctaaaaagtacgatccgcttgaagtggaggacagccgtttctttgacatcgacacgaaatattacacgaaagagcttcacaaagcggcatttgttcttccgaaatttgtgagcgacttaatcaaataa

SEQ ID NO: 154782 - protein, 276 aa, Bacillus amyloliquefaciens FZB42
MSELWYTEKQTKNFGITLKVKQTLHTEQTEFQHLEMVETEEFGNMLFLDGMVMTSEKDEFVYHEMVAHVPLFTHPNPENVLVVGGGDGGVIREILKHPSVKKATLVDIDGKVIEYSKKFLPSIAGKLDDPRVDVRVDDGFMHIAKSENEYDVIMVDSTEPVGPAVNLFSKGFYAGISKALKEDGIFVAQTDNPWFTPELITNVQRDVKEIFPITRLYTANIPTYPSGLWTFTIGSKKYDPLEVEDSRFFDIDTKYYTKELHKAAFVLPKFVSDLIK

SEQ ID NO: 154783 - DNA, 852 bp, Cronobacter sakazakii ATCC BAA-894
  CDS (1)..(852): transl_table=11
atgtggcacgaaacgctgcacgatcagtttggtcaatactttgccgtcgacaaagtgctctatcgcgaaaagaccgatcatcaggatctgattattttcgaaaactccgcctttggccgggtgatggcgctggacggcgtggtgcaaaccaccgaacgcgacgagtttatctatcacgaaatgatgacgcatgtgccgctgctggcccacggccacgcgaagcgcgtgctgatcatcggcggcggcgatggcgcgatgctgcgtgaagtgacgcgtcatcagagcgtggaatccatcacgatggtggaaatcgacgccggcgtggtggcgttttgccgcgagcatctgcctaaccacaatgccggtagctatgacgatccgcgctttacgctggtgatcgacgacggcgtgaatttcgtcaaccagaccacccagaagtttgatgtgattatctccgactgcaccgatcccatcgggccgggagagagcctgttcacgtcggcgttttatgaagggtgcaagcgctgcctgaatccgggcgggattttcgtcgcgcagaacggcgtctgctttctccagcaggatgaagccatcgacagccataaaaagctcagccactactttggcgatgtgagcttttatcaggcggcaatccccacctactacggcggcatcatgacgttcgcctgggcgaccgataacgacgccctgcgcaaactcccgctcgaaaccttacaggcgcgctttcacaccgcggggctgaagtgccgttattacaatccggccattcatacggcagcattcgctctgccgcaatatttgcaagatgccctggcgtctcaggcatcctaa

SEQ ID NO: 154784 - protein, 283 aa, Cronobacter sakazakii ATCC BAA-894
MWHETLHDQFGQYFAVDKVLYREKTDHQDLIIFENSAFGRVMALDGVVQTTERDEFIYHEMMTHVPLLAHGHAKRVLIIGGGDGAMLREVTRHQSVESITMVEIDAGVVAFCREHLPNHNAGSYDDPRFTLVIDDGVNFVNQTTQKFDVIISDCTDPIGPGESLFTSAFYEGCKRCLNPGGIFVAQNGVCFLQQDEAIDSHKKLSHYFGDVSFYQAAIPTYYGGIMTFAWATDNDALRKLPLETLQARFHTAGLKCRYYNPAIHTAAFALPQYLQDALASQAS

SEQ ID NO: 154785 - DNA, 867 bp, Citrobacter koseri ATCC BAA-895
  CDS (1)..(867): transl_table=11
atggccgaaaatacgaagtggcatgaaacgctacacgaccagtttggtcagtactttgccgtggacaacgtgctgtatcacgagaaaaccgatcaccaggatctgattattttcgagaacgccgcgtttggccgcgtaatggcgctggacggcgtggtgcaaaccaccgagcgcgatgagtttatctatcacgagatgatgacccacgttccgctgctggcacacggccacgcgaaacatgtgctgatcatcggcggcggcgacggcgcaatgctgcgtgaagtgacacggcataaaaatgtcgaaaccatcacgatggtggagatcgacgcaggcgtggtctctttctgccgtcagtatctgccgaatcacaacgcaggcagctatgacgatccgcgttttaatctggtgatcgacgatggcgttaacttcgtgaatcagaccagccagacctttgatgtgatcatctccgactgtaccgatccgatcggccccggcgagagtctgttcacctcaaccttctatgaaggttgcaagcgctgtctgaatcctggcgggatctttgtcgcacagaacggcgtctgcttcctgcaacaggatgaagccattgacagccaccgcaagctcagccattactttggcgatgtcagcttctaccaggcagccattccgacctactacggcggcattatgaccttcgcgtgggcgacggacaatgacgcgctgcgccacctgtcgaccgagattattcaggcgcgtttccatacctccggcctgaaatgccgttactacaatccgtctgttcacacggcagcttttgccttacctcagtatttgcaagacgcgctcgcaacaccgtcgtcctaa

SEQ ID NO: 154786 - protein, 288 aa, Citrobacter koseri ATCC BAA-895
MAENTKWHETLHDQFGQYFAVDNVLYHEKTDHQDLIIFENAAFGRVMALDGVVQTTERDEFIYHEMMTHVPLLAHGHAKHVLIIGGGDGAMLREVTRHKNVETITMVEIDAGVVSFCRQYLPNHNAGSYDDPRFNLVIDDGVNFVNQTSQTFDVIISDCTDPIGPGESLFTSTFYEGCKRCLNPGGIFVAQNGVCFLQQDEAIDSHRKLSHYFGDVSFYQAAIPTYYGGIMTFAWATDNDALRHLSTEIIQARFHTSGLKCRYYNPSVHTAAFALPQYLQDALATPSS

SEQ ID NO: 154787 - DNA, 873 bp, Thermotoga lettingae TMO
  CDS (1)..(873): transl_table=11
atgcctgaaaaaatgataccaggaaaacatctgtggttttttgattattttcccggtggcgatgtagggcttttcatgaggatatccaatatggtgcactctcagcaaacccggtatcagagaatagacatttttgacaacccaacacttggtagagtattcgcactcgatggtattacaatgactacggatgcagatgagtttatgtatcatgaaatgcttgctcatgttccaatgttttctcacccaaatccagtttctgttcttattgttggtggtggcgatggtggaacattaagagaagttttgagacatccaggagttaagagagccgttttatgtgaaatagatgaacaggttgttgaagcagcaaggcaatatttgaaaacaagcgaatcattcgatgacaaaagggcagagttcgcttatgagaatggcgcggattatgtaaaacgttttaaaaatgagtttgatgttataattattgactcgactgatcccactgcgggcgaaggcggccatcttttcacgcaagaattttacaaatcgtgttttgatgcattgagagaagatggaattttaactgtgcaggccgagaatgctttatatgatttcggatggacaaagataactcacaggagaatatcttccgtttttccgatagtcaaagcttatcagggatttgtacctacatatccatctggatactggctgtatattttcgcatcaaagaacattgatccggttgaaaatttcaggtacgatgatgcgaaaaatatgtcccagaaattgaaatattataatgaagaacttcataaagcttgctttgtgttgccaaattttataaaaaatgaacttaagggaaagatgtga

SEQ ID NO: 154788 - protein, 290 aa, Thermotoga lettingae TMO
MPEKMIPGKHLWFFDYFPGGDVGLFMRISNMVHSQQTRYQRIDIFDNPTLGRVFALDGITMTTDADEFMYHEMLAHVPMFSHPNPVSVLIVGGGDGGTLREVLRHPGVKRAVLCEIDEQVVEAARQYLKTSESFDDKRAEFAYENGADYVKRFKNEFDVIIIDSTDPTAGEGGHLFTQEFYKSCFDALREDGILTVQAENALYDFGWTKITHRRISSVFPIVKAYQGFVPTYPSGYWLYIFASKNIDPVENFRYDDAKNMSQKLKYYNEELHKACFVLPNFIKNELKGKM

SEQ ID NO: 154789 - DNA, 864 bp, Serratia proteamaculans 568
  CDS (1)..(864): transl_table=11
atgacccagaaagaaatttggtatgaaacgctgcatgccaacttcggccagtacttctcggtagagaacgtactgtatcgtgagaagaccgagcatcaggatttggtgatttttgaaaacccggttctggggcgcgtgatggcgctcgacggcgtggtgcaaaccaccgagcgcgatgagttcatctatcacgaaatgatgacccacgtaccgctgctggcccacggccaggcgaagaaagtgctgatcatcggcggtggcgacggcgccatgctgcgcgaagtcagccgccatcagggcgtagagcagatcaccatggttgagatcgacgccggtgtggtcgagttctgtcgccaatatctacctaaccacaatgccggtgcttatgacgatccgcgcttcaagctggtgatcgacgacggcgtcaactttgttaatcagaccgatgaaaaattcgatgtgattatctctgactgtaccgatcccatcggccccggcgaaagtctgttcacctcagcattctacgaaggctgcgcgcgctgcctgaacgaaggcggcatttttgttgcgcagaacggcgtgtgcttcctgcagcaagacgaagcggtcaatagccacaccaggctgagccagtacttcaaggacgtcagcttctatcaggcggcgatcccgacctattacggcggtatcatgaccttcgcctgggcgagccaggatccggcgttgcgccagcttgatctgaccacgctgcaacatcgctttcatcaaagcggcttaaactgtcgttattacaacccggcaattcacgctggcagctttgctctgccacagtatttgctcgacgcactgaacgtttcacgttaa

SEQ ID NO: 154790 - protein, 287 aa, Serratia proteamaculans 568
MTQKEIWYETLHANFGQYFSVENVLYREKTEHQDLVIFENPVLGRVMALDGVVQTTERDEFIYHEMMTHVPLLAHGQAKKVLIIGGGDGAMLREVSRHQGVEQITMVEIDAGVVEFCRQYLPNHNAGAYDDPRFKLVIDDGVNFVNQTDEKFDVIISDCTDPIGPGESLFTSAFYEGCARCLNEGGIFVAQNGVCFLQQDEAVNSHTRLSQYFKDVSFYQAAIPTYYGGIMTFAWASQDPALRQLDLTTLQHRFHQSGLNCRYYNPAIHAGSFALPQYLLDALNVSR

SEQ ID NO: 154791 - DNA, 831 bp, Bacillus pumilus SAFR-032
  CDS (1)..(831): transl_table=11
atgagcgaactttggtatacagagaagcaaacgaagaattttggtattacattgaaggtgaacaagacccttcacacagaacaaacagattttcagcatttagaaatggtggaaacagaagagtttggcaatatgctgtttttagacggtatggtgatgacatctgagaaagatgagtttgtataccacgaaatggtggcacatgttcctcttttcactcatccaaacccggaaaatgttcttgttgtaggcggaggagacggcggtgtcattcgtgaaattctcaagcacccaagtgtgaaaaaagcgacacttgttgatattgatggaaaagtcatcgaatactcgaagaaattccttccttcaattgctgggaagctagacgatcctcgtgtagatgtcaaagtcggagacggctttatgcacattgctgaagctgacaatgagtacgatgtcatcatggtggactcaactgaaccagttggaccagctgtgaacctgttctctaaaggattttacgcaggaatctcaaaagcactcaaagaagacggtattttcgtggcacaaacggacaacccttggttcacacctgagctgattacaaatgtacaacgtgatgtgaaagaaattttcccaatcacgaagctttatacagcgaatattccaacgtatccaagtggactttggacatttaccattggttcaaaaaagtatgacccacttgctgtagaagacagccgtttctttgatattgagacgaaatattacacaaaagaattgcacaaagcggcattcgttctgccgaaatttgtgagcgacttaatcaaataa

SEQ ID NO: 154792 - protein, 276 aa, Bacillus pumilus SAFR-032
MSELWYTEKQTKNFGITLKVNKTLHTEQTDFQHLEMVETEEFGNMLFLDGMVMTSEKDEFVYHEMVAHVPLFTHPNPENVLVVGGGDGGVIREILKHPSVKKATLVDIDGKVIEYSKKFLPSIAGKLDDPRVDVKVGDGFMHIAEADNEYDVIMVDSTEPVGPAVNLFSKGFYAGISKALKEDGIFVAQTDNPWFTPELITNVQRDVKEIFPITKLYTANIPTYPSGLWTFTIGSKKYDPLAVEDSRFFDIETKYYTKELHKAAFVLPKFVSDLIK

SEQ ID NO: 154793 - DNA, 855 bp, Alkaliphilus oremlandii OhILAs
  CDS (1)..(855): transl_table=11
atggaattatggtatacagaacagcatacagaggacgttcgcttttcaatcaaagtggacaaccaattatatagcggtcaaagtgaatttcaaagaattgatgtttttgaatctaaggaatttggcaaattttttacattagatggattgatgatggtaactgaaaaggacgaatttatctatcacgatatgattacccatattccaatggcaacaaatccaaagattaaaaatgtcctggtgattggtgctggtgatggcggtactgtacgtgaactaacacgatatgaaaccatagaaaatattgatatggtggaaatcgacaaacttgtggtagatatttgtaaggaataccttccacaaacagcttctaagctggaggatccaagagttcatatttattatgaagatggactaaaattcgttcgtacaaaagaaaatgaatacgatttgatcattgtagattctacagatccttttggaccaggtgaaggtctttttacgaaagagttctatgggaactgctttaaagcattgaaggaagacggtattttagtgaaccaacatgagagtccgtattatgcttcctatgcaaaatccatgaagagagctcataagagaatcaaagagtttttcccgatttgcaaggtatatcaagcccatattccgacttatccttctggacattggttatttggatttgcatccaaaaaatacgatccgattgaagatttaaattcagaagcttggaatgctttaggacttcaaacaaaatattataatacagaccttcatatgggatgctttgcgctgccaaactacgttaaggaactgttagaaaaagaagaagagtaa

SEQ ID NO: 154794 - protein, 284 aa, Alkaliphilus oremlandii OhILAs
MELWYTEQHTEDVRFSIKVDNQLYSGQSEFQRIDVFESKEFGKFFTLDGLMMVTEKDEFIYHDMITHIPMATNPKIKNVLVIGAGDGGTVRELTRYETIENIDMVEIDKLVVDICKEYLPQTASKLEDPRVHIYYEDGLKFVRTKENEYDLIIVDSTDPFGPGEGLFTKEFYGNCFKALKEDGILVNQHESPYYASYAKSMKRAHKRIKEFFPICKVYQAHIPTYPSGHWLFGFASKKYDPIEDLNSEAWNALGLQTKYYNTDLHMGCFALPNYVKELLEKEEE

SEQ ID NO: 154795 - DNA, 981 bp, Caldivirga maquilingensis IC-167
  CDS (1)..(981): transl_table=11
atgcttaataaggggactatgcattactcatggcgattaggcgtaatgagtagtgtaatggatcaggttagtagaatgggtacgtacttcatagagtttgagactccattcagttggcatttaagggctgttaatagggtcctctactcaggtgaatcaaagtaccagaggatagctgtggttgagtttaaggatttaggtaaggcactggtgcttgatggtaaggttcagagttcgttattcgatgagtatgtttaccatgaatccctagttcacccagcaatggtgcttaatgggaatccagagagggtgcttataattggtggaggggagggtgcaacagctagggaggtgcttaagtgggatacggttaaggaagtggtgatggttgatattgatgaggaggtggttagggtttccaaggagtatttacctgaaatgcacggtggatcattctacgataagaggttcaaactgattataggtgatgggaggaggttcctggaggaatccagtgagaagtttgatgtaataatagttgatgcaacagatccattggagggtggtccctcatacctcctctacactgttgaattctataagcttgctaaaagtaggctcacacccaatggagtcttagccacgcaggcaaccaacatggcttatgccttaagggttctatcagtgatatacaggactattgggagtgtgttcagtaaggtgaggccttatcaatcatacatgcactcctacgatgccccctggggattcatggtggccagtgatactgctgatgcccttcaattaactcaagcggatgttgataacgccttaatgaggcatgttaagggtaataccaggtattacgatgggttaacccacgttcacatgttcactttaccaaggcacataagaatcgcacttgaagataaggaggttaagccagccactgactcaaacccaaccttcatgcccatgtag

SEQ ID NO: 154796 - protein, 326 aa, Caldivirga maquilingensis IC-167
MLNKGTMHYSWRLGVMSSVMDQVSRMGTYFIEFETPFSWHLRAVNRVLYSGESKYQRIAVVEFKDLGKALVLDGKVQSSLFDEYVYHESLVHPAMVLNGNPERVLIIGGGEGATAREVLKWDTVKEVVMVDIDEEVVRVSKEYLPEMHGGSFYDKRFKLIIGDGRRFLEESSEKFDVIIVDATDPLEGGPSYLLYTVEFYKLAKSRLTPNGVLATQATNMAYALRVLSVIYRTIGSVFSKVRPYQSYMHSYDAPWGFMVASDTADALQLTQADVDNALMRHVKGNTRYYDGLTHVHMFTLPRHIRIALEDKEVKPATDSNPTFMPM

SEQ ID NO: 154797 - DNA, 867 bp, Petrotoga mobilis SJ95
  CDS (1)..(867): transl_table=11
atggctgaaaataattttaactttccacatactatttttaccgagtacgataaagtacataatgtaggagttttcacagaagtaactaatcacatttataccgaacaaactgaatatcaaagaatagatatatatgaaactccaacatttggaaagttattttcattagatgggttcatcatgacgagagattcagatgaatttgtttatcatgaaatgatctcacacgttcctttgttcatacatcctgatcccaaaaaggttttggtaatcggtggaggcgatggaggaactgtcagagaagtattgaaacatgattctgtagagaaagtgatcctttgcgaattggataaaaaggttgtagaaactgctttaacgtatttacccaacatttcttatgagttaaaaaatccaaaagtagaaatagtctatgaggatggaagtaaatttgtttctcaatttaaagatgagttcgacgctatattgattgattccactgatcccacagaaggtgaaggtggactacttttcaccgaagagttttatcataaatgttttgaagccttgaaggaaaacggagttttctctgcacaaacagaggagccttttttaagaaaagaatggatgataagggcgtataaaagaatcagcaataccttcaatgtagctcgattgtacatgggttatgtacctcaatatatgccgggtacatggacatggacatttgcttcaaaaaatttggatccaataaaagattttgatcctgaaaaggttagggagtttaataaagaacttaaatattacgatgaagaagttcacgttgcatctttttctctacctgtttttgtaaaaaaattaatcaattga

SEQ ID NO: 154798 - protein, 288 aa, Petrotoga mobilis SJ95
MAENNFNFPHTIFTEYDKVHNVGVFTEVTNHIYTEQTEYQRIDIYETPTFGKLFSLDGFIMTRDSDEFVYHEMISHVPLFIHPDPKKVLVIGGGDGGTVREVLKHDSVEKVILCELDKKVVETALTYLPNISYELKNPKVEIVYEDGSKFVSQFKDEFDAILIDSTDPTEGEGGLLFTEEFYHKCFEALKENGVFSAQTEEPFLRKEWMIRAYKRISNTFNVARLYMGYVPQYMPGTWTWTFASKNLDPIKDFDPEKVREFNKELKYYDEEVHVASFSLPVFVKKLIN

SEQ ID NO: 154799 - DNA, 861 bp, Salmonella enterica subsp. arizonae serovar 62:z4,z23:--
  CDS (1)..(861): transl_table=11
atggccgaaaatacgatgtggcacgaaacgctacacgaccagtttggtcagtactttgccgtagacaacgttctgtatcatgaaaaaaccgatcaccaggatttgatcatctttgaaaacgccgcctttggccgcgtgatggcgctggacggcgtggtacagaccaccgaacgcgacgagtttatttatcatgaaatgatgacccacgtcccgctgctggcgcacggtcatgcgaaacatgttctgattatcggcggcggcgacggcgcgatgctgcgtgaagtcacccggcataaaaacgttgaaaccattaccatggtagagattgacgccggcgtggtttcattttgtcgtcaatatttgcctaaccacaatgcgggcagctacgacgatccgcgctttactctggtgatcgacgatggcgtgaatttcgtcaatcagacccaccagacttttgatgtgattatctccgactgtaccgatccaatcggccccggcgaaagcctgtttacctccgccttttatgaaggctgtaagcgctgcctgaatccaggcgggatttttgtcgcccagaatggcgtatgcttcctgcaacaggatgaagcgctcgacagccaccgcaagctgagtcattacttcagcgatgtcagcttctaccaggcggcgattccaacttattacggcggcatcatgactttcgcctgggcgacggacaatgacgccattcgccacctgtcgagtgaaactattcaggcgcgttttcatgccgccggcctcaaatgtcgctattacaacccggctattcatgccgctgcatttgcgctgccgcaatatctacatgacgcactgtccgcacagtga

SEQ ID NO: 154800 - protein, 286 aa, Salmonella enterica subsp. arizonae serovar 62:z4,z23:--
MAENTMWHETLHDQFGQYFAVDNVLYHEKTDHQDLIIFENAAFGRVMALDGVVQTTERDEFIYHEMMTHVPLLAHGHAKHVLIIGGGDGAMLREVTRHKNVETITMVEIDAGVVSFCRQYLPNHNAGSYDDPRFTLVIDDGVNFVNQTHQTFDVIISDCTDPIGPGESLFTSAFYEGCKRCLNPGGIFVAQNGVCFLQQDEALDSHRKLSHYFSDVSFYQAAIPTYYGGIMTFAWATDNDAIRHLSSETIQARFHAAGLKCRYYNPAIHAAAFALPQYLHDALSAQ

SEQ ID NO: 154801 - DNA, 861 bp, Salmonella enterica subsp. enterica serovar Paratyphi B str. SPB7
  CDS (1)..(861): transl_table=11
atggccgaaaatacgatgtggcatgaaacgctacacgaccagtttggtcagtactttgccgtagacaacgttctgtatcatgaaaaaaccgatcaccaggatttaatcatctttgaaaacgccgcttttggccgcgtgatggcgctggacggcgtggtacagaccaccgaacgcgacgagtttatttatcatgaaatgatgacccacgtcccgctgctggcgcacggtcatgcgaaacacgttctgattatcggcggcggcgacggcgcaatgctacgtgaagttacccggcataaaaatgtcgaaaccatcaccatggtggagatcgacgctggcgtagtctcgttttgccgccagtatttacccaaccacaatgccggcagctacgacgatccgcgctttacgctggtaatcgacgacggcgtgaatttcgtcaatcagacccatcagacctttgatgtgatcatttccgactgtaccgatccgataggccccggcgaaagcctgtttacctccgccttttatgaaggctgtaagcgttgcctgaatccgggcggcatttttgtcgcccagaacggcgtgtgcttcctgcaacaggatgaagcgctcgacagccaccgcaaactgagtcattacttcagcgatgtcggcttctaccaggcggcgattccgacctattacggcggcatcatgaccttcgcctgggcgacgaacaacgacgctcttcgtcacctgtcgagcgaaattattcaggcgcgttttcatgccgccggcctcaaatgtcgctattacaacccggctattcatgccgctgcatttgcgctaccgcaatatctacatgacgcactgtccgcacagtga

SEQ ID NO: 154802 - protein, 286 aa, Salmonella enterica subsp. enterica serovar Paratyphi B str. SPB7
MAENTMWHETLHDQFGQYFAVDNVLYHEKTDHQDLIIFENAAFGRVMALDGVVQTTERDEFIYHEMMTHVPLLAHGHAKHVLIIGGGDGAMLREVTRHKNVETITMVEIDAGVVSFCRQYLPNHNAGSYDDPRFTLVIDDGVNFVNQTHQTFDVIISDCTDPIGPGESLFTSAFYEGCKRCLNPGGIFVAQNGVCFLQQDEALDSHRKLSHYFSDVGFYQAAIPTYYGGIMTFAWATNNDALRHLSSEIIQARFHAAGLKCRYYNPAIHAAAFALPQYLHDALSAQ

SEQ ID NO: 154803 - DNA, 870 bp, Gluconacetobacter diazotrophicus PAl 5
  CDS (1)..(870): transl_table=11
atgactgaagcatggatcggcgaaacactctatgacggctggcagcagcgcttccgggtccgcaccgagctggcccgcaccaggagcgcgttccaggatatcgtggttttcgaaagcgagacgcatggccgcgtcctcgtgctcgacggcgtgatccagatcaccgagggtgacgagttcgtctatcaggaaatgctgacccacgtgccgctgctggcccacggcaacgccgccagcgtgctgatcatcggcgcgggtgacggcggcgtgctgcgccgggtgctgcagcatcgcggcgtgacccgggcggtgatggtggaaattgacggcgaggtgatcgcgctgtccaggcagttcctgcccggcattgccggcgacgcctggaccgacccccgcgccgaggtgatcgtgggcgacggcatcgactacgtcgcgcgcgccgaaaccggatcggtcgatgtgatcatcgtcgatagcaccgacccgatcggcgtgggcgaggtgctgtttaccgattcgttctacgaacattgcgcgcgcatcctgacgccgaacggcatcatcgtgaatcagtgcggcgtgcccttcatgcaggccgacgaactgcgcgacaccagcctgcgccgcgcgcggttcttcccgcacgtgtcggcctatgtcgcggcggtgccgacctatgtcggcgggttcatgacgctgggcgtcgcggcgaaaggcacgaatccggccacaccgtcggtcgagacgattcgcgcccgggccgaggcggcgggcatcctggggaccaccggctactggacgccggaaatccacaccggcgccttcaacctgccgccctatatcgcgaagcacctgcccgcggcgaagtaa

SEQ ID NO: 154804 - protein, 289 aa, Gluconacetobacter diazotrophicus PAl 5
MTEAWIGETLYDGWQQRFRVRTELARTRSAFQDIVVFESETHGRVLVLDGVIQITEGDEFVYQEMLTHVPLLAHGNAASVLIIGAGDGGVLRRVLQHRGVTRAVMVEIDGEVIALSRQFLPGIAGDAWTDPRAEVIVGDGIDYVARAETGSVDVIIVDSTDPIGVGEVLFTDSFYEHCARILTPNGIIVNQCGVPFMQADELRDTSLRRARFFPHVSAYVAAVPTYVGGFMTLGVAAKGTNPATPSVETIRARAEAAGILGTTGYWTPEIHTGAFNLPPYIAKHLPAAK

SEQ ID NO: 154805 - DNA, 834 bp, Thermoanaerobacter pseudethanolicus ATCC 33223
  CDS (1)..(834): transl_table=11
atggaattatggtttacagaaaatcaggatgaaaatttgagattttctttgaaagttaaagaaacattggtggtagaaaaaactccttatcaacatttagcaatactcgatacatatcaatttggaagagtattaactttagatggtatacttcaaaccactgaaaaagatgaatttgtatatcatgagatgatagtacatgtacccctctttactcataaaaatccaaaaagcgtattaattgttggaggcggagatggaggctcagtaagagaggtcttaaagcacccttctgtagaaagagtagttttggcagaaattgacgaggcagtagtgagaaattctaaaaaatatcttcctacaataagccaggcattagatgacccaagagtagaaataatgattggagatggaattaaatatgttaatgaacacaaaaatgaatttgatgtggtaatagtggattctactgacccaattgggccagctgtaggtctttttacttctgatttttataaagccgtatatgaatgcttgaaagaagatggtattattgtggctcagacagaatcaccttttatttatggaaaattgataaacaaactcagcaaaatgttcaaagaaatatatcctattacaaaagcatatatagcaacaataccgacttatccaggaagtttgtggacttttaccatgggttcaaaaaaatatgaccctgaagaagtggacataaattctattccaagaatagatactaaatactatacacctgaaattcacaaagcggcctttgtactgcctaaatttgtgaaggatatttttgatgaggtgtaa

SEQ ID NO: 154806 - protein, 277 aa, Thermoanaerobacter pseudethanolicus ATCC 33223
MELWFTENQDENLRFSLKVKETLVVEKTPYQHLAILDTYQFGRVLTLDGILQTTEKDEFVYHEMIVHVPLFTHKNPKSVLIVGGGDGGSVREVLKHPSVERVVLAEIDEAVVRNSKKYLPTISQALDDPRVEIMIGDGIKYVNEHKNEFDVVIVDSTDPIGPAVGLFTSDFYKAVYECLKEDGIIVAQTESPFIYGKLINKLSKMFKEIYPITKAYIATIPTYPGSLWTFTMGSKKYDPEEVDINSIPRIDTKYYTPEIHKAAFVLPKFVKDIFDEV

SEQ ID NO: 154807 - DNA, 828 bp, Candidatus Desulforudis audaxviator MP104C
  CDS (1)..(828): transl_table=11
ttgcatctgtggttcaccgagaagcaaaacgacaacttcgccatcagctaccgggtgaatgagacgctccacacggagaccacgccgtttcagcatctggccgtgctggataccgtgccgttcgggcgtaccctggttctggacgggatcgtgcagacctcggtggtggacgagtacgtctaccatgagatgatcacccacgtcccgctgaacacccaccccgacccgcgccgggtgctgattgtcggcggcggggacgggggtactttgcgcgaggtgaccaagcacccgtcggttgaaaaggccaccctggtcgagatcgacgagcgggtgatcgccgcctccaagaagtacctgccagaactagcctgcggtttcgattcgcccaaggccgaggtcgtgatcggggacgggatcaagtacgtggcggagcacaaaaagaccttcgacctggtcatcgtcgactccaccgacccgatcgggccggcggtgggcctcttcagcctggagttctaccgctcgatctacgaggccctgaaggacgaagggctgttcgtggcccagaccgagtcgccctacttcaacaccgacctgatcctccggatctaccgggacatcgccgggatcttcccgctggcccggacgtactgggcgtgtattcccacctatcccggagccatgtggagcttcaccatcggctccaaaaaacacgaccccgcccaggtcgcgccggaaaaaatccgggaacacgccacccggtactatacgccggagatacaccgtgccagtttcgccatgccgcgattcctggcggaccgcttccgctag

SEQ ID NO: 154808 - protein, 275 aa, Candidatus Desulforudis audaxviator MP104C
MHLWFTEKQNDNFAISYRVNETLHTETTPFQHLAVLDTVPFGRTLVLDGIVQTSVVDEYVYHEMITHVPLNTHPDPRRVLIVGGGDGGTLREVTKHPSVEKATLVEIDERVIAASKKYLPELACGFDSPKAEVVIGDGIKYVAEHKKTFDLVIVDSTDPIGPAVGLFSLEFYRSIYEALKDEGLFVAQTESPYFNTDLILRIYRDIAGIFPLARTYWACIPTYPGAMWSFTIGSKKHDPAQVAPEKIREHATRYYTPEIHRASFAMPRFLADRFR

SEQ ID NO: 154809 - DNA, 891 bp, Yersinia pseudotuberculosis YPIII
  CDS (1)..(891): transl_table=11
atgtcacagaaagaactatggtatgaaacattacatgccaacttcggccagtacttttctgttgagaatgtattgtaccgcgaaaaaaccgagcatcaggacctggtgatttttgaaaacccagagttgggccgcgtaatggcattagatggtgtggtgcaaacgacagagcgtgatgagtttatctaccacgaaatgatgacacacgttcctttgctggcccacgggcaagcaaaaaaagtgctgatcatcggcggtggcgatggcgcaatgctgcgagaagtcagccgccacaagaatattgagcagattaccatggtggaaattgacgccggggtcgtagaattttgccgccagtatttgcctaatcatagcgcgggggcgtatgacgatcctcgtttcaagctagtcatcgacgatggtgtgaatttcgttaatcagaccactgaaaagttcgatgtcatcatttctgactgtaccgatcctatcggtcctggcgaaagcctgtttacctctgtattttatgagggatgcgcccgtagcctgaatgagggggggatcttcgttgcacaaaacggcgtctgtttcctacaacaggatgaagccgtcaatagccataacaaacttagccactatttcagtgacgttagtttttatcaggccgcaattccaacgtattacggcggtattatgacctttgcctgggcgacacagaacccggctctgcgccagttggatctcgccaccttgcaaaaccgctttgcccaagctggcttggcctgccgctactataacccagcgattcatgtcggcagctttgctttaccacagtatttgctagatgccttaacgacgatacccaaagtcattggcctcgattcaagtgaataa

SEQ ID NO: 154810 - protein, 296 aa, Yersinia pseudotuberculosis YPIII
MSQKELWYETLHANFGQYFSVENVLYREKTEHQDLVIFENPELGRVMALDGVVQTTERDEFIYHEMMTHVPLLAHGQAKKVLIIGGGDGAMLREVSRHKNIEQITMVEIDAGVVEFCRQYLPNHSAGAYDDPRFKLVIDDGVNFVNQTTEKFDVIISDCTDPIGPGESLFTSVFYEGCARSLNEGGIFVAQNGVCFLQQDEAVNSHNKLSHYFSDVSFYQAAIPTYYGGIMTFAWATQNPALRQLDLATLQNRFAQAGLACRYYNPAIHVGSFALPQYLLDALTTIPKVIGLDSSE

SEQ ID NO: 154811 - DNA, 867 bp, Shigella boydii CDC 3083-94
  CDS (1)..(867): transl_table=11
atggccgaaaaaaaacagtggcatgaaacgctacacgaccagtttgggcagtactttgcggtagataacgttctgtatcatgaaaagaccgatcaccaagatctgatcatttttgagaacgctgcatttggtcgcgtaatggcgctggatggcgtagtacaaaccaccgagcgcgacgagtttatctatcatgagatgatgacccatgttccgctactggcccacggtcacgcgaaacatgtgctgattatcggcggcggcgacggtgccatgctgcgtgaagtaacccgacataaaaacgttgagtcaatcacgatggtggaaatcgatgcgggtgtcgtgtcgttctgccgtcagtatctgcccaaccataacgccggtagctacgacgatccgcgctttaagctggtgatcgacgatggcgtcaatttcgttaatcaaaccagccagacctttgatgtcattatctccgactgcaccgatcctatcggtcccggcgaaagtctgttcacctcagcattttatgaaggctgcaaacgttgcctgaatcctagcggtatcttcgtcgcacaaaacggcgtctgctttttacagcaggaagaagccatcgacagccatcgcaaactcagccattacttcagcgacgttggcttttatcagacggcgatcccgacctattacggcggtatcatgacttttgcatgggcgacagataacgacgccttacgccatctctcaaccgaaattattcaggcgcgttttctcgcttctggcctgaaatgccgttattacaatccggcaatccatacggcagcttttgccttacctcagtatctgcaagatgcactggcttcacagccgtcctaa

SEQ ID NO: 154812 - protein, 288 aa, Shigella boydii CDC 3083-94
MAEKKQWHETLHDQFGQYFAVDNVLYHEKTDHQDLIIFENAAFGRVMALDGVVQTTERDEFIYHEMMTHVPLLAHGHAKHVLIIGGGDGAMLREVTRHKNVESITMVEIDAGVVSFCRQYLPNHNAGSYDDPRFKLVIDDGVNFVNQTSQTFDVIISDCTDPIGPGESLFTSAFYEGCKRCLNPSGIFVAQNGVCFLQQEEAIDSHRKLSHYFSDVGFYQTAIPTYYGGIMTFAWATDNDALRHLSTEIIQARFLASGLKCRYYNPAIHTAAFALPQYLQDALASQPS

SEQ ID NO: 154813 - DNA, 855 bp, Clostridium botulinum B str. Eklund 17B
  CDS (1)..(855): transl_table=11
atggaattatggtatacagaaaaacatactgaatatgtaaaattttccattaaagttgatagagaattatatactgaacaaagtaaatttcaacgaattgatattttagaatctaaagaatttggaaagttcttcactctagatggattaatgatggtaactgaaaaggatgaatttatttaccatgacatgatagtgcatgttcctatggcaactaaccctaatataaaaaatgttttggttattggtgctggtgatggtggaactataagagaacttacaaggtataagactatagaaaagattgacatggttgaaatagatgagagagttgttgaagtatgcaaaaaatacctacctaaaacagcaggcaagcttgaagaagaaagggtaaatattgtatatgaggatggattgaaatttgttcgtaataaagaaaatgagtatgacttaataatagtagattcaactgatccatttggaccaggagaaggtttatttactaaagagttttatggcaattgctataaagcattaagtgaagatggaatattagttaaccaacatgaaagtccatattatgagtattatgcaaaatcaatgaaagatgctcatgaaaaaatacaaggattatttaaaataaataaggtttatcaagcgcatattccaacttatccatcagggcattggttatttggatttgcttctaaaaagtatgatccaattaaagatcttaatgcagaagcttggaatagtttaggattaaaaacaaaatattataatacagatttacatgtggggtgttttgcactacctacttatgtaatagacatgcttaatgaaaataaagaatag

SEQ ID NO: 154814 - protein, 284 aa, Clostridium botulinum B str. Eklund 17B
MELWYTEKHTEYVKFSIKVDRELYTEQSKFQRIDILESKEFGKFFTLDGLMMVTEKDEFIYHDMIVHVPMATNPNIKNVLVIGAGDGGTIRELTRYKTIEKIDMVEIDERVVEVCKKYLPKTAGKLEEERVNIVYEDGLKFVRNKENEYDLIIVDSTDPFGPGEGLFTKEFYGNCYKALSEDGILVNQHESPYYEYYAKSMKDAHEKIQGLFKINKVYQAHIPTYPSGHWLFGFASKKYDPIKDLNAEAWNSLGLKTKYYNTDLHVGCFALPTYVIDMLNENKE

SEQ ID NO: 154815 - DNA, 858 bp, Erwinia tasmaniensis Et1/99
  CDS (1)..(858): transl_table=11
atggcgactaatgaaatgtggtatgaaacgcttcataccggattcgggcagtatttttctgtcgacaaaatcatttaccgcgaaaagaccgatcatcaggatctggttatttttgaaaatgcagccctgggccgcgttatggcgctggacggcgtggtgcaaaccaccgaacgcgatgaatttatctatcatgagatgatgacccacgttcccctgctggcacacggtgcaccaaagcgcgtgctgattatcggtggcggcgatggcgcaatgctgcgtgaagtgtgtcgccataaaaacatcgaacagataacgatggttgaaatcgatgccggtgtggtgaccttttgccgtcagtacctgccgaatcataacgccggagcgtatgacgatgcgcgtttcaagctggttattgacgatggtgtaaacttcgttaatcaaaccagtgataaatttgatgtgatcatttctgactgtaccgatccgatcgggccaggagaaagtctctttacttcggagttttatcagggatgccgccgctgtctgaatcaggacggcatttttgtggcacaaaacggcgtgtgtttcctacagcaggatgaggcggtcaacagccatcgtaaactgagccactactttggtgatgtcagtttctatcaggccgcgatcccgacctactacggcggtatcatgaccttcgcctgggcaagcgataacccggcgctgcgccagctggatatggccacactgaccgcgcgcttctctgaagcaggcctgaactgccgttattacaatccggcaatccataccggcagctttgccctgccgcaatatttgttaaatgcgctggcagactag

SEQ ID NO: 154816 - protein, 285 aa, Erwinia tasmaniensis Et1/99
MATNEMWYETLHTGFGQYFSVDKIIYREKTDHQDLVIFENAALGRVMALDGVVQTTERDEFIYHEMMTHVPLLAHGAPKRVLIIGGGDGAMLREVCRHKNIEQITMVEIDAGVVTFCRQYLPNHNAGAYDDARFKLVIDDGVNFVNQTSDKFDVIISDCTDPIGPGESLFTSEFYQGCRRCLNQDGIFVAQNGVCFLQQDEAVNSHRKLSHYFGDVSFYQAAIPTYYGGIMTFAWASDNPALRQLDMATLTARFSEAGLNCRYYNPAIHTGSFALPQYLLNALAD

SEQ ID NO: 154817 - DNA, 855 bp, Clostridium botulinum E3 str. Alaska E43
  CDS (1)..(855): transl_table=11
atggaattatggtatacggaaaaacacactgaagatgtgaaattttctataagagttgatagagaattatatacagagcaaagtaaatttcaacgaattgatattttggaatctaaagagtttggaagatttttcactttagatggtttaatgatggtaacagaaaaagatgaatttatttaccatgacatgatagtgcatgttcctatggcaactaaccctaatataaaaaaagttttggttattggtgctggtgatggtggaactataagagaacttacaaggtataagactatagaaaaaatagacatggttgaaatagatgagagcgttgttgaagcatgcaaaaaatacctacctaaaacagcatgcaagcttgaagaagaaagagtaaatattgtatacgaagatggattaaaatttgttcgcaacaaagaaaacgattatgacttaataatagtggattcaactgatccatttgggccaggagaaggattatttactaaggagttttatgggaattgttataaagcattaagtgaagatggaatattagttaatcaacatgaaagtccatattatgagtattatgcaaaatcaatgaaagatgctcatgagaaaatacaaggattatttaaaataaataaggtttatcaagcgcatattccaacttatccatcaggacattggttatttggatttgcttctaaaaaatatgatccaattaaagatcttaatgtggaagcttggaagagtttaggaatacaaactaagtattataatacagatttacatgtgggatgctttgcactacctacttatgtaatagacatgcttaatgaagataaagaatag

SEQ ID NO: 154818 - protein, 284 aa, Clostridium botulinum E3 str. Alaska E43
MELWYTEKHTEDVKFSIRVDRELYTEQSKFQRIDILESKEFGRFFTLDGLMMVTEKDEFIYHDMIVHVPMATNPNIKKVLVIGAGDGGTIRELTRYKTIEKIDMVEIDESVVEACKKYLPKTACKLEEERVNIVYEDGLKFVRNKENDYDLIIVDSTDPFGPGEGLFTKEFYGNCYKALSEDGILVNQHESPYYEYYAKSMKDAHEKIQGLFKINKVYQAHIPTYPSGHWLFGFASKKYDPIKDLNVEAWKSLGIQTKYYNTDLHVGCFALPTYVIDMLNEDKE

SEQ ID NO: 154819 - DNA, 1317 bp, Chloroherpeton thalassium ATCC 35110
  CDS (1)..(1317): transl_table=11
atgtcaggaaaatcgctgggaaagcacattttagttgaattttacgactgcacaccggaagtgctcgatgatgtgattcatattgagcgttccatggtgaaagcagccgaaatcgccaatgccacgattatcaacaccgggtttcatcatttctcaccctatggcgtttccggtgtcgtcgttattcaagaaagtcatttaaccattcacacttggcctgagtacggttatgcctcggtggatattttttcgtgcggagatacggttgatccgtgggcagcttacacttcgctaaaagaagcgcttggcgcaaaaagcggttcaacaatggaactgcggcgcggccaggaaaaactgctgaacaagcaatacaacattccagtttttggtgaggaaacgcctcagcgcgaaatgcaatactcgccgcaatatgccagaaatatttggttcactgaaaaaggtcacaacattgcgctttcgttgcgccacaccggcgatttgctttatcgcaagcgctcgccttatcagcgtgttgagatctatgacaccttcgcttacggcaaaatgctcaccatcgacgggctggtgatgtgtaccgaaaaagatgaatatgtttatcatgagatgatttcgcatgtgccaatgctcacgcatcccaacccaaagcgtgtgttggtgattggcggcggcgacggcggaacgattcgcgagattttgcgtcacgaatcgcttgaagaagttgtcatggtcgaaattgacggcgctgtggtcgaagcttgccgcgaatttttaccggcgatcgcctcagaatttgagaatcccaagctcgacttgcgcatcgaagatggcgtgaagtatgtcatggaatcgccggataaatcattcgatattgtcatcgtggattcgtccgacccggttgggccaaacgaagggctttttacggaggaattttaccgcaatgcgtatcgtattttggccgacgatggcatcatggtgacgcagagcgagtcgccaagaatgaatgtgagaacgttcaaagagctgttccatctctataaaaagattttcggcatggaaaatgtcttttgttacttggcgttcattccaacctacacctccggtatgtggagcttttcctattcaaccaaatgcagcgctcatcctttgaaaaacctcgatcgtgagcgtgccgctgaattcagccgcgagcagcacttgaaatattataacgagggtgtgcatcaaggcgcttttgctctgccgaattttgtcgttgagcttttggaagaagacatcacggtggaacatacgttatag

SEQ ID NO: 154820 - protein, 438 aa, Chloroherpeton thalassium ATCC 35110
MSGKSLGKHILVEFYDCTPEVLDDVIHIERSMVKAAEIANATIINTGFHHFSPYGVSGVVVIQESHLTIHTWPEYGYASVDIFSCGDTVDPWAAYTSLKEALGAKSGSTMELRRGQEKLLNKQYNIPVFGEETPQREMQYSPQYARNIWFTEKGHNIALSLRHTGDLLYRKRSPYQRVEIYDTFAYGKMLTIDGLVMCTEKDEYVYHEMISHVPMLTHPNPKRVLVIGGGDGGTIREILRHESLEEVVMVEIDGAVVEACREFLPAIASEFENPKLDLRIEDGVKYVMESPDKSFDIVIVDSSDPVGPNEGLFTEEFYRNAYRILADDGIMVTQSESPRMNVRTFKELFHLYKKIFGMENVFCYLAFIPTYTSGMWSFSYSTKCSAHPLKNLDRERAAEFSREQHLKYYNEGVHQGAFALPNFVVELLEEDITVEHTL

SEQ ID NO: 154821 - DNA, 861 bp, Salmonella enterica subsp. enterica serovar Newport str. SL254
  CDS (1)..(861): transl_table=11
atggccgaaaatacgatgtggcatgaaacgctacacgaccagtttggtcagtactttgccgtagacaacgttctgtatcatgaaaaaaccgaccaccaggatttaatcatctttgaaaacgccgcttttggccgcgtgatggcgctggacggcgtggtacagaccaccgaacgcgacgagtttatttatcatgaaatgatgacccacgtcccgctgctggcgcacggtcatgcgaaacacgttctgattatcggcggcggcgacggcgcaatgctacgtgaagttacccggcataaaaatgtcgaaaccatcaccatggtagagatagacgctggcgtagtctcgttttgccgccagtatttacccaaccacaatgccggcagctacgacgatccgcgctttacgctagtgatcgacgacggcgtgaatttcgtcaatcagacccatcagacctttgatgtgatcatttccgactgtaccgatccgataggccccggcgaaagcctgtttacctccgccttttatgaaggctgtaagcgttgcctgaatccgggcggcatttttgtcgcccagaacggcgtgtgcttcctgcaacaggatgaagcgctcgacagccaccgcaagctgagtcattacttcagcgatgtcggcttctaccaggcggcgattccgacctattacggcggcattatgaccttcgcctgggcgacggacaacggcgctcttcgtcacctgtcgagcgaaattattcaggcgcgttttcatgccgccggccttaaatgtcgctattacaacccggctattcatgccgctgcatttgcgctaccgcaatatctacatgacgcactgtccgcacagtga

SEQ ID NO: 154822 - protein, 286 aa, Salmonella enterica subsp. enterica serovar Newport str. SL254
MAENTMWHETLHDQFGQYFAVDNVLYHEKTDHQDLIIFENAAFGRVMALDGVVQTTERDEFIYHEMMTHVPLLAHGHAKHVLIIGGGDGAMLREVTRHKNVETITMVEIDAGVVSFCRQYLPNHNAGSYDDPRFTLVIDDGVNFVNQTHQTFDVIISDCTDPIGPGESLFTSAFYEGCKRCLNPGGIFVAQNGVCFLQQDEALDSHRKLSHYFSDVGFYQAAIPTYYGGIMTFAWATDNGALRHLSSEIIQARFHAAGLKCRYYNPAIHAAAFALPQYLHDALSAQ

SEQ ID NO: 154823 - DNA, 870 bp, Francisella novicida GA99-3549
  CDS (1)..(870): transl_table=11
atgatagctaatattaacaataaaaaaatatttcatgaaactttgtaccatagttatcaccaaagtatagcaatttctgaaatattgtatgaacataaaacagattaccaacatctaataatttttaataatccaatttttggtaatgtcatggtcttggatggtattgtacagactactgaaaaagatgagtttatttatcatgaaatgttagtgcatgtgccagttatcgcgcatgggaatgttaaaaacatattaattattggtggcggcgatggtggtatgcttagggaagctcttagtcataaagctgtcgaatctgtaacactagttgaaattgaccaagctgttatagatatgtgccaagagtactttccagggcattcaaaaggtgcttttgatcatcctaaagcgaaaatagttattcaagatggttgtgaatttgtcaaaaatccgcctaggaaatatgatttgattatttgtgatagtactgatccgattggcccaggagaggttttatttacctcaaaattttataaagactgtaaagaagctctaaatccaggtggtataatggtaacccaaaatggagtaatctactttcaaatagatgagttaaagaaaactcttgagcgctttgaaccattatataaagatgtttctttttatactgcagcagttccaacatatgtcggtggaagtatggcatttggttggggcactgatgaattatcctatcgtaatcacgatattcaagtaattgcacagagatttcttaagagcggtattaaaacaaaatactacaatccagctatacatattgctgcttttgctttaccacaatatgttatagatactctaaagaagtaa

SEQ ID NO: 154824 - protein, 289 aa, Francisella novicida GA99-3549
MIANINNKKIFHETLYHSYHQSIAISEILYEHKTDYQHLIIFNNPIFGNVMVLDGIVQTTEKDEFIYHEMLVHVPVIAHGNVKNILIIGGGDGGMLREALSHKAVESVTLVEIDQAVIDMCQEYFPGHSKGAFDHPKAKIVIQDGCEFVKNPPRKYDLIICDSTDPIGPGEVLFTSKFYKDCKEALNPGGIMVTQNGVIYFQIDELKKTLERFEPLYKDVSFYTAAVPTYVGGSMAFGWGTDELSYRNHDIQVIAQRFLKSGIKTKYYNPAIHIAAFALPQYVIDTLKK

SEQ ID NO: 154825 - DNA, 858 bp, Oligotropha carboxidovorans OM5
  CDS (1)..(858): transl_table=11
atgaccatttttcaggagacgatgtatcaaggtcatgcgcaggctctcaccgtcgaggagaccttgtatcagggccgcaccgactatcaggacgttctgatcttcaggaacgagacgttcggcaatgtcatggcgctcgatggcgtcgtgcaactgaccgatctcgacaatcacgtctatcacgagatgatggctcatgtgccgctgaccgcacatggtgccgcgaaagacgtgctggtcatcggcggcggcgacggcggaacgttgaaggaggttctcaagcaaccggtcgacaatgcggtgctggtcgagatcgacccgcaggtcatcgaattgtcgaagcgctattttcccgccgtgtcggcaggcgcattcgatgatccgcgcgtctcggtgcggatcgaggacggactcaaatacgtcgccaatgccgaccggcaattcgatgtggtgatcatcgattcaaccgacccggtgggccccggtgaggcgctgttctccgatgcgttctatgccaactgccgcgccttgctgcgcgcgggtgggctggtggttctgcaaagcggcacgccgtttttccggcccgccgacctcgatcaaatttgccggcggctcggcgtgcatttcggtgcggcaaagcctttcctcgccccggtcccgacctacgcccacggccaactcgcgctgattgccgcaggcccatcggctgctgccctgtgcccgccgctggcaacgctcgatgagcggtttgcgcccatcaacagcaggctgcgatattattcgccgcaggttcatcatgcggccttcacgctcgctccggcgctccggaagagcgtcacagcagacaatgctcagtga

SEQ ID NO: 154826 - protein, 285 aa, Oligotropha carboxidovorans OM5
MTIFQETMYQGHAQALTVEETLYQGRTDYQDVLIFRNETFGNVMALDGVVQLTDLDNHVYHEMMAHVPLTAHGAAKDVLVIGGGDGGTLKEVLKQPVDNAVLVEIDPQVIELSKRYFPAVSAGAFDDPRVSVRIEDGLKYVANADRQFDVVIIDSTDPVGPGEALFSDAFYANCRALLRAGGLVVLQSGTPFFRPADLDQICRRLGVHFGAAKPFLAPVPTYAHGQLALIAAGPSAAALCPPLATLDERFAPINSRLRYYSPQVHHAAFTLAPALRKSVTADNAQ

SEQ ID NO: 154827 - DNA, 861 bp, Klebsiella pneumoniae 342
  CDS (1)..(861): transl_table=11
atggccgataatccactgtggcatgaaacgctgcatgaccattttggtcagtactttagcgttgataacgtgctgtaccacgaaaaaaccgatcatcaggatttgatcatcttcgacaaccgcgcctttggccgggtgatggcgctggatggcgtcgtgcaaaccaccgaacgcgatgagtttatctatcacgaaatgatgacccacgtgccgctgctggcccacggcaacgcgaagcatgtcctgatcatcggcggcggcgacggcgcgatgctgcgcgaagtctctcgtcaccgtagcatcgaaaccatcaccatggtggaaatcgatgccggggtggtctcattctgccgtcagtacctgcccaaccatagcgccggggcctacgacgatccgcgcttcacgctggtgattgatgatggcgtcaattttgttaaccagacgacgcaaacgtttgacgtgatcatttcggactgtaccgaccctatcggtccgggcgaaagcctgttcacctcggctttttatgaaggctgcaaacgctgcctgaacccggggggcgtgttcgttgcccaaaacggcgtttgtttcctgcagcaggacgaagcggtcggtagccatcgcaaactgagccactattttcgcgacgtcagcttctatcaggcggccatcccaacctattacggcgggatcatgacttttgcctgggcgagcgacaacgaggcgttgcgccatctctccagcgaaatcattcaggcgcgctttcacaaagccaacctgacctgccgttactacaatccggcaatccatacggcggccttcgccttaccacaatatctgcatgatgctctgtccgcaccgtga

SEQ ID NO: 154828 - protein, 286 aa, Klebsiella pneumoniae 342
MADNPLWHETLHDHFGQYFSVDNVLYHEKTDHQDLIIFDNRAFGRVMALDGVVQTTERDEFIYHEMMTHVPLLAHGNAKHVLIIGGGDGAMLREVSRHRSIETITMVEIDAGVVSFCRQYLPNHSAGAYDDPRFTLVIDDGVNFVNQTTQTFDVIISDCTDPIGPGESLFTSAFYEGCKRCLNPGGVFVAQNGVCFLQQDEAVGSHRKLSHYFRDVSFYQAAIPTYYGGIMTFAWASDNEALRHLSSEIIQARFHKANLTCRYYNPAIHTAAFALPQYLHDALSAP

SEQ ID NO: 154829 - DNA, 915 bp, Dictyoglomus thermophilum H-6-12
  CDS (1)..(915): transl_table=11
atggatgcttattggattattgaaaaaaaccatcctagtgagatacattggcatggagtaagcaggttttattatactggtgtttcgccatttcaaaagatagaggtcattgagagtagcttttatggcaaatgtctcgtgttagatggaagaattcagtctagtgagaaagatgagtttatttatcacgaggcattagtgcatcctgctttattgttgaataactctaatagaaaaaaagtattaataatgggaggaggagaaggagctacattaagagaggttttacggcataaagatgtagaagaggctataatggtggatatagatggtgaggtagtcgaagtctcgaaggaataccttcctgaatggcatcagggagcctttgaagatccaagaacaaaattatacataactgatgcaagggaatttgtagaaagagctgaagaaaaatacgatgtaataataagtgatttatcagagcctatggaaggtagtcctgccgtaaaattgttcacttatgagttttataatattataaaggagcatttgaaagaagatggagtatttgtaatgcaggcaggtacaactcaccatcttaagatattttttcatgctgcaatgagttctactttacgtagggtatttaaaatagtaagatcctatcaggcttacgtaccagcctatgactttatttggagttttatatgggcaagtgataaaatagatccaaagaatttcagtgaggaggatataaataatttaattaaagcaaaaggtttagaaaatttgaggttttatgatggagaagcgcataagatgatgttttctcttccaaaacacattagagaattaatagaaagagaagaaaaagtagcttatgatagcgctcctctatatgcggtagaggattaa

SEQ ID NO: 154830 - protein, 304 aa, Dictyoglomus thermophilum H-6-12
MDAYWIIEKNHPSEIHWHGVSRFYYTGVSPFQKIEVIESSFYGKCLVLDGRIQSSEKDEFIYHEALVHPALLLNNSNRKKVLIMGGGEGATLREVLRHKDVEEAIMVDIDGEVVEVSKEYLPEWHQGAFEDPRTKLYITDAREFVERAEEKYDVIISDLSEPMEGSPAVKLFTYEFYNIIKEHLKEDGVFVMQAGTTHHLKIFFHAAMSSTLRRVFKIVRSYQAYVPAYDFIWSFIWASDKIDPKNFSEEDINNLIKAKGLENLRFYDGEAHKMMFSLPKHIRELIEREEKVAYDSAPLYAVED

SEQ ID NO: 154831 - DNA, 870 bp, Gluconacetobacter diazotrophicus PAl 5
  CDS (1)..(870): transl_table=11
atgaccgaagcatggatcggcgaaacactctatgacggctggcagcagcgcttccgggtccgcaccgagctggcccgcaccaggagcgcgttccaggatatcgtggttttcgaaagcgagacgcatggccgcgtcctcgtgctggacggcgtgatccagatcaccgagggtgacgagttcgtctatcaggaaatgctgacccacgtgccgctgctggcccacggcaacgccgccagcgtgctgatcatcggcgcgggtgacggcggcgtgctgcgccgggtgctgcagcatcgcggcgtgacccgggcggtgatggtggaaatcgacggcgaggtgatcgcgctgtccaagcagttcctgcccggcattgccggcgacgcctggaccgacccccgcgccgaggtgatcgtgggcgacggcatcgactacgtcgcgcgcgccgaaaccggatcggtcgatgtgatcatcgtcgatagcaccgacccgatcggcgtgggcgaggtgctgtttaccgattcgttctacgaacattgcgcgcgcatcctgacgccgaacggcatcatcgtgaatcagtgcggcgtgcccttcatgcaggccgacgaactgcgcgacaccagcctgcgccgcgcgcggttcttcccgcacgtgtcggcctatgtcgcggcggtgccgacctatgtcggcgggttcatgacgctgggcgtcgcggcgaaaggcacgaatccggccacaccgtcggtcgagacgattcgcgcccgggccgaggcggcgggcatcctggggaccaccggctactggacgccggaaatccacaccggcgccttcaacctgccgccctatatcgcgaagcacctgcccgcggcgaagtaa

SEQ ID NO: 154832 - protein, 289 aa, Gluconacetobacter diazotrophicus PAl 5
MTEAWIGETLYDGWQQRFRVRTELARTRSAFQDIVVFESETHGRVLVLDGVIQITEGDEFVYQEMLTHVPLLAHGNAASVLIIGAGDGGVLRRVLQHRGVTRAVMVEIDGEVIALSKQFLPGIAGDAWTDPRAEVIVGDGIDYVARAETGSVDVIIVDSTDPIGVGEVLFTDSFYEHCARILTPNGIIVNQCGVPFMQADELRDTSLRRARFFPHVSAYVAAVPTYVGGFMTLGVAAKGTNPATPSVETIRARAEAAGILGTTGYWTPEIHTGAFNLPPYIAKHLPAAK

SEQ ID NO: 154833 - DNA, 963 bp, Anoxybacillus flavithermus WK1
  CDS (1)..(963): transl_table=11
atgactattgcaattttttcacctgttgttctcaccctttgcaaactcatgcacaaatgtattaatataaaaaaggtgcaaaatacattgttagaggaggaagctatgaactacataaaagagcaaaatggacagctatggttaacagaagatgagcgtgagaatttaaaaattagttatcgtattaaagagatcatttactcagaacgttcaccatttcaacatgtgatgattttagactcatacgactttggaagaatgcttgtgcttgatggagttgtacaaacaacttctattgatggacatatttacaatgagatgattacacatgttcctctttctcttcatccgtcgccaaagaaagttttaattattggtgggggcgattgtggggcagctcgtgaagtggcgaaatatgaagaggtagaagaaatccatctcgtcgaaattgatgaacttgttgttcaagcatgtaaagaacatttacctgaagtatctggaaatctttccgaccctcgtgtacagtatgtatataaagatggggttcaatttgtgaaagatcatatgaatacgtacgatgtcattatcatcgactcgtctgatcctattggccctgcccaagtattatttgaatacgatttttataaaagtgtgcatgaagcgctcaaagaagatggaataatggtttgtcaaagccaatcgccgattttccatatggacgtattgaaacaaacatatgcaaatattcgtcatttattcccacacgtttacgtatatacggctactgttccaacgtatcctggtgggctatggagcttcactcttggcgcaaaacagcctgttttatttgaacgactcaacacgtttgcaaagcaaacaaaatacgcaaatgctgatatactaaatcaatgcttctaccttccacaattcatgaaagaacagttacaaccgcagtcgaaatga

SEQ ID NO: 154834 - protein, 320 aa, Anoxybacillus flavithermus WK1
MTIAIFSPVVLTLCKLMHKCINIKKVQNTLLEEEAMNYIKEQNGQLWLTEDERENLKISYRIKEIIYSERSPFQHVMILDSYDFGRMLVLDGVVQTTSIDGHIYNEMITHVPLSLHPSPKKVLIIGGGDCGAAREVAKYEEVEEIHLVEIDELVVQACKEHLPEVSGNLSDPRVQYVYKDGVQFVKDHMNTYDVIIIDSSDPIGPAQVLFEYDFYKSVHEALKEDGIMVCQSQSPIFHMDVLKQTYANIRHLFPHVYVYTATVPTYPGGLWSFTLGAKQPVLFERLNTFAKQTKYANADILNQCFYLPQFMKEQLQPQSK

SEQ ID NO: 154835 - DNA, 891 bp, Anoxybacillus flavithermus WK1
  CDS (1)..(891): transl_table=11
atgtttagcattttattttttgggcatgataagcggtgcattattgacgaaagggtgttcaatatggaactttggtttactgaaaaacagacggacaactttgggattacagcacgaattaaacgcactttacatacagagcaaacggaattccaaaagctcgatatggtggaaacagaagaattcgggaacatgcttattttagacggaatggtgatgacaacgcaaaaagatgagttcgtctatcatgaaatggttgcgcacgttccgctatttacgcatccgaatccagaaaacgttcttgtcgttggcggtggagacggcggcgtcattcgcgaagtgttaaagcatccaagcgtgaaaaaagcgacgcttgttgaaattgacggaaaagtcatcgagtattcgaaaaaatatttgccagaaatcgctggtcaattagacgatccccgtgttgaagtgaaagtggacgacggctttatgcacattgcgcaaagcgaaaacgaatacgacgtcattatggttgactcgacagagccagtcggtccagcggtcaatctatttacaaaagggttttatgcaggcattgcgaaagcgttaaaagacgacggcatttttgttgcgcaaacagacaatccgtggtttaaagcggatttaattcgcactgttcaacgcgatgtgcgcgaaattttcccgattacacgtctatatatcgcgaacattccaacgtatccgagcggcatgtggacgtttacactcggttcgaaaaaatatgatccgcttgaagtaagcgaagagcgcttccacgacattgaaacgaaatactatacaaaacagcttcataaagcgtgcttcgtattgccgaaatttgttgaagacttagtgaagtaa

SEQ ID NO: 154836 - protein, 296 aa, Anoxybacillus flavithermus WK1
MFSILFFGHDKRCIIDERVFNMELWFTEKQTDNFGITARIKRTLHTEQTEFQKLDMVETEEFGNMLILDGMVMTTQKDEFVYHEMVAHVPLFTHPNPENVLVVGGGDGGVIREVLKHPSVKKATLVEIDGKVIEYSKKYLPEIAGQLDDPRVEVKVDDGFMHIAQSENEYDVIMVDSTEPVGPAVNLFTKGFYAGIAKALKDDGIFVAQTDNPWFKADLIRTVQRDVREIFPITRLYIANIPTYPSGMWTFTLGSKKYDPLEVSEERFHDIETKYYTKQLHKACFVLPKFVEDLVK

SEQ ID NO: 154837 - DNA, 900 bp, Thermosipho africanus TCF52B
  CDS (1)..(900): transl_table=11
atgtccgaaaaaaaaataatcgatggaatgcaatatggctttgtacctaatagacatctctggtactttgaatattacactccaggtaattgtggtattttcatgaaaatgaataaacatctttatagtgcacaaagtaaatatcaaagaatagatattttcgaaacggatttctttggtagagtcttttcattagatggaattacaatgactacagaaaaggatgactttttctaccacgaaatgctagttcatgtaccaatgttcatgcatccaaacccaaaaaaggtattagtaattggtggcggtgacggtggaagtgtaagagaagtattgaaacacaaaagtgtagaaaaagttataatgtgtgaaattgacgaaatggttgtcgaagcagcaaaaaaatatcttcctgtcacagcttcaaaattggatgacccaagggtagaacttgtctttgaagatggttctcaatttgtaaggaattttaaaaatgaatttgatgtaattataattgattcaacagatccaacagcaggtgaaggagggcacctatttactgaagatttttacaaagcatgttttgatgctctcaaggaaaatggtactttttctgctgaatcagaagattggttatatgatggtgcatggttaagacttgcatattctagaataaagaaagtattccctgttacaaaactataccttggatttatgccaacttatccaagtggtatgtggggttacacatttgcatcaaaaggagttgatcctattaaagattttgatcctgaaaaagttaagaactttggcgaagaattaaaatattacaacgaagaaattcataaagctgcatttgccttgccaactttcttaaaaaaggaattagagaatttataa

SEQ ID NO: 154838 - protein, 299 aa, Thermosipho africanus TCF52B
MSEKKIIDGMQYGFVPNRHLWYFEYYTPGNCGIFMKMNKHLYSAQSKYQRIDIFETDFFGRVFSLDGITMTTEKDDFFYHEMLVHVPMFMHPNPKKVLVIGGGDGGSVREVLKHKSVEKVIMCEIDEMVVEAAKKYLPVTASKLDDPRVELVFEDGSQFVRNFKNEFDVIIIDSTDPTAGEGGHLFTEDFYKACFDALKENGTFSAESEDWLYDGAWLRLAYSRIKKVFPVTKLYLGFMPTYPSGMWGYTFASKGVDPIKDFDPEKVKNFGEELKYYNEEIHKAAFALPTFLKKELENL

SEQ ID NO: 154839 - DNA, 867 bp, Escherichia fergusonii ATCC 35469
  CDS (1)..(867): transl_table=11
atggccgagaaaaaacagtggcatgaaacgctacacgaccagtttgggcagtactttgcggtagataacgttctgtatcatgaaaagaccgatcaccaggatctgatcatttttgagaacgctgcatttggccgcgtaatggcgctggatggcgtagtacaaaccaccgagcgcgacgagtttatctatcatgagatgatgacccacgttccgctattagcccacggtcacgcgaaagatgtgctgattatcggcggcggcgacggtgccatgctgcgtgaagtgacccgacataaaaacgttgagtcaatcacgatggtggaaatcgatgcgggtgtcgtgtcgttctgccgtcagtatctgcccaaccataacgccggtagctacgacgatccgcgctttaaactggtgatcgacgatggcgtcaatttcgttaatcaaaccagccagacctttgatgtcattatctccgactgcaccgatcctatcggtcccggcgaaagtctgttcacctcagcattttatgaaggctgcaaacgttgcctgaatcctggcggtatcttcgtcgcacaaaacggcgtctgctttttacagcaggaagaggctatcgacagtcatcgcaaactcagcaattattttagcgatgtcggcttttatcaggcggcaatcccgacctattacggcggcatcatgacctttgcatgggcgacagataacgacgccttacgccatctctcaagcgaaattattcaggcgcgttttctcgcttctggcctgaaatgccgttattacaatccggcagtccatacggcagcttttgccttacctcagtatctgcaagacgcactggcctcacagccgtcctaa

SEQ ID NO: 154840 - protein, 288 aa, Escherichia fergusonii ATCC 35469
MAEKKQWHETLHDQFGQYFAVDNVLYHEKTDHQDLIIFENAAFGRVMALDGVVQTTERDEFIYHEMMTHVPLLAHGHAKDVLIIGGGDGAMLREVTRHKNVESITMVEIDAGVVSFCRQYLPNHNAGSYDDPRFKLVIDDGVNFVNQTSQTFDVIISDCTDPIGPGESLFTSAFYEGCKRCLNPGGIFVAQNGVCFLQQEEAIDSHRKLSNYFSDVGFYQAAIPTYYGGIMTFAWATDNDALRHLSSEIIQARFLASGLKCRYYNPAVHTAAFALPQYLQDALASQPS

SEQ ID NO: 154841 - DNA, 867 bp, Escherichia coli ED1a
  CDS (1)..(867): transl_table=11
atggccgaaaaaaaacagtggcatgaaacgctacacgaccagtttgggcagtactttgcggtagataacgttctgtatcatgaaaagaccgatcaccaggatctgatcatttttgagaacgccgcatttggtcgcgtaatggcgctggatggtgtagtacaaaccaccgagcgtgacgagtttatctatcatgagatgatgacccatgttccgctactggcccacggtcacgcgaaacatgtgctgattatcggcggcggcgacggtgccatgctgcgtgaagtaacccgacataaaaacgttgagtcaatcacgatggtggaaatcgatgcgggtgtcgtgtcgttctgccgtcagtatcttcccaaccataacgccggtagttacgacgatccgcgctttaaactggtgatcgacgatggtgtcaatttcgttaatcaaaccagccagacctttgatgtcattatctccgactgcaccgatcctatcggtcccggcgaaagtctgtttacttctgcattttatgaaggctgcaaacgttgcctgaatcctgccggtatcttcgtcgcacaaaacggcgtctgctttttacagcaggaagaggccatcgacagccatcgcaaactcagccattacttcagcgatgttggcttttatcaggcggcgatcccgacctattacggcggcatcatgacctttgcatgggcgacagataacgacgccttacgccatctctcaaccgaaattattcaggcgcgttttctcgcttctggcctgaaatgccgttattacaatccggcagtccatacggcagcttttgccttaccccagtatctgcaagatgcactggcttcacagccgtcctaa

SEQ ID NO: 154842 - protein, 288 aa, Escherichia coli ED1a
MAEKKQWHETLHDQFGQYFAVDNVLYHEKTDHQDLIIFENAAFGRVMALDGVVQTTERDEFIYHEMMTHVPLLAHGHAKHVLIIGGGDGAMLREVTRHKNVESITMVEIDAGVVSFCRQYLPNHNAGSYDDPRFKLVIDDGVNFVNQTSQTFDVIISDCTDPIGPGESLFTSAFYEGCKRCLNPAGIFVAQNGVCFLQQEEAIDSHRKLSHYFSDVGFYQAAIPTYYGGIMTFAWATDNDALRHLSTEIIQARFLASGLKCRYYNPAVHTAAFALPQYLQDALASQPS

SEQ ID NO: 154843 - DNA, 939 bp, Thermomicrobium roseum DSM 5159
  CDS (1)..(939): transl_table=11
ttgattgacggtgggctctggcataccgatgatccggaagtcccgagccagcgggtcttcctgcaggtgagggatgttctgtaccgcggcacatctccgttccaagagatcgcggtcatcgagaccgtgctcttcggccgtgccctggtactcaacaacgtgctccagactgcggagcgcgacgaattctgctaccacgaaatgctcgtgcatccggtgatgatcgcccacccggcaccgcgccgggtgctgatcatcggcgggggtgatggtggtgccttgcggcgggtactccagcaccccgtcgagcaggtcacgatggtcgagatcgaccagcaagtcgtcgaggcctgccgcgagcatctctggaacattcatcgcggtgcctttgatgatccccgcgtggagctccgtttcgaggacggttttgcctacgtcgagcggcgttcggcgaccttcgacatcatcatcgtcgatggccccgatccgctcggcccgacaccgggtatggttctcttctcgccggatttctaccacgggctcgccgacatgctggccccaggggggctggtcgtgcagcagaccgagtcaccgatgctgctgccgatccagaccgcagccacgcatctccatttgcgtgaggtgctgcctattgtccgcacctatttgacgacagtgcaatcgtacgatagtttctggagtttcacggtcgcctcgcgcgatgtcgatccggccgctctcgacatcgagacggtcgccgctcgtcttcgggagcgcggcatcgacgattgtcagtactactctccggaaatccactgggcggctttccgtctaccgccgttcctgcgccgcttcatcgaggactcgatcgctctcgggcgtccggctgattctcacccgttgttgccggaagctgcggcccggcgagcgaccgcgtga

SEQ ID NO: 154844 - protein, 312 aa, Thermomicrobium roseum DSM 5159
MIDGGLWHTDDPEVPSQRVFLQVRDVLYRGTSPFQEIAVIETVLFGRALVLNNVLQTAERDEFCYHEMLVHPVMIAHPAPRRVLIIGGGDGGALRRVLQHPVEQVTMVEIDQQVVEACREHLWNIHRGAFDDPRVELRFEDGFAYVERRSATFDIIIVDGPDPLGPTPGMVLFSPDFYHGLADMLAPGGLVVQQTESPMLLPIQTAATHLHLREVLPIVRTYLTTVQSYDSFWSFTVASRDVDPAALDIETVAARLRERGIDDCQYYSPEIHWAAFRLPPFLRRFIEDSIALGRPADSHPLLPEAAARRATA

SEQ ID NO: 154845 - DNA, 891 bp, Thermotoga neapolitana DSM 4359
  CDS (1)..(891): transl_table=11
atgtgtgaattgaaagaactggaaagagaacttcagccaagacagcacctctggtacttcgaatactacacgggaaacaacgtggggcttttcatgaagatgaaccgcgtgatttactcaggacagagcgacatacagaggatcgacatctttgaaaaccccgatctcggtgtagtcttcgcactcgatggcatcacgatgacaacagagaaagacgagttcatgtaccacgagatgctcgcacacgttcccatgttccttcatcccaacccgaagaaggtgctcatcatcggtggaggagacggaggaacactcagagaagtcttaaagcacgatagtgtggaaaaggcgattctctgtgaggtcgatggcctcgtcatagaagcggcgaggaaatatctgaaacagacctcctgtggtttcgacgatcccagagcggagatcgtgatagcgaacggtgccgaatacgtgaggaagttcaaaaacgagttcgacgtcatcatcatagactccacggacccgacggcgggtcagggcgggcacctcttcaccgaggagttctaccaggcctgctacgacgcattgaaggaagacggagtcttctctgcagaaacggaggatccgttctacgacattggatggttcaaactcgcctacaagaggatcagcaaggtctttcctatcacgaaggtttaccttggtttcatgaccacctatccctccggcatgtggtcctacaccttcgcctccaagggaatagacccgataaaagacttcgacccggaaaaggtgagaaagttcaacaaagaactgaagtactacaacgaagaagtccacgttgcctcctttgccctcccgaatttcgtgaagaaagaactcggactgatgtga

SEQ ID NO: 154846 - protein, 296 aa, Thermotoga neapolitana DSM 4359
MCELKELERELQPRQHLWYFEYYTGNNVGLFMKMNRVIYSGQSDIQRIDIFENPDLGVVFALDGITMTTEKDEFMYHEMLAHVPMFLHPNPKKVLIIGGGDGGTLREVLKHDSVEKAILCEVDGLVIEAARKYLKQTSCGFDDPRAEIVIANGAEYVRKFKNEFDVIIIDSTDPTAGQGGHLFTEEFYQACYDALKEDGVFSAETEDPFYDIGWFKLAYKRISKVFPITKVYLGFMTTYPSGMWSYTFASKGIDPIKDFDPEKVRKFNKELKYYNEEVHVASFALPNFVKKELGLM

SEQ ID NO: 154847 - DNA, 963 bp, Diaphorobacter sp. TPSY
  CDS (1)..(963): transl_table=11
atgagcggcgccctcaccgcgcaggccacgcgctacgtggccgagcgcctgaacgccgacttcggcttttacctcagcgaccgccgcctgctggccgaacgccagtcggcctggcagcacatcgaggtcttcgacaacccgcagttcggccgcgtgatgcgcatcgacggctgcttcatgaccagcgagcgcgacgaattcttctaccacgagccgatggtgcacctgccggccatcgcccaccccggcgtgcgccgtgcgctggtcgtgggcgggggagacggcggcgccgccaaggagttgctgaagctgcccggcgttgagcaggtggtgctggccgagctggatggcgaggtgattgccatggcccgcgattggctgggccagatccaccgtggcgcctttgacgacccgcgcctggaggtgcgcctgggcgacgcgcgcgccttcatcggccagaccgaggagcgcttcgaccagatcgtcctggacctgaccgaccccttcggccctgccgtggagctgtacaccgtggagttctacgccgcctgccgccgcgcgctcaaccccggcggcgtgctgtcgctgcacctgggctcgcccgtgcacttgcccgagagcctggggcgcatcgccgcctcggtgcgcgcggtgttccccatcttccggccctacctgcagtacgtgccgctgtacggcacgctgtggtgcatgggcatggcatcggacagcacggaccccgcccggctcagcgccgacgaggtggacgcacgcatcgccgcgcgcggcctgggcgatctgcagctgtacaacggggccgtgcaccacgcgctgctggcacagccgaacttcgtgcgtgcgctgctggatcggcctgcgctgccgctgcacagcggggatgtgctggaagaggtgcgggacccggcggagttgccgcaggtggtggtgtccgctgccgcgtaa

SEQ ID NO: 154848 - protein, 320 aa, Diaphorobacter sp. TPSY
MSGALTAQATRYVAERLNADFGFYLSDRRLLAERQSAWQHIEVFDNPQFGRVMRIDGCFMTSERDEFFYHEPMVHLPAIAHPGVRRALVVGGGDGGAAKELLKLPGVEQVVLAELDGEVIAMARDWLGQIHRGAFDDPRLEVRLGDARAFIGQTEERFDQIVLDLTDPFGPAVELYTVEFYAACRRALNPGGVLSLHLGSPVHLPESLGRIAASVRAVFPIFRPYLQYVPLYGTLWCMGMASDSTDPARLSADEVDARIAARGLGDLQLYNGAVHHALLAQPNFVRALLDRPALPLHSGDVLEEVRDPAELPQVVVSAAA

SEQ ID NO: 154849 - DNA, 837 bp, Anaerocellum thermophilum DSM 6725
  CDS (1)..(837): transl_table=11
ttggctgagatggaactttggtttaccgagcaacagactcctgacttgggatttacatgcaagataacaaaaaccatctacacagcaaagactcaataccaagacttagcaatacttgaaacaaaacagtttggcaggatgcttgtactggacggtgctgttcagacaacaattgcagatgaattttgttaccatgagttaatttctcatgttcctttattcacccatccaaatcccaaaaaggttgctgtcataggtgggggagacggaggagttattagagaaattctcaaacatgacgaggttgaaaaggcatatttaatagagattgatagagaagttatagaagcaagcaagaaataccttcctgagataagttgtgcgcttgatgatgaaagggcagaggtcattataaccgatggaataaaatttgtatccgagaacaaaaatatgtttgatgttataattgtggattcaacagaccctgttggtcctgcagtgggactttttcaagatagtttttataaggcagtgtttgaatgcttaaaagaagatgggctttttgttgcacagaccgagtcgcctttttatgatcaggacctgataaaaaatgtatttcacgctgtgaagtccattttcccaataacaagactttatcttggatttattccaacgtatccgagcggactttggagttttactcttggttctaaaaagtatgacccacttgaggtagatgtttcaaggataaaaaggattgatacaaagtattacaatccagagttgcataaagctctatttgcactgccaacttttgttcaagaaattataaagtaa

SEQ ID NO: 154850 - protein, 278 aa, Anaerocellum thermophilum DSM 6725
MAEMELWFTEQQTPDLGFTCKITKTIYTAKTQYQDLAILETKQFGRMLVLDGAVQTTIADEFCYHELISHVPLFTHPNPKKVAVIGGGDGGVIREILKHDEVEKAYLIEIDREVIEASKKYLPEISCALDDERAEVIITDGIKFVSENKNMFDVIIVDSTDPVGPAVGLFQDSFYKAVFECLKEDGLFVAQTESPFYDQDLIKNVFHAVKSIFPITRLYLGFIPTYPSGLWSFTLGSKKYDPLEVDVSRIKRIDTKYYNPELHKALFALPTFVQEIIK

SEQ ID NO: 154851 - DNA, 861 bp, Alcanivorax sp. DG881
  CDS (1)..(861): transl_table=11
atgagcagcaccaaagacaactggttttacgagcacttcgacaccgccggcaccgccttcggcctgcgcctcaaacaaaagctggaagaagtgcaaaccgagtaccagcacatcgagatgtgggaaaccgacaccttcggttacctgatgaccattgatggcgccaccatgctctccacccgcgacaacttcctctaccacgagatgatgtcgcacccggtgctgttcagccacgccaaccccaagcgcgtcatcatcatcggcggcggcgactgcggcaccctgcgtgaagtgctacgccatcccagcgtggaaaaagccacccagatcgacatcgatgaaatggtcacccgctactccgagaaatacttcccggaactgtgcgagtccaacggcgacagccgtgccgaactgctgttcgaagacggcgtgcaatacatgcgcaactgtgaagacggcagcgtggacgtgatcatcgtggattccaccgacccggtgggcccggcggaaggcctgttcaaggcggacttcttccgcgattgccaccgcgtcctggccgaaggcggtatcatcgtgcagcaatccgaatcgccgctgctgcacagcgataccatcatcaaggacctgcacgccaacatgcgcgaagcgggcttcaccagcacccagaccctgcccttcccgcagccggtatatcccagcggctggtggagctgcaccctggcgggcaagaacacggatgtaagtgaattccgggaaaccgatgccaccgggaaaggatttgatacccgttattattcagcggcgattcataaaggggcgctggttttgccgccgtttatggaggcggcgataaaaggctga

SEQ ID NO: 154852 - protein, 286 aa, Alcanivorax sp. DG881
MSSTKDNWFYEHFDTAGTAFGLRLKQKLEEVQTEYQHIEMWETDTFGYLMTIDGATMLSTRDNFLYHEMMSHPVLFSHANPKRVIIIGGGDCGTLREVLRHPSVEKATQIDIDEMVTRYSEKYFPELCESNGDSRAELLFEDGVQYMRNCEDGSVDVIIVDSTDPVGPAEGLFKADFFRDCHRVLAEGGIIVQQSESPLLHSDTIIKDLHANMREAGFTSTQTLPFPQPVYPSGWWSCTLAGKNTDVSEFRETDATGKGFDTRYYSAAIHKGALVLPPFMEAAIKG

SEQ ID NO: 154853 - DNA, 828 bp, Picrophilus torridus DSM 9790
  CDS (1)..(828): transl_table=11
atgagattaatagaaaactggttttcagagaggtattcagataatctgcagctgtcctttagggttcaggatcagcttctatcggttaagacagattatcagagaatagacctttttaatacatacgatttcggaaagcttctttctatagatggtacggttcagctgacggaaaaggatgagtacatttaccacgagatgataacaatggttccgtactattgcaccgcaaaatctgacagcgcccttataataggtggtggtgatggtggtgctgccaagaggcttatagaccttggaataaagaggattgtaaacgttgaaatagaccagaacgttgttgaaatatcaaggaagtactttccggagctggcagattcatttaataataaaaacgttgagcttataataggggatggaataaaatatgtaaaggatacagacgaatcatttgatttaattataatagattcaacagatccggttggtccagcagagggtcttttcaataaatcattctatgaaaatgcaagggccaggcttagcgatgatggtataatagtaacccagtcagggtcaccatattaccagccagaggcacttaaaatggccaccaaaggaatgcttgatgtctttagcaacgtaagaacctacatagcatttataccaacgtatccaagcggtctctggtcatttaccatggcatcaaaatctgaaataatgcaaagaaaggataatatcattcctggaagatatttcaatgaggatgttttaaaaggatcattttaccttcctgaattcgtcaagaatataataaaatctatttaa

SEQ ID NO: 154854 - protein, 275 aa, Picrophilus torridus DSM 9790
MRLIENWFSERYSDNLQLSFRVQDQLLSVKTDYQRIDLFNTYDFGKLLSIDGTVQLTEKDEYIYHEMITMVPYYCTAKSDSALIIGGGDGGAAKRLIDLGIKRIVNVEIDQNVVEISRKYFPELADSFNNKNVELIIGDGIKYVKDTDESFDLIIIDSTDPVGPAEGLFNKSFYENARARLSDDGIIVTQSGSPYYQPEALKMATKGMLDVFSNVRTYIAFIPTYPSGLWSFTMASKSEIMQRKDNIIPGRYFNEDVLKGSFYLPEFVKNIIKSI

SEQ ID NO: 154855 - DNA, 864 bp, Pectobacterium atrosepticum SCRI1043
  CDS (1)..(864): transl_table=11
atgtcccagaaagaaatttggtatgaaaccctgcatgccaactttggtcagtatttttcggtcgatcgcgtgctatatcacgagaagaccgatcatcaagatctcatcatctttgaaaacgatgcattaggccgcgtgatggcgcttgacggcgtggtgcaaaccaccgaacgcgatgagttcatctatcacgaaatgctcacccacgtccctcttctgtcacacggcaacgccaaacgcgtactgattatcggtggcggcgatggcggcatgctgcgggaagtcagccgacaccacggcgtcgaacaaatcacgatggtggaaatcgatgctggcgtggtggaattttgtcgccagtatttgcccaaccacagcgccggtagctatgacgatccgcgttttaatctggtgattgatgacggcgttaacttcgtcagacagtgcagcgaaaagtttgacgtcataatttccgattgcaccgaccccatcggccccggcgaaagcctgttcacctcagatttctatcagggttgtgcccgcagtctgaacgaaggcgggatttttgtcgctcagaatggcgtgtgtttcctgcaacaggatgaagccatcggcagccataaaaaactcagccactatttcaatgatgtcagcttttatcaggccgcaatcccgacttactacggcggcattatgactttcgcctgggccagcaataacccggcgctgcgccagatggacatcgtaactctgcgccaacatttcgcgcaatcaggcatcacctgtcgctattacacacctgatgttcacatcggcagctttgccctgccacagtatctgttgagtgcgctacagaatgcgcaataa

SEQ ID NO: 154856 - protein, 287 aa, Pectobacterium atrosepticum SCRI1043
MSQKEIWYETLHANFGQYFSVDRVLYHEKTDHQDLIIFENDALGRVMALDGVVQTTERDEFIYHEMLTHVPLLSHGNAKRVLIIGGGDGGMLREVSRHHGVEQITMVEIDAGVVEFCRQYLPNHSAGSYDDPRFNLVIDDGVNFVRQCSEKFDVIISDCTDPIGPGESLFTSDFYQGCARSLNEGGIFVAQNGVCFLQQDEAIGSHKKLSHYFNDVSFYQAAIPTYYGGIMTFAWASNNPALRQMDIVTLRQHFAQSGITCRYYTPDVHIGSFALPQYLLSALQNAQ

SEQ ID NO: 154857 - DNA, 891 bp, Yersinia pseudotuberculosis IP 32953
  CDS (1)..(891): transl_table=11
atgtcacagaaagaactatggtatgaaacattacatgccaacttcggccagtacttttctgttgagaatgtattgtaccgcgaaaaaaccgagcatcaggacctggtgatttttgaaaacccagagttgggccgcgtaatggcattagatggtgtggtgcaaacgacagagcgtgatgagtttatctaccacgaaatgatgacacacgttcctttgctggcccacgggcaagcaaaaaaagtgctgatcatcggcggtggcgatggcgcaatgctgcgagaagtcagccgccacaagaatattgagcagattaccatggtggaaattgacgccggggtcgtagaattttgccgccagtatttgcctaatcatagcgcgggggcgtatgacgatcctcgtttcaagctagtcatcgacgatggtgtgaatttcgttaatcagaccactgaaaagttcgatgtcatcatttctgactgtaccgatcctatcggtcctggcgaaagcctgtttacctctgtattttatgagggatgcgcccgtagcctgaatgagggggggatcttcgttgcacaaaacggcgtctgtttcctacaacaggatgaagccgtcaatagccataacaaacttagccactatttcagtgacgttagtttttatcaggccgcaattccaacgtattacggcggtattatgacctttgcctgggcgacacagaacccggctctgcgccagttggatctcgccaccttgcaaaaccgctttgcccaagctggcttggcctgccgctactataacccagcgattcatgtcggcagctttgctttaccacagtatttgctagatgccttaacgacgatacccaaagtcattggcgtcgattcaagtgaataa

SEQ ID NO: 154858 - protein, 296 aa, Yersinia pseudotuberculosis IP 32953
MSQKELWYETLHANFGQYFSVENVLYREKTEHQDLVIFENPELGRVMALDGVVQTTERDEFIYHEMMTHVPLLAHGQAKKVLIIGGGDGAMLREVSRHKNIEQITMVEIDAGVVEFCRQYLPNHSAGAYDDPRFKLVIDDGVNFVNQTTEKFDVIISDCTDPIGPGESLFTSVFYEGCARSLNEGGIFVAQNGVCFLQQDEAVNSHNKLSHYFSDVSFYQAAIPTYYGGIMTFAWATQNPALRQLDLATLQNRFAQAGLACRYYNPAIHVGSFALPQYLLDALTTIPKVIGVDSSE

SEQ ID NO: 154859 - DNA, 855 bp, Symbiobacterium thermophilum IAM 14863
  CDS (1)..(855): transl_table=11
atgaatcgtggcgattggctgatcgaggaacagacccccagctaccagacccggtggcgggtccgggaggtgctccacgaggagcagacgccgtaccagaagctgcaggtgctcgagctggaggatttcggccgggcgctggtgctggacgacgcggtgcagaccaccgtgggcgatgagttcatctaccatgagatgatcgcccacgtacccctgttcacgcatccgcaccccgagcgggtcctgatcatcggcggcggcgacgggggcacggcccgcgaggtctgccgccatgagtcggtgcagaaggtggacatggtggagatcgatcgggcggtcatcgaggcgtgccggaagcacctgcccgaaatcgcctgcggcatggatcaccccaaggtcaacctggtggtgggcgacggcatcgcctgggtcgccgaccacgccgacgagtacgacgtgatcatcgtcgattcgtccgatcccgtggggcccgccaaggggctgttcaaccaggcgttctacaagaacgtgttccgggccctgaaggcagacgggctgttcgtctgccaggtgctctcgccgttcttccatcagtccctgatccgcgacgtgtacggcgtggtgtccgcgatcttcccgatcaccatgccctacctggcggtggtgcccacgtatcccagcggactgcactgcttcatgctgggctccaagcggcacagccccttgcgggagggggtccgtacccccgcctggcccacccgctggtatacaccggccgtccatcgggccgccttccagctgccaccggtcgtcgcacagctgctggaaccgtcgggctcgcaggccggccagtag

SEQ ID NO: 154860 - protein, 284 aa, Symbiobacterium thermophilum IAM 14863
MNRGDWLIEEQTPSYQTRWRVREVLHEEQTPYQKLQVLELEDFGRALVLDDAVQTTVGDEFIYHEMIAHVPLFTHPHPERVLIIGGGDGGTAREVCRHESVQKVDMVEIDRAVIEACRKHLPEIACGMDHPKVNLVVGDGIAWVADHADEYDVIIVDSSDPVGPAKGLFNQAFYKNVFRALKADGLFVCQVLSPFFHQSLIRDVYGVVSAIFPITMPYLAVVPTYPSGLHCFMLGSKRHSPLREGVRTPAWPTRWYTPAVHRAAFQLPPVVAQLLEPSGSQAGQ

SEQ ID NO: 154861 - DNA, 831 bp, Bacillus licheniformis ATCC 14580
  CDS (1)..(831): transl_table=11
ttgagcggactttggtatacagagaagcaaacgaaaaatttcggtattacaatgaaaatcaacaggactttacatacagagcagacagattttcaaaagctcgaaatggccgagactgaagaattcggcaacatgctgtttttggacggcatggtcatgacatctgaaaaagatgaatttgtctaccacgaaatggtggcgcacgtgcccctgtttacgcatccgaatcctgagcatgtgcttgtggtcggcggcggagacggcggcgttatccgtgaaattttgaagcatccgagcgtgaaaaaagcgacgcttgtcgatattgacggcaaggtgatcgaatattccaagaaattcttgccttccattgcaggcaaacttgacgatccgcgcgtcgaagtaaaagtcgatgacggcttcatgcacattgcccaatctgaaaatgagtacgatgtcatcatggtggattcaaccgagccagtagggcctgctgtcaacttgtttacaaaaggcttttacgccggcatagcaaaagcgctaaaggaagacggcattttcgttgctcagacggacaacccttggtttacacctgaactgatcacaaacgttcagcgcgatgtaaaagagatcttcccgattacaaagctgtatttggccaacattccgacatatccaagcggattgtggacgtttacgatcggttcgaaaaaatacgatcctcttgaagtggaggacagccgcttctttgatattgagacgaaatactacacaaaagaaattcataaagcggcattcgtccttccgaaattcgtcagcgatttaatcaaataa

SEQ ID NO: 154862 - protein, 276 aa, Bacillus licheniformis ATCC 14580
MSGLWYTEKQTKNFGITMKINRTLHTEQTDFQKLEMAETEEFGNMLFLDGMVMTSEKDEFVYHEMVAHVPLFTHPNPEHVLVVGGGDGGVIREILKHPSVKKATLVDIDGKVIEYSKKFLPSIAGKLDDPRVEVKVDDGFMHIAQSENEYDVIMVDSTEPVGPAVNLFTKGFYAGIAKALKEDGIFVAQTDNPWFTPELITNVQRDVKEIFPITKLYLANIPTYPSGLWTFTIGSKKYDPLEVEDSRFFDIETKYYTKEIHKAAFVLPKFVSDLIK

SEQ ID NO: 154863 - DNA, 828 bp, Bacillus cereus E33L
  CDS (1)..(828): transl_table=11
atggaactatggttcactgaaaaacaaacaaaacattttgggattacggcgcgtattaaccgcacattacatacggagcaaacagaattccaaaaacttgatatggttgaaacggaagagttcggaaacatgcttattttagatggcatggttatgacgacagaaaaagatgagtttgtttaccatgaaatggtagcgcacgtacctttatttacacacccaaaccctgaaaacgtattagttgttggtggcggtgatggtggtgttattcgtgaagtgttaaaacacccaagcgtaaagaaagcaactcttgttgaaatcgatggaaaagtaattgagtactctaaaaaatatttaccatcaattgcaggcgcattagataatgagcgtgtagaagtgaaagtaggagacggtttcctacatatcgcagaaagcgaaaatgaatatgacgtaattatggtagattctactgagccagtaggaccagcagtaaacctatttacaaaaggcttctacgctggaatttcaaaagcgttaaaagaagatggtattttcgttgcacaaacggacaacccttggtttacaccagaattaattacaactgtgtttaaagacgtaaaagagatcttcccaattactcgtttatacacagcgaacattccaacttacccaagtggtctttggacgttcacaattggatctaaaaaacatgatccattagaagtaagtgaagagcgtttccacgaaatcgaaacgaaatactatacaaaagaattacacaatgcagcattcgcattaccgaaatttgttggcgatctaattaagtaa

SEQ ID NO: 154864 - protein, 275 aa, Bacillus cereus E33L
MELWFTEKQTKHFGITARINRTLHTEQTEFQKLDMVETEEFGNMLILDGMVMTTEKDEFVYHEMVAHVPLFTHPNPENVLVVGGGDGGVIREVLKHPSVKKATLVEIDGKVIEYSKKYLPSIAGALDNERVEVKVGDGFLHIAESENEYDVIMVDSTEPVGPAVNLFTKGFYAGISKALKEDGIFVAQTDNPWFTPELITTVFKDVKEIFPITRLYTANIPTYPSGLWTFTIGSKKHDPLEVSEERFHEIETKYYTKELHNAAFALPKFVGDLIK

SEQ ID NO: 154865 - DNA, 876 bp, Geobacillus kaustophilus HTA426
  CDS (1)..(876): transl_table=11
atgaaacacgaaggaagcgctttgccaccttacttgcatatggacaatggagagctttggctcaccgaagatgatcgcgacaacttaaaaatcagctatcgaatcaaagaggtgatttttgccgagccgtccgagtaccagcatgtgatgattttggattcgtacgattttggccgcatgctcgtactcgatggcgtcgtgcaaacgacctcgattgacggccatatttataacgaaatgatttcgcacgtgccgctgcagtttcatccggaagcgaagcgggtgctcatcatcggcggcggcgactgcggcgcagctcgtgagacggcgaaatacgctcatcttgaagccatcgatatggtggaaatcgacgaaaaagtcgtccgggcgtgcaaagagcatttgccagccgtctccggcaacttatcggatccgcgcgtgcggtttgtttatgatgatggcgtcgtgtttgtgcaagagaaagaaaacgtctacgacgtcattatgatcgactcgtctgacccagtcggcccggcggaagccttgttttcaccggagttttacgccaacgtccatcgcgcgttgaaagcagacgggctgatggtctgccaaagccagtcgccgattttccacttggatattttgaaacggacgtaccgcaatattcgcgaactgttcccgcatgtgcttgtgtacaccgcggtggtgccgacgtatccaggcggactgtggagctttacgatcggctcgaaacggccgctcgattttccggcgcagacaaccattccaaacgacacgaaatacgtcaatgatgcggtctttcgtcaatgtttcgccttgcccgagtttttgcgctcggcgcttgaggtggaataa

SEQ ID NO: 154866 - protein, 291 aa, Geobacillus kaustophilus HTA426
MKHEGSALPPYLHMDNGELWLTEDDRDNLKISYRIKEVIFAEPSEYQHVMILDSYDFGRMLVLDGVVQTTSIDGHIYNEMISHVPLQFHPEAKRVLIIGGGDCGAARETAKYAHLEAIDMVEIDEKVVRACKEHLPAVSGNLSDPRVRFVYDDGVVFVQEKENVYDVIMIDSSDPVGPAEALFSPEFYANVHRALKADGLMVCQSQSPIFHLDILKRTYRNIRELFPHVLVYTAVVPTYPGGLWSFTIGSKRPLDFPAQTTIPNDTKYVNDAVFRQCFALPEFLRSALEVE

SEQ ID NO: 154867 - DNA, 828 bp, Geobacillus kaustophilus HTA426
  CDS (1)..(828): transl_table=11
atggaactttggtttaccgaaaagcaaacggagcattttggcatcaccgcacgcatcatccgcactttacatacagaacagacgccgttccaaaagctcgatatggtcgaaacggcggagtttggcaacatgctcattctagacggcatggtcatgacaacacaaaaagacgagttcgtctatcatgaaatggtcgcccatgtgccgctgttcacccaccccaatccggaaaacgtgcttgtcgtcggcggcggcgacggcggcgtcattcgtgaagtgctgaagcacccaagcgtcaaaaaagcgacgcttgtcgaaattgacggtaaagtgatcgagtgctcgaaaacctacttgccggagattgccggcaaactcgatgatccgcgcgtcgaagtgaaagtcgatgacgggtttatgcatatcgccaaaagcgaaaacgagtatgacgtcattatggttgactcaaccgaaccggtcggcccagcggtcaacttgttcacaaaagggttttacgccggcatcgccaacgcgttgaaggaagacggcattttcgtcgcccaaacggacaatccgtggtttaaggccgatttgattcgcaacgtctaccgcgatgtgaaagaaattttcccgatcacccgtttgtatacggcgaacattccgacgtatccgagcgggctctggacgtttacgctcggctcgaaaaaatacgacccgctcgctgtgagcgacgaccggttccatgacattgagacgaaatactacacgaaagaattgcataaggcgtgcttcgttttgccaaaatttgtcgcggacctagtgaaataa

SEQ ID NO: 154868 - protein, 275 aa, Geobacillus kaustophilus HTA426
MELWFTEKQTEHFGITARIIRTLHTEQTPFQKLDMVETAEFGNMLILDGMVMTTQKDEFVYHEMVAHVPLFTHPNPENVLVVGGGDGGVIREVLKHPSVKKATLVEIDGKVIECSKTYLPEIAGKLDDPRVEVKVDDGFMHIAKSENEYDVIMVDSTEPVGPAVNLFTKGFYAGIANALKEDGIFVAQTDNPWFKADLIRNVYRDVKEIFPITRLYTANIPTYPSGLWTFTLGSKKYDPLAVSDDRFHDIETKYYTKELHKACFVLPKFVADLVK

SEQ ID NO: 154869 - DNA, 861 bp, Salmonella enterica
  subsp. enterica serovar Paratyphi A str. ATCC 9150
  CDS (1)..(861): transl_table=11
atggccgaaaatacgatgtggcatgaaacgctacacgaccagtttggtcagtactttgccgtagacaacgttctgtatcatgaaaaaaccgatcaccaggatttaatcatctttgaaaacgccgcttttggccgcgtgatggcgctggacggcgtggtacagaccaccgaacgcgacgagtttatttatcatgaaatgatgacccacgtcccgctgctggcgcacggtcatgcgaaacacgttctgattatcggcggcggcgacggcgcaatgctacgtgaagttacccggcataaaaacgtcgaaaccatcaccatggtggagatcgacgctggcgtagtctcgttttgccgccagtatttacccaaccacaatgccggcagctacgacgatccgcgctttacgctggtaatcgacgacggcgtgaatttcgtcaatcagacccatcagacctttgatgtaatcatttccgactgtaccgatccgataggccccggcgaaagcctgtttacctccgccttttatgaaggctgtaagcgttgcctgaatccgggcggcatttttgtcgcccagaacggcgtgtgcttcctgcaacaggatgaagcgatcgacagccaccgcaagctgagtcattacttcagcgatgtcggcttctaccaggcggcgattccgacctattacggcggcatcatgaccttcgcctgggcgacggacaacgatgctcttcgtcacctgtcgagcgaaattattcaggcgcgttttcatgccgccggcctcaaatgtcgctattacaacccggctattcatgccgctgcatttgcgctaccgcaatatctacatgacgcactgtccgcacagtga

SEQ ID NO: 154870 - protein, 286 aa, Salmonella enterica
  subsp. enterica serovar Paratyphi A str. ATCC 9150
MAENTMWHETLHDQFGQYFAVDNVLYHEKTDHQDLIIFENAAFGRVMALDGVVQTTERDEFIYHEMMTHVPLLAHGHAKHVLIIGGGDGAMLREVTRHKNVETITMVEIDAGVVSFCRQYLPNHNAGSYDDPRFTLVIDDGVNFVNQTHQTFDVIISDCTDPIGPGESLFTSAFYEGCKRCLNPGGIFVAQNGVCFLQQDEAIDSHRKLSHYFSDVGFYQAAIPTYYGGIMTFAWATDNDALRHLSSEIIQARFHAAGLKCRYYNPAIHAAAFALPQYLHDALSAQ

SEQ ID NO: 154871 - DNA, 870 bp, Francisella tularensis subsp. tularensis SCHU S4
  CDS (1)..(870): transl_table=11
atgatagctaatattaataataaaaaaatatttcatgaaactttgtaccatagctatcatcaaagtatagcaatttctgaaatattgtatgaacataaaacagattaccaacatctagtaatttttaataatccaatttttggtaatgtcatggtcttggatggtattgtacagactactgaaaaagatgagtttatttatcatgaaatgttagtgcatgtaccagttatcgcgcatgggaatgttaaaaacatattaattattggtggcggcgatggtggtatgcttagggaagctcttagtcataaagctgtcgaatctgtaacactagttgaaattgaccaagctgttatagatatgtgccaagagtactttccagggcattcaaaaggtgcttttgatcatcctaaagcgaaaatagttattcaagatggttgtgaatttgtcaaaaatccgcctaggaaatatgatttgattatttgtgatagtactgatccgattggtccaggagaggttttatttacctcaaaattttataaagactgtaaagaagctataaatccaggtggtataatggtaacccaaaatggagtgatctactttcaaatagatgagttaaagaaaactcttgagcgctttgaaccattatataaagatgtttctttttatactgcagcagttccaacatatgtcggtggaagtatggcatttggttggggcactgatgaattatcctatcgtaatcacgatattcaagtaattgcacagagatttcttaagagcggtattaaaacaaaatactacaatccagctatacatattgctgcttttgctttaccacaatatgttatagatactctaaagaagtaa

SEQ ID NO: 154872 - protein, 289 aa, Francisella tularensis subsp. tularensis SCHU S4
MIANINNKKIFHETLYHSYHQSIAISEILYEHKTDYQHLVIFNNPIFGNVMVLDGIVQTTEKDEFIYHEMLVHVPVIAHGNVKNILIIGGGDGGMLREALSHKAVESVTLVEIDQAVIDMCQEYFPGHSKGAFDHPKAKIVIQDGCEFVKNPPRKYDLIICDSTDPIGPGEVLFTSKFYKDCKEAINPGGIMVTQNGVIYFQIDELKKTLERFEPLYKDVSFYTAAVPTYVGGSMAFGWGTDELSYRNHDIQVIAQRFLKSGIKTKYYNPAIHIAAFALPQYVIDTLKK

SEQ ID NO: 154873 - DNA, 828 bp, Bacillus clausii KSM-K16
  CDS (1)..(828): transl_table=11
atggagttttggtttacagaaaaacaaacagaacgatttggcattacgatgaagataaaacggacgcttcacacggagaagacagacttccaacagcttgatatggtggaaacggaagagtttggcaacatgttgcttcttgacggcatggtaatgacgacagaaaaggatgaatttgtttaccatgaaatggtgacacatgtccctttattcacgcacccgaacccgaagcatgtccttgtagtaggtggcggcgatggcggggcgatccgagaaattcttaagcatccttctgttgaaaaagcgacgttggtcgatattgatgggaaggtcattgaatactcgaaaacctatttgccgacaattgcctgtgctttagaagatgaacgtgttgacgtgaaagtcgctgacgggtttatgcatatcgcccaatcagcaaatgagtatgacgtgattatggtcgattcgacggagcctgtcggaccagctgctaaactgtttgagcgtgggttttatgaagggatttccaaagcgttaaaagaagatggcatttttgttgcgcaaacggataacccatggttccatcaggaactagtgtctaatgtgtacaaagacgtaaaagagatctttccgattacccgtttgtacaccgccaatattcctacctacccaagcggcatgtggacgtttacgatcggttctaaaaaacacgatcctcttgctgtagaagcaacgcgctttcatgatgtccaaacgaaatattatacgccagacatccaccgtgccgcgtttgtgctgccgaaattcgtccaggacttacttaaatag

SEQ ID NO: 154874 - protein, 275 aa, Bacillus clausii KSM-K16
MEFWFTEKQTERFGITMKIKRTLHTEKTDFQQLDMVETEEFGNMLLLDGMVMTTEKDEFVYHEMVTHVPLFTHPNPKHVLVVGGGDGGAIREILKHPSVEKATLVDIDGKVIEYSKTYLPTIACALEDERVDVKVADGFMHIAQSANEYDVIMVDSTEPVGPAAKLFERGFYEGISKALKEDGIFVAQTDNPWFHQELVSNVYKDVKEIFPITRLYTANIPTYPSGMWTFTIGSKKHDPLAVEATRFHDVQTKYYTPDIHRAAFVLPKFVQDLLK

SEQ ID NO: 154875 - DNA, 867 bp, Thermococcus kodakarensis KOD1
  CDS (1)..(867): transl_table=11
atgggatacaacgagcaggagagggctttcatcgaatggtaccctcgcggctacggagtcgggtttaaggtgaagaggagactgtttgagacccagacggaataccagcgtcttgagatatacgagacggagggctttgggaagctccttgtcctggatggaaccgtccaacttgtggaggttggtgaggagagctatcacgaagtcctggtacaccctgtaatgcttgcacacccgaacccgaggaaggttctcgtcatcggcggtggagacggtggaacgctccgcgaggttcttaggcatgacaccgttgagaaggccataatggtggagatagacgagggtgttgtggaagcgtcttacctctaccttgacgtcgccaaagaccttttggacaggctcataaagaaggaagagccacgggccgagctgataatcggcgacggcgtcaagtacctcagggaaactgatgaacgcttcgacgttataatcgtggactcaaccgatccagtcggccccgcgaagcttctcttcagcgaagagttttacagggacgcctacgagaagctgaacgagaagggtctttacgttacccaggccggcagcgtttacttgttcacgaacgagctcctcgacgcgtataaggccatgaagaaagtctttgacagggtgtactacttcagcttcccggtaataggctacgcctcgccctggagcttcctcgttggggtcaagggagacgttgacttcaccaggatagaccttgagagggcaaagaagctcgacctctactactacgatcccgagaggcacgaaaccctcttccagatgccgcgctacgtcagaaagctcctagaggggcagtaa

SEQ ID NO: 154876 - protein, 288 aa, Thermococcus kodakarensis KOD1
MGYNEQERAFIEWYPRGYGVGFKVKRRLFETQTEYQRLEIYETEGFGKLLVLDGTVQLVEVGEESYHEVLVHPVMLAHPNPRKVLVIGGGDGGTLREVLRHDTVEKAIMVEIDEGVVEASYLYLDVAKDLLDRLIKKEEPRAELIIGDGVKYLRETDERFDVIIVDSTDPVGPAKLLFSEEFYRDAYEKLNEKGLYVTQAGSVYLFTNELLDAYKAMKKVFDRVYYFSFPVIGYASPWSFLVGVKGDVDFTRIDLERAKKLDLYYYDPERHETLFQMPRYVRKLLEGQ

SEQ ID NO: 154877 - DNA, 873 bp, Gluconobacter oxydans 621H
  CDS (1)..(873): transl_table=11
atggctgaaacatggctcaacgagaccctgtacccggactggggacagcgctttctcgttacgcgtgagctcgcacgggtaaaatccgacttccaggatgtggtggtgtttgaaagctccagccacggccgcgtgctggttctggacggtgtcatccagatcaccgagcgtgacgagttcgtctatcaggaaatgctgacgcatgtgccgctgctggcgcatccctgtgcgaagcgcgtgctgattatcggtgcgggtgacggtggcgtcctgcgtcgcgtcctgcagcatgacacggtcgagaaggctgtcatggtcgagatcgacggtgcggtgatcgagctgtccaagcagtatctgccggacattgccggtgacgcgtggaacgacccgcgggccgaggtcattgtcggtgacggcatcgactatgttgccaaggcggctgatggctccttcgacgtgatcatcgtcgacagcactgatccgatcggtgtgggtgaagtgctgttcacggacgaattctacagcaactgcgcacgcatcctttcggctgaagggctgatcgtgaaccagtgcggcgtgccgttcatgcaggctgatgagctgtatgagacgagcctgcgtcgcgcgaagttcttcccgcatgtgggtgcgtatgtggccgccgttccgacctatgtcggcgggttcatgacgctgggtgtggcctccaaggggcaggcgccgaacacgcagacggtcgagcagatccgtacccgtgcggaagccgcgaagatcctggggacgacgcgttactggacgccggagatccatgtcggatcgttcaatctgccgccctatattgccgagcatcttccgaaaaccggaaaatga

SEQ ID NO: 154878 - protein, 290 aa, Gluconobacter oxydans 621H
MAETWLNETLYPDWGQRFLVTRELARVKSDFQDVVVFESSSHGRVLVLDGVIQITERDEFVYQEMLTHVPLLAHPCAKRVLIIGAGDGGVLRRVLQHDTVEKAVMVEIDGAVIELSKQYLPDIAGDAWNDPRAEVIVGDGIDYVAKAADGSFDVIIVDSTDPIGVGEVLFTDEFYSNCARILSAEGLIVNQCGVPFMQADELYETSLRRAKFFPHVGAYVAAVPTYVGGFMTLGVASKGQAPNTQTVEQIRTRAEAAKILGTTRYWTPEIHVGSFNLPPYIAEHLPKTGK

SEQ ID NO: 154879 - DNA, 861 bp, Pseudomonas syringae pv. syringae B728a
  CDS (1)..(861): transl_table=11
atgagcgattatcaggaaacgttatacgaaggctacggccaacgctttcgtatggaaaaaatgcttcacgaagtacgtaccgatcaccagcacctggtgatcttccagaacccgcgcatgggccgtgtcatggcgctggacggcgtcattcagaccaccgaagcggacgaattcatctaccacgaaatgctcacccatgtgccgattctggcgcacggtgcagccaagcgcgtactgatcatcggcggtggcgacggcggcatgctgcgtgaagtcgccaagcacatgagcgtcgaacatatcaccatggtcgagatcgatgcgaccgtggtcgagatgtgcaaggaatatctgcccaatcattccagcggtgccttcgacgattcgcgtctgaacctggtgatcgacgacggcatgcgcttcgtcgcgaccaccgaagagaagttcgacgtgatcatctccgactccaccgatccgatcggcccgggtgaagtcctgttctcggaaaacttttatcaggcctgccatcgctgcctcaatgaaggcggcattctggtcacccagaacggcacgcctttcatgcagttgagcggtgtgcagaccacggccgggcgcatgaacggtctgtttgccgactggcatttctatcacgcagcgatcccgacctacattggcggcgcaatgactttcgcctggggttcgaccgacaagagctatcgcaaactgccgctggaaaccctgcgtcagcgtttctcgggcagcggtattgttacgcgttattacaatccggaagtccacatcggcgcattcgccttgccacagtacgttctgcaggccgtaggcaaggccagcaacgactga

SEQ ID NO: 154880 - protein, 286 aa, Pseudomonas syringae pv. syringae B728a
MSDYQETLYEGYGQRFRMEKMLHEVRTDHQHLVIFQNPRMGRVMALDGVIQTTEADEFIYHEMLTHVPILAHGAAKRVLIIGGGDGGMLREVAKHMSVEHITMVEIDATVVEMCKEYLPNHSSGAFDDSRLNLVIDDGMRFVATTEEKFDVIISDSTDPIGPGEVLFSENFYQACHRCLNEGGILVTQNGTPFMQLSGVQTTAGRMNGLFADWHFYHAAIPTYIGGAMTFAWGSTDKSYRKLPLETLRQRFSGSGIVTRYYNPEVHIGAFALPQYVLQAVGKASND

SEQ ID NO: 154881 - DNA, 861 bp, Pseudomonas syringae pv. phaseolicola 1448A
  CDS (1)..(861): transl_table=11
atgagcgattatcaggaaacgttgtacgaaggctacggccagcgctttcgtatggaaaaaatgctgcacgaagtgcgtaccgaacaccagcatctggtgatcttccagaacccgcgcatgggccgcgtcatggcgctggacggcgtgatccagaccaccgaggcggatgagttcatctatcacgaaatgctcactcacgtgccgattctggcccacggcgctgccaaacgtgtactgatcattggcggcggcgatggcggcatgctgcgcgaagtcgccaagcacctgaccgtcgagcacatcaccatggtcgagatcgacgccacggtggtcgagatgtgcaaggagttcctgcccaatcactccagtggcgcttttgacgattcgcgcctgaacctggtcatcgacgacggcatgcgctttgtcgcgacgaccgaagagaagttcgacgtgatcatctccgactccactgatcctatcggtccgggcgaagtgctgttttcggagaacttttatcaggcctgtcatcgctgcctgaacgaaggcggcattctggttacccagaacggtacgcccttcatgcaactgagcggtgtgcagaccactgcaggacgcatgaatggcctgtttgccgattggcatttctatcaggccgccatcccgacctacatcggcggtgcaatgacttttgcctggggtgccactgacaagagctaccgcaaactgccactggaaaccctgcgtcagcgcttcacgggcagcggtattgttacgcgctattacaacccggaagttcacattagcgcattcgccttgccgcagtacgtactgcaggctgtgagcaaggccagcaacgactga

SEQ ID NO: 154882 - protein, 286 aa, Pseudomonas syringae pv. phaseolicola 1448A
MSDYQETLYEGYGQRFRMEKMLHEVRTEHQHLVIFQNPRMGRVMALDGVIQTTEADEFIYHEMLTHVPILAHGAAKRVLIIGGGDGGMLREVAKHLTVEHITMVEIDATVVEMCKEFLPNHSSGAFDDSRLNLVIDDGMRFVATTEEKFDVIISDSTDPIGPGEVLFSENFYQACHRCLNEGGILVTQNGTPFMQLSGVQTTAGRMNGLFADWHFYQAAIPTYIGGAMTFAWGATDKSYRKLPLETLRQRFTGSGIVTRYYNPEVHISAFALPQYVLQAVSKASND

SEQ ID NO: 154883 - DNA, 867 bp, Shigella sonnei Ss046
  CDS (1)..(867): transl_table=11
atggccgaaaaaaaacagtggcatgaaacgctacacgaccagtttgggcagtactttgcggtagataacgttctgtatcatgaaaagaccgatcaccaagatctgatcatttttgagaacgctgcatttggtcgcgtaatggcgctggatggcgtagtacaaaccaccgagcgcgacgagtttatctatcatgagatgatgacccatgttccgctactggcccacggtcacgcgaaacatgtgctgattatcggcggcggcgacggtgccatgctgcgtgaagtaacccgacataaaaacgttgagtcaatcacgatggtggaaatcgatgcgggtatcgtgtcgttctgccgtcagtatctgcccaaccataacgccggtagctacgacgatccgcgctttaagctggtgatcgacgatggcgtcaatttcgttaatcaaaccagccagacctttgatgtcattatctccgactgcaccgatcctatcggtcccggcgaaagtctgttcacctcagcattttatgaaggctgcaaacgttgcctgaatcctggcggtatcttcgtcgcacaaaacggcgtctgctttttacagcaggaagaagccatcgacagctatcgcaaactcagccattacttcagcgacgttggcttttatcaggcggcgatcccgacctattacggcggtatcatgacttttgcatgggcgacagataacgacgccttacgccatctctcaaccgaaattattcaggcgcgttttctcgcttctggcctgaaatgccgttattacaatccggcaatccatacggcagcttttgccttacctcagtatctgcaagacgcactggcttcacagccgtcctaa

SEQ ID NO: 154884 - protein, 288 aa, Shigella sonnei Ss046
MAEKKQWHETLHDQFGQYFAVDNVLYHEKTDHQDLIIFENAAFGRVMALDGVVQTTERDEFIYHEMMTHVPLLAHGHAKHVLIIGGGDGAMLREVTRHKNVESITMVEIDAGIVSFCRQYLPNHNAGSYDDPRFKLVIDDGVNFVNQTSQTFDVIISDCTDPIGPGESLFTSAFYEGCKRCLNPGGIFVAQNGVCFLQQEEAIDSYRKLSHYFSDVGFYQAAIPTYYGGIMTFAWATDNDALRHLSTEIIQARFLASGLKCRYYNPAIHTAAFALPQYLQDALASQPS

SEQ ID NO: 154885 - DNA, 864 bp, Pseudoalteromonas haloplanktis TAC125
  CDS (1)..(864): transl_table=11
atggcaaatttagatcaaagtaagtggtttactgaaattagcgaccgcgatggcagcgcattttcattacgtattaacaaaaagttagatgaaaaacagtctccttttcaaaaagtagaaatgttcgaaaccaccgactttggtaatttaatgatcatcgacggttgcactatggtaagtagccgcgaaaactttttttatcatgagatgatcagccaccctgcacttttagcgcacccagcacctaaaaatgtagttattattggcggcggcgactgcggtaccttacgcgaagtgttaaagcaccctggtgtagagagcgttacgcaaatagatatagacgaagtagtaacgcaaatgtcgttaaaatacttcccagagctgtgtgaatctaacaacgatcctcgtgcaacagttatgtttgacgacggcattaaatacatgcgcgaagccgcaagcgaatcaatcgatgttgttattgttgatggcaccgacccagtaggcccaggtgaaggtttatttaatcatgcattttacactagctgcttaaacgcacttcgcccaggtggcattttagtacaacaaagcgaatcaccgcttatgcatatgccgttattagttgaaatgcgcgaggctatgctaacggtaggttttaacgacttacaaacactgccattcccgcaacctatatacccaagtggtttatggtcagtaactttagcgcgtaaatctgcagcctttaatggctttagagaagatgcagcagccgatattgcaaagaacagcgaatactacaacaacggcattcatcacggtgcattagctacgccaaactttatgcaacgcgcttttgataaaaaataa

SEQ ID NO: 154886 - protein, 287 aa, Pseudoalteromonas haloplanktis TAC125
MANLDQSKWFTEISDRDGSAFSLRINKKLDEKQSPFQKVEMFETTDFGNLMIIDGCTMVSSRENFFYHEMISHPALLAHPAPKNVVIIGGGDCGTLREVLKHPGVESVTQIDIDEVVTQMSLKYFPELCESNNDPRATVMFDDGIKYMREAASESIDVVIVDGTDPVGPGEGLFNHAFYTSCLNALRPGGILVQQSESPLMHMPLLVEMREAMLTVGFNDLQTLPFPQPIYPSGLWSVTLARKSAAFNGFREDAAADIAKNSEYYNNGIHHGALATPNFMQRAFDKK

SEQ ID NO: 154887 - DNA, 855 bp, Nitrosococcus oceani ATCC 19707
  CDS (1)..(855): transl_table=11
atgcagctagatccgaagggatggttcactgaggtttgcaaggagggcggcctcgctttttctcttgccatcagggaaaaacttcatgcggagaccactccctatcagtatatcgaaatttatcagaccgagacttttggccggttgatggtcatcgacggctttattatgctatctggaagggataattttttctatcatgaaatgatggctcacccggtgttgtttacccaccctcatccacaacgggtactcatcatcggggggggagattgcgggaccttgcgggaagtgcttaagcatgacgtagttgagaaagtccagcaggtggagatagatgaacgggttacccggttggcggaaaaatattttccagaactgtgccaaagtaacgatgatccccgggcccatttccacttcggtgatggactgcgctttgtggccgaagcgcccgccaacagcgtcgacgttattatcattgatagtaccgatccgatcggttctgcggaggggctttttcaggcttcattttatgctgattgtcaacggttattgggggagaagggcattctggtgcatcaaagtgaatctcccctaatccatttggacctcctcaacaagatgcgggcggaaatgaagaaggggggctttccccaggtacggaccttgacttacccccagtgcgtttatccttctggctggtggagcgcaactttggcggggcatactttgtcctgcttccgggagcgggacgccacggccaaaatctttccaacccgttattataatgtggatatccaccgggcttccctggctgttccagaatttctgcgccagacagaagagtcatcatag

SEQ ID NO: 154888 - protein, 284 aa, Nitrosococcus oceani ATCC 19707
MQLDPKGWFTEVCKEGGLAFSLAIREKLHAETTPYQYIEIYQTETFGRLMVIDGFIMLSGRDNFFYHEMMAHPVLFTHPHPQRVLIIGGGDCGTLREVLKHDVVEKVQQVEIDERVTRLAEKYFPELCQSNDDPRAHFHFGDGLRFVAEAPANSVDVIIIDSTDPIGSAEGLFQASFYADCQRLLGEKGILVHQSESPLIHLDLLNKMRAEMKKGGFPQVRTLTYPQCVYPSGWWSATLAGHTLSCFRERDATAKIFPTRYYNVDIHRASLAVPEFLRQTEESS

SEQ ID NO: 154889 - DNA, 876 bp, Pseudomonas fluorescens Pf0-1
  CDS (1)..(876): transl_table=11
atgaccgtcaccaagaccagcgaatacctggaaaccctctacgaaggctacggccagcgttttcgcatggaaaaactgctgcacgaagtgcgcaccgaacaccagcacctggtgattttccagaacccgcgcatgggccgggtgatggcgctggacggcgtgatccagaccaccgaagccgatgagttcatctaccacgaaatgctcacccacgtgccgatcctcgcccacggcaccgccaagcgcgtgctgatcattggcggcggcgacggcggcatgctgcgcgaagtgaccaaacacgccagcgtcgagcacatcaccatggtcgagatcgacggcaccgtggtcgacatgtgcaaagagtttctgccgaaccactccagcggtgcgtacgacgatccacgcctgaacctggtgatcgacgacggcatgcgtttcgtcgccaccaccactgaaaaattcgacgtgatcatttccgactccaccgacccgatcggtccgggcgaagtgctgttctcggaaaacttctaccaggcctgccaccgctgcctgaacgagggcggcatcctcgtgacccagaacggcacgccgttcatgcagatcgaagaagtgaaaaccaccgccggccgcctgcgcagcctgttcccggactggcacttctatcaggcagccgtcccgacctacatcggcggttcgatgacctttgcctggggctcgaccaacccggcctatcgcaagctgagccgcgaagttctgcaacagcgcttcatcggtagcggcatcgtcacccgctactacaacccggaaatccatatcggcgccttcgccttgccgcaatacgtgttgcaagcggtgaacaagccaagcaacgactga

SEQ ID NO: 154890 - protein, 291 aa, Pseudomonas fluorescens Pf0-1
MTVTKTSEYLETLYEGYGQRFRMEKLLHEVRTEHQHLVIFQNPRMGRVMALDGVIQTTEADEFIYHEMLTHVPILAHGTAKRVLIIGGGDGGMLREVTKHASVEHITMVEIDGTVVDMCKEFLPNHSSGAYDDPRLNLVIDDGMRFVATTTEKFDVIISDSTDPIGPGEVLFSENFYQACHRCLNEGGILVTQNGTPFMQIEEVKTTAGRLRSLFPDWHFYQAAVPTYIGGSMTFAWGSTNPAYRKLSREVLQQRFIGSGIVTRYYNPEIHIGAFALPQYVLQAVNKPSND

SEQ ID NO: 154891 - DNA, 822 bp, Carboxydothermus hydrogenoformans Z-2901
  CDS (1)..(822): transl_table=11
atgtggtatattgaaaaacacaatgaaaattatcaagttggttggagggtttctgatatattatatcagaaaaaaaccccgtatcaaaacctggcaattgttgaatttgctgaattcggtagatccttaattttagatgatgcggtccagaccacagaaaaagatgaatacgtttaccatgaaatgttggttcatcctgcagcttttacccataagtctccccgtcgggccctgattataggaggtggtgacggaggaactttaagagaagtattaaaacataaaactattgaaaaagttgatttagttgaaatagatgaagaggttatcaaagcttcaaagcaattcttaccatctttaagtgaaagttttaatgatccccgggttgaagttattattgatgatggtatccgttacgttaaaaaagtaaaaaattattacgacctgatctttgtggatgcctcagaccctgtgggacctgcagtggttttatacagtgaagaattttaccgttccctttttgatgctttaactgctgacggaatagctgcggttcaatcggaatcgcccaatttctaccccgatattttcgttaaaatcgtaactactttgcgagatatttttcccaaggtaaatgtcgctttagctcccgttccgtcatatattagcggtttctttgcttttaccgttgcttcaaaagtttataatcctaaagaaacaactcccaacattacgtttcctactaagtactacaatgaagaaatccataatgcttgctttgcattaccaaactttatcttagatatgctaaaaatccgctaa

SEQ ID NO: 154892 - protein, 273 aa, Carboxydothermus hydrogenoformans Z-2901
MWYIEKHNENYQVGWRVSDILYQKKTPYQNLAIVEFAEFGRSLILDDAVQTTEKDEYVYHEMLVHPAAFTHKSPRRALIIGGGDGGTLREVLKHKTIEKVDLVEIDEEVIKASKQFLPSLSESFNDPRVEVIIDDGIRYVKKVKNYYDLIFVDASDPVGPAVVLYSEEFYRSLFDALTADGIAAVQSESPNFYPDIFVKIVTTLRDIFPKVNVALAPVPSYISGFFAFTVASKVYNPKETTPNITFPTKYYNEEIHNACFALPNFILDMLKIR

SEQ ID NO: 154893 - DNA, 831 bp, Thiomicrospira crunogena XCL-2
  CDS (1)..(831): transl_table=11
atgctttatccaacctggggacagcagtttgtgatgaatgacgtgctgtttgaagtcgatactgggcatcaacatttgattattttcaagaatgatcagtgggggacagtgatggctctggatggggtgatacagaccacggaaaaagatgagttcatttatcatgaaatgatgacgcatgtgccgatgttcgcgcatggcaacgctaagaaagtgttgattatcggtgggggtgacggaggtattttacgtgaagtgttgaaacacccaactgttgacgcagtaactcaggttgagattgatcagcaagtcattgacatgtgtaagcaatacttgcctaagcactcagcgggtgcttttgaacacccgaaggctaacgtggtgatcgctgatggggtggatttcgtgaatgagtgcactgaaaaatttgatgtgattatttccgattcaaccgacccgattggtccgggggaagttttattcacctctcgcttttaccaaggcattcagtcatgtttgaacgatggcggggtgtttgtggcgcaaaacggtgtcagttttatgcaaacggatgaagtcacgactacttttaagcgtttgtcacccttattcaacgagtcgagtttttattcggccgctgtccccacatacgtgggagggattatgacgtttgcctgggcaacgaatgatctgagtttaaagcaacagtccgttgacgtcattcggtcacgttatgacgccgcggcgattgaaacgcgtttttatacgccggaattacatattggggcctttgcactgcccaaatacgtacaacaagcaatacaagcataa

SEQ ID NO: 154894 - protein, 276 aa, Thiomicrospira crunogena XCL-2
MLYPTWGQQFVMNDVLFEVDTGHQHLIIFKNDQWGTVMALDGVIQTTEKDEFIYHEMMTHVPMFAHGNAKKVLIIGGGDGGILREVLKHPTVDAVTQVEIDQQVIDMCKQYLPKHSAGAFEHPKANVVIADGVDFVNECTEKFDVIISDSTDPIGPGEVLFTSRFYQGIQSCLNDGGVFVAQNGVSFMQTDEVTTTFKRLSPLFNESSFYSAAVPTYVGGIMTFAWATNDLSLKQQSVDVIRSRYDAAAIETRFYTPELHIGAFALPKYVQQAIQA

SEQ ID NO: 154895 - DNA, 867 bp, Shigella dysenteriae Sd197
  CDS (1)..(867): transl_table=11
atggccgaaaaaaaacagtggcatgaaacgctacacgaccagtttgggcagtactttgcggtagataacgttctgtatcatgaaaagaccgatcaccaggatctgatcatttttgagaacgctgcatttggtcgcgtaatggcgctggacggcgtagtccaaaccaccgagcgcgacgagtttatctatcatgagatgatgacccatgttccgctactggcccacggtcacgctaaacatgtgctgattatcggcggcggcgacggtgccatgctgcgtgaagtaacccgacataaaaacgttgagtcaatcacgatggtggaaatcgatgcgggtgtcgtgtcgttctgccgtcagtatctacccaaccataacgcaggtagctacgacgatctgcgctttaagctggtgatcgacgatggcgtcaatttcgttaatcaaaccagccagacctttgatgtcattatctccgactgcaccgatcctatcggtcccggcgaaagccttttcacttcggcattttatgaaggctgcaaacgttgcctgaatcctggcggtatcttcgtcgcacaaaacggcgtctgctttttacagcaggaagaagccatcgacagccatcgcaaactcagccattacttcagcgacgttggcttttatcaggcggcgatcccgacctattacggcggtatcatgacttttgcatgggcgacagataacgacgccttacgccatctctcaaccgaaattattcaggcgcgttttctcgcctctggcctgaaatgccgttattacaatccggcagtccatacggcagcttttgccttaccccagtatctgcaagacgcactggctccacagccgtcctaa

SEQ ID NO: 154896 - protein, 288 aa, Shigella dysenteriae Sd197
MAEKKQWHETLHDQFGQYFAVDNVLYHEKTDHQDLIIFENAAFGRVMALDGVVQTTERDEFIYHEMMTHVPLLAHGHAKHVLIIGGGDGAMLREVTRHKNVESITMVEIDAGVVSFCRQYLPNHNAGSYDDLRFKLVIDDGVNFVNQTSQTFDVIISDCTDPIGPGESLFTSAFYEGCKRCLNPGGIFVAQNGVCFLQQEEAIDSHRKLSHYFSDVGFYQAAIPTYYGGIMTFAWATDNDALRHLSTEIIQARFLASGLKCRYYNPAVHTAAFALPQYLQDALAPQPS

SEQ ID NO: 154897 - DNA, 867 bp, Shigella boydii Sb227
  CDS (1)..(867): transl_table=11
atggccgaaaaaaaacagtggcatgaaacgctacacgaccagtttgggcagtactttgcggtagataacgttctgtatcatgaaaagaccgatcaccaagatctgatcatttttgagaacgctgcatttggtcgcgtaatggcgctggatggcgtagtacaaaccaccgagcgcgacgagtttatctatcatgagatgatgacccatgttccgctactggcccacggtcacgcgaaacatgtgctgattatcggcggcggcgacggtgccatgctgcgtgaagtaacccgacataaaaacgttgagtcaatcacgatggtagaaatcgatgcgggtgtcgtgtcgttctgccgtcagtatctgcccaaccataacgccgatagctacgacgatccgcgctttaagctggtgatcgacgatggcgtcaatttcgttaatcaaaccagccagacctttgatgtcattatctccgactgcaccgatcctatcggtcccggcgaaagtctgttcacctcagcattttatgaaggctgcaaacgttgcctgaatcctagcggtatcttcgtcgcacaaaacggcgtctgctttttacagcaggaagaagccatcgacagccatcgcaaactcagccattacttcagcgacgttggcttttatcaggcggcgatcccgacctattacggcggtatcatgacttttgcatgggcgacagataacgacgccttacgccatctctcaaccgaaattattcaggcgcgttttctcgcttctggcctgaaatgccgttattacaatccggcaatccatacggcagcttttgccttacctcagtatctgcaagatgcactggcttcacagccgtcctaa

SEQ ID NO: 154898 - protein, 288 aa, Shigella boydii Sb227
MAEKKQWHETLHDQFGQYFAVDNVLYHEKTDHQDLIIFENAAFGRVMALDGVVQTTERDEFIYHEMMTHVPLLAHGHAKHVLIIGGGDGAMLREVTRHKNVESITMVEIDAGVVSFCRQYLPNHNADSYDDPRFKLVIDDGVNFVNQTSQTFDVIISDCTDPIGPGESLFTSAFYEGCKRCLNPSGIFVAQNGVCFLQQEEAIDSHRKLSHYFSDVGFYQAAIPTYYGGIMTFAWATDNDALRHLSTEIIQARFLASGLKCRYYNPAIHTAAFALPQYLQDALASQPS

SEQ ID NO: 154899 - DNA, 852 bp, Rhodospirillum rubrum ATCC 11170
  CDS (1)..(852): transl_table=11
atgaccgaatggttcagcgagacccttcacccccattggcgccagagcttcgccgccgaccgcgtgctcttgcgcgaacagaccgcccatcaggatctggtgatcctcgagaatcagaccttcggccgggtgatggtgcttgacggcatggtgcagctgaccgagcgcgacgaattcgtctatcacgagatgatcgcccatgtgccgttgttcggccacggcgcggcgcggcgggtgctaatcatcggcggcggcgatggcggcacgctgcgcgaagtcctgcgccataaaaccgtcgagcgggcgaccatggtcgaaatcgacgccaccgtcgtcgagatggcgcgcgaccatatgccgatggtcagcgatggcgccttcgacgatccgcgcgccgagctgatcatcgccgacggcatcgccttcgtcgccggcgcccatcagccctatgacgtgatcatcatcgattccaccgatcccttcggtccggccgaggggctgttcaccccggccttctatggcgcctgccgccagttgctgaccccgggcggcgtgctggtggtgcaggccggcgtgcccttcctgcagccgcgcgagatcgcccatgtcaacgccgccctgtcggcggccttccccgaggtggccttctatgccatcgccgttcccacctatgtcggcggcttgatgaccctgggctgggcgagcgaggatgccggcaagaaggttcccgatccggcggttctggccgcgcgggtggcggccagcggccttgcgttcggctattactcgcccgagggccatgccggcgccttcgccctgcccccccatatccgcgccgccgcccgaggctga

SEQ ID NO: 154900 - protein, 283 aa, Rhodospirillum rubrum ATCC 11170
MTEWFSETLHPHWRQSFAADRVLLREQTAHQDLVILENQTFGRVMVLDGMVQLTERDEFVYHEMIAHVPLFGHGAARRVLIIGGGDGGTLREVLRHKTVERATMVEIDATVVEMARDHMPMVSDGAFDDPRAELIIADGIAFVAGAHQPYDVIIIDSTDPFGPAEGLFTPAFYGACRQLLTPGGVLVVQAGVPFLQPREIAHVNAALSAAFPEVAFYAIAVPTYVGGLMTLGWASEDAGKKVPDPAVLAARVAASGLAFGYYSPEGHAGAFALPPHIRAAARG

SEQ ID NO: 154901 - DNA, 852 bp, Moorella thermoacetica ATCC 39073
  CDS (1)..(852): transl_table=11
ttgcgcggtatttggttttcagaactacagacaccggacctggcgatttccgttcgtctgaaccaaaccctgcatcatgaaaaaaccccctaccaggagctggccgtggtggatacggaagcctacggccgcatgctccttctggacaatattatccagacgaccgttaaggacgagttcttctatcatgagatgatcgcccacgtgcccttgaatacccatcccaaccccaggaccgccctggttatcggtggcggcgacggcggcgtggtccgggaaattgtcaaacacccttcaattgagaaggttaccctggtggagattgacgcccgggtggtggccaatgcccgcgagtacctgccggagatcgcctgcggcttagacgacgcccgggtggagatccgctttgaagacggcatcgagcacgtccgccagcgggagaatacttatgacgtaattatcgtcgactctaccgaccccatcgggccggcagtgggcctcttcagcgctgagttttaccgtaacgtctaccgggctttaaaagccgatggtgtattcgtcgcccagacggaatcccctatctttaacagcaggcttatccgccggatccagcgcgacctcaaggagatcttccccatagccaggctatacctgaccacggtgcccacctatccgggtggtctttgggccttcagcctggggagcaagaagtatgaccctctggaggtcgattggagacaggcccccaaggttgcgacccgttattataccccggccattcaccaggccgccttttcccttcccccatttgtccaggagttcctggaggccccggaggaagaagagttttag

SEQ ID NO: 154902 - protein, 283 aa, Moorella thermoacetica ATCC 39073
MRGIWFSELQTPDLAISVRLNQTLHHEKTPYQELAVVDTEAYGRMLLLDNIIQTTVKDEFFYHEMIAHVPLNTHPNPRTALVIGGGDGGVVREIVKHPSIEKVTLVEIDARVVANAREYLPEIACGLDDARVEIRFEDGIEHVRQRENTYDVIIVDSTDPIGPAVGLFSAEFYRNVYRALKADGVFVAQTESPIFNSRLIRRIQRDLKEIFPIARLYLTTVPTYPGGLWAFSLGSKKYDPLEVDWRQAPKVATRYYTPAIHQAAFSLPPFVQEFLEAPEEEEF

SEQ ID NO: 154903 - DNA, 864 bp, Hahella chejuensis KCTC 2396
  CDS (1)..(864): transl_table=11
atgagcgagcagatccccgggtggtttaccgaaatctttcaggaccagggcaccgggttttccctcaaagtaaaaagtaaactgcacgaagagcagagccagtatcaaaagattgaaatctttgagacggaaaccttcggtaatctgatggtgttggacggttgcgtcatgttgactgaccgtgacaatttcctctaccacgaaatgatgacccaccccgcgctgtttactcatcacgcgccgaagaaagtcgtgattgttggcggcggcgattgcggcacattgaaagaagtgctcaaacaccctggcgtagaggaagcctggcaggtggaaatcgatgagcgcgtcactcgcgttgcagagaagtatttccctgacctgtgcaccgccaacaatgacccgcgcgccaacttcttcttcggcgatggcatcaaatggatcgctgacgcgccattggaatccatcgacctgattattgttgactccaccgacccggttggacctgctgaaggtctgttcgccgtcgacttctaccgcaactgtttcatggcgctgcgcgaaggcggcatgatcgtgcagcagacggaatcccctttgctgcacacttccagcatcatcaagaaagtgcatgacgatatgcgtcaggctggttttgacggcgtcagaacgctgccgttcccacagcctgtatatcctaccggctggtggagctgcaccatggcgggcaagggtaagaagctggagtttttccgagaagaagatgcggcggagcgtcctttcgtcacccgctactacaatgcggaagtgcataaagcagccctggccctgcctgaatttatgaagaatgaacttgacttagattag

SEQ ID NO: 154904 - protein, 287 aa, Hahella chejuensis KCTC 2396
MSEQIPGWFTEIFQDQGTGFSLKVKSKLHEEQSQYQKIEIFETETFGNLMVLDGCVMLTDRDNFLYHEMMTHPALFTHHAPKKVVIVGGGDCGTLKEVLKHPGVEEAWQVEIDERVTRVAEKYFPDLCTANNDPRANFFFGDGIKWIADAPLESIDLIIVDSTDPVGPAEGLFAVDFYRNCFMALREGGMIVQQTESPLLHTSSIIKKVHDDMRQAGFDGVRTLPFPQPVYPTGWWSCTMAGKGKKLEFFREEDAAERPFVTRYYNAEVHKAALALPEFMKNELDLD

SEQ ID NO: 154905 - DNA, 864 bp, Sodalis glossinidius str. 'morsitans'
  CDS (1)..(864): transl_table=11
atgtcccatcaagaaacctggcacgaaacgttacacgatcatttcggccaatattttactgtggataatcttctgtaccgggatacaaccggccagcaggatttggtgatatttgaaaacgccgcgctcggccgcgtcatggcgttggacggcgtggtgcagaccaccgagcgtgatgagtttatttaccatgaaatgatggctcatgtaccgcttatcgcgcatggcggtgccaaaaaagtgctgatcatcggcggcggcgacggcggtatgctacgcgaagtcagccggcatcccggcgttgaacagataacgatggttgaaatcgatgccggcgtagtgacgttctgcaagcaatacctgccgcgccacaacgccggcgcgtttgacgatccgcgcttcaagctggtgatcgctgacggggtgaactttgtttcccaaagcagtgagaaatttgatgtcatcatttccgactgcaccgaccctatcgggccgggagaaagcctatttacctctaatttttatcaagactgcgcacgctgtctcaatgagggcggcattttcgtcgcgcagaacggcgtgtgttttttacagcaggatgaagtggtaaacagccatcgtaaacttggtcactattttagcgacatcagtttttatcaggcggcggtgccgacctattatggcggcatcatgaccttcgcctgggcgagccagaatccggcgctacgccagctcgacacggcgaccctggcggctcgtatcgacgagaccgcgctaacctgccgctattacaatgcggcgatccatcacggcagcttcgccctgccgcaatatttgctgaatgccttatcagcctcccgctga

SEQ ID NO: 154906 - protein, 287 aa, Sodalis glossinidius str. 'morsitans'
MSHQETWHETLHDHFGQYFTVDNLLYRDTTGQQDLVIFENAALGRVMALDGVVQTTERDEFIYHEMMAHVPLIAHGGAKKVLIIGGGDGGMLREVSRHPGVEQITMVEIDAGVVTFCKQYLPRHNAGAFDDPRFKLVIADGVNFVSQSSEKFDVIISDCTDPIGPGESLFTSNFYQDCARCLNEGGIFVAQNGVCFLQQDEVVNSHRKLGHYFSDISFYQAAVPTYYGGIMTFAWASQNPALRQLDTATLAARIDETALTCRYYNAAIHHGSFALPQYLLNALSASR

SEQ ID NO: 154907 - DNA, 939 bp, Synechococcus sp. JA-3-3Ab
  CDS (1)..(939): transl_table=11
atgaacaccccaaagagcttcttctgggcgcaggagtacttcaccccctgggactacactgcccgtgccatcacgcgcattctggcctaccgaaaaacccgttttcaggagatgctgatcgccgagacgggagcctatggcaagggcctgatgctggatggccactggcagtccaccacggcggacgaattcctgtaccacgaggctctggttcatccggccctggtgcaggtcgtccaggcgggtgggatcccgcggcgagtgttgatattgggtggtgcggaaggggcgacgctgcgggaggtgctgcgctggcgctcggtggagcaagtggtgatggtggatatcgacggggaggtggtggaagcctgtcgagagcatctgccggaaatgcaccaaggatcctttgcggatccgcgggcagaggtggtgatcgccgacgccttggactttcttggccagacggagccgatctgggacgcgatcctttccgatctgtcggatcccgttgaggccggcccggcctaccgcctctttacccaggagtttttccgccaggttcgctccaagttgcagaccgctggggcttttgtcatccaagctgggccgacgggtccagtggagttgtggcagcacactcgcatcgttcacaccttgaaaacggtgtttgctgctgtgcagccctacgctatctacgcccccacctacggcgggccgctggggtttgccctggcagcccaggatcccatctcttccaggccggagcccgaacaggtcgaccagatcctggcccaacacctggatcccgaccgcggagcgctgcgcttcatcgatggcatcaccctcctgggactctaccaggttcccgcccacctgcgccgtgccattgctgctgagaccaccgtctacaccctggccaaccctcctcaggtcgagtaa

SEQ ID NO: 154908 - protein, 312 aa, Synechococcus sp. JA-3-3Ab
MNTPKSFFWAQEYFTPWDYTARAITRILAYRKTRFQEMLIAETGAYGKGLMLDGHWQSTTADEFLYHEALVHPALVQVVQAGGIPRRVLILGGAEGATLREVLRWRSVEQVVMVDIDGEVVEACREHLPEMHQGSFADPRAEVVIADALDFLGQTEPIWDAILSDLSDPVEAGPAYRLFTQEFFRQVRSKLQTAGAFVIQAGPTGPVELWQHTRIVHTLKTVFAAVQPYAIYAPTYGGPLGFALAAQDPISSRPEPEQVDQILAQHLDPDRGALRFIDGITLLGLYQVPAHLRRAIAAETTVYTLANPPQVE

SEQ ID NO: 154909 - DNA, 879 bp, Methanospirillum hungatei JF-1
  CDS (1)..(879): transl_table=11
atggatacatctcttttttcagacctgctctgtgaatcactgaatgataacagcgggtttttctttaaaaagggaagactgctggagcagggtgaaacgccctttcaagtctatgaggtctgggatactccggagcttggaaaactcttccggctggacggatatttcatgacatcagagagggatgagttcttttaccatgagaatatgattcatcccgccctcgtctctcatcctgaaccagagaccgtcctcatcatcggtggcggggatggcggatcagctgacgaggtattcaagcacccgtcggtgaaacggatcgttcttgtcgaactggacaaagcggttattgacctttcacgcaagtactttgaatcggtacaccatggatctcttgatgatccccggatggagattctcattgaagacgggctgaaatatgtcagggagatcggaccaggaaaagaagaaaagtttgatctgatcgttctggacctgaccgatcccctgggtccggctgccgagctctattcaccacgatttatggcagagtgtaaggcacttctgaatgagggaggtatgtttgtcctccacatcggaccgcctgtctatgcaccgcagcgggtatccgggcttatgaaaaaccttaccagtgtctttcacatcgtggccccatactttgtgtatattccgctctatggaagcctctggggtatggcctgtgcatctgataccagagatcccagacagacgaacaaagcgagggtagatgagattatcagggaacgttcactaccaaatcttcagtattataacggggctactcatgaagcaggatttgccctgcctgagtatctgaaaaaaatactttcctcgtaa

SEQ ID NO: 154910 - protein, 292 aa, Methanospirillum hungatei JF-1
MDTSLFSDLLCESLNDNSGFFFKKGRLLEQGETPFQVYEVWDTPELGKLFRLDGYFMTSERDEFFYHENMIHPALVSHPEPETVLIIGGGDGGSADEVFKHPSVKRIVLVELDKAVIDLSRKYFESVHHGSLDDPRMEILIEDGLKYVREIGPGKEEKFDLIVLDLTDPLGPAAELYSPRFMAECKALLNEGGMFVLHIGPPVYAPQRVSGLMKNLTSVFHIVAPYFVYIPLYGSLWGMACASDTRDPRQTNKARVDEIIRERSLPNLQYYNGATHEAGFALPEYLKKILSS

SEQ ID NO: 154911 - DNA, 870 bp, Francisella tularensis subsp. holarctica
  CDS (1)..(870): transl_table=11
atgatagctaatattaataataaaaaaatatttcatgaaactttgtaccatagctatcatcaaagtatagcaatttctgaaatattgtatgaacataaaacagattaccaacatctagtaatttttaataatccaatttttggtaatgtcatggtcttggatggtattgtacagactactgaaaaagatgagtttatttatcatgaaatgttagtgcatgtaccagttatcgcgcatgggaatgttaaaaatatattaattattggtggcggcgatggtggtatgcttagggaagctcttagtcataaagctgtcgaatttgtaacactagttgaaattgaccaagctgttatagatatgtgccaagagtactttccagggcattcaaaaggtgcttttgatcatcctaaagcgaaaatagttattcaagatggttgtgaatttgtcaaaaatccgcctaggaaatatgatttgattatttgtgatagtactgatccgattggtccaggagaggttttatttacctcaaaattttataaagactgtaaagaagctctaaatccaggtggtataatggtaacccaaaatggagtgatctactttcaaatagatgagttaaagaaaactcttgagcgctttgaaccattatataaagatgtttctttttatactgcagcagttccaacatatgtcggtggaagtatggcatttggttggggcactgatgaattatcctatcgtaatcacgatattcaagtaattgcacagagatttcttaagagcggtattaaaacaaaatactacaatccagctatacatattgctgcttttgctttaccacaatatgttatagatactctaaagaagtaa

SEQ ID NO: 154912 - protein, 289 aa, Francisella tularensis subsp. holarctica
MIANINNKKIFHETLYHSYHQSIAISEILYEHKTDYQHLVIFNNPIFGNVMVLDGIVQTTEKDEFIYHEMLVHVPVIAHGNVKNILIIGGGDGGMLREALSHKAVEFVTLVEIDQAVIDMCQEYFPGHSKGAFDHPKAKIVIQDGCEFVKNPPRKYDLIICDSTDPIGPGEVLFTSKFYKDCKEALNPGGIMVTQNGVIYFQIDELKKTLERFEPLYKDVSFYTAAVPTYVGGSMAFGWGTDELSYRNHDIQVIAQRFLKSGIKTKYYNPAIHIAAFALPQYVIDTLKK

SEQ ID NO: 154913 - DNA, 855 bp, Desulfitobacterium hafniense Y51
  CDS (1)..(855): transl_table=11
atggaattatggtatacagaagagcatacggaaaacgttcgcttttcgattaaggtggatcggcagctttattcaggacagagtgagtttcaaaggatcgatgtctttgaatccaaagagtttggcaccttttttaccctggatggcttgatgatggtgacccaaaaggatgaatttatttatcacgatatgattgttcatgttcccatggcgaccaacccccaaattaaagatgttttggtcatcggggccggggatgggggaaccgtccgcgaactgacccgctatgactctatcgtcaacattgacatggtggaaattgataaactggtggtggatgtctgtaaagagtatctgccccagacggcttgcaagctggaggatccgcgggttcgtttgttctttgaggatggcttgagatttatccggactaaagaaaacagctatgatctgattattgtagactcgacggatccctttggtccgggggaaggtctgtttacaaaagagttttatggcaactgctataaagccctcaaggatgatggcatcctggtgaatcagcatgagagcccttattatgaaacctatgcccagaacatgggccgggctcaccaaaggatcaaagaatttttccccgtctgccgggtctatcaagctcatattcccacctatccttccggacactggcttttcggctttgcttcgaaaaagtatgaccccttgatcgatatagacgagcaggcctggaacgacttagggattaaaactcaatactataacacggagatccataaaggctgctttgctctccccaattatgtcaaagaacagctggccgatgcggtggaataa

SEQ ID NO: 154914 - protein, 284 aa, Desulfitobacterium hafniense Y51
MELWYTEEHTENVRFSIKVDRQLYSGQSEFQRIDVFESKEFGTFFTLDGLMMVTQKDEFIYHDMIVHVPMATNPQIKDVLVIGAGDGGTVRELTRYDSIVNIDMVEIDKLVVDVCKEYLPQTACKLEDPRVRLFFEDGLRFIRTKENSYDLIIVDSTDPFGPGEGLFTKEFYGNCYKALKDDGILVNQHESPYYETYAQNMGRAHQRIKEFFPVCRVYQAHIPTYPSGHWLFGFASKKYDPLIDIDEQAWNDLGIKTQYYNTEIHKGCFALPNYVKEQLADAVE

SEQ ID NO: 154915 - DNA, 867 bp, Escherichia coli UTI89
  CDS (1)..(867): transl_table=11
atggccgaaaaaaaacagtggcatgaaacgctacacgaccagtttgggcagtactttgcggtagataacgttctgtatcatgaaaagaccgatcaccaggatctgatcatttttgagaacgccgcatttggtcgcgtaatggcgctggatggtgtagtacaaaccaccgagcgtgacgagtttatctatcatgagatgatgacccatgttccgctactggcccacggtcacgcgaaacatgtgctgattatcggcggcggcgacggtgccatgctgcgtgaagtaacccgacataaaaacgttgagtcaatcacgatggtggaaatcgatgcgggtgtcgtgtcgttctgccgtcagtatcttcccaaccataacgccggtagttacgacgatccgcgctttaaactggtgatcgacgatggtgtcaatttcgttaatcaaaccaaccagacctttgatgtcattatctccgactgcaccgatcctatcggtcccggcgaaagtctgtttacttctgcattttatgaaggctgcaaacgttgcctgaatcctggcggtatcttcgtcgcacaaaacggcgtctgctttttacagcaggaagaggccatcgacagtcatcgcaaactcagccattacttcagcgatgttggcttttatcaggcggcgatcccgacctattacggcggcatcatgacctttgcatgggcgacagataacgacgccttacgccatctctcaaccgaaattattcaggcgcgttttctcgcttctggcctgaaatgccgttattacaatccggcagtccatacggcagcttttgccttaccccagtatctgcaagatgcactggcttcacagccgtcctaa

SEQ ID NO: 154916 - protein, 288 aa, Escherichia coli UTI89
MAEKKQWHETLHDQFGQYFAVDNVLYHEKTDHQDLIIFENAAFGRVMALDGVVQTTERDEFIYHEMMTHVPLLAHGHAKHVLIIGGGDGAMLREVTRHKNVESITMVEIDAGVVSFCRQYLPNHNAGSYDDPRFKLVIDDGVNFVNQTNQTFDVIISDCTDPIGPGESLFTSAFYEGCKRCLNPGGIFVAQNGVCFLQQEEAIDSHRKLSHYFSDVGFYQAAIPTYYGGIMTFAWATDNDALRHLSTEIIQARFLASGLKCRYYNPAVHTAAFALPQYLQDALASQPS

SEQ ID NO: 154917 - DNA, 855 bp, Ruegeria sp. TM1040
  CDS (1)..(855)
atgacgaaagaggtctggaacacagaacgcctgcacgatcatttcgcccaatccctgcgcgtgagcgagatgtattatgacagcaagaccgagcaccagcggctcaaggtctttcagaatggcaccttcgggcgcgttctgacgctggacgatgtggtacagaccaccgaaggcgacaacttcatctatcatgaaatgctgacccatgtgccgatcctggcacatggggccgccaaacgtgtgctcatcatcggtggcggcgacggtggcattgcgcgcgaggtgctgaaacacgcctccgtcgagcatgtcaccatggtggaaatcgacgctggcgttgtcgatttttccaaggaatacctgccgatgctgagccagggcgcatttgacgatgcgcgtctcaacctggtgatcaatgacggtgcggtctttatgaaagagaccgaagataaattcgacgtcatcattgtcgactcgaccgaccccatcggccccggcgaagtgctgtttaccgatacattctatggccatgcagcgcgtgcgctaaccgaggatggcatcatcgtcacccagaacggcgtgccgttcatgcagggcgatgagctgaccaacacgatgcgggcctttcaagcgctgtttcaggatgcgacctgctatctcgcgacgattccgacctacgtcggcggcccgatggcattgggctggggtagccactccacaaaggcgcgttcggtggatctgacaacgcttgaagctcggtttgcagcggcaggcctttcgccggactactacaccccagaggtgcacaaggcggcattcgcgctgcccggatacgtcaagaaactgtttccataa

SEQ ID NO: 154918 - protein, 284 aa, Ruegeria sp. TM1040
MTKEVWNTERLHDHFAQSLRVSEMYYDSKTEHQRLKVFQNGTFGRVLTLDDVVQTTEGDNFIYHEMLTHVPILAHGAAKRVLIIGGGDGGIAREVLKHASVEHVTMVEIDAGVVDFSKEYLPMLSQGAFDDARLNLVINDGAVFMKETEDKFDVIIVDSTDPIGPGEVLFTDTFYGHAARALTEDGIIVTQNGVPFMQGDELTNTMRAFQALFQDATCYLATIPTYVGGPMALGWGSHSTKARSVDLTTLEARFAAAGLSPDYYTPEVHKAAFALPGYVKKLFP

SEQ ID NO: 154919 - DNA, 861 bp, Alcanivorax borkumensis SK2
  CDS (1)..(861): transl_table=11
atgagcagcaccacaaaaaactggttttacgagcacttcgactccgctggcactgccttcggcctgcgcctgaaacaaaagctggaagaagtacaaaccgagtaccagcacatcgagatgtgggaaaccgacaccttcggttacctgatgaccatcgatggcgccaccatgctttccacccgcgacaactttctctaccacgagatgatgtcgcacccggtactgttcagccatgccagccccaagcgcgtcatcattattggtggcggcgactgcggcaccctgcgtgaagtgctgcgtcatccgagcgtggaaaaagccacccagatcgacatcgacgaaatggtcacccgctattccgagaaatacttcccagaattgtgcgagtccaacgatgacagccgtgccgagctattgttcgaagatggcgtgcaatacatgcgcaactgtgaagacggcagcgtggacgtgatcatcgtcgattccactgacccggtgggcccggcggaaggtttgttcaaagccgacttcttccgcgattgccaccgcgtgctggccgacggcggcatcatcgtgcagcaatctgaatccccgctgctgcacagcgacaccatcattaaagacctgcataccaacatgcgcgaagcgggcttcaccaccacccaaaccctgcccttcccgcagccggtgtaccccagcggctggtggagctgcaccctggcgggaaaaaacaccgacgtgagccgcttccgggaagccgatgccaccggcaaagggtttgatacccgctactattcagcggcgattcataaaggggcgttggtgatgccgccgtttatggaagcggcgattaagcgctga

SEQ ID NO: 154920 - protein, 286 aa, Alcanivorax borkumensis SK2
MSSTTKNWFYEHFDSAGTAFGLRLKQKLEEVQTEYQHIEMWETDTFGYLMTIDGATMLSTRDNFLYHEMMSHPVLFSHASPKRVIIIGGGDCGTLREVLRHPSVEKATQIDIDEMVTRYSEKYFPELCESNDDSRAELLFEDGVQYMRNCEDGSVDVIIVDSTDPVGPAEGLFKADFFRDCHRVLADGGIIVQQSESPLLHSDTIIKDLHTNMREAGFTTTQTLPFPQPVYPSGWWSCTLAGKNTDVSRFREADATGKGFDTRYYSAAIHKGALVMPPFMEAAIKR

SEQ ID NO: 154921 - DNA, 852 bp, Clostridium perfringens ATCC 13124
  CDS (1)..(852): transl_table=11
atggaattatggtacacagaagaacatacagacaaggtacgtttttcaatcaaagtagatgaacaactttatagtggaaagagcgatttccaaagaatagatgtttttaaatctcaagagtttggaactttcttcacattagatggacttatgatggtaacagaaaaggatgaatttatttatcatgacatgatagttcatgttccaatggctacaaatcctaatataaaaaatgtactagttataggagctggagatggtggaactgtaagagaacttacaagatatgaaactatagaaaaaatagacatggttgaaattgataagttagttgttgatgtttgtagagaatatttacctcaaacagctaataaattagatgatcctagagtaagtttattctttgaagatggattaaaatttgtacgctcagttgaaaataaatatgacttaataatagttgattcaacagatccatttggacctggagaaggtttattcacaagagaattttatggaaattgctttaaggccttaaaagaagatggaatacttgtaaatcaacatgaaagcccatactatgaagagtatgcaaggggaatgaagagagctcataagagaataaaagaatgtttcccagtatgtagagtttatcaagctcatataccaacttatccatcaggacattggctatttggttttgcatcaaaaaaatatgatccactaaatgctgatatagaaaagtggaatgatttaggattaaaaactaaatattataacactgagttgcataaaggatgttttgcattacctaattatgttaaggagatgctagagaatgttgatgaatag

SEQ ID NO: 154922 - protein, 283 aa, Clostridium perfringens ATCC 13124
MELWYTEEHTDKVRFSIKVDEQLYSGKSDFQRIDVFKSQEFGTFFTLDGLMMVTEKDEFIYHDMIVHVPMATNPNIKNVLVIGAGDGGTVRELTRYETIEKIDMVEIDKLVVDVCREYLPQTANKLDDPRVSLFFEDGLKFVRSVENKYDLIIVDSTDPFGPGEGLFTREFYGNCFKALKEDGILVNQHESPYYEEYARGMKRAHKRIKECFPVCRVYQAHIPTYPSGHWLFGFASKKYDPLNADIEKWNDLGLKTKYYNTELHKGCFALPNYVKEMLENVDE

SEQ ID NO: 154923 - DNA, 852 bp, Clostridium perfringens SM101
  CDS (1)..(852): transl_table=11
atggaattatggtacacagaagaacatacagacaaagtacgtttttcaatcaaagtagatgaacaactttatagtggaaagagcgatttccaaagaatagatgtttttaaatctcaagagtttggaactttcttcacattagatggacttatgatggtaacagaaaaggatgaatttatttatcatgacatgatagttcatgttccaatggctacaaatcctaatataaaaaatgtactagttataggagcaggagatggtggaactgtaagagaacttacaagatatgaaactatagaaaaaatagacatggttgaaattgataagttagttgttgatgtttgtagagaatatttacctcaaacagctaataaattagatgatcctagagtaagtttattctttgaagatggattaaaatttgtacgttcagttgaaaataaatatgacttaataatagttgattcaacagatccctttggacctggagaaggtttattcacaagagaattttatggaaattgctttaaggccttaaaagaagatggaatacttgtaaatcaacatgaaagcccatactatgaagagtatgcaagggggatgaagagggctcataagagaataaaagaatgtttcccagtatgtagagtttatcaagctcatataccaacttatccatcaggacattggctatttggttttgcatcaaaaaaatatgatccactaaatgctaatatagaaaagtggaatgatttaggattaaaaactaaatattataacactgatttgcataaaggatgttttgcattacctaattatgttaaggagatgctagagaatgttgatgaatag

SEQ ID NO: 154924 - protein, 283 aa, Clostridium perfringens SM101
MELWYTEEHTDKVRFSIKVDEQLYSGKSDFQRIDVFKSQEFGTFFTLDGLMMVTEKDEFIYHDMIVHVPMATNPNIKNVLVIGAGDGGTVRELTRYETIEKIDMVEIDKLVVDVCREYLPQTANKLDDPRVSLFFEDGLKFVRSVENKYDLIIVDSTDPFGPGEGLFTREFYGNCFKALKEDGILVNQHESPYYEEYARGMKRAHKRIKECFPVCRVYQAHIPTYPSGHWLFGFASKKYDPLNANIEKWNDLGLKTKYYNTDLHKGCFALPNYVKEMLENVDE

SEQ ID NO: 154925 - DNA, 861 bp, Alkalilimnicola ehrlichei MLHE-1
  CDS (1)..(861): transl_table=11
atgaggcgtgacgacaactggttcaccgaggtcctggaggaggagggtatggccttctccctgcgggtgcgtgagaagctgcacgaggagcgcaccgccttccagcacatcgaggtctacgagaccgaggcctggggccggctgctggtgatcgacggctgcgtgatgctcaccagccgcgacaacttcgtctaccacgagatgatgagccacccggcgctgttcacccacccggacccgcgccgggtggcgatcatcggcgggggtgactgcggcatgctgcgcgaggtgctgaagcacccgggcatcgagtcggtggtgcaggtggatatcgacgccggggtcacccgggccgccgagcgctacttcccggagctcaccgaggccaacgacgacccgcgcgccaccctgctgttcgatgacggtgtggcctggatccaggaccagccggcgggcagcctggacgtggtcattgtcgacagcaccgacccggtgggggtggcggaggggctcttcggcccgggcttcctgggccaggtgtatcgggtgctgggcgaccagggcctgatggtgcagcagagcgagtcgcccatcctgcaccgggacaccatcctcgagcgcctccacggccacatgcgcggcagtggcttcgcgccggtggttaccctgccctacccggtggtcagctacccgtccggctggtggtcggcgaccctggccagcaagggcccgcatccggcggccttccgagagtcggacgcgcgcgccaaggcctttgccaccctgtactacaacgccgatatccaccgggcggcactggcggcgccggagttctgcaaaggcctgctcaccgatcagtag

SEQ ID NO: 154926 - protein, 286 aa, Alkalilimnicola ehrlichei MLHE-1
MRRDDNWFTEVLEEEGMAFSLRVREKLHEERTAFQHIEVYETEAWGRLLVIDGCVMLTSRDNFVYHEMMSHPALFTHPDPRRVAIIGGGDCGMLREVLKHPGIESVVQVDIDAGVTRAAERYFPELTEANDDPRATLLFDDGVAWIQDQPAGSLDVVIVDSTDPVGVAEGLFGPGFLGQVYRVLGDQGLMVQQSESPILHRDTILERLHGHMRGSGFAPVVTLPYPVVSYPSGWWSATLASKGPHPAAFRESDARAKAFATLYYNADIHRAALAAPEFCKGLLTDQ

SEQ ID NO: 154927 - DNA, 882 bp, Granulibacter bethesdensis CGDNIH1
  CDS (1)..(882): transl_table=11
atgtctgatcaaaccacctcctctactggcacctggatcgctgaaacgctgtattctgactgggggcagcaattccgcgtcggcaaggagctggcccgcgttaaatcagactttcaggacattgtggtgttcgagagcaattctcatggtcgcgtcctgctgctggacggtgtggtgcaaatcactgaagccgatgaattcgtctatcaggaaatgctgacccatgtgccgctgatcgcccatggcgcggccaaaaacgtgctgatcatcggcgctggtgacggcggtgtgctgcgccgtgtgctggaacacaaaaccgtcgaacgcgccgtcatggtcgaaattgacggcgaagtcatccgtctcagccgcgagttcatgccgggcatcagtggcaatgcctggaacgatccacgggccgaggtcatcgttggtgacggcatcgattatgtaaaaaaagccgctgatggcagcttcgatgtcatcatcgtcgacagcaccgatccgatcggcgtgggcgaagtgctgtttacggatgatttctatcagaatgcagcccgtatcctgaccgcccgcggtctgatcgtgaaccagtgcggcgtgcccttcatgcaggctgatgaattgcgtgaaaccagcctgcgtcgccgcaacttcttcccccgcgtgggtgcctatgtcgcagccgttccgacctatgtcggcggtttcatgactttgggcttcgcgaccaaggatgctgattttacacaggccgatctggaaacagtgcgtgcccgtgcccaggcggcagggatcgccaacacacgctattggacgccggaagtgcatgtcggcagcttctatctgccgccctacattgccgagcagctgcctgcctga

SEQ ID NO: 154928 - protein, 293 aa, Granulibacter bethesdensis CGDNIH1
MSDQTTSSTGTWIAETLYSDWGQQFRVGKELARVKSDFQDIVVFESNSHGRVLLLDGVVQITEADEFVYQEMLTHVPLIAHGAAKNVLIIGAGDGGVLRRVLEHKTVERAVMVEIDGEVIRLSREFMPGISGNAWNDPRAEVIVGDGIDYVKKAADGSFDVIIVDSTDPIGVGEVLFTDDFYQNAARILTARGLIVNQCGVPFMQADELRETSLRRRNFFPRVGAYVAAVPTYVGGFMTLGFATKDADFTQADLETVRARAQAAGIANTRYWTPEVHVGSFYLPPYIAEQLPA

SEQ ID NO: 154929 - DNA, 960 bp, Nitrosomonas eutropha C91
  CDS (1)..(960): transl_table=11
atggaagaatccggcaatgcttataaagcgcgttatgtagcagagcgtctgagcccggattttggtttttatctgcgtgcaagccgacaactggcaaaggtaaactcagcctggcaaaaaattgagatttttgagaatccactgtttggccgggtgatgcgcatcgatggctgtttcatgacctcggagcgtgatgaatttttttatcatgaacccatggtgcatttgcctgccatcagccatggtgcaccgcgccacgccctgattgttggtggtggcgatggcggcgcggcagaagagttactcaaatatcccggggtgcagcgcctggtactggctgaactggatggtgaggtgatccggatggcgcgagaatggttgccaactattcatcgcggggcatttgatgatccgcgcctggagctgctcctgggcgatgcgctgccttttattgaaagtagcgttgaacgcttcgatcagatcattctcgacttgaccgacccgttcgggccagcaaccgatctttacacagttgaattttatcgtgcctgccaaaagctgttgaatcccggtggggtaatttcgctgcatatcggatcgcccattcatttgcagatacccatggcaagaattgccgcttcgttacgggaggtgtttgccatcgttcggccctatttgcagtatgtcccgctctacggcacgttatggtgtatggccatggcttccgatacaactgatcctcttcttctgagctcagaagaagttaatgcacgtctagataaacagggattgcaggatttgcagctctacaacggagcgactcaccatgccctgctcgcacaacctaattttgtacgcgagatcctgcagcgaccggttaaattaattcaccggggtgaaatacttgaaggaatcaacgaccccgaatcattgcctggcgttaccgtcatcccggactga

SEQ ID NO: 154930 - protein, 319 aa, Nitrosomonas eutropha C91
MEESGNAYKARYVAERLSPDFGFYLRASRQLAKVNSAWQKIEIFENPLFGRVMRIDGCFMTSERDEFFYHEPMVHLPAISHGAPRHALIVGGGDGGAAEELLKYPGVQRLVLAELDGEVIRMAREWLPTIHRGAFDDPRLELLLGDALPFIESSVERFDQIILDLTDPFGPATDLYTVEFYRACQKLLNPGGVISLHIGSPIHLQIPMARIAASLREVFAIVRPYLQYVPLYGTLWCMAMASDTTDPLLLSSEEVNARLDKQGLQDLQLYNGATHHALLAQPNFVREILQRPVKLIHRGEILEGINDPESLPGVTVIPD

SEQ ID NO: 154931 - DNA, 822 bp, Syntrophomonas wolfei subsp. wolfei str. Goettingen
  CDS (1)..(822): transl_table=11
ttggatctctgggttaccgaatatcaaaccccgtctttaggcttttcctgcaaggttaaagagaccttgcgttatgagaaaacggaatttcaggagctttccgtagtggaaaccgagcaattcggcaaaatgctgctgttggacggaatggttcagaccacggaacaggatgaattcgtttaccacgaaatgattaccctggtagcccttaactcccaccgcaatccggagaaagtcctaattatcggaggtggcgatggaggaacattgcgcgaagttgtgaagcatcctgccgtaagccaggctaccctggtggagattgatgaacgggtggtaattgcctccaaggatttcttcccggatttagcctgtgccttcagcgaacctaaagcagaagtcctgattgctgacggcatagaatatgttaaacagcagcatcagagctttgatttaattattgttgactctaccgagccggtaggcccagcaattcaattattctcccgcgaattttaccagagtgtatatgatgccctgaaagatgatggaatgctcgtagtgcagagcgaatctccattttataaccagaatgttattaaaatggcatttggcggtataaaccaggtatttcccctgaccaagttatatctagccaatatccccacctatcccagtggcttgtggagctttacggtaggttccaaattatatgatccccagctgccttcctgctcctacagccagggatgcaaatattacacaccggagattcaccaggcggcatttcagctcccggcctttgtaagcaggataatagaatag

SEQ ID NO: 154932 - protein, 273 aa, Syntrophomonas wolfei subsp. wolfei str. Goettingen
MDLWVTEYQTPSLGFSCKVKETLRYEKTEFQELSVVETEQFGKMLLLDGMVQTTEQDEFVYHEMITLVALNSHRNPEKVLIIGGGDGGTLREVVKHPAVSQATLVEIDERVVIASKDFFPDLACAFSEPKAEVLIADGIEYVKQQHQSFDLIIVDSTEPVGPAIQLFSREFYQSVYDALKDDGMLVVQSESPFYNQNVIKMAFGGINQVFPLTKLYLANIPTYPSGLWSFTVGSKLYDPQLPSCSYSQGCKYYTPEIHQAAFQLPAFVSRIIE

SEQ ID NO: 154933 - DNA, 870 bp, Francisella tularensis subsp. holarctica OSU18
  CDS (1)..(870): transl_table=11
atgatagctaatattaataataaaaaaatatttcatgaaactttgtaccatagctatcatcaaagtatagcaatttctgaaatattgtatgaacataaaacagattaccaacatctagtaatttttaataatccaatttttggtaatgtcatggtcttggatggtattgtacagactactgaaaaagatgagtttatttatcatgaaatgttagtgcatgtaccagttatcgcgcatgggaatgttaaaaacatattaattattggtggcggcgatggtggtatgcttagggaagctcttagtcataaagctgtcgaatctgtaacactagttgaaattgaccaagctgttatagatatgtgccaagagtactttccagggcattcaaaaggtgcttttgatcatcctaaagcgaaaatagttattcaagatggttgtgaatttgtcaaaaatccgcctaggaaatatgatttgattatttgtgatagtactgatccgattggtccaggagaggttttatttacctcaaaattttataaagactgtaaagaagctctaaatccaggtggtataatggtaacccaaaatggagtgatctactttcaaatagatgagttaaagaaaactcttgagcgctttgaaccattatataaagatgtttctttttatactgcagcagttccaacatatgtcggtggaagtatggcatttggttggggcactgatgaattatcctatcgtaatcacgatattcaagtaattgcacagagatttcttaagagcggtattaaaacaaaatactacaatccagctatacatattgctgcttttgctttaccacaatatgttatagatactctaaagaagtaa

SEQ ID NO: 154934 - protein, 289 aa, Francisella tularensis subsp. holarctica OSU18
MIANINNKKIFHETLYHSYHQSIAISEILYEHKTDYQHLVIFNNPIFGNVMVLDGIVQTTEKDEFIYHEMLVHVPVIAHGNVKNILIIGGGDGGMLREALSHKAVESVTLVEIDQAVIDMCQEYFPGHSKGAFDHPKAKIVIQDGCEFVKNPPRKYDLIICDSTDPIGPGEVLFTSKFYKDCKEALNPGGIMVTQNGVIYFQIDELKKTLERFEPLYKDVSFYTAAVPTYVGGSMAFGWGTDELSYRNHDIQVIAQRFLKSGIKTKYYNPAIHIAAFALPQYVIDTLKK

SEQ ID NO: 154935 - DNA, 843 bp, Leptospira borgpetersenii serovar Hardjo-bovis L550
  CDS (1)..(843): transl_table=11
atggaactctggttagacgaagcattagaactcaaaaatgggcgcgctcttaaaatcaaggtaaaggaattcctacattccaggacgactccttttcaaaagatcgacgtattcgaatccgtaggtttcggaagaatgttcactctcgacggagtggtcatgatgaccgaagccgatgagttcgcgtatcatgagatgatcgttcacgttcctatgatgagtcatccgaacccggaaaaggttctggtgatcggagggggagacggaggaacggttcgcgaggttctcaaacatccttcggtaaaagaagtgcatctttgtgaaatcgataagggtgtgatcgatgtttgttacgaatactttcccgagatcgcaaatgcgatgaaggatcctcgagtaaaacacgcctacgaagacggtgcgaaatacgtaaaagattatcggaattatttcgattgtattatggttgattcttccgatcccgtaggtcctgccgaagtccttttcaaaagacctttctatgaaacgatggccgactgtttgaaagaaggcggaatttgcacgacccaaggagaaagctactattatcacggaccgattatccgtgagttgttcaacttcattccggagattttcaaacactgcggttactattacactgttgttccgacttatccttccggaatcatcgggtttacatattgctctaagggaccggatccttatacggtgattcccgatctccaaagggttccgcaaggactgaagtattattctgcggagatgcacaaggcggccttcgtgcttcctcagttcgcgcagaaacatatcgttcgaaaataa

SEQ ID NO: 154936 - protein, 280 aa, Leptospira borgpetersenii serovar Hardjo-bovis L550
MELWLDEALELKNGRALKIKVKEFLHSRTTPFQKIDVFESVGFGRMFTLDGVVMMTEADEFAYHEMIVHVPMMSHPNPEKVLVIGGGDGGTVREVLKHPSVKEVHLCEIDKGVIDVCYEYFPEIANAMKDPRVKHAYEDGAKYVKDYRNYFDCIMVDSSDPVGPAEVLFKRPFYETMADCLKEGGICTTQGESYYYHGPIIRELFNFIPEIFKHCGYYYTVVPTYPSGIIGFTYCSKGPDPYTVIPDLQRVPQGLKYYSAEMHKAAFVLPQFAQKHIVRK

SEQ ID NO: 154937 - DNA, 876 bp, Shewanella amazonensis SB2B
  CDS (1)..(876): transl_table=11
atgcaagacaacaatctatatttcgagacgctgcacagcggctatggtcaatatttcgagatagacaaggtgctcttcgagcaaaagaccagtcagtggcatttatcaatttttgaaaatgcccgttttggcagggtgatggccctcaatggcgccattcaaaccaccgaagcggatgaatttgtctatcacgaaatgttgacccacgtgccggtgttggcacatggacaggttaaaagcctgctgattatcggcggtggcgatggcggcatgctccgtgaagtggtgaaacaccaggctattgagcgtatcgtgatggtggaaattgatagcgccgttgtggacatgtgcaaaacctggttgcctaatcattctgccggcgcctacgacgatccacgagtggagctggttatcgccgatggcatggactttgttgccaactgcgcagagcggtttgatgtgattatttctgactgtaccgacccggttggccccggcgaagtgctgttcagctctgatttttatgcgggctgtaaacgatgccttaatgaaaacggcatctttgtggcccaaaatggggtgccctttatgcaggttgaatccctgcaggacacggtgcgccgtatgagcagttatacccgggagtgttggttttacatggcggcagtcccaacgtacattggtggttccatggcatttgcctgggccaccgacaatcctgaggcgcgcaagcttgaccttgcaaccctcgaggcgcgtttcaacgaggctgggatcagtacccgttactacacgcccgcagtgcatcaggcaagctttgccttgcctaaatacgtcgaacaggcgatccggtcagccatgaccgtgaccgcttaa

SEQ ID NO: 154938 - protein, 291 aa, Shewanella amazonensis SB2B
MQDNNLYFETLHSGYGQYFEIDKVLFEQKTSQWHLSIFENARFGRVMALNGAIQTTEADEFVYHEMLTHVPVLAHGQVKSLLIIGGGDGGMLREVVKHQAIERIVMVEIDSAVVDMCKTWLPNHSAGAYDDPRVELVIADGMDFVANCAERFDVIISDCTDPVGPGEVLFSSDFYAGCKRCLNENGIFVAQNGVPFMQVESLQDTVRRMSSYTRECWFYMAAVPTYIGGSMAFAWATDNPEARKLDLATLEARFNEAGISTRYYTPAVHQASFALPKYVEQAIRSAMTVTA

SEQ ID NO: 154939 - DNA, 882 bp, Marinobacter aquaeolei VT8
  CDS (1)..(882): transl_table=11
atgaccgcattgaacgaaggctggttcaccgaggtatttcaggaccagggcaccgctttttcccttcaggtaaagcgcaagctccatgaagagcagacgccatttcagaaactcgaaatctatgaaaccgaaaccttcggcaacctgatggttctggacggctgtgtgatgctgaccaccagggacaatttcctgtaccacgaaatgatgacccatcctgcgctgttcacccacaaggacccgaaaaaagtggtcatcgtcggtggtggcgactgcggcaccctgaaagaagtgctgaaacacccaggagtgcaggaagcctggcaggtggagatcgatgagcgggtaacccgcatgtctgagaagtattttccagaactgtgcgaagctaatggcgacccccgtgccaacttctttttcggtgatggcatccagtggatgcgtgatatcgagccgaacagcattgatgtgctgattatcgacagtaccgacccggtgggtcctgcggaaggcctgttcgcgctggatttctatcgcgatgccatgttggccctgagggagggcggtatcatcgttcagcagagcgaatcccccctgctgcacaccaataccatcatcaaggacattcacgatgatatgcacaaagccggttttggccatgtgcagacattgccattcccccagccggtataccccacgggctggtggagctgcaccatgggcagtaaggaaaacccgctgaagtatttccgcgaggaagatgccaacaaccgcccctttgtcacccgttactacaatgccggggtgcaccacggtgccttggccatgccgcagtttatggtggatgcgctggaagatgaggttcgcccggaagagggttga

SEQ ID NO: 154940 - protein, 293 aa, Marinobacter aquaeolei VT8
MTALNEGWFTEVFQDQGTAFSLQVKRKLHEEQTPFQKLEIYETETFGNLMVLDGCVMLTTRDNFLYHEMMTHPALFTHKDPKKVVIVGGGDCGTLKEVLKHPGVQEAWQVEIDERVTRMSEKYFPELCEANGDPRANFFFGDGIQWMRDIEPNSIDVLIIDSTDPVGPAEGLFALDFYRDAMLALREGGIIVQQSESPLLHTNTIIKDIHDDMHKAGFGHVQTLPFPQPVYPTGWWSCTMGSKENPLKYFREEDANNRPFVTRYYNAGVHHGALAMPQFMVDALEDEVRPEEG

SEQ ID NO: 154941 - DNA, 963 bp, Acidovorax sp. JS42
  CDS (1)..(963): transl_table=11
atgagcggcgcccccaccgcgcaggccacgcgctacgtggccgagcgcctgaacgccgacttcggcttttacctaagcgaccgccgcctgctggccgaacgccagtcggcctggcagcacatcgaggtcttcgacaacccgcagttcggccgcgtgatgcgcatcgacggctgcttcatgaccagcgagcgcgacgaattcttctaccacgagccgatggtgcacctgccggccatcgcccaccccggcgtgcgccgtgcgctggtcgtgggcgggggggacggcggcgccgccgaggagttgctgaagctgcccggcatcgagcaggtggtgctggccgagctggatggcgaggtgattgccatggcccgcgattggctgggccagatccaccgtggcgcctttgacgacccgcgcctggaggtgcgcctgggcgacgcgcgcgccttcatcggccagaccgaggagcgcttcgaccagatcgtcctggacctgaccgaccccttcggccccgccgtggagctgtacaccgtggagttctacgccgcctgccgccgcgcgctgaacccgggcggcgtgctttcgctgcacctgggctcgcccgtgcacctgcccgagagcctggggcgcatcgccgcctcggtgcgcgcggtgtttcccatcttccggccctacctgcagtacgtgccgctgtacggcacgttgtggtgcatgggcatggcatcggacagcaccgaccccgcccggctcagcgccgacgaggtggacgcacgcatcgccgcgcgcggcctgggcgatctgcagctgtacaacggggccgtgcaccatgcgctgctggcgcagccgaacttcgtgcgtgcgctgctggatcggcctgcgctgccgctgcacagcggggatgtgctggaagaggtgcgggacccggcggagttgccggaggtggtggtgtccgctgccgcgtaa

SEQ ID NO: 154942 - protein, 320 aa, Acidovorax sp. JS42
MSGAPTAQATRYVAERLNADFGFYLSDRRLLAERQSAWQHIEVFDNPQFGRVMRIDGCFMTSERDEFFYHEPMVHLPAIAHPGVRRALVVGGGDGGAAEELLKLPGIEQVVLAELDGEVIAMARDWLGQIHRGAFDDPRLEVRLGDARAFIGQTEERFDQIVLDLTDPFGPAVELYTVEFYAACRRALNPGGVLSLHLGSPVHLPESLGRIAASVRAVFPIFRPYLQYVPLYGTLWCMGMASDSTDPARLSADEVDARIAARGLGDLQLYNGAVHHALLAQPNFVRALLDRPALPLHSGDVLEEVRDPAELPEVVVSAAA

SEQ ID NO: 154943 - DNA, 861 bp, Azotobacter vinelandii
  CDS (1)..(861): transl_table=11
atgagcgactatcaggaaactctctacgaaggctacggccagcgttttcgcatggacaggctgctccatgaagtgcgtaccgggcaccagcatctggtgatcttcgagaatgcccgcatggggcgggtgatggccctggacggagtgatccagactaccgaggccgatgagttcatctaccacgaaatgctcacccatgtgccgattctcgcccatggcgcggcacggcgcgtgctgatcgtcggcggcggcgatggcggtatcctgcgcgaggtgtgtcggcaccggagcgtcgaacggatcaccatggtcgagatcgatgccaccgtggtggagatgtgcaaggagttcctgcccgaacactccagaggagccttcgaagaccctcgcctgaacctggtgatcgacgacggcatgcgcttcgtcgccaccaccgaggacaggttcgacgtcatcatttccgactccaccgaccccatcgggccgggcgaggtgctgttctccgagaacttctaccaggcctgccggcgctgcctgaacgacggcggcatcctggtcacccagaacggtacgccgttcatgcaactgggcgaagtgcagaccaccgcgcagcgaatgaacggactgttcgccgactggcacttctatcaggctgcggtgccgacctatatcggcggggccatgaccttcgcctggggggcctgcgacgccgcctcgcgtcgcctgccgccggacatcttgcgtcagcgcttcgtcggcagcggtatcgtggcgcgctattacaacccggaaattcatcagggtgcctttgccctgccgcagtacgtgctgcaggccatcggcaagcccggcaacaattga

SEQ ID NO: 154944 - protein, 286 aa, Azotobacter vinelandii
MSDYQETLYEGYGQRFRMDRLLHEVRTGHQHLVIFENARMGRVMALDGVIQTTEADEFIYHEMLTHVPILAHGAARRVLIVGGGDGGILREVCRHRSVERITMVEIDATVVEMCKEFLPEHSRGAFEDPRLNLVIDDGMRFVATTEDRFDVIISDSTDPIGPGEVLFSENFYQACRRCLNDGGILVTQNGTPFMQLGEVQTTAQRMNGLFADWHFYQAAVPTYIGGAMTFAWGACDAASRRLPPDILRQRFVGSGIVARYYNPEIHQGAFALPQYVLQAIGKPGNN

SEQ ID NO: 154945 - DNA, 864 bp, Yersinia frederiksenii ATCC 33641
  CDS (1)..(864): transl_table=11
atgtcacagaaagaactatggtatgaaacattacatgccaacttcggccagtatttttcagtagaaaatatactgtaccgcgaaaaaaccgagcatcaggatctggtgatttttgaaaacccggtgctgggtcgggtaatggctctggacggcgtcgtgcaaaccactgaacgtgatgaatttatctatcacgaaatgatgacgcacgtccctttgctggcccatggccaggcgaagaaagtgcttatcatcggcggcggtgacggcgcgatgctgcgtgaagttagtcgccataagaatattgaccaaatcaccatggtagaaattgatgctggtgtcgtcgagttctgtcgccaatatttaccaaatcatagcgccggagcctatgacgatccccgcttcaagttagttatcgatgatggcgtcaatttcgttaaccagaccactgaaaaatttgatgtcattatctctgactgtaccgaccctattggcccaggagaaagcttgttcacatcagctttctacgagggatgtgcccgcagcctaaacgaaggcggcatttttgtggcacaaaacggagtatgtttcctgcaacaagatgaagccgtcgatagccataacaagcttagtcactatttcaaagatgtcagtttttatcaggcagcaattccgacatattacggtggtatcatgaccttcgcttgggcgacacaaaacccacagttgcgtcaattggatatcaccacgctgcaacaacgttttgcagaagccggcctgacctgccgctactataacccagccattcatgtcggcagctttgctttgccacagtatctgctggatgccttaacgaccactcgttga

SEQ ID NO: 154946 - protein, 287 aa, Yersinia frederiksenii ATCC 33641
MSQKELWYETLHANFGQYFSVENILYREKTEHQDLVIFENPVLGRVMALDGVVQTTERDEFIYHEMMTHVPLLAHGQAKKVLIIGGGDGAMLREVSRHKNIDQITMVEIDAGVVEFCRQYLPNHSAGAYDDPRFKLVIDDGVNFVNQTTEKFDVIISDCTDPIGPGESLFTSAFYEGCARSLNEGGIFVAQNGVCFLQQDEAVDSHNKLSHYFKDVSFYQAAIPTYYGGIMTFAWATQNPQLRQLDITTLQQRFAEAGLTCRYYNPAIHVGSFALPQYLLDALTTTR

SEQ ID NO: 154947 - DNA, 888 bp, Oceanicaulis alexandrii HTCC2633
  CDS (1)..(888): transl_table=11
atgaccgacacggccaagcacacctatcgcgacgccaatggcgatctgtggttccgggaatccctgagcgaggggatcggcaacggcctgcgcatcgacaatctgctctatgccgaagcctccgacgttcaggacctgatcgtgttcgagaacaatgagaacggccgcgtgctggcgattgacggcctggtgcaggtctccatggcggacgagttcatctatcacgagatggtctcccatgttccgctcctgtcgcacggcgcagtcaagcgtgtgctgatcgtgggcggcggcgatggcggcgccatgcgcgaaatgctcaagcacaagggcgttgaatcgatcaccctcgtcgagatcgacccggacgtgatcgagttctccaaaaaatggttcccggacgtgtcccagggctcgttcgatgatccgcgcgtcaatgtggtgatcgcggatggctcgaaatatgtcgaggagacctcggacaaattcgatctcatcctgatcgactcctctgacccggtcgggccgagcgcggtgctgttcacccgtgaattctacaccgcctgctccaagcttctgaatgagggcggcgtcatcgtcacccagtccggtctcgccgcgatccaccccgagccggtgaaatccacgtcagacagcttcaaatcgctgttcaagcattcgggcttttacctgatctgcgtgccggccttctcgggcggcttcatggcgctgggctttgccaccgataacgacgcgacgtttgatccggacattgagacgatccgcacgcgtttcgctgaactcgacatcaagaccaagtattacagccccgagatccacaagggcagcttcgccctgccgccctatatcgccgagaaaatcgcgtaa

SEQ ID NO: 154948 - protein, 295 aa, Oceanicaulis alexandrii HTCC2633
MTDTAKHTYRDANGDLWFRESLSEGIGNGLRIDNLLYAEASDVQDLIVFENNENGRVLAIDGLVQVSMADEFIYHEMVSHVPLLSHGAVKRVLIVGGGDGGAMREMLKHKGVESITLVEIDPDVIEFSKKWFPDVSQGSFDDPRVNVVIADGSKYVEETSDKFDLILIDSSDPVGPSAVLFTREFYTACSKLLNEGGVIVTQSGLAAIHPEPVKSTSDSFKSLFKHSGFYLICVPAFSGGFMALGFATDNDATFDPDIETIRTRFAELDIKTKYYSPEIHKGSFALPPYIAEKIA

SEQ ID NO: 154949 - DNA, 891 bp, Parvularcula bermudensis HTCC2503
  CDS (1)..(891): transl_table=11
atgagcggccgcttcatcatcgacgtcgacgggcagcgctggttcaaggaagaggtgacgcccgaaatcggccatgccttgcggatcgatcgtaccctgtatgagggggagatcgaccaccagcacctgattgtcttcgaaaatcagcgcttcgggcggctctttgccctcgaaggctttgtccaaatctccacggcggatgaatttatctaccatgagatgttggtgcatgtgccgttcttcgcccatggacgggcaaagcgggtgctgatcatcggcggcggtgacggcggtgccattcgtgaggtgctccgccaccggaccgtcgagcaagtgacccttgtcgagattgagaaggccgttgtcgatttttcgaaagagtggtttccgagtctgtcggcgggcgcctttgacgacccgcgcctggacctgcgcattgcggatggcgccgccttcgtcaaagaggatcaagagccttacgacgttattttggtcgactccaccgatccggtgggcccaggcaaagtgctgtttaccgaggaattttaccgcgactgctatgcgcggctcggcgatgaggggattatggtgacccagtgcggtctccccttcctccaggcgccggaacttaagaccgcgtacgagaaccagtctgcgagttttgccgcgccccggttctatacgattgccgtgcccgcctattcaggggggctgatggctcttggctttgcccggaaggggggagaagatccgtctcccgccgacctcgccgcgcgaattgaaaaggccgatctcggcaccttcaaggtctatagcgcgaaaacccatcagggggcgtttatggggccggcctatatcgacacgatcctgaagaccggacagtttggctga

SEQ ID NO: 154950 - protein, 296 aa, Parvularcula bermudensis HTCC2503
MSGRFIIDVDGQRWFKEEVTPEIGHALRIDRTLYEGEIDHQHLIVFENQRFGRLFALEGFVQISTADEFIYHEMLVHVPFFAHGRAKRVLIIGGGDGGAIREVLRHRTVEQVTLVEIEKAVVDFSKEWFPSLSAGAFDDPRLDLRIADGAAFVKEDQEPYDVILVDSTDPVGPGKVLFTEEFYRDCYARLGDEGIMVTQCGLPFLQAPELKTAYENQSASFAAPRFYTIAVPAYSGGLMALGFARKGGEDPSPADLAARIEKADLGTFKVYSAKTHQGAFMGPAYIDTILKTGQFG

SEQ ID NO: 154951 - DNA, 861 bp, Synechococcus sp. WH 5701
  CDS (1)..(861): transl_table=11
atggatccaaccgctggctgggttgatgaaattcaccagggtgtccgctacggcctcgaagccgaggtgctgctggagcagtccagcccttaccagagggtcacgatcatcgagagccggcgctatggcaaggggctgctgctcgatggctgctggatgacggccgagcgccaggagcgtcactatcacgagccgctggtgcatccggccctctgtgccgccgccagcctcgagcgggtgctcgtgatcggcggtggcgacggtggcacggcgcgggagtgcctgcgccacccaggcgtgcgccacctcgatctggtggagatcgacgggctggtggtggagtgcgcccagcgttacctgccctccctcggtggcggctgctgggacgacccccgctttcagctcacggtgggggatggcatcgcctgggtgtcggcggctgccgccgccagctacgacgtggtgatcgtcgacggctctgaccccgcaggccccgctgagggcctgttcaatcgggccttcttccagcagtgccgccgcctgctgcggcccggaggggtgttcgccacccagagcgaatcccccgaggccttccgcgaggtgcacctggccaccgtgcggctgctgcgggaggtgttcggccacgccgatccgctctatggctgggtgccgatgtaccccagcggctggtggagctggaccttcgcggccgtcgacggcccccgctatctggagcccaggcccgagcgggccgaggcggtggcggccggctgtgagatctggtcgccccgctggcagcgcggtgccttcgaggccattccggccggcatcgagcgggcccttgaccacccccaggcctga

SEQ ID NO: 154952 - protein, 286 aa, Synechococcus sp. WH 5701
MDPTAGWVDEIHQGVRYGLEAEVLLEQSSPYQRVTIIESRRYGKGLLLDGCWMTAERQERHYHEPLVHPALCAAASLERVLVIGGGDGGTARECLRHPGVRHLDLVEIDGLVVECAQRYLPSLGGGCWDDPRFQLTVGDGIAWVSAAAAASYDVVIVDGSDPAGPAEGLFNRAFFQQCRRLLRPGGVFATQSESPEAFREVHLATVRLLREVFGHADPLYGWVPMYPSGWWSWTFAAVDGPRYLEPRPERAEAVAAGCEIWSPRWQRGAFEAIPAGIERALDHPQA

SEQ ID NO: 154953 - DNA, 858 bp, Nitrococcus mobilis Nb-231
  CDS (1)..(858): transl_table=11
atggcacttgacgagaattggttcacagaaacagtacttgacgagggcctcgctttctcgcttcgcattaaggaaaggctgcatgctgagcaatccccttatcagcgcatcgaggtttttgaaaccctccactggggccgcttgatggctattgatggctgcgtgatgctcaccgagcgcgacaacttcctctaccatgagatgatggtgcaccccgccatgttcacgcacgccgagccacataccgtgctgatcatcgggggcggcgattgcggcaccttgcaggaagtgctgcgccatccaaatgtggcgcgagttgtgcaagtagagatcgacgagcgagtaacccgtattgccgagcgcttcttccctgagctcacggccatgaacggcgacccacgttgcgatttgcggttcgaagacggcgtgaaattcgttcgcaggacagccacggcctgctttgatgtggtcatcatcgatagcacagatccgatcggaccggcgcaagagttgttcggcagcggctttctgcgtcagatccaccgtatactgcgaccgggtggtgtgctggcacaacagagtgaatcgcccctattgcatgagaaaaatatcctcaagccactgcatcgcagtttagcggaggcgggcttcgcacgccgagtgaccctttgcttcccggtacccagttaccccagcggctggtggagctgcacgctcgccggcaaggcgtgtgaggtacgtgacttccgccgcactgcggcagcggcacggccgtttacgacccgctattataatgaggatgtacatcgtggctcactggcagtgccggaattctgtcgtggcgcgttcgatggctga

SEQ ID NO: 154954 - protein, 285 aa, Nitrococcus mobilis Nb-231
MALDENWFTETVLDEGLAFSLRIKERLHAEQSPYQRIEVFETLHWGRLMAIDGCVMLTERDNFLYHEMMVHPAMFTHAEPHTVLIIGGGDCGTLQEVLRHPNVARVVQVEIDERVTRIAERFFPELTAMNGDPRCDLRFEDGVKFVRRTATACFDVVIIDSTDPIGPAQELFGSGFLRQIHRILRPGGVLAQQSESPLLHEKNILKPLHRSLAEAGFARRVTLCFPVPSYPSGWWSCTLAGKACEVRDFRRTAAAARPFTTRYYNEDVHRGSLAVPEFCRGAFDG

SEQ ID NO: 154955 - DNA, 870 bp, Neptuniibacter caesariensis
  CDS (1)..(870): transl_table=11
atgggtgttaatttcatgactacaaactataaagaaactttacataaaggttacgggcaggctttcgatgtagaagaggtcttgtttgaacaacagactgattcttggcatctcattatttttcgtaatccggtctacgggactgtgatggcactagatggcatcatccagacaaccgaacgtgatgagtttgtatatcatgaaatgttaacgcatgtgcctatccttgcgcatggaaaggcaaagcgagtgctgattattggtgggggtgatggtggtattttgcgagaagtttgccgccataaaagtgttgaacatgttacacaggtcgagattgaccaggctgtaatcgacatgtgtaaagagtatctgcctaatcattcggcgggtgcatttgatgatccgcgtgcaaacattgttattgcagatggagttgagtacgtaaactctacggatgaaaagttcgatgtgattatttcagattgcactgatccggttggaccaggcgaagtccttttctccagtcgtttctatgaaggttgtaaaagccttcttaatgaaggtggcgtatttgtcgcacagaacggtgtgccattccttcagcaggatgaagtcatcacaacccgtcgtcgcctgagcccatattttaaagatcagagcttttatgcggttgcggttccaacctacattggtggtgtaatgactttagcctggggttcagataacgaatcgcttcggcagcttgatctctccgagttgcaaaagcgttttgcggacagtggtatcacaactcgttactataacccgcaaactcatctgggctgttttggcttgccccaatatctgctcgacgcattagataaagcctga

SEQ ID NO: 154956 - protein, 289 aa, Neptuniibacter caesariensis
MGVNFMTTNYKETLHKGYGQAFDVEEVLFEQQTDSWHLIIFRNPVYGTVMALDGIIQTTERDEFVYHEMLTHVPILAHGKAKRVLIIGGGDGGILREVCRHKSVEHVTQVEIDQAVIDMCKEYLPNHSAGAFDDPRANIVIADGVEYVNSTDEKFDVIISDCTDPVGPGEVLFSSRFYEGCKSLLNEGGVFVAQNGVPFLQQDEVITTRRRLSPYFKDQSFYAVAVPTYIGGVMTLAWGSDNESLRQLDLSELQKRFADSGITTRYYNPQTHLGCFGLPQYLLDALDKA

SEQ ID NO: 154957 - DNA, 828 bp, Bacillus sp. NRRL B-14911
  CDS (1)..(828): transl_table=11
atgggactttggtttacagagaaacagacagagaactttggcatcacaatgaaagtgaagcagactttacatacagagcaaactgattttcaaaagcttgatatggtagagacagaagaatggggcaatatgctcctcttggatgatatggtcatgacatccatcaaggatgagttcgtttaccatgaaatggtggcccatgtgccgttattcacgcatccgaaccctgagaacgttcttgtagtgggcggcggcgacggcggcgttatccgcgaagtgctgaagcacccaagcgttaagaaagcaacactggttgaaatcgatgggaaggtaattgagtacagcaagaagtatcttcctgaaatcgcaggcatgcttgacgatgaaagagtagaagtgaaggttgacgacggcttcatgcatatcgccaacagcgagaatgaatatgacgtcatcatggtagattccactgagccggtcgggccagctgtgaacctgttcacgaaaggcttctatgccggcatttccaaggctttgaaggaagacggcatctttgttgcgcagtctgacaacccttggttcaaggcagacctgatccgcaccgtccagaaggatgtaaaagaaatcttcccgatcacaagcttatatgtggccaacatcccgacatacccaagcggactgtgggcatttacaattggaagcaagaagcacaatccgcttgaagtaagcgaagagcgcttccacgaaatcgacacaaagtactatacaaaagaactgcacaaagcagcgtttgtgctgcctaagtttgtgcaggatcttgtaaaataa

SEQ ID NO: 154958 - protein, 275 aa, Bacillus sp. NRRL B-14911
MGLWFTEKQTENFGITMKVKQTLHTEQTDFQKLDMVETEEWGNMLLLDDMVMTSIKDEFVYHEMVAHVPLFTHPNPENVLVVGGGDGGVIREVLKHPSVKKATLVEIDGKVIEYSKKYLPEIAGMLDDERVEVKVDDGFMHIANSENEYDVIMVDSTEPVGPAVNLFTKGFYAGISKALKEDGIFVAQSDNPWFKADLIRTVQKDVKEIFPITSLYVANIPTYPSGLWAFTIGSKKHNPLEVSEERFHEIDTKYYTKELHKAAFVLPKFVQDLVK

SEQ ID NO: 154959 - DNA, 843 bp, Desulfuromonas acetoxidans DSM 684
  CDS (1)..(843): transl_table=11
atggagatgtggtacaccgagaaacactcggaaaatgtcgggattaccatgaaagtgacggagacattgttctccggcaagagtgaatttcagcaactggacattgtccagacacttgaatacggcaaaatgatgctgcttgatggtctggtcatggttaccgagcgtgatgagttcgtttaccacgacatgattgcccacccggcgctgttcacccaccccgccccgaaaaacgtactggtaatcggcggcggtgacggcggcagcatccgcgagatcatgaagcaccccggtgttgagcaagcgaccctgtgcgaaattgacggtctggtgattgagaagtccatcgaactgctgccctccatggcctgtgaaatcgacggcagcaactcacgcgtcaaactgcatgtcgatgacggcctggcctatattcgtgaccaccagaacgaattcgacgtcatccttgtcgactccaccgatcccatcggtccggccgtcggcctgttcgaagaggatttttaccgtctggttcacggtgctctgaaagaggacggcatcatggtcgcccagagcgaatcgccgttttaccatgccgacatccagaaggccatgtacggcaacctgcgcaacgtgttcccgattgtcgagatgtatcaggcgttcatccccacctaccccagcggtctgtggagtttcgcctttgccagcaagaaatatcatccggtcaatgatttcgaccagcagcgcgctgccaaccgcggctttcatacccgctactacaacgagcaactgcacctcggcgcgttcatgctgccgacgtttgcccgcgaaaacattgcttga

SEQ ID NO: 154960 - protein, 280 aa, Desulfuromonas acetoxidans DSM 684
MEMWYTEKHSENVGITMKVTETLFSGKSEFQQLDIVQTLEYGKMMLLDGLVMVTERDEFVYHDMIAHPALFTHPAPKNVLVIGGGDGGSIREIMKHPGVEQATLCEIDGLVIEKSIELLPSMACEIDGSNSRVKLHVDDGLAYIRDHQNEFDVILVDSTDPIGPAVGLFEEDFYRLVHGALKEDGIMVAQSESPFYHADIQKAMYGNLRNVFPIVEMYQAFIPTYPSGLWSFAFASKKYHPVNDFDQQRAANRGFHTRYYNEQLHLGAFMLPTFARENIA

SEQ ID NO: 154961 - DNA, 861 bp, Pseudomonas aeruginosa PACS2
  CDS (1)..(861): transl_table=11
atgagcgattatcaggaaactctgtaccagggctacggccagcgcttcagcatcgacaacatgctgcatgaggtgcgcaccgagcaccagcacctggtgattttcgaaaacgcccggatgggccgggtgatggcgctcgatggagtgatccagaccaccgaggccgacgagttcatctaccacgagatgctcacccacgtgccgatcctcgcccacggcgcggcccggcgcgtgctgatcatcggcggcggcgacggtggcatgctgcgcgaggtggccaagcacaagagcgtcgagcggatcaccatggtcgagatcgacggcaccgtggtcgacatgtgcaaggcgttcctgcccaaccactcccagggcgccttcgacgacccgcggctgaacctggtgatcgacgacggcatgcgcttcgtggctaccacggaagaacgcttcgacgtgatcatctccgactccaccgacccgatcggccctggcgaggtgctgttctccgagaacttctaccaggcctgccggcgctgcctgaacgagggtggcatcctggtcacccagaacggcacgccgttcatgcaactggaggaagtgcgcaccaccgccgcacgtaccgacgggctgttcgccgactggcatttctaccaggcggcggtgccgacctatatcggcggcgccatgaccttcgcctggggttcgacccgcgaaggcctgcgtcgccttccgctggaaacgctgcgccagcgcttccgcgacagcggcatcgccacccgctactacaacgccgatatccacctgggcgcgtttgctctgccgcagtacgtgctgcaggccatcggcaagcaggacaacgactga

SEQ ID NO: 154962 - protein, 286 aa, Pseudomonas aeruginosa PACS2
MSDYQETLYQGYGQRFSIDNMLHEVRTEHQHLVIFENARMGRVMALDGVIQTTEADEFIYHEMLTHVPILAHGAARRVLIIGGGDGGMLREVAKHKSVERITMVEIDGTVVDMCKAFLPNHSQGAFDDPRLNLVIDDGMRFVATTEERFDVIISDSTDPIGPGEVLFSENFYQACRRCLNEGGILVTQNGTPFMQLEEVRTTAARTDGLFADWHFYQAAVPTYIGGAMTFAWGSTREGLRRLPLETLRQRFRDSGIATRYYNADIHLGAFALPQYVLQAIGKQDND

SEQ ID NO: 154963 - DNA, 834 bp, Thermosinus carboxydivorans Nor1
  CDS (1)..(834): transl_table=11
atggagttgtggattaccgaatggcagaccaagaacctgggactgacctgccgggtgaaagaagcgctgtttaccggtcggtcggaatttcaggaagttgtcgttgttgataccgatgagtttggccggatgctggttttggacggagtatttcagacctccatctttgacgagtttgtttatcacgaaatgattgcccatgtgcccctctttacccatcccaatccgaaaaacgttctagtcattggcggcggcgacggcggcaccatccgtgaagtggttaagcatccttcggtcgagcgggccgaaatggtggaaatcgacgggctggtcgttgaggtctgcaaaaagtatctgccagaaatcagcgaggcgttaatcaataaccatccgaaagtgcatctgaagattgatgatggcatcaaacacatgaaagaagcggaaaacttctatgatgtcattattgtcgactgttccgaccctattggtcctggcgaaggcttgttcacttacgaattctacaaagatgtctacaaggcgctcaaggccgacggcctgtttgtgcagcagactgaatcgcctttcttccatcaacccctggtcaagcgcttgtggaaggatatttcctcgctgttccccattacccgcatgtacctggcgcagatccccctctatcccggcggtacgcattgcttcaccatcggctccaagcagtatgatccgctcaatgttgataccgccaaactgccaaaactgaatacccggtattacaaccgcgatattcagaaaagctgttttgtgctgcccaacttcatccaagaactgcttaagtaa

SEQ ID NO: 154964 - protein, 277 aa, Thermosinus carboxydivorans Nor1
MELWITEWQTKNLGLTCRVKEALFTGRSEFQEVVVVDTDEFGRMLVLDGVFQTSIFDEFVYHEMIAHVPLFTHPNPKNVLVIGGGDGGTIREVVKHPSVERAEMVEIDGLVVEVCKKYLPEISEALINNHPKVHLKIDDGIKHMKEAENFYDVIIVDCSDPIGPGEGLFTYEFYKDVYKALKADGLFVQQTESPFFHQPLVKRLWKDISSLFPITRMYLAQIPLYPGGTHCFTIGSKQYDPLNVDTAKLPKLNTRYYNRDIQKSCFVLPNFIQELLK

SEQ ID NO: 154965 - DNA, 849 bp, Microscilla marina ATCC 23134
  CDS (1)..(849): transl_table=11
atgtggtataacgaagaccaagacgaacacatcataagcataggggcacgcacctctatcagggtaaccaaaaaactctacgaaaagcagagtaattttcagaaaatagaaatatatcagaccgatgcctttggcaaaatgatggtgctggacaattgtattatgttgactgatgccaacgagtttgcttaccatgaaatgattgcccatgtgcctttgtttgcgcaccccaaccctgagcgagtgttgattattggagggggagacggcggcactgcgcgcgaggtattgcgtcacccacaggtaaaagaatgtgtaatggtagagatagacgaagaggtagtgaatgtatcacgggagtattttccggctatagctgctgagttagacaacccccggcttgacttgcgtatagaagatggcatggcgtatattcgcaacaatgagaatgcctttgatgtaattttgattgattctaccgacccggtaggcattgccgaaaatctgattacagtcaagttttatgaagaaacccatcgatcgctcaaaaaagggggcattatggtagcgcaggccgaaagcccattttattttgccgatattcagaggaagctttttcagaacattaaaggagcttttccggcggtgtctatgtatttatcgcagatacctttttaccccagtggtacctggtcgtttgcctttgctacccaagaagcaggctttgaccgcaccaactacagggtggccgatttgaaagcaatggagcaccaattgcaatacttcaacgaggctttgtttacaggttgttttgcaatacctacgtttgcaaaaaaaatgattgaataa

SEQ ID NO: 154966 - protein, 282 aa, Microscilla marina ATCC 23134
MWYNEDQDEHIISIGARTSIRVTKKLYEKQSNFQKIEIYQTDAFGKMMVLDNCIMLTDANEFAYHEMIAHVPLFAHPNPERVLIIGGGDGGTAREVLRHPQVKECVMVEIDEEVVNVSREYFPAIAAELDNPRLDLRIEDGMAYIRNNENAFDVILIDSTDPVGIAENLITVKFYEETHRSLKKGGIMVAQAESPFYFADIQRKLFQNIKGAFPAVSMYLSQIPFYPSGTWSFAFATQEAGFDRTNYRVADLKAMEHQLQYFNEALFTGCFAIPTFAKKMIE

SEQ ID NO: 154967 - DNA, 855 bp, Sagittula stellata E-37
  CDS (1)..(855): transl_table=11
atggacgacacaccgctttggatgcgagaacagttgcacggcgattacgctcaggcgatgcgggtcgacgatgttctgtacgacagccagaccgaccatcagcgcctgcgtgtaatacagaatgaaaccttcggtcgggtgctgacgctcgatgatgtcgttcaggttaccgaaagggacaacttcatctaccacgagatgctgacgcatgtgccgatcttcgcccatggcgcggcaacccggatctgcatcgtgggcggcggcgacggtggcatggctcgcgaagcactgcgccacaagacggtcaagcacgtcacgatggtcgaaatcgaccccggcgtggtggagttctccaaacgctaccttcccacgatcagcaacggtgccttcgacgacccccggctggatctggtgatcgcggacggtgcggacttcatgaagaccacgacgggcgattacgatgtcatcatcgtcgactccaccgatccgatcggtcccggcgaagcgttgtatgccaacaccttctatgccgatgcccgcaaggctttgaaggacggcgggatcatcgtcacgcagaacggtgtgcccttcatgcaaggggatgagctgacccggacgatgcgcgccttccaggcgctgtttgccgacgccacatgttaccttgcgacagtgcccagctacgcaggcggacccatggcattcggttggggaaccgacagcggtgcccgccacaccgacgtgaacacccttcagacccgcttttgcgccagcggcatccgtccgcaatactacaccgcagaggtccacaaggcggccttcgccctgcccggctacatccggaaactcatcccttga

SEQ ID NO: 154968 - protein, 284 aa, Sagittula stellata E-37
MDDTPLWMREQLHGDYAQAMRVDDVLYDSQTDHQRLRVIQNETFGRVLTLDDVVQVTERDNFIYHEMLTHVPIFAHGAATRICIVGGGDGGMAREALRHKTVKHVTMVEIDPGVVEFSKRYLPTISNGAFDDPRLDLVIADGADFMKTTTGDYDVIIVDSTDPIGPGEALYANTFYADARKALKDGGIIVTQNGVPFMQGDELTRTMRAFQALFADATCYLATVPSYAGGPMAFGWGTDSGARHTDVNTLQTRFCASGIRPQYYTAEVHKAAFALPGYIRKLIP

SEQ ID NO: 154969 - DNA, 864 bp, Roseobacter sp. SK209-2-6
  CDS (1)..(864): transl_table=11
atgagcggcacagagaagcaggaatggatcaccgaaagcctgcatgagcactacgcccaacgtctgcgcgtggaggagatgctttatgacagcaagaccgagcatcagcgcctgaaggtgtttgagaacggccagttcggccgcatcctgacgctggatgacgtggttcaaaccactgagggtgacaatttcatctatcatgagatgctgacccatgtgccgatcctggcccatggcaatgcaaaacgggtgctgatcatcggcggcggcgacggcggcatggcccgcgagacccttcgccacacctcggttgagcatgtgaccatggtggagatcgacgccggtgtggtggatttctcaaaagaatacctgccgatgctgagcaacggcgcctttgacgatccgcgcctcaatctggtgatcaacgacggtgccctcttcatgaaagagaacaccgaaaaattcgacgtgatcatcgttgattcgaccgacccgatcggccccggcgaagtgctgttcaccgatactttctacggccatgcggcccgctcgctgactgaggacggcatcatcgtcacccaaaacggcgtgcccttcatgcagggcgacgagctcaccggcaccctgcgcgcgttccaggcgctctttgccgatgcctcgtgctatctggcgtcggtgccaacctatgcaggcggcccgatggcctttggctggggcagccattcggacaagtcgcgcaacgtgaccctcgccgatgttgaagcacgctttgccgccgcagggatcgagaccggatactacaatccggacattcacaaagccgcctttgcactgccgaactatgtgcgcaaactcttcccctga

SEQ ID NO: 154970 - protein, 287 aa, Roseobacter sp. SK209-2-6
MSGTEKQEWITESLHEHYAQRLRVEEMLYDSKTEHQRLKVFENGQFGRILTLDDVVQTTEGDNFIYHEMLTHVPILAHGNAKRVLIIGGGDGGMARETLRHTSVEHVTMVEIDAGVVDFSKEYLPMLSNGAFDDPRLNLVINDGALFMKENTEKFDVIIVDSTDPIGPGEVLFTDTFYGHAARSLTEDGIIVTQNGVPFMQGDELTGTLRAFQALFADASCYLASVPTYAGGPMAFGWGSHSDKSRNVTLADVEARFAAAGIETGYYNPDIHKAAFALPNYVRKLFP

SEQ ID NO: 154971 - DNA, 882 bp, Marinobacter algicola DG893
  CDS (1)..(882): transl_table=11
atgactgcactgaacgatggctggtttaccgaagtattccaggaccagggaaccgccttttccctgcaggtgaagaaaaaactgcacgaagaacaaaccgagttccagaaactggaaatatgggaaaccgaaaccttcggcaacctgatggtgctcgatggctgtgtgatgctgaccaccagagacaacttcctctatcacgagatgatgactcatccggccctgttcacccataaagacccgaagaaagtggttatcgttggcggtggtgattgtggaaccctgaaagaagtcctcaaacaccccggtgtggaagaggcctggcaggtagaaatcgacgaacgcgtgacccgtctgtcggaacagtattttcccgaactctgcgaatccaacgccgatccccgcgcgaactttttcttcggcgatggcatccagtggatacgtgatgcggtgcccggaagcctcgatgtcatcatcatcgacagcaccgacccggtcggccccgccgaaggcctgttcgccctggacttctatcgcgactgcatgatcgctctgcgcgacggaggcgttattgtccagcaaagcgaatcgcccctgttgcacaccaacaccatcatcaaaaccattcacgacgacatgaaaaaggcaggcttcgaccacgtccgcactctgccgttcccgcaaccggtgtaccccactggctggtggagctgcaccatggcgggtaaggaaaaaccggtggtgtacttccgtgaggaggacgccgatcagcggccgttcgtgacccgctattacaacgcggatattcaccgtggggcattggccatgccgcagttcatggtggatgcattggaagatgaggtgatgtcgagcgagcgttaa

SEQ ID NO: 154972 - protein, 293 aa, Marinobacter algicola DG893
MTALNDGWFTEVFQDQGTAFSLQVKKKLHEEQTEFQKLEIWETETFGNLMVLDGCVMLTTRDNFLYHEMMTHPALFTHKDPKKVVIVGGGDCGTLKEVLKHPGVEEAWQVEIDERVTRLSEQYFPELCESNADPRANFFFGDGIQWIRDAVPGSLDVIIIDSTDPVGPAEGLFALDFYRDCMIALRDGGVIVQQSESPLLHTNTIIKTIHDDMKKAGFDHVRTLPFPQPVYPTGWWSCTMAGKEKPVVYFREEDADQRPFVTRYYNADIHRGALAMPQFMVDALEDEVMSSER

SEQ ID NO: 154973 - DNA, 861 bp, Bacteroides capillosus ATCC 29799
  CDS (1)..(861): transl_table=11
atggagctttggtttcgtgaggcccacacccccaatgtaaagctgtccatccgggtggacaagcagctgtacagcggccagagcgagttccagcggatcgacgtgttcgactcccaggagtttggccgcttcctcaccctggacggctacatgatgctcaccgagaaggacgagttcatctaccatgagatgatggtgcacatccccatggccgttcaccccaacgtgaaggatgtgctggtcatcggcggcggcgacggcggcgtggtccgtgagctgtgccgctatcctgaaattgagcacatcgacctggtggagatcgacccccaggtggtggaggtatgcaggcggtatctccctttcaccacctgtagcctggacgacccccgtgtgtccatccactatgaggatggcctgcggtacgtccgtacccctgtggagcagtatgacctcataatcgtggactccaccgatcccttcggccccggtgagggactgttcacccgggagttctacggcaactgctccaaggccctgcgtgcggacggcatcatggtcaaccagcatgagagccccttctaccaggaggacgccgtggcctgccagcgggctcacaagcggattgtggagtccttccccctggccaaggtgtaccaggcccacatccccacctatccctccggccactggctcttcggctttgccagtaagaagtatcaccccctgcgggacctggatgaggtccgctggaacgcccggaagctcagctgcaagtactacaccaccatgctgcacaagggcgcgttctatatccccgcctatgtagaggagctgctgaaaaatgttgaatccgcagattga

SEQ ID NO: 154974 - protein, 286 aa, Bacteroides capillosus ATCC 29799
MELWFREAHTPNVKLSIRVDKQLYSGQSEFQRIDVFDSQEFGRFLTLDGYMMLTEKDEFIYHEMMVHIPMAVHPNVKDVLVIGGGDGGVVRELCRYPEIEHIDLVEIDPQVVEVCRRYLPFTTCSLDDPRVSIHYEDGLRYVRTPVEQYDLIIVDSTDPFGPGEGLFTREFYGNCSKALRADGIMVNQHESPFYQEDAVACQRAHKRIVESFPLAKVYQAHIPTYPSGHWLFGFASKKYHPLRDLDEVRWNARKLSCKYYTTMLHKGAFYIPAYVEELLKNVESAD

SEQ ID NO: 154975 - DNA, 855 bp, Clostridium leptum DSM 753
  CDS (1)..(855): transl_table=11
atggagctttggttcacggaacgccatacccccagcgtgaaattttctattaaggtagaccggcagctttacaccgctcaaagcgagttccagcgcatcgacgtgttcgactccaaagagttcggccggtttctcactctggacggctatatgatgctgacagaaaaggacgagtttatttaccacgaaatgatggtccacgtgcccatggcggttcatcccaacgccaggcgggtgctgattatcggcgccggcgacggcggcgtggtgcgggagctgacccggtaccaccagatcgagcacatcgacctggtggaaatcgacgagctggtggtggaggtgtgcaaaaaatatctgcctcagaccgcctgccgcctggatgacgagcgggtgcatatttactatgaggatggattgaagtttatccgctccaaggaaaacgagtacgacctgattatcgtggattccaccgatcccttcggccccggagagggcctgttcaccaaggagttttacggcaactgctataaggcgctgaaagaggacggcatcatggtaaaccagcacgaaagccccttctacgacgaggacgccgccgccatgcagcgggcccacaagcggattgtggagagcttcgccatcagcaaggtttaccaggcccatattcccacctatccgtcgggccattggctgttcggcttcgcctccaaaaaatatcacccggtaaaggatttgaacgccgcggcgtggaatcttctggggatccatacccaatactataacaccaggctgcacgccggggcgttcgctctgcccagctatgtggaaggattgttaaaagatgttgaaccctaa

SEQ ID NO: 154976 - protein, 284 aa, Clostridium leptum DSM 753
MELWFTERHTPSVKFSIKVDRQLYTAQSEFQRIDVFDSKEFGRFLTLDGYMMLTEKDEFIYHEMMVHVPMAVHPNARRVLIIGAGDGGVVRELTRYHQIEHIDLVEIDELVVEVCKKYLPQTACRLDDERVHIYYEDGLKFIRSKENEYDLIIVDSTDPFGPGEGLFTKEFYGNCYKALKEDGIMVNQHESPFYDEDAAAMQRAHKRIVESFAISKVYQAHIPTYPSGHWLFGFASKKYHPVKDLNAAAWNLLGIHTQYYNTRLHAGAFALPSYVEGLLKDVEP

SEQ ID NO: 154977 - DNA, 858 bp, Faecalibacterium prausnitzii M21/2
  CDS (1)..(858): transl_table=11
atggaattttggttttcagagtttcacaccccggatgtgaagcacagcattcgtgtgaacaagcagctctactccaagcagagcgattatcagcgcattgatatctttgagaccccggagttcggccgggtgctcacgctggacggcaacgtgatgctgaccgagcgcgatgagttcatctacgatgaaatgatcgtccatgtgcccatggcggtgcacaaggaagccaaggatattctggtcatcggtgccggagacggcggcgtggtgcgggagctgacccgctacgaccgtgtggagcgcatcgaccttgtggagatggacccgcaggtggtggaggcctgccgcgcttacctacccagcaatgcctgccgtatggatgaccgtcgggtgcatatctattttgagaatgccttgaagtatatccgccgctgcgaggaggagtacgaccttatcattgtggactcctccgaccccttcggcccctctgagggtctgttcacccgcgagttctacggcagctgcttcaacgccctgaaagaggacggcatcatggtcaaccagcagggcagccccttctacgccgaggacgccagcgccatgcagcgcagccacaagcgcattgcatccaccttccccatcagccgggtgtatcaggcgcatatccccacctttgcggcagggtactggctgttcggctttgcaagcaaaaaataccatcccatcgatgatctggacgctgaatcgtggaaggcgctgaatatgcgcacccgctactacaccaccaaactgcatatcggagcattctacctgccggcttttctggaggagatgctgcgggaagtggaggaacactga

SEQ ID NO: 154978 - protein, 285 aa, Faecalibacterium prausnitzii M21/2
MEFWFSEFHTPDVKHSIRVNKQLYSKQSDYQRIDIFETPEFGRVLTLDGNVMLTERDEFIYDEMIVHVPMAVHKEAKDILVIGAGDGGVVRELTRYDRVERIDLVEMDPQVVEACRAYLPSNACRMDDRRVHIYFENALKYIRRCEEEYDLIIVDSSDPFGPSEGLFTREFYGSCFNALKEDGIMVNQQGSPFYAEDASAMQRSHKRIASTFPISRVYQAHIPTFAAGYWLFGFASKKYHPIDDLDAESWKALNMRTRYYTTKLHIGAFYLPAFLEEMLREVEEH

SEQ ID NO: 154979 - DNA, 855 bp, Phaeobacter gallaeciensis 2.10
  CDS (1)..(855): transl_table=11
atgagcgatcagacctggaacaccgaacgcctgcacgcgcattacgcgcaatccctgcgcgtcgatgagatgctctatgacagcaacaccgagcatcagcgtctgaaagtgtttcagaacggccagttcggccgcattctgacgctggatgacgtggtgcagaccaccgaaggcgacaacttcatctaccatgagatgctgactcatgtgccgattctggcccatggcaacgcaaaacgggtgctgatcattggcggcggcgacggcggcatggcccgtgaggcgctgcgccacacctcggtcgagcatgtgaccatggtggaaattgacgcaggtgtggtggatttctccaaagaatacctgcccatgctgagcgatggcgcctttgatgatccgcgcctcaatctggtgatcaacgacggtgcgctcttcatgaaagagaacaccgagacgtttgatgtgatcatcgtcgattccaccgaccccatcggccccggcgaagtgctgttcaccgacaccttctatggccacgcggcccgctcgctgtctgaggatggcatcatcgtcacgcaaaacggtgtgcccttcatgcagggcgatgagctgaccggcaccttgcgcgcgttccaagcgctgtttgccgatgcctcctgctatctggccaccgtgccaacctatgccggcggccccatggcgttcggctggggcagccattcggacaaggcgcgcaacgtgagcctggcggatgtcgaggcgcgttatacagcagccggaatcgataccgggtattacaacccggaagttcacaaggccgcattcgccttgccgaactatgtgaaaaagctgttcccgtaa

SEQ ID NO: 154980 - protein, 284 aa, Phaeobacter gallaeciensis 2.10
MSDQTWNTERLHAHYAQSLRVDEMLYDSNTEHQRLKVFQNGQFGRILTLDDVVQTTEGDNFIYHEMLTHVPILAHGNAKRVLIIGGGDGGMAREALRHTSVEHVTMVEIDAGVVDFSKEYLPMLSDGAFDDPRLNLVINDGALFMKENTETFDVIIVDSTDPIGPGEVLFTDTFYGHAARSLSEDGIIVTQNGVPFMQGDELTGTLRAFQALFADASCYLATVPTYAGGPMAFGWGSHSDKARNVSLADVEARYTAAGIDTGYYNPEVHKAAFALPNYVKKLFP

SEQ ID NO: 154981 - DNA, 954 bp, Bacillus selenitireducens MLS10
  CDS (1)..(954): transl_table=11
ttgaaacacaaagacagacaccatcaaagcggatgtcatcctcggaaggacgaaggctacagtcttcgtccttttccatatgtgtcccttacttttgatgatcagacaggagcgaacaaatctatgagtatctggtttacagaaaaacagaccgaacatttcggcatcaccgcccgcatcacaaagacgtacgtcagtgagaagaccgactatcagcagctcgacatggtccaaaccgccgagtttggcaatatgcttttgcttgacggcatggtcatgacgacggagaaagatgaatttgtctatcatgaaatggtggcccacgtgccccttcacacgcaccccaatccggaacatgtcctcgttgtcggcggcggtgacggcggtgtgatccgggagattctcaagcacccggaggtcaaaacggcgaccctcgtggagatcgacggcaaagtgattgagtattccaagcagtacttgccgacgattgccggggcgttggacgatgagcgcgtcacggtgaaagtggcggacggcttcatgcatattgccgaaagtgacagcgtgtatgacgtcatcatggtcgattccacagaaccggtgggaccggcggtgaacctgtttacgaaaggcttctatgaaggcatcagcaaagccctgaaggaagacggcctgttcgtcgcccagaccgataacccgtggtttcaaaagtcactgattaagaatgcctttcaggatatccgggaaacgttcccggtgacaaagctctatacggcgaatattccgacctacccgagcggcctctggacgtttacaatgggttcaaagaaacatgatccgctcgacgtgaaggatgagcgttttcatgatctcgacacgagctactacacgccggcgattcaccgggccgcttttgcgttgccgaagttcgtcgaagagctgacgggaaaatga

SEQ ID NO: 154982 - protein, 317 aa, Bacillus selenitireducens MLS10
MKHKDRHHQSGCHPRKDEGYSLRPFPYVSLTFDDQTGANKSMSIWFTEKQTEHFGITARITKTYVSEKTDYQQLDMVQTAEFGNMLLLDGMVMTTEKDEFVYHEMVAHVPLHTHPNPEHVLVVGGGDGGVIREILKHPEVKTATLVEIDGKVIEYSKQYLPTIAGALDDERVTVKVADGFMHIAESDSVYDVIMVDSTEPVGPAVNLFTKGFYEGISKALKEDGLFVAQTDNPWFQKSLIKNAFQDIRETFPVTKLYTANIPTYPSGLWTFTMGSKKHDPLDVKDERFHDLDTSYYTPAIHRAAFALPKFVEELTGK

SEQ ID NO: 154983 - DNA, 828 bp, Bacillus cereus AH820
  CDS (1)..(828): transl_table=11
atggaactatggttcactgaaaaacaaacaaaacattttgggattacggcgcgtattaaccgcacattacatacggagcaaacagaattccaaaaacttgatatggttgaaacgaaagagttcggaaacatgcttattttagatggcatggttatgacgacagaaaaagatgagttcgtgtaccatgaaatggtagcgcacgtacctttatttacacatccaaaccctgaaaacgtattagttgttggtggcggtgatggcggtgttattcgtgaagtgttaaaacacccaagcgtaaagaaagcaactcttgttgaaatcgatggaaaagtaattgagtactctaaacaatacttaccatcaattgcaggtgcattagataatgagcgtgtagaagtgaaagtaggagacggtttcctacatatcgcagaaagcgaaaatgaatatgacgtaattatggtagattctactgagccagtaggaccagcagtaaacctatttacaaaaggcttctacgctggaatttcaaaagcgttaaaagaagatggtattttcgttgcacaaacggacaacccttggtttacaccagaattaattacaactgtgtttaaagacgtaaaagagatcttcccaattactcgtttatacacagcgaacattccaacttacccaagtggtctttggacgttcacaattggatctaaaaaacatgatccattagaagtaagtgaagagcgtttccacgaaatcgaaacgaaatactatacaaaagaattacacaatgcagcattcgcattaccgaaatttgttggcgatctaattaagtaa

SEQ ID NO: 154984 - protein, 275 aa, Bacillus cereus AH820
MELWFTEKQTKHFGITARINRTLHTEQTEFQKLDMVETKEFGNMLILDGMVMTTEKDEFVYHEMVAHVPLFTHPNPENVLVVGGGDGGVIREVLKHPSVKKATLVEIDGKVIEYSKQYLPSIAGALDNERVEVKVGDGFLHIAESENEYDVIMVDSTEPVGPAVNLFTKGFYAGISKALKEDGIFVAQTDNPWFTPELITTVFKDVKEIFPITRLYTANIPTYPSGLWTFTIGSKKHDPLEVSEERFHEIETKYYTKELHNAAFALPKFVGDLIK

SEQ ID NO: 154985 - DNA, 903 bp, Eubacterium siraeum DSM 15702
  CDS (1)..(903): transl_table=11
atgcgtttacagattgaaaggacggtaatacaaatggatctttggtttacggaaaatcacagcgacagtgtaagattttctataagagttgacaaacagctttacagcgagcagagcgaatatcagcgcatagacgtgtttcagtcgctcgaattcggcagactgcttgcgcttgacggatatgtaatgataacgcagaaggacgaatttatctatcacgatatgatagttcacgttcctatggcggtaaagaaggatataaagaacgtgcttgttatcggcgcaggcgacggcggtacggtaagggagctgtgccgttacagcacgatagagcatatcgaccttgtcgagatagacaaaaaggtcgtcgaggtctgcgaggaatatttccccgaaatgaccgtttcgatgcacgaccccagacttgatatacattttaccgacggacttcgttttgtaagacgcaagcagggcgaatatgaccttataatagtggattctaccgacccgttcggaccgggcgagggacttttcacacctgagttctacggaaactgctacaacgcactgaccgatacgggtgtgcttgtgaatcagcacgaaagcccgttctatgtaaatgacgcaaaggcaatgtgcagggcgcacgagcgtataaagtcggtgttccccgtgtgcgccgtttatcaggctcatattccgacatacgcaagcggacactggctgttcggctttgcaagcaagggacttgacccgataaaggatcttgatgaacagcactggaattcactcggaattaagacaagatattataatacagagcttcacaagggttgctttgctctgccgagctatgtaaaggaaatgctggaaacgggagaggtgcttgatgtgcgcagctga

SEQ ID NO: 154986 - protein, 300 aa, Eubacterium siraeum DSM 15702
MRLQIERTVIQMDLWFTENHSDSVRFSIRVDKQLYSEQSEYQRIDVFQSLEFGRLLALDGYVMITQKDEFIYHDMIVHVPMAVKKDIKNVLVIGAGDGGTVRELCRYSTIEHIDLVEIDKKVVEVCEEYFPEMTVSMHDPRLDIHFTDGLRFVRRKQGEYDLIIVDSTDPFGPGEGLFTPEFYGNCYNALTDTGVLVNQHESPFYVNDAKAMCRAHERIKSVFPVCAVYQAHIPTYASGHWLFGFASKGLDPIKDLDEQHWNSLGIKTRYYNTELHKGCFALPSYVKEMLETGEVLDVRS

SEQ ID NO: 154987 - DNA, 852 bp, Clostridium ramosum DSM 1402
  CDS (1)..(852): transl_table=11
atggaattatggtttacggagagacatacaaatggtgtgaatttttcgattaaagtagattgtcagttatttagtggtcaaagtgaattccagaaaattgatatttttgactcaaaagaatttggacgatttttagcgctagacggttatatgatgctaacggaaaaagatgagttcatttatcatgaaatgattgttcatgttcctatggcagttcatcctgaagtcaaaaaagtattagtaattggagcaggagacgggggtgtaattagagaattatgccgttatgaaacgattgaaaagattgatatggttgaaatagatgagttagttgttgaagtaagtaaaaaatatttaccgatgacagcatgttgttttgatgatccgcgattacaaatctattatcaagatgggttaaagtttgttagaggtaaagaaaatgaatatgatttgatcattgttgattcaacagatccttttggaccgggggaaggactgtttacaaaggaattttatggtaactgttataaagcattaaatgatacaggaattatggttaatcaacatgaaagtcctttttatcaagaagatgctgttgcaatgcaacgggctcataaacgaattgttgaaagttttccgatttctcgagtctatcaagcgcatattcctacctatccttcagggcattggttatttggttttgcttcaaaaaaatatcatcccatcaaagattttcaaaaaacaaaatggaatgctcgagggatgaaaacaaagtattataataccggcattcatgtaggttcgtttgcattaccaaattatgtagaggagttattaagagatgtggaataa

SEQ ID NO: 154988 - protein, 283 aa, Clostridium ramosum DSM 1402
MELWFTERHTNGVNFSIKVDCQLFSGQSEFQKIDIFDSKEFGRFLALDGYMMLTEKDEFIYHEMIVHVPMAVHPEVKKVLVIGAGDGGVIRELCRYETIEKIDMVEIDELVVEVSKKYLPMTACCFDDPRLQIYYQDGLKFVRGKENEYDLIIVDSTDPFGPGEGLFTKEFYGNCYKALNDTGIMVNQHESPFYQEDAVAMQRAHKRIVESFPISRVYQAHIPTYPSGHWLFGFASKKYHPIKDFQKTKWNARGMKTKYYNTGIHVGSFALPNYVEELLRDVE

SEQ ID NO: 154989 - DNA, 861 bp, Salmonella enterica subsp. enterica serovar Kentucky str. CDC 191
  CDS (1)..(861): transl_table=11
atggccgaaaatacgatgtggcatgaaacgctacacgaccagtttggtcagtactttgccgtagacaacgttctgtatcatgaaaaaaccgatcaccaggatttaatcatctttgaaaacgccgcttttggccgcgtgatggcgctggacggcgtggtacagaccaccgaacgcgacgagtttatttatcatgaaatgatgacccacgtcccgctgctggcgcacggtcatgcgaaacacattctgattatcggcggcggcgacggcgcaatgctacgtgaagtcacccggcataaaaacgtcgaaaccatcactatggtggagatcgatgctggcgtagtctcgttttgccgccagtatttacccaaccacaatgccggcagctacgacgatccgcgctttacgctggtgatcgacgacggcgtgaatttcgtcaatcagacccatcagacctttgatgtgatcatttccgactgtaccgatccgatcggccccggcgaaagcctgtttacctccgccttttatgaaggctgtaagcgttgcctgaatccgggcggcatttttgtcgcccagaacggcgtgtgcttcctgcaacaggatgaagcgctcgacagccaccgcaagctgagtcattacttcagcgatgtcggcttctaccaggcggcgattccgacctattacggcggcattatgaccttcgcctgggcgacggacaacgacgctcttcgtcacctgtcgagcgaaattattcaggcgcgttttcatgccgccggcctcaaatgtcgctattacaacccggctattcatgccgctgcatttgcgctaccgcaatatctacatgacgcactgtccgcacagtga

SEQ ID NO: 154990 - protein, 286 aa, Salmonella enterica subsp. enterica serovar Kentucky str. CDC 191
MAENTMWHETLHDQFGQYFAVDNVLYHEKTDHQDLIIFENAAFGRVMALDGVVQTTERDEFIYHEMMTHVPLLAHGHAKHILIIGGGDGAMLREVTRHKNVETITMVEIDAGVVSFCRQYLPNHNAGSYDDPRFTLVIDDGVNFVNQTHQTFDVIISDCTDPIGPGESLFTSAFYEGCKRCLNPGGIFVAQNGVCFLQQDEALDSHRKLSHYFSDVGFYQAAIPTYYGGIMTFAWATDNDALRHLSSEIIQARFHAAGLKCRYYNPAIHAAAFALPQYLHDALSAQ

SEQ ID NO: 154991 - DNA, 861 bp, Salmonella enterica
  subsp. enterica serovar Schwarzengrund str. SL480
  CDS (1)..(861): transl_table=11
atggccgaaaatacgatgtggcatgaaacgctacacgaccagtttggtcagtactttgccgtagacaacgttctgtatcatgaaaaaaccgatcaccaggatttaatcatctttgaaaacgccgcttttggccgcgtgatggcgctggacggcgtggtacagaccaccgaacgcgacgagtttatttatcatgaaatgatgacccacgtcccgctgctggcgcacggtcatgcgaaacacgttctgattatcggcggcggcgacggcgcaatgctacgtgaagttacccggcataaaaacgtcgaaaccatcaccatggtggagatagacgctggcgtagtctcgttttgccgccagtatttacccaaccacaatgccggcagctacgacgatccgcgctttacgctggtgatcgacgacggcgtgaatttcgtcaatcagacccatcagacctttgatgtgatcatttccgactgtaccgatccgataggccccggcgaaagcctgtttacctccgccttttatgaaggctgtaagcgttgcctgaatccgggcggcatttttgtcgcccagaacggcgtgtgcttcctgcaacaggatgaagcgctcgatagccaccgcaagctgagtcattacttcagcgatgtcggcttctaccaggcggcgattccgacctattacggcggcattatgaccttcgcctgggcgacggacaacgacgctcttcgtcacctgtcgagcgaaattattcaggcgcgttttcatgccgccggcctcaaatgtcgctattacaacccggctattcatgtcgctgcatttgcgctaccgcaatatctacacgacgcactgtccgcacagtga

SEQ ID NO: 154992 - protein, 286 aa, Salmonella enterica
  subsp. enterica serovar Schwarzengrund str. SL480
MAENTMWHETLHDQFGQYFAVDNVLYHEKTDHQDLIIFENAAFGRVMALDGVVQTTERDEFIYHEMMTHVPLLAHGHAKHVLIIGGGDGAMLREVTRHKNVETITMVEIDAGVVSFCRQYLPNHNAGSYDDPRFTLVIDDGVNFVNQTHQTFDVIISDCTDPIGPGESLFTSAFYEGCKRCLNPGGIFVAQNGVCFLQQDEALDSHRKLSHYFSDVGFYQAAIPTYYGGIMTFAWATDNDALRHLSSEIIQARFHAAGLKCRYYNPAIHVAAFALPQYLHDALSAQ

SEQ ID NO: 154993 - DNA, 891 bp, Thauera sp. MZ1T
  CDS (1)..(891): transl_table=11
atgagcggagcgtcctggtttgccgatctgccgaaggatgtcctcgccgagcttctcggcgaggatgccggctactttctccgtggtgcgcgcctgctcgagtccggccgctccgagtggcaagactacgaggtttgggaaacgccgcgcttcggcaagctctttcgcctcgatggctgtttcatgacgtcggagcgcgacgagttccactaccatgagaacctgatccacgtccccggggttgcccatcccggcctgcgccgggcgctgctcatcgggggaggggatggcggttcggccgaagagctgctcaagtatccgggcatcgagcgtatcgtgatcgccgagctcgacgcgaaggtggtcgacatcgcccggcgctacctcgatgccgtgcatcatggcgccctcgacgatccccgcgtggagatccgcatcggggacgggatggcccatgtgtgcgagcatgctcccgccacgggcgagcgctacgacctgatcgtgctcgatctgaccgacccgatcgggccggcggaagcgctctacaccgccgacttcttcgcagcctgcaaggccctgctggccgagggcggggcgctgacgctgcatatcggtacgccggtattccagcccgagcgtgtgcgagagttgctcgcccgcctgcgtcgggtgtttgcgcgggtgcggccgtacttcctctacattccgctctatgggagcctctggggcatggcctgcgcgtccgatacgctcgacccggctgcgctcgacgcgaacgaggtggaccgccgtcttgccgagcgcgccatccgcgaactgcagcacttcaatggtgcggtacactgtgcgcagttcgccctgcccaatcatctgcgtgccttgctggcctga

SEQ ID NO: 154994 - protein, 296 aa, Thauera sp. MZ1T
MSGASWFADLPKDVLAELLGEDAGYFLRGARLLESGRSEWQDYEVWETPRFGKLFRLDGCFMTSERDEFHYHENLIHVPGVAHPGLRRALLIGGGDGGSAEELLKYPGIERIVIAELDAKVVDIARRYLDAVHHGALDDPRVEIRIGDGMAHVCEHAPATGERYDLIVLDLTDPIGPAEALYTADFFAACKALLAEGGALTLHIGTPVFQPERVRELLARLRRVFARVRPYFLYIPLYGSLWGMACASDTLDPAALDANEVDRRLAERAIRELQHFNGAVHCAQFALPNHLRALLA

SEQ ID NO: 154995 - DNA, 852 bp, Clostridium spiroforme DSM 1552
  CDS (1)..(852): transl_table=11
atggaattgtggtttagtgaaagacatactaaaggtgttaagttttcgattaaagttgatcgtcagttgtttagtggtcatagtgaatttcaaagaattgatatatttgattctaaagagtttggacgttttttagcattagatggttatatgatgttaacagaaaaagatgaattcatttatcatgaaatgattgttcatgttcctatggcagtacatcctaatgtaaaaaaagttttagttataggtgccggtgatggtggtgtgattcgtgaattatgccgttatgaaacaattgaaacaattgatatggtagaaattgatgaattagttgttgaggtaagtaaaaaatatttaccaactacagcatgttgttttgatgatccgcgattaaatatatattatcaagatggcttaaaatttgttcgtactaaagaaaatgaatatgatttaattattgttgattcaacagatccatttggaccaggtgaaggactttttacaaaagaattttatgggaactgctttaaagcattaaatgaaacgggaattatggtaaatcagcatgaaagtccattttatcaagatgatgctgttgcaatgcaacgtgctcataaacgaattgttgaaagtttcccaatttctagagtatatcaagcgcatattccaacttatccttcaggacattggttatttggttttgcttccaaaaaatatcatccaatcaaggattttcaaaagacaaaatggaatgctcggggaatgcaaactagatattataataccggaatacatgtaggagcatttgctttgccaaattatgttgaggagttacttagagatgtggaataa

SEQ ID NO: 154996 - protein, 283 aa, Clostridium spiroforme DSM 1552
MELWFSERHTKGVKFSIKVDRQLFSGHSEFQRIDIFDSKEFGRFLALDGYMMLTEKDEFIYHEMIVHVPMAVHPNVKKVLVIGAGDGGVIRELCRYETIETIDMVEIDELVVEVSKKYLPTTACCFDDPRLNIYYQDGLKFVRTKENEYDLIIVDSTDPFGPGEGLFTKEFYGNCFKALNETGIMVNQHESPFYQDDAVAMQRAHKRIVESFPISRVYQAHIPTYPSGHWLFGFASKKYHPIKDFQKTKWNARGMQTRYYNTGIHVGAFALPNYVEELLRDVE

SEQ ID NO: 154997 - DNA, 843 bp, candidate division TM7 single-cell isolate TM7a
  CDS (1)..(843): transl_table=11
atggaattatggtatacagaagagcatacaaaaaatgttcgattttctataaaggttgataagcagttagtcagtgtgaaaagtgattttcagcggattgatatttttgagtcgcaggaatttgggcggtttttgacgctggatggatttatgatgctgacagaaaaggatgagtttatttaccatgagatgataacacatgttccgatggcagtaaatcctaaagctaagaaaatattggtaattggcgctggagatggcggaactgtccgtgagcttgtaaagtatgaacatatcgagagaattgatatggtggaaattgataagatggttgttgatgtctgtcgtgaatatttgcctaagactgcgaataaattgaatgatgaaagagttcgcatttattatgaggatggattgaaatttgtacgttctaaaacaaatgaatacgatattgtaattgtggattcgacagatccatttgggcctggagaagatttatttacaagggaattttatggaaactgctttaatgcgctaaaagatgacggaattcttgtaaatcagcatgaaagtccctattatgaggcggatgctaaagcaacagcaagagcgaataaacagttaagagcagtttttccgtttgcaacagtttatcagctgcatataccgacatatccgtcaggacattggctatttggatttgcttcaaaaaaatataatcctgtaaaagacttgaaggctgatgaatggaatgagtttggcatagaaacgagatattataatacggaattgcataaagggtcatttgctttgccaaattatgtgaaagatttaataaaataa

SEQ ID NO: 154998 - protein, 280 aa, candidate division TM7 single-cell isolate TM7a
MELWYTEEHTKNVRFSIKVDKQLVSVKSDFQRIDIFESQEFGRFLTLDGFMMLTEKDEFIYHEMITHVPMAVNPKAKKILVIGAGDGGTVRELVKYEHIERIDMVEIDKMVVDVCREYLPKTANKLNDERVRIYYEDGLKFVRSKTNEYDIVIVDSTDPFGPGEDLFTREFYGNCFNALKDDGILVNQHESPYYEADAKATARANKQLRAVFPFATVYQLHIPTYPSGHWLFGFASKKYNPVKDLKADEWNEFGIETRYYNTELHKGSFALPNYVKDLIK

SEQ ID NO: 154999 - DNA, 867 bp, Escherichia albertii TW07627
  CDS (1)..(867): transl_table=11
atggccgaaaagaaacggtggcatgaaacgctacacgaccagtttgggcagtactttgctgtagataacgttctgtatcatgaaaagaccgatcttcaggatctgatcatttttgaaaacgccgcatttggtcgcgtgatggcgctggatggtgtagtacaaaccaccgagcgcgacgagtttatctatcatgagatgatgacccacgtgccgctactggcccacggccacgcgaagcatgtgctaatcatcggcggcggcgacggcgccatgctgcgtgaagtgacccgacacaaaaacgttgagtcaatcacgatggtggaaatcgacgcgggtgtcgtgtcgttctgccgtcagtatctgcctaaccataacgccggtagctacgacgatccgcgctttaaactggtgatcgacgatggtgtcaacttcgttaatcaaatcaaccaaacctttgatgtgatcatctccgactgtaccgatcccatcggccccggcgaaagtctgttcacttctgcattttatgaaggttgcaaacgctgcctgaatcctggcggtatcttcgtcgcgcagaacggcgtctgctttttacagcaggaagaagccatcggcagccatcgtaaactcagccattacttcgacgatgttggcttttatcaggccgcaatcccgacctattacggcggcataatgacctttgcatgggcaaccgataacgacgcattacgccatctctcaaccgaaattattcaggcacgttttctcgcctctggtctgaaatgtcgttattacaatccggcaatccacacggcagcttttgccttaccccagtatctgcaagacgcactggtttcacaggcgtcctaa

SEQ ID NO: 155000 - protein, 288 aa, Escherichia albertii TW07627
MAEKKRWHETLHDQFGQYFAVDNVLYHEKTDLQDLIIFENAAFGRVMALDGVVQTTERDEFIYHEMMTHVPLLAHGHAKHVLIIGGGDGAMLREVTRHKNVESITMVEIDAGVVSFCRQYLPNHNAGSYDDPRFKLVIDDGVNFVNQINQTFDVIISDCTDPIGPGESLFTSAFYEGCKRCLNPGGIFVAQNGVCFLQQEEAIGSHRKLSHYFDDVGFYQAAIPTYYGGIMTFAWATDNDALRHLSTEIIQARFLASGLKCRYYNPAIHTAAFALPQYLQDALVSQAS

SEQ ID NO: 155001 - DNA, 828 bp, Geobacillus sp. WCH70
  CDS (1)..(828): transl_table=11
atggaattatggtttacggaaaagcagacagagcattttggcattacagcgagaattaaacgaactttacatacagagcaaaccccatttcaaaagctggacatggtggagacagtagagttcggcaatatgcttattttagacggaatggtgatgacaacgcaaaaagatgagtttgtgtaccacgaaatggttgcacacgttccgctcttcacccacccgaatccggaaaatgtgcttgtcgttggcggcggcgatggcggtgttattcgtgaagtgttaaaacacccgagcgtaaaaaaagtgacattagtggagattgatggaaaagtgattgaatgctcaaaaaaatttcttccggaaattgctggaaagttagatgacccgcgtgtagaagtaaaagtggatgacggttttatgcatattgcgaaaagtgaaaacgaatatgacgtcattatggtcgattcgacagagccagtcggcccggctgtcaacttatttacaaaaggtttttatgctggaatcgcaaaggctttgaaagaagacggcatttttgtcgcacaaacagacaacccttggtttaaagcagacttaatccgtaatgtttatcgcgatgttcgcgaaattttcccgattacgcgtctatacactgccaatatcccgacatatccaagcggtctatggacgtttacgatcggctcgaaaaaatacgatccgcttgaagtaagcgatgaacgcttccacgatattgagacgaaatattacacaaaagagcttcataaagcttgctttgttctgccgaaatttgtcgctgatttattgaagtaa

SEQ ID NO: 155002 - protein, 275 aa, Geobacillus sp. WCH70
MELWFTEKQTEHFGITARIKRTLHTEQTPFQKLDMVETVEFGNMLILDGMVMTTQKDEFVYHEMVAHVPLFTHPNPENVLVVGGGDGGVIREVLKHPSVKKVTLVEIDGKVIECSKKFLPEIAGKLDDPRVEVKVDDGFMHIAKSENEYDVIMVDSTEPVGPAVNLFTKGFYAGIAKALKEDGIFVAQTDNPWFKADLIRNVYRDVREIFPITRLYTANIPTYPSGLWTFTIGSKKYDPLEVSDERFHDIETKYYTKELHKACFVLPKFVADLLK

SEQ ID NO: 155003 - DNA, 873 bp, Geobacillus sp. WCH70
  CDS (1)..(873): transl_table=11
atgaaacacgtacaaaatgtattaccaccttatgtaaaagtccaaaacggtgaactctggttaacagaagatgaccgcgaaaatttaaaaattagctatcgcattaaagacattattttctccgaacgatctgatttccaacatgtcatgattttagattcttacgatttcggacgtatgcttgtactcgatggagtcgtgcaaacgacatcgattgacggccacatttataacgaaatgatttctcacgtaccgcttcaattccatccatcggcaaaaaaagtgcttattattggcggcggagactgcggtgcggctagagaagtagcgaaatataaacatgtcgaagaaattcatatggttgaaattgatgaaaaagtagtgcaatcttgcaaagcgcatttacaagaagtttccggaaacttatccgatccgcgagtacagtttatttatgatgatggggttgcttttgtaaaagaacgtgaaagtgaatatgatgtgattattatcgactcgtctgacccagtcggtccggctgaagcgctcttttcacgcgacttttatgccaatgtccgccgtgctttaaaagatgatggattaatggtttgccaaagtcaatcgccaattttccatttagacattttacgccaaacgtatgcaaatatttgcgaattattcccgcatgtccaagtatacacagcgactgttcctacatatccaggcggattgtggagctttaccatcggttcaacgaaacctctttcacttccggaaaatacaaccattccatcagatacgaaatatgttaacgaaggaatattaaaacaatgcttccaacttcctcaattcttgaaaaaggcgcttgaaaagtaa

SEQ ID NO: 155004 - protein, 290 aa, Geobacillus sp. WCH70
MKHVQNVLPPYVKVQNGELWLTEDDRENLKISYRIKDIIFSERSDFQHVMILDSYDFGRMLVLDGVVQTTSIDGHIYNEMISHVPLQFHPSAKKVLIIGGGDCGAAREVAKYKHVEEIHMVEIDEKVVQSCKAHLQEVSGNLSDPRVQFIYDDGVAFVKERESEYDVIIIDSSDPVGPAEALFSRDFYANVRRALKDDGLMVCQSQSPIFHLDILRQTYANICELFPHVQVYTATVPTYPGGLWSFTIGSTKPLSLPENTTIPSDTKYVNEGILKQCFQLPQFLKKALEK

SEQ ID NO: 155005 - DNA, 855 bp, Clostridium butyricum 5521
  CDS (1)..(855): transl_table=11
atggaactttggtatacagaacaacacacagaaaatgtacgattttcaattaaggttgaaaaacagttacatagcgagcagacagaatttcaaagaatagatatattggaatcaaaggaattcggaagattctttacacttgatggaatgatgatggttacagaaaaagatgaatttatttaccacgatatgatagtacatgttccaatggcagtaaatcctaatattaaaaatgtacttgttataggtgcaggagatggggggactgttagagaacttgcaaagtataaatctattgaaaatatagatatggttgaaatagataaaagagttgtggaagtctgcatggaataccttccacagacagcgtgcagattaaatgatgaaagagtaaacttattttttgaagacggattaagatttgtgagaaataaggaaaatgaatatgaccttataatagttgattcaacagatccgtttggacctggggaaggattgtttacaaaagagttttacggaaattgctataaagcgttaaaagaagatggaatattagtgaatcagcatgaaagtccatattatgaaaaatatgcaaaagctatgcaggatgctcatgaaaaaatatatggattatttaaagtgcacagagtttatcaagcacatattccaacatatccatcaggtcattggctttttggttttgcatctaaaaattatgatcctgtgaaagacttgaatgctgaaagatggaataatctcaatatagagacaaaatattataatacagaattacattcagggtgctttgcattacctaattatgtgaaaaaattactagaagtaaagaagaaataa

SEQ ID NO: 155006 - protein, 284 aa, Clostridium butyricum 5521
MELWYTEQHTENVRFSIKVEKQLHSEQTEFQRIDILESKEFGRFFTLDGMMMVTEKDEFIYHDMIVHVPMAVNPNIKNVLVIGAGDGGTVRELAKYKSIENIDMVEIDKRVVEVCMEYLPQTACRLNDERVNLFFEDGLRFVRNKENEYDLIIVDSTDPFGPGEGLFTKEFYGNCYKALKEDGILVNQHESPYYEKYAKAMQDAHEKIYGLFKVHRVYQAHIPTYPSGHWLFGFASKNYDPVKDLNAERWNNLNIETKYYNTELHSGCFALPNYVKKLLEVKKK

SEQ ID NO: 155007 - DNA, 909 bp, Exiguobacterium sp. AT1b
  CDS (1)..(909): transl_table=11
atgattaagaagcgcctcaaaacgccactcgcatacgaacaactttttgaacagaaaggggttctatcgatggaccaaaaattaaaattatggtttacggagcaccaaacagaagattacgggattacgttccgtgtaaaccacgtttatgagagcgaacaaacggagtttcaacgactagagatggtcgaaacggacgagttcggaacgatgttgttacttgacgggatggtcatgacgacggataaggacgaattcgtctatcacgagatggtcgcacacgtcccactctttacacacccgaatccgaagcatgtgctcgtagtcggtgggggagacggcggtgtcatccgtgaaattatgaaacacccatcagtagaaaaagcggttctcgtagatatcgacgggaaagttattgaatattcgaagaaatacttaccaaatattgcgggtgagcttgataacccgcgtgttgaagtcatcgttggtgacggattcatgcatatcgcgaagtcagaaaacgagtacgacgtcattatggtcgactcgactgaaccggtcggaccagcagccaacctcttcacaaaagggttctatgcagggatttcaaaagcgctcaaagaggatggaatctttgtggctcaaacggataacccatggttcacaccagaactcatccaaacggttcaacgtgacgtgaaggaaatcttcccaatcacgaaattgtacacagcaaacgtaccgacgtacccgagcggcatgtggacgttcacaatcggttcgaagaaatacgatccggaacaagtatcagcggagcgtttccatgacatcgaaacgaagtactatacgccgaagcttcacaatgcagcgttcgttcttccgaaattcgtggaggacttaacaaaatga

SEQ ID NO: 155008 - protein, 302 aa, Exiguobacterium sp. AT1b
MIKKRLKTPLAYEQLFEQKGVLSMDQKLKLWFTEHQTEDYGITFRVNHVYESEQTEFQRLEMVETDEFGTMLLLDGMVMTTDKDEFVYHEMVAHVPLFTHPNPKHVLVVGGGDGGVIREIMKHPSVEKAVLVDIDGKVIEYSKKYLPNIAGELDNPRVEVIVGDGFMHIAKSENEYDVIMVDSTEPVGPAANLFTKGFYAGISKALKEDGIFVAQTDNPWFTPELIQTVQRDVKEIFPITKLYTANVPTYPSGMWTFTIGSKKYDPEQVSAERFHDIETKYYTPKLHNAAFVLPKFVEDLTK

SEQ ID NO: 155009 - DNA, 831 bp, Bacillus pumilus ATCC 7061
  CDS (1)..(831): transl_table=11
atgagcgaactttggtatacagagaagcaaacgaagaattttggtattacattgaaggtgaacaaaacccttcacacagaacaaacagattttcagcatttagaaatggtggaaacagaagagtttggcaatatgctgtttttagacggtatggtgatgacgtctgagaaagatgagtttgtatatcatgaaatggtggcacatgttcctcttttcactcatccaaacccggaaaatgttctcgtcgtaggcggaggagacggcggtgtcattcgtgaaatcctgaagcatccaagtgtgaaaaaagcgacacttgttgatattgatggcaaagtcatcgaatactcgaaaaaattccttccttcgattgctggaaaactagacgatcctcgtgtggatgtcaaagtcggagacggctttatgcacattgctgaagctgacaacgagtatgatgtcatcatggtggactcaactgaaccagttggaccagctgtgaacctgttctctaaaggattttacgcaggaatttcaaaagcactcaaagaagacggtattttcgtggcacaaacggacaatccttggttcacacctgagctgattacaaatgtacagcgtgatgtgaaagagattttcccaatcacgaagctttacacagcaaatattccaacgtatccaagtggtctttggacatttaccatcggttcaaaaaaatatgatccacttgctgtagaagacagccgtttctttgatattgacacgaaatattacacaaaagaattacacaaagcggcattcgttctgccgaaatttgtgagcgacttaatcaaataa

SEQ ID NO: 155010 - protein, 276 aa, Bacillus pumilus ATCC 7061
MSELWYTEKQTKNFGITLKVNKTLHTEQTDFQHLEMVETEEFGNMLFLDGMVMTSEKDEFVYHEMVAHVPLFTHPNPENVLVVGGGDGGVIREILKHPSVKKATLVDIDGKVIEYSKKFLPSIAGKLDDPRVDVKVGDGFMHIAEADNEYDVIMVDSTEPVGPAVNLFSKGFYAGISKALKEDGIFVAQTDNPWFTPELITNVQRDVKEIFPITKLYTANIPTYPSGLWTFTIGSKKYDPLAVEDSRFFDIDTKYYTKELHKAAFVLPKFVSDLIK

SEQ ID NO: 155011 - DNA, 867 bp, Shigella dysenteriae 1012
  CDS (1)..(867): transl_table=11
atggccgaaaaaaaacagtggcatgaaacgctacacgaccagtttgggcagtactttgcggtagataacgttctgtatcatgaaaagaccgatcaccaggatctgatcatttttgagaacactgcatttggtcgcgtaatggcgctggatggcgtagtacaaaccaccgagcgcgacgagtttatctatcatgagatgatgacccatgttccgctactggcccacggtcacgcgaaacatgtgctgattatcggcggcggcgacggtgccatgctgcgtgaagtaacccgacataaaaacgttgagtcaatcacgatggtggaaatcgatgcgggtgtcgtatcgttctgccgtcagtatctacccaaccataacgccggtagctacgacgatccgcgctttaagctggtgatcgacgatggcgtcaatttcgttaatcaaaccagccagacctttgatgtcattatctccgactgcaccgatcctatcggtcccggcgaaagccttttcacttcggcattttatgaaggctgcaaacgttgcctgaatcctggcggtatcttcgtcgcacaaaacggcgtctgctttttacagcaggaagaagccatcgacagccatcgcaaactcagccattacttcagcgacgttggcttttatcaggcggcgatcccgacctattacggcggtatcatgacttttgcatgggcggcagataacgacgccttacgccatctctcaaccgaaattattcaggcgcgttttctcgcctctggcctgaaatgccgttattacaatccggctgtccatacggcagcttttgccttaccccagtatctgcaagacgcactggcttcacagccgtcctaa

SEQ ID NO: 155012 - protein, 288 aa, Shigella dysenteriae 1012
MAEKKQWHETLHDQFGQYFAVDNVLYHEKTDHQDLIIFENTAFGRVMALDGVVQTTERDEFIYHEMMTHVPLLAHGHAKHVLIIGGGDGAMLREVTRHKNVESITMVEIDAGVVSFCRQYLPNHNAGSYDDPRFKLVIDDGVNFVNQTSQTFDVIISDCTDPIGPGESLFTSAFYEGCKRCLNPGGIFVAQNGVCFLQQEEAIDSHRKLSHYFSDVGFYQAAIPTYYGGIMTFAWAADNDALRHLSTEIIQARFLASGLKCRYYNPAVHTAAFALPQYLQDALASQPS

SEQ ID NO: 155013 - DNA, 945 bp, Thermus aquaticus Y51MC23
  CDS (1)..(945): transl_table=11
atggactacggcatgtacttctttgagcacatcaccccctatgagaccctggtgcgccgcatggagcgggtcatcgcctcggggcgcacccagtaccaggactacttcctctttgagaccaagggcttcggcaaggtcctggtcctggacaaggacgtgcagagcacggaaaaggacgagtacatctaccacgagaccttggtccaccccgccatgctggcccaccccgaccccaggcgggtcctgatcgtggggggcggggagggggccacgctaagggaggtcctcaggcaccccagcgtggagcgggcggtcatggtggacatagacggggagctggtggaggtggccaaggcccacatgcccgagtggcaccagggggcctttgaggacccccgcacggtcctggtcattgaggacgcccgggcctacctggagcgccacgaggacacctacgacgtcatcctcattgacctcaccgaccccgtgggggaggacaacccggccaggctcctctacaccgtggagttctaccgcctggtgaaaagccgcctgaaccccgggggggtcatgggcatgcaggcggggatggtcatgctcacccaccaccgggtccaccccgtggtccaccgcacggtgcgggaggccttccgctacgtgcgcagctacaaaaaccacatcccaggcttcttcctcaacttcggcttcctcctggcctcggacgcctttgacccggcggccttctccgagggggtcatagaggcccggatccgggagcggaacctgcctctgcgccacctcacctcccgctacctcgaggccatgttcgtcctgcccaaggacctggaagaggccatcgccgaggagaccttggtctccaccgaccaaaaccccttttacgtcacccctgagggcgaggcccggcaggccccttaccggggctag

SEQ ID NO: 155014 - protein, 314 aa, Thermus aquaticus Y51MC23
MDYGMYFFEHITPYETLVRRMERVIASGRTQYQDYFLFETKGFGKVLVLDKDVQSTEKDEYIYHETLVHPAMLAHPDPRRVLIVGGGEGATLREVLRHPSVERAVMVDIDGELVEVAKAHMPEWHQGAFEDPRTVLVIEDARAYLERHEDTYDVILIDLTDPVGEDNPARLLYTVEFYRLVKSRLNPGGVMGMQAGMVMLTHHRVHPVVHRTVREAFRYVRSYKNHIPGFFLNFGFLLASDAFDPAAFSEGVIEARIRERNLPLRHLTSRYLEAMFVLPKDLEEAIAEETLVSTDQNPFYVTPEGEARQAPYRG

SEQ ID NO: 155015 - DNA, 873 bp, Geobacillus sp. G11MC16
  CDS (1)..(873): transl_table=11
atgaaacaccaaggaaacgctttgccaccatatgtgcatttggacaatggggagctttggctcaccgaagatgaccgcgacaatttaaaaatcagctatcgcatcaaagaagtaatctttgccgagccgtccgattaccagcatgttatgattttggattcgtacgattttggacgcatgcttgttcttgacggcgtcgtgcaaacgacttcgattgatggccatatttataacgaaatgattacacacgtgccgctgcagcttcatccagaggcaaaacaggcgctcatcatcggcggtggcgactgtggagcggctcgtgaagcggccaagtatgaccgtttagagacgatcgagatggtcgaaatcgacgaaaaggtcgtccatgcatgcaaagaacatttaccggccgtctccggcaacttgtctgatccgcgcgtgaagtttatttatgatgacggcgtcgcgtttgtacaaggaaaagaaggcgtgtacgacgtcattatgatcgactcatccgacccagtcggcccagccgaagcgctgttttcgtcggagttttatgcgaacgtgcaccgcgcgttaaaagaggacgggctgatggtgtgccaaagccagtccccgattttccacctagatattttaaagcgcacataccgcaacattcgtgaattgttcccgcatgtgctcgtgtatacggcggtcgtgccgacatacccgggcggaatgtggagctttacgatcggctcgaaacggccgctagatttcccggcacagacgacgattccaaacgatacgaaatacgtcaatgatgccgttttccgccaatgtttctccttgccggaatttttgcgttcggcactagaggagtaa

SEQ ID NO: 155016 - protein, 290 aa, Geobacillus sp. G11MC16
MKHQGNALPPYVHLDNGELWLTEDDRDNLKISYRIKEVIFAEPSDYQHVMILDSYDFGRMLVLDGVVQTTSIDGHIYNEMITHVPLQLHPEAKQALIIGGGDCGAAREAAKYDRLETIEMVEIDEKVVHACKEHLPAVSGNLSDPRVKFIYDDGVAFVQGKEGVYDVIMIDSSDPVGPAEALFSSEFYANVHRALKEDGLMVCQSQSPIFHLDILKRTYRNIRELFPHVLVYTAVVPTYPGGMWSFTIGSKRPLDFPAQTTIPNDTKYVNDAVFRQCFSLPEFLRSALEE

SEQ ID NO: 155017 - DNA, 861 bp, Salmonella enterica subsp. enterica serovar Saintpaul str. SARA23
  CDS (1)..(861): transl_table=11
atggccgaaaatacgatgtggcatgaaacgctacacgaccagtttggtcagtactttgccgtagacaacgttctgtatcatgaaaaaaccgatcaccaggatttaatcatctttgaaaacgccgcttttggccgcgtgatggcgctggacggcgtggtacagaccaccgaacgcgacgagtttatttatcatgaaatgatgacccacgtcccgctgctggcgcacggtcatgcgaaacacgttctgattatcggcggcggcgacggcgcaatgctacgtgaagttacccggcataaaaatgtcgaaaccatcaccatggtggagatcgacgctggcgtagtctcgttttgccgccagtatttacccaaccacaatgccggcagctacgacgatccgcgctttacgctagtgatcgacgacggcgtgaatttcgtcaatcagacccatcagacctttgatgtgatcatttccgactgtaccgatccgataggccccggcgaaagcctgtttacctccgccttttatgaaggctgtaagcgttgcctgaatccgggcggcatttttgttgcccagaacggcgtgtgcttcctgcaacaggatgaagcgctcgacagccaccgaaagctgagtcattacttcagcgatgtcggcttctaccaggcggcgattccgacctactacggcggcatcatgaccttcgcctgggcgacggacaacgacgctcttcgtcacctgtcgagcgaaattattcaggcgcgttttcatgccgccggcctcaaatgtcgctattacaacccggctattcatgccgctgcatttgcgctaccgcaatatctacatgacgcactgcccgcacagtga

SEQ ID NO: 155018 - protein, 286 aa, Salmonella enterica subsp. enterica serovar Saintpaul str. SARA23
MAENTMWHETLHDQFGQYFAVDNVLYHEKTDHQDLIIFENAAFGRVMALDGVVQTTERDEFIYHEMMTHVPLLAHGHAKHVLIIGGGDGAMLREVTRHKNVETITMVEIDAGVVSFCRQYLPNHNAGSYDDPRFTLVIDDGVNFVNQTHQTFDVIISDCTDPIGPGESLFTSAFYEGCKRCLNPGGIFVAQNGVCFLQQDEALDSHRKLSHYFSDVGFYQAAIPTYYGGIMTFAWATDNDALRHLSSEIIQARFHAAGLKCRYYNPAIHAAAFALPQYLHDALPAQ

SEQ ID NO: 155019 - DNA, 852 bp, Ruminococcus lactaris ATCC 29176
  CDS (1)..(852): transl_table=11
atggaactttggtttagtgaatttcacgctcccgatgtcaaacacagtatccgggtgaacagacacctctattcacacaaaagtccgtatcagcagattgatatctacgagacaccggaattcggtaaagttctgtcactggatggaaatgtcatgctgacggaacgggatgagtttatttatgatgaaatgatcacgcatgttccgatggcggttcatcccggaattaagaatgtacttgtgatcggagcaggagacggcggcgttgtccatgagttggcacgttaccgtacgattgaaaatattgatctggtggaaatggatgagcaggttgtagaggcttgcaggatgtatctgcctgaaaatgccagccggctggatgatgaacgtgtgcatatttattttgacaatgcacttcgctttatccggcgccgcacggatgaatatgatctgatcattgtggattccacagacccgttcggtccttcggaaagttattttacaaaagagttctatggaatctgctacaatgcactacatgaggacggaatcctggtcaatcagcagggaagcccgttttatcagcacgatgcagaagcgatgcagcgcagccaccagcggatcgtcagtacatttccaatcagcagagtgtatcaggcacacatcccgacctatgcggcaggatactggctctttggtttcgcaagcaaaaaatatcatccgctggatgatcttgatgcggagaaatggcaggcgttgaatctgaaaacgaattattatacgacccgtctgcataaaggtgccttttatcttccggcgtttttggaacggctgcttgaggaggtagaataa

SEQ ID NO: 155020 - protein, 283 aa, Ruminococcus lactaris ATCC 29176
MELWFSEFHAPDVKHSIRVNRHLYSHKSPYQQIDIYETPEFGKVLSLDGNVMLTERDEFIYDEMITHVPMAVHPGIKNVLVIGAGDGGVVHELARYRTIENIDLVEMDEQVVEACRMYLPENASRLDDERVHIYFDNALRFIRRRTDEYDLIIVDSTDPFGPSESYFTKEFYGICYNALHEDGILVNQQGSPFYQHDAEAMQRSHQRIVSTFPISRVYQAHIPTYAAGYWLFGFASKKYHPLDDLDAEKWQALNLKTNYYTTRLHKGAFYLPAFLERLLEEVE

SEQ ID NO: 155021 - DNA, 828 bp, Bacillus cereus AH1134
  CDS (1)..(828): transl_table=11
atggaactatggttcactgaaaaacaaacaaaacattttgggattacggcgcgtattaaccgcacattacatacggagcaaacagaattccaaaaattggatatggttgaaacggaagagttcggaaacatgcttattttagatggcatggttatgacaacagaaaaagatgagttcgtttatcatgaaatggtagcgcacgtacctttatttacacatccaaaccctgaaaacgtattagttgttggcggcggtgatggcggtgttattcgtgaagtattaaaacacccaagtgtaaagaaagcaactcttgttgaaatcgatggaaaggtaattgagtactctaaacaatacttaccatcaattgcaggcgcattagataatgagcgtgtagaagtaaaagtaggagatggcttcctacacatcgcagagagcgaaaatgaatatgacgtaattatggtagattctactgagccagtaggaccagcagtaaacttatttacgaaaggtttctacgctggaatctctaaagcgttaaaagaagacggtattttcgttgcacaaacggacaacccttggtttacaccagaattaattacaactgtgtttaaagacgtaaaagagatcttccctattactcgtttatacacagcgaacattccaacttacccaagtggtctttggacgttcacaattggatctaaaaaacatgatccattacaagtaagtgaagagcgtttccacgaaatcgaaacgaaatactacacaaaagaattacacaatgcagcattcgcattaccgaaatttgttggtgatttaattaagtaa

SEQ ID NO: 155022 - protein, 275 aa, Bacillus cereus AH1134
MELWFTEKQTKHFGITARINRTLHTEQTEFQKLDMVETEEFGNMLILDGMVMTTEKDEFVYHEMVAHVPLFTHPNPENVLVVGGGDGGVIREVLKHPSVKKATLVEIDGKVIEYSKQYLPSIAGALDNERVEVKVGDGFLHIAESENEYDVIMVDSTEPVGPAVNLFTKGFYAGISKALKEDGIFVAQTDNPWFTPELITTVFKDVKEIFPITRLYTANIPTYPSGLWTFTIGSKKHDPLQVSEERFHEIETKYYTKELHNAAFALPKFVGDLIK

SEQ ID NO: 155023 - DNA, 942 bp, Arthrospira maxima CS-328
  CDS (1)..(942): transl_table=11
atggctggcagtgaagttcaggctgatttttggatgacagagtacatcacaccttgggatatttatgctcacggggtgatcgatgttctggcccataaaaaaaccccctatcaggaaatgtacatagttgaaactggggcttatggcaaagccctagtcctggacggtaaatggcagtcttgcaccggggatgagtttctgtatcatgaacccctagtccatccggggatggtcattcaaggtaaaccagagaaggttttagtcttaggtggcggcgagggagcgactatccgggaagtgttgcgctggaaaactgttgatcgggtggtaatggttgatattgatggggatgtagtggaggcgtgccgcgaatatctgccagaaatgcaccagaatgcttttgaagacccccggacggaattagtggttggggatgcgttggagtttctcgataccaccgaccaaaaatgggatgtgattatttctgatctatcagaccccattgaggaaggaccctcatttaaactgtttacgaaggagtattttgagaatatccagcgcgtcctagctgatgatgggatatttgtaattcaagctggcccggtggctcccggaaatttaaatcttcacgttcgcattgtcaatacagttaacgctgtgtttccccatgttcaatcctatactagctttatccccacctatggggctccttggggatttgcgatcgcctcgcaacaccccattgatccctatcctcaaccggagaaaacagatgaaatcctccaacagcatactgtaggcggtatgcggatgtttgacggtactaccctgttaggactatttcaacttccccgacatctacgagaggcgatcgccgccgaaactgaagtctacacactttcggaacctcctaaattctttggcaaaggcaagttaagttag

SEQ ID NO: 155024 - protein, 313 aa, Arthrospira maxima CS-328
MAGSEVQADFWMTEYITPWDIYAHGVIDVLAHKKTPYQEMYIVETGAYGKALVLDGKWQSCTGDEFLYHEPLVHPGMVIQGKPEKVLVLGGGEGATIREVLRWKTVDRVVMVDIDGDVVEACREYLPEMHQNAFEDPRTELVVGDALEFLDTTDQKWDVIISDLSDPIEEGPSFKLFTKEYFENIQRVLADDGIFVIQAGPVAPGNLNLHVRIVNTVNAVFPHVQSYTSFIPTYGAPWGFAIASQHPIDPYPQPEKTDEILQQHTVGGMRMFDGTTLLGLFQLPRHLREAIAAETEVYTLSEPPKFFGKGKLS

SEQ ID NO: 155025 - DNA, 852 bp, Thioalkalivibrio sp. HL-EbGR7
  CDS (1)..(852): transl_table=11
atgtcactggacaacacctggttcaccgagatccatcaggacacggccttctcgctgcgcatgaaggaaaagctgcacgaggaacagacgccgttccagaagatcgagatctacgagaccgagggcttcggcaccctgatggtgatcgacggctgcgtgatgctcaccgaccgggacaacttcatctaccacgagatgatgtcccacccggtgttgtattcccattctgatcccaagaacgtgctgatcatcggcggcggcgactgcggcaccctgcgcgaggtgctcaagcaccccgaggtgaagtccgccacccaggtggacatcgacgagcgggtaacccgcctcgcagaaaaatatttcccggagctgtgcgattccaacgacgatccgcgggcgaagctcctgttcgacgatggcatcaagtacgtgcaggacgcagcacccggctcgcttgacgtgatcatcatcgacagcaccgatccggtgggcccggcggaaggcctgttctccaccgccttctacagggactgcatcaaggccctgggccccggcggcctgctggtacagcagagcgagtcgcccctgctgcacaccgattccatcatcaagcccatgcacgacagcctgcgtgccgccggtttcctggacaccctcgccctgcacttcccccagtgcagctacccctccggctggtggaccgccaccatggcctgcaaggacatgcccgtgaccttcctgcgcgaagcgcaggcggaagacaagcccttcgagacccactactacaacgccgccatccagcgcgccgccattgcctgcccggagttcttccgcaagaagctgtacgggtaa

SEQ ID NO: 155026 - protein, 283 aa, Thioalkalivibrio sp. HL-EbGR7
MSLDNTWFTEIHQDTAFSLRMKEKLHEEQTPFQKIEIYETEGFGTLMVIDGCVMLTDRDNFIYHEMMSHPVLYSHSDPKNVLIIGGGDCGTLREVLKHPEVKSATQVDIDERVTRLAEKYFPELCDSNDDPRAKLLFDDGIKYVQDAAPGSLDVIIIDSTDPVGPAEGLFSTAFYRDCIKALGPGGLLVQQSESPLLHTDSIIKPMHDSLRAAGFLDTLALHFPQCSYPSGWWTATMACKDMPVTFLREAQAEDKPFETHYYNAAIQRAAIACPEFFRKKLYG

SEQ ID NO: 155027 - DNA, 870 bp, Enterobacter cancerogenus ATCC 35316
  CDS (1)..(870): transl_table=11
atgaccgaaaaaacggtttggcaagaaacgctgcatgaccagtttggtcagtattttgccgttgataacgtgctttatcatgagaaaaccgatcatcaggatttgataatcttcgagaacgccgcctttggccgcgtgatggcgctggacggcgtggtgcaaaccaccgagcgcgacgagtttatctatcacgagatgatgacccacgtccccctgctggcgcacggccacgcaaaacacgtgctgattatcggcggcggcgacggtgccatgctgcgcgaagtgtcccgccatcagactgtcgaaaccatcaccatggtggaaatcgacgcaggcgtggtctctttctgccgccagtatctgcctaaccacaacgccgggagctacgacgacccgcgcttcaatctggttatcgacgacggcgtcaattttgttaaccagaccacgcaaacgtttgatgtgatcatttcggactgcaccgacccgatcggcccgggcgcatcgctgtttacctcatccttctacgaaggctgcaagcgctgcctgaaaccgggcggcatctttgtggctcaaaacggcgtctgcttcctgcagcaggatgaagccctcgacagccatcgcaagctgagcacgtatttcagtgacgtgagcttctatcaggctgccatcccgacctactacggcgggatcatgacctttgcctgggcgacggataacgaagcgctgcgccatctctccaccgaaattattcaggcccggttccatcagacccatcttcagtgccgttactacaatccggcgatccataccgcagcctttgccttgccacagtatctgcaagacgcgctgtcctctaagggggtgaactaa

SEQ ID NO: 155028 - protein, 289 aa, Enterobacter cancerogenus ATCC 35316
MTEKTVWQETLHDQFGQYFAVDNVLYHEKTDHQDLIIFENAAFGRVMALDGVVQTTERDEFIYHEMMTHVPLLAHGHAKHVLIIGGGDGAMLREVSRHQTVETITMVEIDAGVVSFCRQYLPNHNAGSYDDPRFNLVIDDGVNFVNQTTQTFDVIISDCTDPIGPGASLFTSSFYEGCKRCLKPGGIFVAQNGVCFLQQDEALDSHRKLSTYFSDVSFYQAAIPTYYGGIMTFAWATDNEALRHLSTEIIQARFHQTHLQCRYYNPAIHTAAFALPQYLQDALSSKGVN

SEQ ID NO: 155029 - DNA, 915 bp, Dictyoglomus turgidum DSM 6724
  CDS (1)..(915): transl_table=11
atggatgcttattggattattgagaaaaatcatcccagtgagatacattggcatggagtaagtaggttttactatacaggggtatctccctttcaaaagatagagattattgaaagcactttctatggaaaatgtcttgtattagatggaaggattcaatccagtgagaaagatgagtttatctatcatgaggcattagtgcatcctgccttgctattgaatagagctgctaataagaaagtgttgataatgggtggaggagagggggctaccctgagggaagttttgcggcataaagatgtaacagaagctattatggttgacatagatggggaagtagtagaggtgtcaaaaaaatatttacctgaatggcaccaaggagcctttgatgatccaaggacaagattgtatataactgatgcaagagaatttgtagaaaagtccaaggaaaagtatgatgtaatagtaagtgatctttcagagcctatggagggtagccctgcagtaaaactttttacctttgaattttaccacattataaaggatcatttgaaggaagatggcatatttgtaatgcaagctggtacaactcatcatctcaaaatagcttttcattctgccatgaattctactttacgtagggtgtttaagatagtaagatcttatcaagcctatgtaccagcatatgactttatttggagttttatctgggcaagtgataaaatagatccaaaagattttagtgaggaagagataaatagcttgttaaaatccaagaatttagcaaatttaaagttttatgatggagaaacccacaaaatgatgttttctcttccaaaacaccttagagaactaatagaaagagaggagagagtagcttatgataacgctcctctatatgcagtagaggattaa

SEQ ID NO: 155030 - protein, 304 aa, Dictyoglomus turgidum DSM 6724
MDAYWIIEKNHPSEIHWHGVSRFYYTGVSPFQKIEIIESTFYGKCLVLDGRIQSSEKDEFIYHEALVHPALLLNRAANKKVLIMGGGEGATLREVLRHKDVTEAIMVDIDGEVVEVSKKYLPEWHQGAFDDPRTRLYITDAREFVEKSKEKYDVIVSDLSEPMEGSPAVKLFTFEFYHIIKDHLKEDGIFVMQAGTTHHLKIAFHSAMNSTLRRVFKIVRSYQAYVPAYDFIWSFIWASDKIDPKDFSEEEINSLLKSKNLANLKFYDGETHKMMFSLPKHLRELIEREERVAYDNAPLYAVED

SEQ ID NO: 155031 - DNA, 1023 bp, Ammopiptanthus mongolicus
  CDS (1)..(1023)
atggctgcagagaacgatgttgtctcttctgatttgcatgtgaagaggcaaagagatgaagaagaaaatggggtctctgtttccactgtttccatggacatggagggttgtaaggactctgttcataatggtatatcatctgtaattcctgggtggttctctgaaattagcccaatgtggcctggagaggcacactccttgaaggtggaaaagattttgtttcaaggaaagtctgaataccagaatgtcctggtcttccagtcatccacatatggcaaggttctagttttggatggagtcattcagctcacagaaagggatgaatgtgcctatcaagaaatgatcactcatcttcctctttgctctattccaaatcccaaaaaggtattggttatcggtggaggagatggaggagtcctacgcgaagtatcacgccattcttcagttgaaaagatagacatttgtgaaattgataagatggttgttgatgtctccaaacaatttttccctcatgtagcggtagggtttgaggatccacgtgtgaaccttcatattggcgatggagttgcatttttgaaggcagctccagaaggaacttatgatgcagttatagttgattcatctgatcctatcggtcctgctcaagagctttttgaaaaacccttttttgagtcggttgcaagggctcttcgtcccggaggagttgtgtgtactcaggcagaaagtatatggcttcatatggatatcattgaggacattgtggcaaattgtcgccagatttttaaaggctcagttaactatgcttggaccacagttcctacatacccaagtgggatgattggttttatgctttgctcaactgagggacctcccgttgatttcaagcattcggtgaatcccatagatgaaaatgagtgtcagaagtcagtaagaccactgaaattttacaactctgagattcatacagcagctttctgtttgccatcatttgctaagaggaagattggttttataaataattga

SEQ ID NO: 155032 - protein, 340 aa, Ammopiptanthus mongolicus
MAAENDVVSSDLHVKRQRDEEENGVSVSTVSMDMEGCKDSVHNGISSVIPGWFSEISPMWPGEAHSLKVEKILFQGKSEYQNVLVFQSSTYGKVLVLDGVIQLTERDECAYQEMITHLPLCSIPNPKKVLVIGGGDGGVLREVSRHSSVEKIDICEIDKMVVDVSKQFFPHVAVGFEDPRVNLHIGDGVAFLKAAPEGTYDAVIVDSSDPIGPAQELFEKPFFESVARALRPGGVVCTQAESIWLHMDIIEDIVANCRQIFKGSVNYAWTTVPTYPSGMIGFMLCSTEGPPVDFKHSVNPIDENECQKSVRPLKFYNSEIHTAAFCLPSFAKRKIGFINN

SEQ ID NO: 155033 - DNA, 1032 bp, Datura metel
  CDS (1)..(1032)
atggaagtcatatctaccaacacaaatggctcttccctccttaaaaatggtgtcatcaccatgaacggccaccacaatggcaattccgatcaccggaacggcggcaccactgcacatgacaatggcagaaagttattggggaactcaaactctattaagcctggttggttttcagagtttagcgccttatggccaggtgaagcattctcactgaaaattgagaagttgctatttcagggaaagtctgattaccaagatgtcatgctctttgagtcagcaacttatggaaaggttctgacattggatggagcaattcaacacacagaggatggtggatttccatatactgaaatgattgttcatctcccacttggttccatccctaatccaaaaaaggttttgataattggtggaggaattggttttacgttattcgaagtgcttcgttattctaccgttgagaaaatagacatagttgagattgatgacgtggtggtcgatgtatcaagaaaatttttcccctaccttgccgctaactttaatgatcctcgtgtaactttggttctcggtgatggagctgcatttgtaaaggctgcacaagcagggtattatgacgctattatagtggactcttctgatcctattggtccagcaaaagatttgtttgagaggccattttttgaggcagtagccaaagcacttagagcaggaggcgttgtgtgcacacaggctgaaagcatttggcttcatatgcatattatcaaaccaattattgctaattgtcgtcaagtctttaagggttctgtcgactatgcttggactactgttcctacttatccaactggtgtaattggttacatgctgtgctctactgagggaccagacgttgacttcaagaatccagtggatccaattgacaaagatgaaactcatgccaactccgaattaggacctctgaagttctacaacgctgatattcacaaagcagctttcattttgccatcttttgccagaagtatgatagagtcttag

SEQ ID NO: 155034 - protein, 343 aa, Datura metel
MEVISTNTNGSSLLKNGVITMNGHHNGNSDHRNGGTTAHDNGRKLLGNSNSIKPGWFSEFSALWPGEAFSLKIEKLLFQGKSDYQDVMLFESATYGKVLTLDGAIQHTEDGGFPYTEMIVHLPLGSIPNPKKVLIIGGGIGFTLFEVLRYSTVEKIDIVEIDDVVVDVSRKFFPYLAANFNDPRVTLVLGDGAAFVKAAQAGYYDAIIVDSSDPIGPAKDLFERPFFEAVAKALRAGGVVCTQAESIWLHMHIIKPIIANCRQVFKGSVDYAWTTVPTYPTGVIGYMLCSTEGPDVDFKNPVDPIDKDETHANSELGPLKFYNADIHKAAFILPSFARSMIES

SEQ ID NO: 155035 - DNA, 1086 bp, Lotus japonicus
  CDS (1)..(1086)
atgggggacgccgcaggaagaggtttggaatgccagaagactatggatgggaaggagagtaacaggaatggcttagagaaggaacttcctttatgttgtttgaaggctattgcttcagaccctgagttggatgcaaaatgccattccaccgttgtttctgggtggttctcagcacctcaaacttgctctgggaaatctgggaaagatgcttatttcaacaacccaatgtggccaggagaagcccattcaatcaaagtagacaagatcttgtacaaggaaaagtcagagtaccaagaggtcttggtttttgagtcatcaatatatgggaaagttcttgtacttgatgggattgttcagttgactgagaaggatgaatgcgcttaccaggagatgatagctcatcttcccctttgttcaattgcgtccccagaaactgttttagttgttggtggcggagatggcggggttctaagggaagtctcccgccacagctctgtgaagcgtattgatatttgtgagatagataagatggttattgatgtttctaggaagttttttccagagttagctgttggatttgatgatcctcgagtacacctgcatgttggcgatgctgttgaatttcttagatgtactcctgaggggaagtatgatgctataattgttgattcctcagatcctgtgggtcctgcccaggaacttgtagagaaaccattttttgaaacattagcgaaagcattgaggcctggtggagttctctgtaacatggcagaaagtatgtggcttcatacacaccttatccaagatatgatctccgtctgtagagaaacatttaaaggttctgtacattatgcatgggcaagtgttcctacatatccgagtggtctgatagggtttcttctatgctcaacggaggggccacctgttgattttgtaaaccccatcaacccaattgaaaagttggaaggtgcagataagcacaaaaggaaacttagattctataactcagagatgcacacagctgctttcgcgttgcctgcatttctgaagagggaggtgagcttgatccgtgatccttccgcttag

SEQ ID NO: 155036 - protein, 361 aa, Lotus japonicus
MGDAAGRGLECQKTMDGKESNRNGLEKELPLCCLKAIASDPELDAKCHSTVVSGWFSAPQTCSGKSGKDAYFNNPMWPGEAHSIKVDKILYKEKSEYQEVLVFESSIYGKVLVLDGIVQLTEKDECAYQEMIAHLPLCSIASPETVLVVGGGDGGVLREVSRHSSVKRIDICEIDKMVIDVSRKFFPELAVGFDDPRVHLHVGDAVEFLRCTPEGKYDAIIVDSSDPVGPAQELVEKPFFETLAKALRPGGVLCNMAESMWLHTHLIQDMISVCRETFKGSVHYAWASVPTYPSGLIGFLLCSTEGPPVDFVNPINPIEKLEGADKHKRKLRFYNSEMHTAAFALPAFLKREVSLIRDPSA

SEQ ID NO: 155037 - DNA, 858 bp, Magnetospirillum gryphiswaldense
  CDS (1)..(858): transl_table=11
atgactgggcaatggttccgcgaggagctgtacccccattggcgccaaagcttcgccgtcacccgcgagctttaccgcgccgatgacggcttgcaggacatcgtcctgttcgagacccccggtttcggtcgggtgctgaccctggacggggtgatccaggtcaccaccggcgacgagttcatctatcacgagatgctcgcccatgtgcccatctatgcccacggcgccgtcaaaaccacctgcgtggtcggcggcggcgatggcggcatgctgcgcgagatcctcaagcatcaagccatccaacaggctgtgctggtggaaatcgacgcggcggtggtggagttctgccgcacccatatgccatcggtgtcggacggcgccttcgacgatccgcgcaccgagatcgtcatcgccgacggcctgcgctacatggccgagaccgagcgcaagttcgatctgatcgtcatcgattccaccgatcccatcggccccggcggcgtcttgttcaccgaggcattctacaaggattgcgcccgctgcctgacgcctgacggcattgtcgtcaaccagaacggcgtacctttcctgcaaggcgaggaagtcaccgatacctggcgccgccgccgcccgcatttcgccgatgtgagcttttataccgccgccgtgcccacctatgtgggtggcctgatggccttgggctgggcctcgcacagcctgcgccctcgccacgaaagttccgacaccatcgccgcccgtttccaggcggcgccggtggcaacccgctattacacccccgacatccacaaggcatccttcgccttgcccaaatacgtgcaagacttgatccccgggccgtga

SEQ ID NO: 155038 - protein, 285 aa, Magnetospirillum gryphiswaldense
MTGQWFREELYPHWRQSFAVTRELYRADDGLQDIVLFETPGFGRVLTLDGVIQVTTGDEFIYHEMLAHVPIYAHGAVKTTCVVGGGDGGMLREILKHQAIQQAVLVEIDAAVVEFCRTHMPSVSDGAFDDPRTEIVIADGLRYMAETERKFDLIVIDSTDPIGPGGVLFTEAFYKDCARCLTPDGIVVNQNGVPFLQGEEVTDTWRRRRPHFADVSFYTAAVPTYVGGLMALGWASHSLRPRHESSDTIAARFQAAPVATRYYTPDIHKASFALPKYVQDLIPGP

SEQ ID NO: 155039 - DNA, 1110 bp, Vitis vinifera
  CDS (1)..(1110)
  misc_feature (802)..(802): m is a or c
  misc_feature (807)..(807): y is t or c
atggagggcggcgcaggaaaaggtttggaatgcccgaagattatggatgggaaggcgagtaacgggaagggtttgaagaaggccattccttcttgttgcctaaaagctaaggcttcggcccctgagaatgatgcaaaatgccattcaactgttgtttctgggtggttctcagaacctcagtcatgctctgataaagctggcaatctgatgtatttcaacaacccgatgtggcctggagaagcacattcactgaaagttgaaaatattttattccagggaaagtctgagtttcaagagatactggtttttgagtcgtcagcatatggcaaagtgcttgtgcttgatggcattgttcagttgagcgagaaagatgaatgtgcctatcaggagatgattgctcaccttcccctttgttcaattgaatcccccaagagagttctggttgttggtggtggtgatggtggggttcttagggaaatttctcgtcatagctctgttgagcttattgatatttgtgagatagataagatggttatagatgtgtgtaagaagtttttcccacagttatacgttgggtttgaagaccctcgtgtccagcttcatgttggggatgctgttgaatttcttagacatgtacctgaagggaagtatgatgcaattattgttgattcatcagatcctgtgggtcctgctcaagaacttgtcgagagaccattttttgagacaacagccagagctttgcgtcctggtggtgttctttgtaacatggctgaaagcatgtggctccacacacatcttattmaggayatgctttctatttgtcgtgaaacattcaagggttcggtccattatgcatgggcaagtgttcctacatatccaagtggtgtgattggatttctattgtgctcaactgaggggccacctgtggatttcttgcatcctgttaacccaattgagaagttagaaggcaatctcaagtgtggtagagaacttaggttttataactcggagattcactcggctgcttttgcattaccttcatttgtgaggagggaggtgagcattctgcacaattctccaaccccagcacaacgaatctgtgtttcttag

SEQ ID NO: 155040 - protein, 369 aa, Vitis vinifera
  misc_feature (268)..(268): The Xaa at location 268 stands for Gln, or Lys.
MEGGAGKGLECPKIMDGKASNGKGLKKAIPSCCLKAKASAPENDAKCHSTVVSGWFSEPQSCSDKAGNLMYFNNPMWPGEAHSLKVENILFQGKSEFQEILVFESSAYGKVLVLDGIVQLSEKDECAYQEMIAHLPLCSIESPKRVLVVGGGDGGVLREISRHSSVELIDICEIDKMVIDVCKKFFPQLYVGFEDPRVQLHVGDAVEFLRHVPEGKYDAIIVDSSDPVGPAQELVERPFFETTARALRPGGVLCNMAESMWLHTHLIXDMLSICRETFKGSVHYAWASVPTYPSGVIGFLLCSTEGPPVDFLHPVNPIEKLEGNLKCGRELRFYNSEIHSAAFALPSFVRREVSILHNSPTPAQRICVS

SEQ ID NO: 155041 - DNA, 903 bp, Saccharomyces cerevisiae (strain YJM789)
  CDS (1)..(903)
atggttaataattcacagcatccttacatcaaagatggatggtttagagagattaatgataaaagttttccgggccaggcctttactatgaccgtggactcaatactttatgaagcccgcagtgaatttcaggacatcttaatcttccgtaacaaggtatacggtactgttttggtcctcgatggtattgtccaatgtacggaatttgatgagtttgcctatcaagagatgatcacccacattgccatgtttgcgcattctaatcccaagcgtgtacttatcattggcggtggggacggaggtgtcttaagggaagtagccaagcacagctgtgtagaagatatcactatggtagaaattgactcatcagtgatcgaattatcccgtaagttcttgcccacattgagtaatggtgctttcgatgacgaaaggttggacttgaaactttgcgatggcttcaagttcttacaagatataggtgcttccgacgtccataagaaatttgacgtcattattacagatagttctgatcctgaaggtccagctgaagcgttttttcaagagaggtatttcgaactattgaaagatgctttaaatcctaatggcgttgttattatgcaaagctctgaaaatttttggttaaatttagaatacttacatgatttgaaaaatacagccaaaaaggtatttcctaatacagaatattgctataccatggttccaacctatacatctggccaattaggtttaattgtttgcagtaataacgccaatataccgttgaacattccgcaaagaaagatatctgagcaagaacaagggaagctgaagtactataatcctcaaatacattctagtgcgtttgttttgcctacttgggcagacaaggtcattaatgaatga

SEQ ID NO: 155042 - protein, 300 aa, Saccharomyces cerevisiae (strain YJM789)
MVNNSQHPYIKDGWFREINDKSFPGQAFTMTVDSILYEARSEFQDILIFRNKVYGTVLVLDGIVQCTEFDEFAYQEMITHIAMFAHSNPKRVLIIGGGDGGVLREVAKHSCVEDITMVEIDSSVIELSRKFLPTLSNGAFDDERLDLKLCDGFKFLQDIGASDVHKKFDVIITDSSDPEGPAEAFFQERYFELLKDALNPNGVVIMQSSENFWLNLEYLHDLKNTAKKVFPNTEYCYTMVPTYTSGQLGLIVCSNNANIPLNIPQRKISEQEQGKLKYYNPQIHSSAFVLPTWADKVINE

SEQ ID NO: 155043 - DNA, 987 bp, Cochlearia officinalis
  CDS (1)..(987)
atggatccttgttctgctaccgatttgaaacgacctagagaagaggacgctaactccgccgccgcttctaacggcgatccgacgaaggagcctgcttgtttctcctccgtgattcctggctggttctccgagatgagtcctatgtggccaggggaggcacactctttgaaagttgagaaggttttgtttcaagggaaatcagattatcaagatgtcattgttttcaagtctgcaacatatgggaaagttttggtacttgatggagtaatacagcttaccgaaagagacgaatgcgcgtatcaggagatgatcactcaccttccattgtgctctatccctaatcctaagaaggtcttggttattggaggaggagatggaggtgtcctgcgagaagttgcgcgccatgcttctgttgagcatattgacatgtgtgagattgataaaatggtggtagatgtgtctaaacagtttttccctgatgtagcaattggatatgaggatcctcgagtgaaccttgtcattggcgatggtgttgctttcttgaagaatgccgcagaaggatcatacgatgcagttattgttgactcatcagatcctataggtccagcaaaagagctgtttgagaaaccattcttccaatccgtagctagagctctacgacctggtggtgttgtgtgcactcaagccgaaagcttgtggcttcacatggacatcatcgaagacattgtttcaaattgccgtgagatcttcaaaggttctgtcaactatgcatggaccagcgtcccaacatacccaagtggagttattgggtttatgttgtgttcaacggagggacccgatgtcgacttcaaaaacccggtgaactcgattgatgagagctctagcaaatcaaacggacccttgaagttttacaacgccgagattcattcagctgcgttctgcttaccttctttcgccaagaaggtaatcgagtcaaaatccaattga

SEQ ID NO: 155044 - protein, 328 aa, Cochlearia officinalis
MDPCSATDLKRPREEDANSAAASNGDPTKEPACFSSVIPGWFSEMSPMWPGEAHSLKVEKVLFQGKSDYQDVIVFKSATYGKVLVLDGVIQLTERDECAYQEMITHLPLCSIPNPKKVLVIGGGDGGVLREVARHASVEHIDMCEIDKMVVDVSKQFFPDVAIGYEDPRVNLVIGDGVAFLKNAAEGSYDAVIVDSSDPIGPAKELFEKPFFQSVARALRPGGVVCTQAESLWLHMDIIEDIVSNCREIFKGSVNYAWTSVPTYPSGVIGFMLCSTEGPDVDFKNPVNSIDESSSKSNGPLKFYNAEIHSAAFCLPSFAKKVIESKSN

SEQ ID NO: 155045 - DNA, 942 bp, Vitis vinifera
  CDS (49)..(942)
  misc_feature (315)..(315): y is t or c
  misc_feature (402)..(402): y is t or c
  misc_feature (615)..(615): r is g or a
  misc_feature (735)..(735): w is a or t
atggctgaacataccagagagggcgaagagaatggggtcagcggttgcatgtcttctgtgattcctgggtggttttcggagattagcccaatgtggcctggagaggcacattccttaaaggtagaaaagatcttatttcaggagaaatctgactaccagaatgtaatggtctttcagtcagcaacatatggaaaggttctcgttttggatggggtgattcaactcacagagagggatgaatgcgcatatcaagaaatgatcactcacctgccactttgctcaattccaaacccaaagaaggttttggtcattggyggaggagatggtggtgtcctgcgagaagtggcccgacattcttctgttgagcagatagatatctgtgaaattgatgggatggttgtygatgtttctaaaaaatttttccctgacgtagcaattgggtatgatgatccccgtgtgaatctccatattggcgatggggttgcatttatgaagaatgcacctgaaggaacttatgatgctgttatagtagattcttctgacccaataggtcctgcacaggagctttttgagaagcctttctttgcgtcagtggcaagggctcttcgtccaggrggagttgtgtgtactcaggcagaaagtatatggcttcatatgcacattattgaagacattgtcacaaactgccgccagatattcaaaggctctgtcaactatgcatggacaacagttccwacatacccaagtggggtgattggattcatgctgtgctctactgagggacctgctgttgatttcaagcatcctgtcaatcccattgatgcaaatgagagtgcttgcaagtcaagtcgacctttgaaattttacaactcagagattcacgctgcagctttctgtttgccatcttttgcaaagaaggtgattgattcaaaaactacatga

SEQ ID NO: 155046 - protein, 297 aa, Vitis vinifera
MSSVIPGWFSEISPMWPGEAHSLKVEKILFQEKSDYQNVMVFQSATYGKVLVLDGVIQLTERDECAYQEMITHLPLCSIPNPKKVLVIGGGDGGVLREVARHSSVEQIDICEIDGMVVDVSKKFFPDVAIGYDDPRVNLHIGDGVAFMKNAPEGTYDAVIVDSSDPIGPAQELFEKPFFASVARALRPGGVVCTQAESIWLHMHIIEDIVTNCRQIFKGSVNYAWTTVPTYPSGVIGFMLCSTEGPAVDFKHPVNPIDANESACKSSRPLKFYNSEIHAAAFCLPSFAKKVIDSKTT

SEQ ID NO: 155047 - DNA, 963 bp, Caenorhabditis briggsae
  CDS (1)..(963)
atggacaaactacacaagggatggttcactgagttctcgccagacgatttggaaaagatgagcaatcctgatgctcccgaagactcctcttctaaacttctcaagtcggatgggcaggagatgggcggtgcatggccaggccaagcgttttctcttcaggtcaagaaggtgttgttccatgagaagagcaagtatcaggatgtgctcgtttttgagagcactacctatggaaacgtgctagttctagatggaatcgttcaagccaccgaacgagacgagttctcctaccaggaaatgttggctcatcttccactgtttgctcatcagaacccaaagaaagttctcatcattggtggaggagatggaggtattctccgtgaggttctgaagcatgacaccgtcgaaaaagtgacaatgtgtgagattgatgagatggtcattgatgtggccaaaaaattcctgcctggcatgtcttgcggattctcccacgagaaactggatctctactgtggtgacggtttcgaattcttgaaaaatcacaagaacgaattcgatgttattattactgacagttccgatccagtgggtccagccgagtcgctgttcggacagagttactatgagctcttgagagatgctcttaaggaggatggtattttgtcatcgcaaggagaatccgtatggcttcatctcccactgattgctcatcttgtggcgttcaaccggaaaatctttccaacagtgaactacgctcaatcgatcgtctctacttatccatcaggaagcatgggatacttgatttgcgcaaagagtgatacccgtgacgtcaccactcctgctcgtgtgctctctgatgaacaagtcaagaatatgaatctcagattctataattccgaagttcacaaagcggcgttcgtccttccacagttcgtcagaaacgctctggagaagaagaaagagtaa

SEQ ID NO: 155048 - protein, 320 aa, Caenorhabditis briggsae
MDKLHKGWFTEFSPDDLEKMSNPDAPEDSSSKLLKSDGQEMGGAWPGQAFSLQVKKVLFHEKSKYQDVLVFESTTYGNVLVLDGIVQATERDEFSYQEMLAHLPLFAHQNPKKVLIIGGGDGGILREVLKHDTVEKVTMCEIDEMVIDVAKKFLPGMSCGFSHEKLDLYCGDGFEFLKNHKNEFDVIITDSSDPVGPAESLFGQSYYELLRDALKEDGILSSQGESVWLHLPLIAHLVAFNRKIFPTVNYAQSIVSTYPSGSMGYLICAKSDTRDVTTPARVLSDEQVKNMNLRFYNSEVHKAAFVLPQFVRNALEKKKE

SEQ ID NO: 155049 - DNA, 1017 bp, Picea sitchensis
  CDS (1)..(1017)
atggccgagaacaataacaatagtaacagcaacaatggctgcgatctacccataaagcgggtcaggcctcaagaagaagaagaggacgccatggatggagtggatggaggctatccgtccgttattcctggatggtttgcggaaataagtcccatgtggcctggagaggcccactccttaaaagttgagaaggttttgttccaaggcaagtccaaatatcaagatgtaatggtatttcagtcattaacttatggcaaggttctggtgctggatggtgttattcagttgactgaaagagatgaatgtgcttaccaagagatgataacacatcttccactttgctctgttccaaatccaagaaaggtattggtcattggaggaggtgatggtggggttcttcgcgaggtttctcgacatatgtcagttgagcagattgatatttgtgaaattgatggaatggtcatagatgtatccaagcaatatttccctgaaattgctgtgggctttgacgatcctcgtgtgacggttaatgttggtgatggagttgcattcttaagggaatctccagaaggcgtctatgatgttgttattgtagattcttcagatccaataggtcctgcagaggagctatttaaaaagccattttttgaattggtggcaagagctttgcgaccaggaggtgtaatgtgtacccaagcagaaagtatttggttgcacatgcccatcattgaagatattgtttcagcttgccgccaaactttcaaaggttcggttaattatgcatggacaactgttcccacatatccaagtggggtaattggttttatgctgtgttcaactgaagggccagctgtagacttccaacatcctattaatcctatcgaaaagcaggaatccaatgttgagttacagcgtcccttaaagttctataattcagagatgcatacagcatcattttgtttgccagcatttgctagaagggcgataggttccaatgttcaaccaccattatcttaa

SEQ ID NO: 155050 - protein, 338 aa, Picea sitchensis
MAENNNNSNSNNGCDLPIKRVRPQEEEEDAMDGVDGGYPSVIPGWFAEISPMWPGEAHSLKVEKVLFQGKSKYQDVMVFQSLTYGKVLVLDGVIQLTERDECAYQEMITHLPLCSVPNPRKVLVIGGGDGGVLREVSRHMSVEQIDICEIDGMVIDVSKQYFPEIAVGFDDPRVTVNVGDGVAFLRESPEGVYDVVIVDSSDPIGPAEELFKKPFFELVARALRPGGVMCTQAESIWLHMPIIEDIVSACRQTFKGSVNYAWTTVPTYPSGVIGFMLCSTEGPAVDFQHPINPIEKQESNVELQRPLKFYNSEMHTASFCLPAFARRAIGSNVQPPLS

SEQ ID NO: 155051 - DNA, 1167 bp, Nicotiana benthamiana
  CDS (1)..(1167)
atggaagtcatatctaccaacaaaaatggctctaatatcttcaagaatggtgccattcccatgaacggctacaagaatggcacttccaaacaccaaaacggccaccagaatggcacttccgaacatcggactggccaccagaatggaatttccgaacaccaaaacgaccaccagaatggcacttccgaacatcaaaacgaccatcataatgggagatccgaacaacagaacgggacaatcagccatgacaatggcaacgagctacagctactgggaagctccaactctattaagcctggttggttttcagagtttagcgcattatggccaggtgaagcattctcacttaagattgagaagttactattcaaggggaaatctcactaccaagatgtcatgctctttgagtcagcaacatatgggaaggttctgactttggatggagcaattcaacacacagagaatggtggatttccctacacagaaatgattgttcatctcccactcagttccatcccaaacccaaaaaaagttttgatcatcggcggaggaattggttttacattattcgaaatgcttcgctatccttcaatcgaaaaaattgacattgttgagatcgatgatgtggtagttgatgtgtcgagaaaattttttccttatctcgcagctaattttaacgatcctcgtgtaaccctcgtcctcggagatggggctgcatttgtaaaggctgcgcaagcaggatactatgatgctattatagtagactcttctgatcccattggtccagcaaaagacttgtttgagaggccattctttgaggcggtagcgaaagccctaagaccaggaggagttgtatgcacacaggctgaaagcatttggcttcatatgcatattattaagcaaatcattgctaattgtcgtcaagtctttaagggctctgtcaactacgcttggactactgttccaacttatccaaccggtgtgatcggttatatgctttgctctactgaaggaccacaagttgacttcaagaatccagtaaatccaattgacaaagagacaactcaagtcaaatccaaattagcacctctcaagttctacaactctgatattcacaaagcagcattcattttgccatctttcgccagaagtatgatcgagtcttaa

SEQ ID NO: 155052 - protein, 388 aa, Nicotiana benthamiana
MEVISTNKNGSNIFKNGAIPMNGYKNGTSKHQNGHQNGTSEHRTGHQNGISEHQNDHQNGTSEHQNDHHNGRSEQQNGTISHDNGNELQLLGSSNSIKPGWFSEFSALWPGEAFSLKIEKLLFKGKSHYQDVMLFESATYGKVLTLDGAIQHTENGGFPYTEMIVHLPLSSIPNPKKVLIIGGGIGFTLFEMLRYPSIEKIDIVEIDDVVVDVSRKFFPYLAANFNDPRVTLVLGDGAAFVKAAQAGYYDAIIVDSSDPIGPAKDLFERPFFEAVAKALRPGGVVCTQAESIWLHMHIIKQIIANCRQVFKGSVNYAWTTVPTYPTGVIGYMLCSTEGPQVDFKNPVNPIDKETTQVKSKLAPLKFYNSDIHKAAFILPSFARSMIES

SEQ ID NO: 155053 - DNA, 1023 bp, Solanum dulcamara
  CDS (1)..(1023)
atggaagtcatatctaatcacacaaatggctccgtcatcactatcaacggccaccatcacactaatggcaagtccgatcaccggaatggcggtgttacagctcatgacaatggcaataagctatcattggggagctacaactctattaagcccggttggttttcagaatttagcgcgttatggccaggtgaagcattctcagtaaaaattgagaagttactatttcaagggaagtctgattaccaagatgtcatgctctttgagtcagcaacttatggtaaagttcttacattggatggagcaattcaacacacagaaaatggtggattttcatatactgaaatgattgttcatctaccacttggttccatcccaactccaaaaaaggtgttgatcattggtggaggaattggttttacattatttgaagtactacgttattctaccatcgaaaaaatagacatcgttgaaattgatgacgtggtggtcgatgtgtctagaaaatttttcccctacctcgcagctaattttaatgatcctcgtgtaactctggttctcgacgatggagctgcatttgtaaaggcagcacaagcagggtattatgatgctattatagtggactcttctgatcctattggtccagcaaaagatttgtttgaaaggccattttttgaagcagtagccaaagctcttagaccaggaggagttgtatgtacccaagcagaaagcatttggcttcatatgcatattattaaacaaatcattgctaattgtcgtcaagttttcaagggttctgtcaactacgcttggactactgttccaacttatccaactggtgtaattggttacatgctttgctctactgaggggccagaagttgacttcaagaatccaattaatccaattgacaaagattcaactcatgtcaagtcaaaattaggaccactcaagttctacaactctgatattcataaagcagcttttattttgccatcttttgccagaagtttgattgagtcttaa

SEQ ID NO: 155054 - protein, 340 aa, Solanum dulcamara
MEVISNHTNGSVITINGHHHTNGKSDHRNGGVTAHDNGNKLSLGSYNSIKPGWFSEFSALWPGEAFSVKIEKLLFQGKSDYQDVMLFESATYGKVLTLDGAIQHTENGGFSYTEMIVHLPLGSIPTPKKVLIIGGGIGFTLFEVLRYSTIEKIDIVEIDDVVVDVSRKFFPYLAANFNDPRVTLVLDDGAAFVKAAQAGYYDAIIVDSSDPIGPAKDLFERPFFEAVAKALRPGGVVCTQAESIWLHMHIIKQIIANCRQVFKGSVNYAWTTVPTYPTGVIGYMLCSTEGPEVDFKNPINPIDKDSTHVKSKLGPLKFYNSDIHKAAFILPSFARSLIES

SEQ ID NO: 155055 - DNA, 1194 bp, Oryza sativa subsp. japonica
  CDS (1)..(1194)
atggagggtggaggcgcaagaaatggctcgacgaccggggcggcgcggacaggggggagtgggggtgatgctgctgctggtggtggtggtggctccgccgggaacgggaagccgctgcccccttgctgcgtcaaggccagggcggcggcgcctgaatccgaggccaagtgccacgccaccgtggtgtccggatggttcaccgagccccgctcgcgcggcggtaaaacgagcaaagtgcagtattacaataacccgatgtggccaggagaggcccattcactgaaagttgagaagatcttgtatcaggggaagtcaccataccaagaagttttagtttttgagtcctcaacctatggaaaagttcttgtccttgatggtattgtccagttgactgataaggatgaatgtgcgtaccaggaaatgattactcaccttccgctttgctcaattccatccccaaagaaagttttggttattggaggtggtgatggtggagtccttcgggagatatgtagacatggttctgtggagtcaattgatatatgtgaaattgatcagctagttattgatgtttgtaaagatttcttcccagatttatctgttggattcaaagatcctcgtgttcggcttcatgttggtgatgctgtggagttcttaaggaatgctcctgaagggacatatgatgctattattgtcgattcatcagacccgattgggcctgcccaggaacttgtggagaagccattttttgacacaatcgcaagagctttgaggcctggtggtgttctttgtaatcaggctgagagcatgtggttgcatacgcatcttatccaggacatgctttcgatctgccgtgagacattcaagggttctgtccactatgcctggacgagtgtcccgacatatcccagtggtgtgattgggtttctgctatgtgccaaagaaggtccaccagtcaacttcctgactcctgcaaatccaattgaaaaactagaaggagctatggaagcaggaagggatattagattttataattcagagatgcatagagccgcatttgttctcccaacctttgcaaggagagagctagaggcgtattgtactaccgttgaaagggaacaacaagaagaaacaacggccgagcctctgaagatgaacattatgcagaacagtgaaattcttactgcttcctag

SEQ ID NO: 155056 - protein, 397 aa, Oryza sativa subsp. japonica
MEGGGARNGSTTGAARTGGSGGDAAAGGGGGSAGNGKPLPPCCVKARAAAPESEAKCHATVVSGWFTEPRSRGGKTSKVQYYNNPMWPGEAHSLKVEKILYQGKSPYQEVLVFESSTYGKVLVLDGIVQLTDKDECAYQEMITHLPLCSIPSPKKVLVIGGGDGGVLREICRHGSVESIDICEIDQLVIDVCKDFFPDLSVGFKDPRVRLHVGDAVEFLRNAPEGTYDAIIVDSSDPIGPAQELVEKPFFDTIARALRPGGVLCNQAESMWLHTHLIQDMLSICRETFKGSVHYAWTSVPTYPSGVIGFLLCAKEGPPVNFLTPANPIEKLEGAMEAGRDIRFYNSEMHRAAFVLPTFARRELEAYCTTVEREQQEETTAEPLKMNIMQNSEILTAS

SEQ ID NO: 155057 - DNA, 1017 bp, Anisodus acutangulus
  CDS (1)..(1017)
atggaggtcataagcaaccacaacaatggcagcaccaccaaaattatcctgaaaaatggcagcattcgcaatggcaatgttaatggcaactcccactcccatgagaaaattgagaataagcttgtagagtgcactaactctatcaagcctggttggttttctgagtttagcgcactctggccaggtgaagcattttcacttaaaattgaaaagttactatttcaaggaaagtctgattatcaagatgtcatgctctttgagtcagcaacttatgggaaggtgttaacattggatggggcaattcaacatacagagaatggtggatttccatacactgaggtgattgttcatctcccacttggttccattccatcccctaagaaggttttaatcatcggtggagggattggtttcacattgtttgaggtctctcgttacccaactatcgaaacaatagatatagttgagatcgatgacgtggttgtagatgtatctagaaagtatttcccgtacctagcagcaggattcgatgatcccagagtaacccttattattggcgatggagctgcattcgtgaaagctgctcaacctggatactatgatgccattattgtggactcttctgatcctattggtccagcaaaagacttgtttgaaaggccattcttcgaggcagtggcgaaagcgctaaggccaggaggagtagtatgtacacaagcagagagcatttggcttcacatgcatcttattaagcaaattattgctaattgtcgccaagtgtttaagggttctgtcaattatgcatggactacagttcctacttaccctactggtgttatcggttacatgctttgctctacggagggaccagaagttaatttcaagaatccagtgaactctattgacaaagataccagccatgtcaaatccaagggacctttgaagttctacaactctgatattcataaagcagcttttattttgccatctttcgcgagggatttggttgaattttga

SEQ ID NO: 155058 - protein, 338 aa, Anisodus acutangulus
MEVISNHNNGSTTKIILKNGSIRNGNVNGNSHSHEKIENKLVECTNSIKPGWFSEFSALWPGEAFSLKIEKLLFQGKSDYQDVMLFESATYGKVLTLDGAIQHTENGGFPYTEVIVHLPLGSIPSPKKVLIIGGGIGFTLFEVSRYPTIETIDIVEIDDVVVDVSRKYFPYLAAGFDDPRVTLIIGDGAAFVKAAQPGYYDAIIVDSSDPIGPAKDLFERPFFEAVAKALRPGGVVCTQAESIWLHMHLIKQIIANCRQVFKGSVNYAWTTVPTYPTGVIGYMLCSTEGPEVNFKNPVNSIDKDTSHVKSKGPLKFYNSDIHKAAFILPSFARDLVEF

SEQ ID NO: 155059 - DNA, 864 bp, Rhodobacterales bacterium Y4I
  CDS (1)..(864): transl_table=11
atgagcgatgccgcgaagaaggagtgggtcactgagagcctgcacgcgcattacgcccagcgtttgcgcgtcgatgagatgctctatgacagcaacaccgagcaccagcgcctgaaagtgttccagaacggccagttcggccgcatcctgacgctggacgacgtggtgcagaccaccgaaggcgataacttcatctaccatgaaatgctgacccatgtgccgatcctggcgcatggcaacgcaaagcgcgtgctgatcatcggcggcggcgacggcggcatggcccgcgaggcgctgcgccacacgtcggtcgagcatgtcaccatggtggaaatcgacggcggcgtggtggatttctcgaaagagtatctgccgatgctgagcgacggtgcttttgacgatccgcgcctcaatctggtgatcaacgacggtgcggtgttcatgaaagagaacaccgaaaagttcgacgtgatcattgtcgattcgaccgacccgatcggccccggcgaagtgctgttcaccgacaccttctacggccacgccgcgcgctcgctgacggaggacggcatcatcgtaacccagaacggcgtgccgttcatgcagggcgaggagctgaccggcaccttgcgggcgttccaggcgctgtttgcggatgcctcctgctacatggcgaccgtgccgacctatgccggcgggccgatggcctttggctggggcagccgctcgggcaaagcccgcaacgtgagccttgaagatctggaggcgcgttttgctgccgccgggatcgacaccgggtattacaatccggaggttcacaaggccgcgtttgccttgccgaactacgtgaaaaagctgttcccctaa

SEQ ID NO: 155060 - protein, 287 aa, Rhodobacterales bacterium Y4I
MSDAAKKEWVTESLHAHYAQRLRVDEMLYDSNTEHQRLKVFQNGQFGRILTLDDVVQTTEGDNFIYHEMLTHVPILAHGNAKRVLIIGGGDGGMAREALRHTSVEHVTMVEIDGGVVDFSKEYLPMLSDGAFDDPRLNLVINDGAVFMKENTEKFDVIIVDSTDPIGPGEVLFTDTFYGHAARSLTEDGIIVTQNGVPFMQGEELTGTLRAFQALFADASCYMATVPTYAGGPMAFGWGSRSGKARNVSLEDLEARFAAAGIDTGYYNPEVHKAAFALPNYVKKLFP

SEQ ID NO: 155061 - DNA, 882 bp, Penicillium chrysogenum
  strain ATCC 28089 / DSM 1075 / Wisconsin 54-1255
  CDS (1)..(882)
atgagcgagcttacccaccccaccatccaggatggctggttctctgagaagtccggcatgtggcccggtcaggccatgagcctcaaggtcaaccagatcatccaccacgagaagtccaagtaccaggatgtcctcgtcttcgagagcagcgactacggtaccgtcctcgtcctggacaacgttatccagtgcactgagcgcgatgagttctcctaccaggagatgatcacccacctcgccatgaactcccaccccaaccccgagaaggtcctcgtcattggtggcggtgacggcggtgtcctccgtgaggtcgtcaagcacgcctctgtcaaggaggctactctgtgcgacatcgatgaggctgtcatccgtgtttccaagaagtacctgcccggcatggccattggcttccagcaccccaacgcccacacccacgttggtgacggcttcgaattcctcaagaaccgccagaacgagttcgatgttatcatcactgacagctccgaccccgagggtcccgctgagagcctcttccagaagccctacttcgagctgctgaagtctgcccttcgcgagggaggtgtcatcactacccaaggttccgagaaccaatggctccaccttgacatgatcgccgaccttaagaaggcttgcaaggaggtcttccccgtcgccgagtacgcctacaccaccatccccacctacccctccggccagattggcttcatggtctgctccaaggacgctacccgcaacgtccgcgagcccctccgcacctggactgccgaggaggagcagaagctctgccgctactacaaccaggacatccaccgcgccagctttgttctgcccaacttcgctcgccagaagctcggcaactaa

SEQ ID NO: 155062 - protein, 293 aa, Penicillium chrysogenum
  strain ATCC 28089 / DSM 1075 / Wisconsin 54-1255
MSELTHPTIQDGWFSEKSGMWPGQAMSLKVNQIIHHEKSKYQDVLVFESSDYGTVLVLDNVIQCTERDEFSYQEMITHLAMNSHPNPEKVLVIGGGDGGVLREVVKHASVKEATLCDIDEAVIRVSKKYLPGMAIGFQHPNAHTHVGDGFEFLKNRQNEFDVIITDSSDPEGPAESLFQKPYFELLKSALREGGVITTQGSENQWLHLDMIADLKKACKEVFPVAEYAYTTIPTYPSGQIGFMVCSKDATRNVREPLRTWTAEEEQKLCRYYNQDIHRASFVLPNFARQKLGN

SEQ ID NO: 155063 - DNA, 1002 bp, Penicillium marneffei (strain ATCC 18224 / CBS 334.59 / QM 7333)
  CDS (1)..(1002)
atgatacctcgttgtttactgtcttttcgcggtaattcagtcactcgattctcgtgtcaccaattgacccctcttcttcgttcttttccaagaaataagtcaacttttacaacaacaacaatcacaatgtccgaaatcacacaccccaccatcaaggatggctggttctccgagacctccgacatgtggcccggtcaggccatgaccctcaaggtcaaggaagtcctccaccacgagaagtcgcaataccaggatgttcttgtctttgagagcaccgactacggcactgtcctcgttttggacaatgtcattcagtgcactgagcgcgacgaattctcataccaggaaatgatcacccaccttgccatgaactcccaccccaaccccaagaaggtccttgtcatcggtggcggtgacggtggtgtcctccgtgaggtcgtcaagcacgagaccgtcgaggaggctattctctgcgacattgacgaggctgtcatccgcgtctccaagaaatacctccccggcatgagcatcggcttccagcaccccaacgtcaaggtccacgttggtgacggcttcaagttccttgccgactacaagaacgaattcgacgtcatcatcaccgacagctctgaccccgagggaccagcagagtccttgttccagaaaccttactttgagttgttgaatggcgctttgcgcgaaggcggtgttattactacccaagccgaaaaccaatggctccatctctccctcatcaccgacctcaagaagtcctgcaaggaagtcttccccgtcgccgaatacgcctacaccaccatccccacctacccatccggccagatcggtttcatggtctgctgcaaggatgctacacgcaacgtcaaggagcccgtgcgctcttggtctcgcgaggaggaggagaagttgtgccgatactataacgctgatatccaccgagcgagcttcgtgttgcccaactttgcccgcaaggctctcgagtag

SEQ ID NO: 155064 - protein, 333 aa, Penicillium marneffei (strain ATCC 18224 / CBS 334.59 / QM 7333)
MIPRCLLSFRGNSVTRFSCHQLTPLLRSFPRNKSTFTTTTITMSEITHPTIKDGWFSETSDMWPGQAMTLKVKEVLHHEKSQYQDVLVFESTDYGTVLVLDNVIQCTERDEFSYQEMITHLAMNSHPNPKKVLVIGGGDGGVLREVVKHETVEEAILCDIDEAVIRVSKKYLPGMSIGFQHPNVKVHVGDGFKFLADYKNEFDVIITDSSDPEGPAESLFQKPYFELLNGALREGGVITTQAENQWLHLSLITDLKKSCKEVFPVAEYAYTTIPTYPSGQIGFMVCCKDATRNVKEPVRSWSREEEEKLCRYYNADIHRASFVLPNFARKALE

SEQ ID NO: 155065 - DNA, 1164 bp, Zea mays
  CDS (1)..(1164)
atggaggctggaggcgcaggaagtggtttgaatggggcggtgcaggcaaaggggactggggctgatggtggctctgccaaaccgctgccgccttgctgcgtcaaggccagagccgccgcgccggagtccgaggccaggtgccacgccaccgtcgtttcaggatggttcactgaaccgcgatcgcgctgtggcaaagccagcaaagttcagtattacaataacccgatgtggccaggagaggccaattctttgaaagtggagaagatcttgtaccaggggaaatcgccataccaagaagtcttagtcttcgagtcgtcgacctatggtaaagtccttgtgcttgatggtattgttcagttgactgacaaggatgaatgtgcataccaggaaatgattactcacctgccactttgctcaattccatcccctaaaaaagttttggttattggtggtggtgatggaggtgtacttcgagaggtatccaggcatagttcagtggagtccattgacatatgtgagattgatcagctggttattgatgtgtgcaaagatttcttcccacacttgtctgttggatttcaagatcctcgtgttcaacttcatgtcggcgatgctgtggagttcttgagaaatgctcctgaggggacatatgatgctatcattgttgattcgtcagatccaatagggcctgctcaggaacttgtagagaagcctttttttgatacgattgctagagctttgaggcctggaggcgttctttgtaatcaagctgagagtatgtggttacatacacatttggttcaggatatgctttcaatttgccgtgaaactttcaagggttctgtacgctatgcatggacaagtgtcccaacatacccgagtggggtgattggatttttactatgtgccaaagaaggtccattggtgaactttctgactcctataaatccaattgaaaagctggaaggagctacaaaagctggaagggagatcagattttataactcagagatgcatagggcagcatttgttctcccgacctttgcaaggagagagctagaagcatattgcgtttccactgaaacagagcaagcggaggaaacaccggcggcaccactgaagttgactcttgcatccaggagtgaaattttcgctacatcctag

SEQ ID NO: 155066 - protein, 387 aa, Zea mays
MEAGGAGSGLNGAVQAKGTGADGGSAKPLPPCCVKARAAAPESEARCHATVVSGWFTEPRSRCGKASKVQYYNNPMWPGEANSLKVEKILYQGKSPYQEVLVFESSTYGKVLVLDGIVQLTDKDECAYQEMITHLPLCSIPSPKKVLVIGGGDGGVLREVSRHSSVESIDICEIDQLVIDVCKDFFPHLSVGFQDPRVQLHVGDAVEFLRNAPEGTYDAIIVDSSDPIGPAQELVEKPFFDTIARALRPGGVLCNQAESMWLHTHLVQDMLSICRETFKGSVRYAWTSVPTYPSGVIGFLLCAKEGPLVNFLTPINPIEKLEGATKAGREIRFYNSEMHRAAFVLPTFARRELEAYCVSTETEQAEETPAAPLKLTLASRSEIFATS

SEQ ID NO: 155067 - DNA, 1170 bp, Zea mays
  CDS (1)..(1170)
atggaggttggagacgcaagaaacggttctgcagcagcggcactgacaaagggaagtgcggatgatgccgcccgcaaaccgctccctccttgctgcgtcaaggccaaggcgcgtgtgcctgaaaccgaggccaactgccatgatactgtggtttcagggtggttcacggaacccagatcgcgttttggtaaaacaagcaaagtgcagtacttcaataacccgatgtggcctggagaggctcattcattgaaagtggagaagatcttgtttcaagggaaatcgccttaccaagaaattttagtttttgagtcttcaacctatggaaatgttcttgtgcttgatggtatagttcagttgactgacaaggatgaatgcgcataccaggaaatggttactcaccttccactgtgctcaattcctgcaccgaagaatgttttggttgttggaggtggtgatggtggtgtactgcgcgaaatagccagacatgattcagtggaaactattgatatatgtgagattgatcaactagttattgatgtttgcaaagaattctttccaaacttatccattggattcaaagatcctcgtgtccgacttcatgttggtgatgctgttgatttcctgaggaattctcccgaaggaaaatatgatgctattattgtagattcatcagatccaattgggccagcacaggcactcgtggagaaactgtttattcagacaattgctagagctttgaagcctggtggtgttctttgtaatcttgctgagagcatgtggctgcacacacatctaatccaggatatgcttgctatctgtcgacagacattcaaaggtgctgtgcactatgcctggacaagtgttccaacatatcccagtggtgtcattggatttttgctatgtgcaaaagaaggtcgtgcagtgaacttcttaactcctgtgaatccaattgagaaaatagaaggaacaacaaaagctggaagggaactcagattttacaattccgagatccatagggctgcttttgttctgccaacatttgtaagaagagaactggaagcatataccactcctagtacctctgctgaaaacgagaaaccgaaagaatcggtgtcagaaccgcagaagataaagatattgtcaaacaacgccattcttacagcttcctag

SEQ ID NO: 155068 - protein, 389 aa, Zea mays
MEVGDARNGSAAAALTKGSADDAARKPLPPCCVKAKARVPETEANCHDTVVSGWFTEPRSRFGKTSKVQYFNNPMWPGEAHSLKVEKILFQGKSPYQEILVFESSTYGNVLVLDGIVQLTDKDECAYQEMVTHLPLCSIPAPKNVLVVGGGDGGVLREIARHDSVETIDICEIDQLVIDVCKEFFPNLSIGFKDPRVRLHVGDAVDFLRNSPEGKYDAIIVDSSDPIGPAQALVEKLFIQTIARALKPGGVLCNLAESMWLHTHLIQDMLAICRQTFKGAVHYAWTSVPTYPSGVIGFLLCAKEGRAVNFLTPVNPIEKIEGTTKAGRELRFYNSEIHRAAFVLPTFVRRELEAYTTPSTSAENEKPKESVSEPQKIKILSNNAILTAS

SEQ ID NO: 155069 - DNA, 861 bp, Photorhabdus asymbiotica subsp. asymbiotica ATCC 43949
  CDS (1)..(861): transl_table=11
atgtcacaaaaagaaatttggcacgaaaccctgcatgccaattttggtcagtatttttcggtcgataaagtgctctatcatgataaaaccgaccatcaagatctgattattttcgagaatgcagagttaggccgcattatggcgttggatggtacggtacaaacgactgaacgtgatgaatttatctaccacgaaatgatgacccacgttcctctattctcccatggtagcgccaagcgagtgttgattatcggtggcggtgatggcggtatgttacgtgaagtctgtcgccatcaataccttgacaatatcactatggttgagattgatgctggcgtcgttgaattttgccgccaatatctgcctaagcataatgccggtgcttataacgatcctcgcttccagctaatcatcgatgatggggttaatttcgttaataccaccgatcagaaatttgatgtcattatctctgattgcactgatccgatcggacctggcgaagggttatttacatctgaattctatcaaggttgccaacgctgcctgaatgaagggggtatcttcgttgcacagaatggagtctgtttcctgcaacaggatgaagcagtcaccagtcataaaaaactaaaccgctatttcattgacagcagtttctatcaagcggccattccaacctattatggcggaattatgacctttgcatgggcaagtcaaaacccgacattacgtcatgtagatctagtaacgctacaacagcgcttcaaccgcgcaggcttcacctgccgctattacaacccagccgttcacgcaggtagctttgccttaccgcaatatttgctggatgcactatctataaactaa

SEQ ID NO: 155070 - protein, 286 aa, Photorhabdus asymbiotica subsp. asymbiotica ATCC 43949
MSQKEIWHETLHANFGQYFSVDKVLYHDKTDHQDLIIFENAELGRIMALDGTVQTTERDEFIYHEMMTHVPLFSHGSAKRVLIIGGGDGGMLREVCRHQYLDNITMVEIDAGVVEFCRQYLPKHNAGAYNDPRFQLIIDDGVNFVNTTDQKFDVIISDCTDPIGPGEGLFTSEFYQGCQRCLNEGGIFVAQNGVCFLQQDEAVTSHKKLNRYFIDSSFYQAAIPTYYGGIMTFAWASQNPTLRHVDLVTLQQRFNRAGFTCRYYNPAVHAGSFALPQYLLDALSIN

SEQ ID NO: 155071 - DNA, 864 bp, Ruegeria sp. R11
  CDS (1)..(864): transl_table=11
atgaccacctctgacaagcaggagtgggtcaccgaaggtctgcacgcgcattacgcccagcgtctgcgcgtggacgagatgctgtatgacagcaacaccgaacaccagcgcctgaaggtgtttcagaacggtcagttcggccgcattctgacgctggatgacgtggttcagaccaccgagggtgacaactttatctaccacgagatgctgacccatgtgccgatcctggcccatggcaatgcaaaacgtgtgctgatcatcggtggcggcgacggcggcatggcccgcgaggcgctgcgccacacgtcggtcgaacatgtcaccatggtcgagatcgacgcaggcgtggtggatttctccaaagaatatctgccgatgctgagcgacggcgcctttgacgatccgcgcctcaatctggtgatcaatgacggtgcgctcttcatgaaagagaacaccgagaaatttgacgtgatcatcgtcgattcgaccgaccccatcggccccggtgaagtgctgttcacagataccttctatggccacgcagcgcggtcgctcactgaggacggcatcatcgtcacccagaacggcgttccctttatgcagggcgacgaactgaccggcacactgcgcgcctttcaggcgttgtttgcagatgcgtcctgctatcttgcttcggttccgacctatgccggcggcccgatggcctttggctggggcagccactccgacaaggcccgtctggtgagccttgaggatctggaggcccgctttgctgcggccggctttgacaccgggtattacaacccggaggttcacaaggctgcgtttgccttgccgaactacgtgaaaaagctgttcccgtaa

SEQ ID NO: 155072 - protein, 287 aa, Ruegeria sp. R11
MTTSDKQEWVTEGLHAHYAQRLRVDEMLYDSNTEHQRLKVFQNGQFGRILTLDDVVQTTEGDNFIYHEMLTHVPILAHGNAKRVLIIGGGDGGMAREALRHTSVEHVTMVEIDAGVVDFSKEYLPMLSDGAFDDPRLNLVINDGALFMKENTEKFDVIIVDSTDPIGPGEVLFTDTFYGHAARSLTEDGIIVTQNGVPFMQGDELTGTLRAFQALFADASCYLASVPTYAGGPMAFGWGSHSDKARLVSLEDLEARFAAAGFDTGYYNPEVHKAAFALPNYVKKLFP

SEQ ID NO: 155073 - DNA, 1194 bp, Oryza sativa subsp. indica
  CDS (1)..(1194)
atggagggtggaggcgcaagaaatggctcgacgaccggggcggcgcggacaggggggagtgggggtgatgctgctggtggtggtggtggtggctccgccgggaacgggaagccgctgcccccttgctgcgtcaaggccagggcggcggcgcctgaatccgaggccaagtgccacgccaccgtggtgtccggatggttcaccgagccccgctcgcgcggcggtaaaacgagcaaagtgcagtattacaataacccgatgtggccaggagaggcccattcactgaaagttgagaagatcttgtatcaggggaagtcaccataccaagaagttttagtttttgagtcctcaacctatggaaaagttcttgtccttgatggtattgtccagttgactgataaggatgaatgtgcgtaccaggaaatgattactcaccttccgctttgctcaattccatccccaaagaaagttttggttattggaggtggtgatggtggagtccttcgggagatatgtagacatggttctgtggagtcaattgatatatgtgaaattgatcagctagttattgatgtttgtaaagatttcttcccagatttatctgttggattcaaagatcctcgtgttcggcttcatgttggtgatgctgtggagttcttaaggaatgctcctgaagggacatatgatgctattattgtcgattcatcagacccgattgggcctgcccaggaacttgtggagaagccattttttgacacaatcgcaagagctttgaggcctggtggtgttctttgtaatcaggctgagagcatgtggttgcatacgcatcttatccaggacatgctttcgatctgccgtgagacattcaagggttctgtccactatgcctggacgagtgtcccgacatatcccagtggtgtgattgggtttctgctatgtgccaaagaaggtccaccagtcaacttcctgactcctgcaaatccaattgaaaaactagaaggagctatggaagcaggaagggatattagattttataattcagagatgcatagagccgcatttgttctcccaacctttgcaaggagagagctagaggcgtattgtactaccgttgaaagggaacaacaagaagaaacaacggccgagcctctgaagatgaacattatgccgaacagtgaaattcttactgcttcctag

SEQ ID NO: 155074 - protein, 397 aa, Oryza sativa subsp. indica
MEGGGARNGSTTGAARTGGSGGDAAGGGGGGSAGNGKPLPPCCVKARAAAPESEAKCHATVVSGWFTEPRSRGGKTSKVQYYNNPMWPGEAHSLKVEKILYQGKSPYQEVLVFESSTYGKVLVLDGIVQLTDKDECAYQEMITHLPLCSIPSPKKVLVIGGGDGGVLREICRHGSVESIDICEIDQLVIDVCKDFFPDLSVGFKDPRVRLHVGDAVEFLRNAPEGTYDAIIVDSSDPIGPAQELVEKPFFDTIARALRPGGVLCNQAESMWLHTHLIQDMLSICRETFKGSVHYAWTSVPTYPSGVIGFLLCAKEGPPVNFLTPANPIEKLEGAMEAGRDIRFYNSEMHRAAFVLPTFARRELEAYCTTVEREQQEETTAEPLKMNIMPNSEILTAS

SEQ ID NO: 155075 - DNA, 876 bp, Talaromyces stipitatus
  strain ATCC 10500 / CBS 375.48 / QM 6759 / NRRL 1006
  CDS (1)..(876)
atgagcgaaatcacgcaccctaccatcaaggatggttggttctccgaggcctctgacatgtggcccggtcaagccatgaccctcaaggtcaaggaagtcctccaccacgagaaatcgcaatatcaggacgttctcgtctttgagagtaccgatcacggcactgtccttgttttggacaatgtcattcaatgcactgagcgcgatgaattttcataccaggaaatgatcacccacctcgctatgaactcccaccccaatcccaagaaggtcctcgtcatcggtggtggtgatggtggtgttctccgtgaagtcgtcaagcacgagagcgtcgaggaggctattctctgcgatattgacgaggccgtcatccgcgtctccaagaaatacctccccggcatgagcatcggcttccaacaccccaacgtcaaagtccacatcggcgacggcttcaagttcctagcagactacaagaatgaattcgacgtcatcatcaccgacagctctgacccggagggacctgcagagtcgttgttccagaaaccatactttgaattgttgaatggtgctttgcgtgaaggcggtgttattactactcaagccgaaaaccaatggctccacctccaactcatcaccgacctcaaaaaatcctgcaaagaagtcttccccgtcgccgaatacgcctacaccaccatcccaacctacccatccggccaaatcggtttcatggtctgctgcaaggacgctactcgcaacgtcaaggaaccgctccgtacctggtctcgtgaggaagaggagaagttgtgccgatactataatgcggatattcatcgggcgagctttgtgttgcctaatttcgcgcgcaaggctcttgagtaa

SEQ ID NO: 155076 - protein, 291 aa, Talaromyces stipitatus
  strain ATCC 10500 / CBS 375.48 / QM 6759 / NRRL 1006
MSEITHPTIKDGWFSEASDMWPGQAMTLKVKEVLHHEKSQYQDVLVFESTDHGTVLVLDNVIQCTERDEFSYQEMITHLAMNSHPNPKKVLVIGGGDGGVLREVVKHESVEEAILCDIDEAVIRVSKKYLPGMSIGFQHPNVKVHIGDGFKFLADYKNEFDVIITDSSDPEGPAESLFQKPYFELLNGALREGGVITTQAENQWLHLQLITDLKKSCKEVFPVAEYAYTTIPTYPSGQIGFMVCCKDATRNVKEPLRTWSREEEEKLCRYYNADIHRASFVLPNFARKALE

SEQ ID NO: 155077 - DNA, 1080 bp, Arabidopsis thaliana
  CDS (1)..(1080)
atggagggagacgtcggaataggtttggtatgccagaatactatggatgggaaggcgagtaatggaaatggtttagagaagactgtaccttcttgttgccttaaggctatggcatgtgaacctgaggatgatgctaagtgtcactccactgttgtttctgggtggttttcggaacctcaccctcgctctgggaaaaaaggcggcaaagcagtctatttcaacaaccctatgtggccaggagaagcacactcactgaaagttgagaaagttctgttcaaagacaagtcggattttcaggaagtcctagtgttcgagtcagccacgtacggaaaggtgcttgttctagatggtatcgtacagctgaccgaaaaagatgaatgtgcatatcaggagatgatagcccatctgcctttatgctctatatcttcccctaaaaatgttcttgttgttggtggaggtgatggtggtgttcttcgagagatttctcgccatagttctgttgaggttattgatatctgtgagatagacaagatggttatagatgtgtctaagaagttcttccccgagttagcggttgggtttgacgatcctcgtgttcaacttcacattggtgatgctgctgagttcctccgtaaatcccctgaagggaagtatgatgccatcattgttgattcttcagatcccgtaggtcctgctcttgcgcttgttgagaagcctttcttcgagacactggctagagcgttgaagcctgggggagttctttgtaacatggcagaaagtatgtggctccatactcatcttattgaagatatgatctccatttgccgtcaaacattcaaaagtgttcactatgcgtggagcagcgtccccacatatccaagcggcgtgattggtttcgtcttgtgctctactgaaggaccagctgttgacttcaagaacccaatcaaccctattgagaaactagacggtgcgatgacccataaaagagaattgaagttctataactctgatatgcacagagccgcatttgctttgcccacattcctgcggagagaagtagcttcacttctggcttcttga

SEQ ID NO: 155078 - protein, 359 aa, Arabidopsis thaliana
MEGDVGIGLVCQNTMDGKASNGNGLEKTVPSCCLKAMACEPEDDAKCHSTVVSGWFSEPHPRSGKKGGKAVYFNNPMWPGEAHSLKVEKVLFKDKSDFQEVLVFESATYGKVLVLDGIVQLTEKDECAYQEMIAHLPLCSISSPKNVLVVGGGDGGVLREISRHSSVEVIDICEIDKMVIDVSKKFFPELAVGFDDPRVQLHIGDAAEFLRKSPEGKYDAIIVDSSDPVGPALALVEKPFFETLARALKPGGVLCNMAESMWLHTHLIEDMISICRQTFKSVHYAWSSVPTYPSGVIGFVLCSTEGPAVDFKNPINPIEKLDGAMTHKRELKFYNSDMHRAAFALPTFLRREVASLLAS

SEQ ID NO: 155079 - DNA, 1041 bp, Ricinus communis
  CDS (1)..(1041)
atggctgaagaagaaactgttgctgttgtctctaataatgatttgcctgttaaaaggccaagagaagatgaattagaaattgaaaacggtgtctcttctgctactactgctgtggcgatggacacagagggtaacactagcaatagtgattatatatcctctgttattcctggttggttctctgagattagcccaatgtggcctggggaggcgcattccttgaaagtggagaagatcttgtttcaagggaagtctgactaccagaatgtcatggtctttcagtcatcaacatatgggaaagttcttgttttggatggggtgattcagcttacagagagggatgaatgtgcatatcaggaaatgataacccaccttccactttgctcaataccaaatccgcagaaggttttggtcattggtggaggagatggcggggtcctgcgggaagtggctcggcactcttccattgatcatatcgacatatgtgaaatagacaagatggttattgatgtttctaaagaattttttcctgatatagcagttgggtatgaggacccccgtgtgactctccatgttggtgatggtgttgcatttttgaagaactctcctgctggaacttatgatgcaattatagtagattcgtctgatccgataggtcctgcacaagagctttttgagaaacccttttttgagtcagtagcaagggctcttcgtcctggtggagttgtgtgtactcaggcagaaagcatatggcttcatatgcacatcattgaggatatcgtagcaaactgccgtcagatattcaaaggctctgtcaattatgcttggactactgttccgacttatccaagtggggtaattggtttcatgctttgctctactgagggaccttctgttgatttcaagcatccagtgaatcctatagatgctaaggatagcaaatcaacaagacccttgaaattttataattcagagattcattctgctgctttctgtttgccatcttttgcaaagaaggtgattgatgcgaaagcaaaatga

SEQ ID NO: 155080 - protein, 346 aa, Ricinus communis
MAEEETVAVVSNNDLPVKRPREDELEIENGVSSATTAVAMDTEGNTSNSDYISSVIPGWFSEISPMWPGEAHSLKVEKILFQGKSDYQNVMVFQSSTYGKVLVLDGVIQLTERDECAYQEMITHLPLCSIPNPQKVLVIGGGDGGVLREVARHSSIDHIDICEIDKMVIDVSKEFFPDIAVGYEDPRVTLHVGDGVAFLKNSPAGTYDAIIVDSSDPIGPAQELFEKPFFESVARALRPGGVVCTQAESIWLHMHIIEDIVANCRQIFKGSVNYAWTTVPTYPSGVIGFMLCSTEGPSVDFKHPVNPIDAKDSKSTRPLKFYNSEIHSAAFCLPSFAKKVIDAKAK

SEQ ID NO: 155081 - DNA, 894 bp, Candida dubliniensis
  strain CD36 / CBS 7987 / NCPF 3949 / NRRL Y-17841
  CDS (1)..(894): transl_table=12
atggctcaagaattaacccatcctgcaatcaaagatggatggtttgctgaaatctccgataccatgtggcctggtcaagccatgtctttaaaagttgaaaaagtacttcacgttgaaaaatctaaataccaagatgttttagttttcaaatcaactacctatggtaatgttttagttttggataactgtattcaggtcactgaacgtgatgaattctcttatcaagaaatgattactcatttggctttaaactctcacccaaatcccaagaaagctcttgtcattggtggtggagatggtggtgttttaagagaaatcttgaagcatgaatcaattgaagaagcttggctttgtgacattgatgaaactgtcattgaagtttccaaaaaatacttgccaaacatggccaaatcttatgaggatccaagaactagagttcatattggtgatggtttcaaatttttggaagaatacaaaaatcaatttgatgttattatcactgattcttctgatccagaaggtccagcagaatcacttttccaaaaaccatactttcaattattgaaagatgctttgactgaaaaaggtgttattactacccaagcagaaaacatgtggattcatatggatatcatttctaaattgaagaaagactgtaatgaaatcttcccagttgctgaatacgcttacactatgatcccaacttacccatcaggttcaattggttttatggtttgttccaaagatccaaatgctgatgtttctaaaccaatcagatttgattggaccgatgaatttgtggctaaaaacttgaaatactacaacaaaaagattcatgaagctgcatttgttttgccaacttgggccgatcaagttttgaacaaaaaggactaa

SEQ ID NO: 155082 - protein, 297 aa, Candida dubliniensis
  strain CD36 / CBS 7987 / NCPF 3949 / NRRL Y-17841
MAQELTHPAIKDGWFAEISDTMWPGQAMSLKVEKVLHVEKSKYQDVLVFKSTTYGNVLVLDNCIQVTERDEFSYQEMITHLALNSHPNPKKALVIGGGDGGVLREILKHESIEEAWLCDIDETVIEVSKKYLPNMAKSYEDPRTRVHIGDGFKFLEEYKNQFDVIITDSSDPEGPAESLFQKPYFQLLKDALTEKGVITTQAENMWIHMDIISKLKKDCNEIFPVAEYAYTMIPTYPSGSIGFMVCSKDPNADVSKPIRFDWTDEFVAKNLKYYNKKIHEAAFVLPTWADQVLNKKD

SEQ ID NO: 155083 - DNA, 957 bp, Zea mays
  CDS (1)..(957)
atggaagccgaggcggcggccaagaggacgcgggacagcggggaggacgccgccgcggcggggatctccgccgtcatcccgggatggttctccgagatcagccccatgtggcccggtgaggcgcactctttgaaggtggacaaggtgctgttccaagggaagtcagactaccaaagcgttatggtctttcagtcctctacgtacgggaaggtgctcgtcctcgatggagttattcaggtgacggagagggatgagtgtgcgtaccaagagatgatcactcacctgcccctttgctccatcaaagaccccaagaaggtgttggttattggagggggtgacggtggtgttctgcgtgaggtttcacggcattcctctgtggaacaaattgacatctgtgaaattgacaagatggtggtagatgtctccaaacaatttttccctcatttagctgttggatttgaagaccctcgtgtgtcattacacattggagatggggttgcctttttgaaaaatgctccagaaggtacttatgacgcagtaattgtggactcatctgatccgataggtcctgctcaagagctttttgagaagcctttcttccagttggtggccagagctttgcgtccaggtggagttgtatgcacccaagcagagagcatatggctacatatgcacattattgaagatattgttgtcaattgtcgacaagttttcaaaggctcggttaactatgcttggacaacggtgcctacataccctagcggagttattgggttcatgctttgctccaccgaagggcctgctgttgatttccagcaccctgttttcaacatcgaggaggatgagcatcctatgaaatcaaagggaccccttaagttctacaactcggagatccacacggcatcattctgtttgccttcttttgcaaagagggtaatcgagtcaaaagcgaactag

SEQ ID NO: 155084 - protein, 318 aa, Zea mays
MEAEAAAKRTRDSGEDAAAAGISAVIPGWFSEISPMWPGEAHSLKVDKVLFQGKSDYQSVMVFQSSTYGKVLVLDGVIQVTERDECAYQEMITHLPLCSIKDPKKVLVIGGGDGGVLREVSRHSSVEQIDICEIDKMVVDVSKQFFPHLAVGFEDPRVSLHIGDGVAFLKNAPEGTYDAVIVDSSDPIGPAQELFEKPFFQLVARALRPGGVVCTQAESIWLHMHIIEDIVVNCRQVFKGSVNYAWTTVPTYPSGVIGFMLCSTEGPAVDFQHPVFNIEEDEHPMKSKGPLKFYNSEIHTASFCLPSFAKRVIESKAN

SEQ ID NO: 155085 - DNA, 1125 bp, Zea mays
  CDS (1)..(1125)
atggaggttggagacgcaagaaacggttctgcagcagcggcactgacaaagggaggtgcggatgatgccgcccgcaaaccgctccctccttgctgcgtcaaggccaaggcgcgggtgcctgaaaccgaggccaactgccatgatactgtggtttcagggtggttcacggaacccagatcgcgttttggagaggcccattcattgaaagtggagaagatcttgtttcaagggaaatcgccttaccaagaaattttagtttttgagtcttcaacctatggaaatgttcttgtgcttgatggtatagttcagttgactgacaaggatgaatgcgcataccaggaaatggttactcaccttccactgtgctcaattcctgcaccgaagaatgttttggttgttggaggtggtgatggtggtgtactgcgcgaaatagccagacatgattcagtggaaactattgatatatgtgagattgatctactagttattgatgtttccaaagaattctttccaaacctatccattggattcaaagatcctcgtgtccgacttcatgttggtgatgctgttgatttcctgaggaattctcccgaaggaaaatatgatgctattattgtagattcatcagatccaattgggccagcacaggcactcgtggagaaaccgtttattcagacaattgctagagctttgaagcctggtggtgttctttgtaatcttgctgagagcatgtggctgcacacacatctaatccaggatatgcttgctatctgtcgacagacattcaaaggtgctgtgcactatgcctggacaagtgttccaacatatcccagtggtgtcattggatttttgctatgtgcaaaagaaggtcgtgcagtgaacttcttgactcctgcgaatccaattgagaaaatagaaggagcagcaaaagctggaagggaactcagattttacaattccgagatccatagggctgcttttgttctgccaacatttgtaagaagagaactggaagcatataccactcctattagttctgctgaaaacgagaaaccgaaagaatcagtgtcagaaccgcagaagataaagatattgtcaaacaacgccattcttacagcttcctag

SEQ ID NO: 155086 - protein, 374 aa, Zea mays
MEVGDARNGSAAAALTKGGADDAARKPLPPCCVKAKARVPETEANCHDTVVSGWFTEPRSRFGEAHSLKVEKILFQGKSPYQEILVFESSTYGNVLVLDGIVQLTDKDECAYQEMVTHLPLCSIPAPKNVLVVGGGDGGVLREIARHDSVETIDICEIDLLVIDVSKEFFPNLSIGFKDPRVRLHVGDAVDFLRNSPEGKYDAIIVDSSDPIGPAQALVEKPFIQTIARALKPGGVLCNLAESMWLHTHLIQDMLAICRQTFKGAVHYAWTSVPTYPSGVIGFLLCAKEGRAVNFLTPANPIEKIEGAAKAGRELRFYNSEIHRAAFVLPTFVRRELEAYTTPISSAENEKPKESVSEPQKIKILSNNAILTAS

SEQ ID NO: 155087 - DNA, 1002 bp, Micromonas sp. RCC299
  CDS (1)..(1002)
atggctcacactagcggcatcggcgccgacgtcttcgacaagggcaactggtaccacgaggtcctcgaggatggcctcgccatctcctacagggttgaggaggtgctccacaagggccagtccaagttccagaccgtggaggtggtcaaaaccaagcccttcggccgtctgctcatcaccgacgggctcatgcagagctccgaggatgacgagtacgtctaccaccagtccctcgtccaccccgcgctcgcggggcacccggaacccaagaaggtgttcatcgcgggcggcggagagggcgccacccttcgcgaggtgctgaagcaccccagcgtcgaggagtgcaagatggtcgacatcgacggcgaggttgtcgacatgtgcgccaagcacaccccgttctacaacgcgggcgcgtacgagtccccgcgggccaagctcgtcatcggcgacgccaaagccgggctggaggctgagccagacggctccatcgacgtcataatctgcgatctctccgacccgctcgacggcggaccgtgctaccagctgtacaccacctcgttctacgagatgtgcaagtccaagctcgcgccggggggcatcctcgtgacccagtcggggtgcgccgccgttcgcgactgcaaggcggttttcaccccaatcaacaagacgctcagggaggtgttcccccaggtgtggggctacaccgtgtgcgtgccctccttctgctccgagtggggtttcaacatcgccacgaaggatgcggaccacgtggacctctacaccggcatcaccgcgaacggcgaactcgacaagcgactcgcggcgcggggcctcggcgccctctcctactacgacggcatcacccacacgaggatgttctcgctgaacagaaccgtgagggaggcgtgcgagcgggagactcgcgtgatgacggtggagaacccgctgttcatgtgctccacggacacgcacgcgggcgtgttcgagccggagaagtga

SEQ ID NO: 155088 - protein, 333 aa, Micromonas sp. RCC299
MAHTSGIGADVFDKGNWYHEVLEDGLAISYRVEEVLHKGQSKFQTVEVVKTKPFGRLLITDGLMQSSEDDEYVYHQSLVHPALAGHPEPKKVFIAGGGEGATLREVLKHPSVEECKMVDIDGEVVDMCAKHTPFYNAGAYESPRAKLVIGDAKAGLEAEPDGSIDVIICDLSDPLDGGPCYQLYTTSFYEMCKSKLAPGGILVTQSGCAAVRDCKAVFTPINKTLREVFPQVWGYTVCVPSFCSEWGFNIATKDADHVDLYTGITANGELDKRLAARGLGALSYYDGITHTRMFSLNRTVREACERETRVMTVENPLFMCSTDTHAGVFEPEK

SEQ ID NO: 155089 - DNA, 978 bp, Micromonas sp. RCC299
  CDS (1)..(978)
atgtcgcagcgagagaacatgatcgccgccgagcaaacctccaacgacgcgtgcgtcgacgggaccatgaacggctggttcagcgagatctccgacgagatgtggcccggccaggccatgagcctcaagatgacggaggtgctttacaagggcaaatccgatttccaggacgtcatggtgttccagtcgcagtcctacggtaaggttctcatcctcgacggcgtcatccaggccaccgagcgcgacgagttctcctatcaggagatgatcgcgcacctccccctgtgctctatccacgacccaccgaagaaggtcctggtcgtgggcggcggcgacggcggcgtgctccgagagatcatccgccacccgacggttgagcacctcgacatcgcggagattgacggcatggtcatcgaagtctcgaagaagttcttccccgggatgtcgtgcgggtttgacgatccgcgcgtccacgtcaacgtctgcgacggcatcaagttcgtgggcgacgcccccgagggatcttacgacgcaatcatcgtcgactcgtccgacccggtgggtccggcgtcggtgctcttcgagaagccgttcttcgagaagatttacagggcgctcaagcccgggggcgtgctcaccacgcagggggagtgcatctggctgcacgcggagctcatcaaggacgtgttggagatgtgcaagggcatcttcgtcggcggttcggtgcagtacgggtactgctccataccgacgtaccccagcggtcagatcgggttcgtcatgtgctcaaagcccacggccgaggggaagacggtggacttctcgaagcccgttcggccgccacccgtcgctccggccaacaccaagctcccgccgctcaggtactacaactccgcgattcacgaggctgcgtccgtgcttccggagtttgcgagagccgcggttgagccgtacgtggtcaagggcaccggcccttga

SEQ ID NO: 155090 - protein, 325 aa, Micromonas sp. RCC299
MSQRENMIAAEQTSNDACVDGTMNGWFSEISDEMWPGQAMSLKMTEVLYKGKSDFQDVMVFQSQSYGKVLILDGVIQATERDEFSYQEMIAHLPLCSIHDPPKKVLVVGGGDGGVLREIIRHPTVEHLDIAEIDGMVIEVSKKFFPGMSCGFDDPRVHVNVCDGIKFVGDAPEGSYDAIIVDSSDPVGPASVLFEKPFFEKIYRALKPGGVLTTQGECIWLHAELIKDVLEMCKGIFVGGSVQYGYCSIPTYPSGQIGFVMCSKPTAEGKTVDFSKPVRPPPVAPANTKLPPLRYYNSAIHEAASVLPEFARAAVEPYVVKGTGP

SEQ ID NO: 155091 - DNA, 879 bp, Paracoccidioides brasiliensis Pb18
  CDS (1)..(879)
atgagcgagctcacacaccccacaatcaaagatggctggttttcggaaatttctgatatgtggcccggccaggccatgactctgaaagttaaccagatcctgcaccacgagaaatccaagtatcaagatgtcctggtcttcgagagcagtgaccacggcacagtcctcgttctggataacgttatccaatgcacagagcgcgatgaattctcataccaagaaatgattacccatctcgccatgaactctcatcctaaccccaagaaagtccttgtcatcggtggaggtgacggcggagttctccgtgaggtcgtcaagcacgagactgtcgaggaggctattctgtgcgatatcgacgaggccgtcatccgcgtctcgaaaaagtacctgccagggatgagcgtcggcttccagcaccccaacgtgacagtccatgtgggcgatggctttaagttccttgcggaccgcaagaatgaattcgacgtgattatcaccgacagctcagacccagaagggccggcggaggctctgtttcagaaaccatatttcgagctgctcttcaacgccctgcgtgaaggcggtgtcgttacgactcaagccgaaaatcaatggcttcatctgtctctcatcaccgaactaaaacgaaatatccgcgagatcttccctgtggtcgagtacgcctacacgacgatccccacctacccctcgggccagattgggttcatggtctgctgtaaagattcgagcagggatgtacgcgagcccgtgcgcacctggacgcgcgaggaagaggagaagttgtgtcgttattacaacaaggagattcaccgggcgagctttgtattgccgaatttcgcaagaaaggcgttggaacagtga

SEQ ID NO: 155092 - protein, 292 aa, Paracoccidioides brasiliensis Pb18
MSELTHPTIKDGWFSEISDMWPGQAMTLKVNQILHHEKSKYQDVLVFESSDHGTVLVLDNVIQCTERDEFSYQEMITHLAMNSHPNPKKVLVIGGGDGGVLREVVKHETVEEAILCDIDEAVIRVSKKYLPGMSVGFQHPNVTVHVGDGFKFLADRKNEFDVIITDSSDPEGPAEALFQKPYFELLFNALREGGVVTTQAENQWLHLSLITELKRNIREIFPVVEYAYTTIPTYPSGQIGFMVCCKDSSRDVREPVRTWTREEEEKLCRYYNKEIHRASFVLPNFARKALEQ

SEQ ID NO: 155093 - DNA, 981 bp, Micromonas pusilla CCMP1545
  CDS (1)..(981)
atgtctcagcgcgagacgctcatcgccgcgacccccgcggtgaacgacgcgggcatggacgccgcgatgaaaggctggttcagcgaagtctccgacgagatgtggcccggtcaagcgatgtcgctcaaggtggaggaggtgctcttccgcggcaagtccgacttccaggacgtcatggttttccagtcggcgacgtacggaaaagtcctcgttctcgacggcgtgattcagtgcaccgaacgcgacgagttctcgtaccaggagatgatcgcgcacctgccgctgtgctcgctgcaccacgaacccaagaaggtgctcgtcgtcggcggcggcgacggcggcgtgttgcgagagatcacgcggcatcgatccgtggagcgtctggacatcgcggagatcgacggggtcgtgatcgagacggcgaagaaatatttccccgggatgtccctagggttcgacgacccgcgcgtgcgcgtgcacgtcacggacgggatcaagtgggtgggcgacgcggaggcggagtcgtacgacgccatcatcgtggactcctccgacccggtcggacccgccgcggtgctgttcgagcgggatttctttgaaaagattcaccgcgcgctcaagccggggggggtggtgtgcacgcagggcgagtgcgtgtggctgcacgcggaactcatcaaggacgttctcgagatgtgcaagagcatattcgtcggcggcagcgtgcagtacgggttcacgacgatacctacgtacccgtccgggcagattgggttcgtgatgtgctccaagccggacgcggcggggaaaaccgtggacttcgcgacgcccgcgcggccgccgccgattgcgccggagggatcgaagctcaagccgttgcggtactacaacgccggggtgcacgcggcggcgttcgtcctccccgagttcgcgcgcgcggccgtggagccgttcgtcgtcaagggcaccgggcagaagtag

SEQ ID NO: 155094 - protein, 326 aa, Micromonas pusilla CCMP1545
MSQRETLIAATPAVNDAGMDAAMKGWFSEVSDEMWPGQAMSLKVEEVLFRGKSDFQDVMVFQSATYGKVLVLDGVIQCTERDEFSYQEMIAHLPLCSLHHEPKKVLVVGGGDGGVLREITRHRSVERLDIAEIDGVVIETAKKYFPGMSLGFDDPRVRVHVTDGIKWVGDAEAESYDAIIVDSSDPVGPAAVLFERDFFEKIHRALKPGGVVCTQGECVWLHAELIKDVLEMCKSIFVGGSVQYGFTTIPTYPSGQIGFVMCSKPDAAGKTVDFATPARPPPIAPEGSKLKPLRYYNAGVHAAAFVLPEFARAAVEPFVVKGTGQK

SEQ ID NO: 155095 - DNA, 942 bp, Candidatus Kuenenia stuttgartiensis
  CDS (1)..(942): transl_table=11
atggaaaaattacccttaaactggatagatgattatttcagcgactatgaacttcacaaactggcattcaaaaacattgtgtacgaggcagaatcaaaacatcaaaaaataattgttgttgatacttatagctttggcaaatgccttatacttgacaatgaattccagtcggctgagtcagatgagtatgtgtatcatgaatccctggtgcaaccttcccttataatgcatccggaggcgcaaagcgtccttattattggcggaggcgagggcgcaaccctgagagaaacgcttcgccataaatcggtaaaaaaggcggtaatggttgacatcaatgacgaggtaatctcgtgtgcgaaaaaaagcctcccctcatttcatgaaggggcttttgatgatgaacgaacctcgcttgttattgaagacgggaggaaatatctggagaatacagatcaacagtttgatgttattattattgatgtaaatgaccctgttggcggcagcccttctgccatgctttttacgagggaattttatcagatcgccgcaggcaggctaaagaaggacggcattgttgttgttcagtccggcgcggtttctgttacggataatgacctgttttccggtatattccatacgctaaacgatgtattcccgcacgtatttccatacaccacctacataccgtcgtatgcatgtctgtggggttttaccatagcaacgcacaatctgggggatttagacatcaccggagaagaaatcgatttcagaatcgggaatcgggttaattcagcattgcgctattatgacagcattacccatcattcgcttttcaacttgccaaaatatttgcgtgaagagttaaagaaaagcaaacacatcatacgtgacaatgcacctctcattaaacaataccccggcgtttcatcggaaaagatttag

SEQ ID NO: 155096 - protein, 313 aa, Candidatus Kuenenia stuttgartiensis
MEKLPLNWIDDYFSDYELHKLAFKNIVYEAESKHQKIIVVDTYSFGKCLILDNEFQSAESDEYVYHESLVQPSLIMHPEAQSVLIIGGGEGATLRETLRHKSVKKAVMVDINDEVISCAKKSLPSFHEGAFDDERTSLVIEDGRKYLENTDQQFDVIIIDVNDPVGGSPSAMLFTREFYQIAAGRLKKDGIVVVQSGAVSVTDNDLFSGIFHTLNDVFPHVFPYTTYIPSYACLWGFTIATHNLGDLDITGEEIDFRIGNRVNSALRYYDSITHHSLFNLPKYLREELKKSKHIIRDNAPLIKQYPGVSSEKI

SEQ ID NO: 155097 - DNA, 1035 bp, Physalis divaricata
  CDS (1)..(1035)
atggaagtcatgacatctacccacacaaatggctctgccctccttaaaagtagtgccataacgacgaatggctaccacaatggcaattccaatcaccggaagggcgtcacagctcatgacaatggcagaaaactattggaggggagctccaactctcttgagcctggttggttttcagagtttagcccgttatggccaggtgaagcattctcattgaaaattgagaagcttctatttcaggggaagtctgattaccaagatgtcatgctcttcgagtcagcaacttatgggaaggttctgacattggatggagcaattcaacacacagagaatggtggatttccatacactgaaatgattgttcatctcccacttggttccatcccaagtccaaagaaggttttgatcatcggcggaggaattggttttacattattcgaagtgcttcgttatcctaccatcgaaaacatagatatagttgagattgatgatgtggtggtcgatgtgtctagaaaattcttcccttacctagcagctaattttaatgatcctcgtgtaactatggttctcggcgatggagctgcatttgtgaaggctgccaaagcaggatattatgatgctattatagtggactcttctgatcctattggtccagcaaaagacttgtttgagaggccattcttcgaggcagtagccaaagctcttagaccaggaggagttgtatgcacgcaggctgaaagcatatggcttcatatgcatattattaaacaaatcattgccaattgtcgtcaagtctttaagggttctgtcaactacgcttggactactgtacctacatatccaactggtgtaataggttacatgctctgttctaccgaggggccggaagttgacttcaagaatccagtgaatccaattgacaaagctacagctcatatcaagtccgaattaggacctctcaagttctacaactctgatattcacaaagcagctttcattttaccatcttttgctgcaagtttgattgagtcttaa

SEQ ID NO: 155098 - protein, 344 aa, Physalis divaricata
MEVMTSTHTNGSALLKSSAITTNGYHNGNSNHRKGVTAHDNGRKLLEGSSNSLEPGWFSEFSPLWPGEAFSLKIEKLLFQGKSDYQDVMLFESATYGKVLTLDGAIQHTENGGFPYTEMIVHLPLGSIPSPKKVLIIGGGIGFTLFEVLRYPTIENIDIVEIDDVVVDVSRKFFPYLAANFNDPRVTMVLGDGAAFVKAAKAGYYDAIIVDSSDPIGPAKDLFERPFFEAVAKALRPGGVVCTQAESIWLHMHIIKQIIANCRQVFKGSVNYAWTTVPTYPTGVIGYMLCSTEGPEVDFKNPVNPIDKATAHIKSELGPLKFYNSDIHKAAFILPSFAASLIES

SEQ ID NO: 155099 - DNA, 1026 bp, Datura innoxia
  CDS (1)..(1026)
atggaagtcatatccactcaaacaaatggctctgccatcatcatgaattacagccaccacaatggcaattccgatcaccggaacggcggcgccacagctcatgatcatgacaatggcagaaagttattggggaactccaactctattaagcctggttggttttcagagtttagcgccttatggccaggtgaagcattttcactgaaaattgagaacttgctatttcagggaaagtctgattaccaagatgtcatgctctttgagtcagcaacatatggaaaggttctgacattggatggagcaattcaacacacagagaatggtggatttccatatactgaaatgattgttcatctcccacttggttccatccctaaaccaaaaaaggttttgatcattggcggagggattggttttacattattcgaagtgcttcgttatcctaccgtcgaaaaaatagacatagttgagattgatgacgtggtggtcgatgtgtcgagaaaatttttcccctaccttgcggctaattttaatgatcctcgtgtaactctggttctcggcgatggagctgcatttgtaaaggctgcacaagcagggtattatgatgctattatagtggactcttctgatcctattggtccagcaaaagacttgtttgagaggccattttttgaggcagtagccaaagcacttagaccaggaggagttgtgtgcacacaggctgaaagtatttggcttcatatgcatattatcaaacaaattattgctaattgtcgtcaagtctttaagggttctgtcaactatgcttggactactgttcctacttatccaactggtgtaataggttacatgctgtgctctactgagggaccagaagttgacttcaagaatccagtgaatgcaattgacaaattagatgaaactcatgtcaactccaaattaggacctctcaagttctacaacactgatattcataaatcagcattcattttgccatcttttgccaaaaatctgactgagtcttaa

SEQ ID NO: 155100 - protein, 341 aa, Datura innoxia
MEVISTQTNGSAIIMNYSHHNGNSDHRNGGATAHDHDNGRKLLGNSNSIKPGWFSEFSALWPGEAFSLKIENLLFQGKSDYQDVMLFESATYGKVLTLDGAIQHTENGGFPYTEMIVHLPLGSIPKPKKVLIIGGGIGFTLFEVLRYPTVEKIDIVEIDDVVVDVSRKFFPYLAANFNDPRVTLVLGDGAAFVKAAQAGYYDAIIVDSSDPIGPAKDLFERPFFEAVAKALRPGGVVCTQAESIWLHMHIIKQIIANCRQVFKGSVNYAWTTVPTYPTGVIGYMLCSTEGPEVDFKNPVNAIDKLDETHVNSKLGPLKFYNTDIHKSAFILPSFAKNLTES

SEQ ID NO: 155101 - DNA, 1023 bp, Datura innoxia
  CDS (1)..(1023)
atggaagtcatatccactcaaacaaatggctctgccatcatcatgaattacagccaccacaatggcaattccgatcaccggaacggcggcgccacagctcatgatcatgacaatggcagaaagttattggggaactccaactctattaagcctggttggttttcagagtttagcgccttatggccaggtgaagcattttcactgaaaattgagaagttgctatttcagggaaagtctgattaccaagatgtcatgctctttgagtcagcaacttatggaaaggttctgacattggatggagcaattcaacacacagagaatggtggatttccatatactgaaatgattgttcatctcccacttggttccatccctaaaccaaaaaaggttttgataattggtggaggaattggttttacattattcgaagtgcttcgttattctaccgttgagaaaatagacatagttgagattgatgacgtggtggtcgatgtatcaagaaaatttttcccctaccttgcggctaactttaatgatcctcgtgtaactttggttctcggtgatggagctgcatttgtaaaggctgcacaagcagggtattatgacgctattatagtggactcttctgatcctattggtccagcaaaagatttgtttgagaggccattttttgaggcagtagccaaagcacttagaccaggaggcgttgtgtgcacacaggctgaaagcatttggcttcatatgcatattatcaaacaaattattgctaattgtcgtcaagtctttaagggttctgtcaactatgcttggactactgttcctacttatccaactggtgtaattggttacatgctatgctctactgagggaccagaagttgacttcaagaatccagtgaatccaattgacaaagatgaaactcatgccaactccaaattaggacctctgaagttctacaacactgatattcacaaagcagctttcattttgccatcttttgccagaagtatgatagagtcttag

SEQ ID NO: 155102 - protein, 340 aa, Datura innoxia
MEVISTQTNGSAIIMNYSHHNGNSDHRNGGATAHDHDNGRKLLGNSNSIKPGWFSEFSALWPGEAFSLKIEKLLFQGKSDYQDVMLFESATYGKVLTLDGAIQHTENGGFPYTEMIVHLPLGSIPKPKKVLIIGGGIGFTLFEVLRYSTVEKIDIVEIDDVVVDVSRKFFPYLAANFNDPRVTLVLGDGAAFVKAAQAGYYDAIIVDSSDPIGPAKDLFERPFFEAVAKALRPGGVVCTQAESIWLHMHIIKQIIANCRQVFKGSVNYAWTTVPTYPTGVIGYMLCSTEGPEVDFKNPVNPIDKDETHANSKLGPLKFYNTDIHKAAFILPSFARSMIES

SEQ ID NO: 155103 - DNA, 1035 bp, Calystegia sepium
  CDS (1)..(1035)
atggaggtcatggctgctcacaataatggcttcaccaaccaccagaatggaaccaccacaaaccaccaaaacggcaccaccaccaaccaccacaacggcacagcgaaccaccagaatggcaacgggactgctcacgaggacggtggcaaagactttgggtgcattaagccggggtggttttccgagttcagccaaatgtggcccggcgaagcattctcactcaagatagagaagctactattccaaggaaagtctgattaccaagatgttatgctctttgagtcagctacatatgggaaagtgctgacattggatagagcaatccaacacacagaaaatggaggatttccctacactgagatgattgtccatctccctcttggctccattcctaacccaaagaaggttctgattatcggaggaggaattggttttactttgatggaagtttcacgctaccccacgattgaaaaaatagatatcgttgaaatagataaaatggtagtggatgtgtccagacaatttttcccgtacctaggtgcaggattcgaagatcctcgtgtgacgctccacattggagatggagctgcatttgtgaaggatgcccagaaaggatattatgatgctgttattgtagattcttctgatcctataggcccagcaaaggatttgtttgagatgccattttttgaggcagtagccaaagctttaaggccaggaggtgttgtatgtacccaagctgaaagcatatggcttcacatgcatttcattaaacaaatcatcgcaagttgccgtcaagttttcaaaggctctgttaactatgcttggaccacagtcccaacttatcccagtggggtgattggttacatgttgtgttctactgaaggaccagatgttgacttcaagaatccagtcaacccaatcgacaaagataccagccacgtcaaatctaaaggccccctaaagttttacaatgctgagattcataaagcagctttcactctgccatcctttgtgcaaaaattgctcgagtag

SEQ ID NO: 155104 - protein, 344 aa, Calystegia sepium
MEVMAAHNNGFTNHQNGTTTNHQNGTTTNHHNGTANHQNGNGTAHEDGGKDFGCIKPGWFSEFSQMWPGEAFSLKIEKLLFQGKSDYQDVMLFESATYGKVLTLDRAIQHTENGGFPYTEMIVHLPLGSIPNPKKVLIIGGGIGFTLMEVSRYPTIEKIDIVEIDKMVVDVSRQFFPYLGAGFEDPRVTLHIGDGAAFVKDAQKGYYDAVIVDSSDPIGPAKDLFEMPFFEAVAKALRPGGVVCTQAESIWLHMHFIKQIIASCRQVFKGSVNYAWTTVPTYPSGVIGYMLCSTEGPDVDFKNPVNPIDKDTSHVKSKGPLKFYNAEIHKAAFTLPSFVQKLLE

SEQ ID NO: 155105 - DNA, 1023 bp, Solanum lycopersicum
  CDS (1)..(1023)
atggaggtcataatgaacaatcacaacaatggcaccatcaacaccaacaccaaaattattcacaaaaatggtagcatttgcaatggcaatggcaatgttaatggcaactcccacacccataacaatgaaaataagcttgtagagttcactaactctatcaaaccgggttggttttctgagttcagcgcactctggccaggtgaagcattttcacttaaaattgaaaaattactattccaaggaaagtctgattatcaagatgttatgctctttgagtcagcaacgtatgggaaggtattaacattggatggggcaattcaacacacagagaatggtggatttccctacactgagatgattgttcatctaccacttggttccattccatcccctaaaaaggtgttaatcatcggtggagggattggtttcacgttgtttgaggtctctcgctatccaagtattgaaaaaatagacatagttgagatcgatgacgtggttgtagacgtatctagaaagtttttcccatacctagcagcaggatttgatgatccaagagtcagccttattattggcgatggagctgcatttgtgaaagctgctcaacctggatactatgatgcaattattgttgactcttctgatcctattggtccagcaaaagacttgtttgaaaggccatttttcgaagcagtggcaaaagccctaaggccaggaggagtagtgtgtacacaggcagaaagtatttggcttcacatgcatctaattaaaaaaattattgcaaattgtcgacaggtctttaagggttctgtcaattatgcatggactaccgttcctacttaccctactggtgtgattggttacatgctttgctctacggagggaccagaagttaatttcaagaatccagtgaactctattgacaaatatgtcaaatccaagggacctttgaagttctataactctgatattcataaatcagcttttattttgccgtcttttgcaagggatttgtttgaatcttga

SEQ ID NO: 155106 - protein, 340 aa, Solanum lycopersicum
MEVIMNNHNNGTINTNTKIIHKNGSICNGNGNVNGNSHTHNNENKLVEFTNSIKPGWFSEFSALWPGEAFSLKIEKLLFQGKSDYQDVMLFESATYGKVLTLDGAIQHTENGGFPYTEMIVHLPLGSIPSPKKVLIIGGGIGFTLFEVSRYPSIEKIDIVEIDDVVVDVSRKFFPYLAAGFDDPRVSLIIGDGAAFVKAAQPGYYDAIIVDSSDPIGPAKDLFERPFFEAVAKALRPGGVVCTQAESIWLHMHLIKKIIANCRQVFKGSVNYAWTTVPTYPTGVIGYMLCSTEGPEVNFKNPVNSIDKYVKSKGPLKFYNSDIHKSAFILPSFARDLFES

SEQ ID NO: 155107 - DNA, 954 bp, Cucumis sativus
  CDS (1)..(954)
atggctgcggaactctccctcggctcggcagcgagcaaaccccagactgagaatggggtttctgattctatttcatctgtaattcctggatggttttctgaaattagcccaatgtggcctggagaggctcactccttgaaggtggagaaggttttgtttcaagggaagtctgattatcaggacgttttggtgtttcagtcatcaacttatgggaaagttctggttttggatggggtgattcagcttacagagagagatgaatgtgcttatcaagagatgatcacccaccttccgctttgctcaattccaaatcccaaaaaggttctagtcattggtggaggggacggcggtgtgttgcgagaggtggctcgtcatttatccgttgagcagatagatatctgtgaaatcgacaagatggtagttgacgtttccaaagaatttttccctcgtgtagctattgggtacgaggatccccgtgtcactcttcatgttggcgatggtgttgcatttctcaaggctgttcctgaaggcacttatgatgcaattatagtggattcatctgatcctatcgggcctgcacaagagctttttgagaagccattttttgcttcagttgccaaagctcttcgaccaggaggtgttgtgtgtactcaggcagagggcatctggctccacatgcacataatcgaagacattgtaacaaactgccgccagatattcaaaggctctgtcaactatgcatggactacagttcccacatatcccagcggagtgattgggtttatgctctgctcaactgagggacctactgtcgatttcaagcatccagtaaactcagccgaggtgaacggcattgacaccgcaaagagtccgctcaagttttacaactcggagattcatgcagcagctttctgtttgccatcttttgcgaagaagattattgactcagaatga

SEQ ID NO: 155108 - protein, 317 aa, Cucumis sativus
MAAELSLGSAASKPQTENGVSDSISSVIPGWFSEISPMWPGEAHSLKVEKVLFQGKSDYQDVLVFQSSTYGKVLVLDGVIQLTERDECAYQEMITHLPLCSIPNPKKVLVIGGGDGGVLREVARHLSVEQIDICEIDKMVVDVSKEFFPRVAIGYEDPRVTLHVGDGVAFLKAVPEGTYDAIIVDSSDPIGPAQELFEKPFFASVAKALRPGGVVCTQAEGIWLHMHIIEDIVTNCRQIFKGSVNYAWTTVPTYPSGVIGFMLCSTEGPTVDFKHPVNSAEVNGIDTAKSPLKFYNSEIHAAAFCLPSFAKKIIDSE

SEQ ID NO: 155109 - DNA, 1017 bp, Anisodus tanguticus
  CDS (1)..(1017)
atggaggtcataagcaaccacaacaatggcagcaccaccaaaattatcctgaaaaatggcagcatttgcaatggcaatgttaatggaaactcccactcccatgagaaaattgagaataagcttgtagagtgcactaactctatcaagcctggttggttttctgagtttagcgcactctggccaggtgaagcattttcacttaaaattgaaaagttactatttcaaggaaagtctgattatcaagatgtcatgctctttgagtcagcaacttatgggaaggtgttaacattggatggggcaattcaacatacagagaatggtggatttccatacactgagatgattgttcatctcccacttggttccattccatcccccaagaaggttttaatcatcggtggagggattggtttcacattgtttgaggtctctcgttacccaactatcgaaacaatagatatagttgagatcgatgacgtggttgtagatgtatctagaaagtttttcccgtacctagcagcaggattcgatgatcccagagtaacccttattattggcgatggagctgcattcgtgaaagctgctcaacctggatactatgatgccattattgtggactcttctgatcctattggtccagcaaaagacttgtttgaaaggccattcttcgaggcattggcgaaagcgctaaggccaggaggagtagtatgtacacaagcagagagcatttggcttcacatgcatcttattaagcaaattattgctaattgtcgccaagtgtttaagggttctgtcaattatgcatggactacagttcctacttaccctactggtgttatcggttacatgctttgctctacggagggaccagaagttaatttcaagaatccagtgaactctattgacaaagataccagccatgtcaaatccaagggacctttgaagttctacaactctgatattcataaagcagcttttattttgccatctttcgcgagggatttggttgagttttga

SEQ ID NO: 155110 - protein, 338 aa, Anisodus tanguticus
MEVISNHNNGSTTKIILKNGSICNGNVNGNSHSHEKIENKLVECTNSIKPGWFSEFSALWPGEAFSLKIEKLLFQGKSDYQDVMLFESATYGKVLTLDGAIQHTENGGFPYTEMIVHLPLGSIPSPKKVLIIGGGIGFTLFEVSRYPTIETIDIVEIDDVVVDVSRKFFPYLAAGFDDPRVTLIIGDGAAFVKAAQPGYYDAIIVDSSDPIGPAKDLFERPFFEALAKALRPGGVVCTQAESIWLHMHLIKQIIANCRQVFKGSVNYAWTTVPTYPTGVIGYMLCSTEGPEVNFKNPVNSIDKDTSHVKSKGPLKFYNSDIHKAAFILPSFARDLVEF

SEQ ID NO: 155111 - DNA, 1023 bp, Solanum tuberosum
  CDS (1)..(1023)
atggaagtcatatctactcacacaaatggctctaccatcacaatcaccaccaacggccaccacaataatggcaagtccgatcaccgaaacggcggaacaattcatgacaatggcaataagctattattgggaaactccaactctattaagcctggttggttttcagagtttagcgcgttatggccaggtgaagcattctcagtaaaaattgagaagttgctatttcaagggaagtctgattaccaagatgtcatgttatttgagtcagcaacttatggtaaagttctaacattggatggagcaattcaacacacagaaaatggtggatttccatatactgaaatgattgttcatctaccacttggttcaatcccaactcccaaaaaggtgttgatcattggtggaggaattggttttacattattcgaagtgcttcgttattctaccatagaaaaaatagatattgttgagattgatgacgttgtggtcgacgtgtctagaaaatttttcccctaccttgctgctaattttaatgatcctcgtgtaactctggttctcggcgacggagcagcatttgtaaaggctgcacaagcagggtattatgatgctattattgtggactcttctgatcctattggtccagcaaaagatttatttgagaggccattttttgaggcagtagccaaagctcttaggccaggaggagttatatgcacacaagctgaaagtatatggcttcatatgcatattattaaacaaattattgctaattgtcgactagtctttaaaggttctgttaactatgcttggactactgttccaacatatccaactggtgtaattggttacatgctttgctctactgagggaccagaagttgactttaagaatccagtgaatccaattgacaaagatacaactcatgtcaagtcaaaattagaacctctcaagttctacaacactgatattcataaagcagcttttattttgccatcttttgccagaagtttgattgagtcttaa

SEQ ID NO: 155112 - protein, 340 aa, Solanum tuberosum
MEVISTHTNGSTITITTNGHHNNGKSDHRNGGTIHDNGNKLLLGNSNSIKPGWFSEFSALWPGEAFSVKIEKLLFQGKSDYQDVMLFESATYGKVLTLDGAIQHTENGGFPYTEMIVHLPLGSIPTPKKVLIIGGGIGFTLFEVLRYSTIEKIDIVEIDDVVVDVSRKFFPYLAANFNDPRVTLVLGDGAAFVKAAQAGYYDAIIVDSSDPIGPAKDLFERPFFEAVAKALRPGGVICTQAESIWLHMHIIKQIIANCRLVFKGSVNYAWTTVPTYPTGVIGYMLCSTEGPEVDFKNPVNPIDKDTTHVKSKLEPLKFYNTDIHKAAFILPSFARSLIES

SEQ ID NO: 155113 - DNA, 1035 bp, Datura stramonium
  CDS (1)..(1035)
atggaagtcttgtcatctacccacacaaatggctcttccctccttaaaaatggtgtcatcaccatgaacggccaccacaatggcaattccgatcaccggaacggcggcaccactgttcatgaaaatggcagaaagttattggggaactccaactctattaagcctggttggttttcagagtttagcgccttatggccaggtgaagcattctcactgaaaattgagaagttgctatttcagggaaagtctgattaccaagatgtcatgctctttgagtcagcaacttatggaaaggttctgacattggatggagcaattcaacacacagagaatggtggatttccatatactgaaatgattgttcatctcccacttggttccatccctaatccaaaaaaggttttgataattggtggaggaattggttttacattattcgaagtgcttcgttatcctaccgttgagaaaatagacatagttgagattgatgacgtggtggttgatgtatcaagaaaatttttcccctaccttgcggctaactttaatgatcctcgtgtaactttggttctcggtgatggagctgcatttgtaaaggctgcacaagcagggtattatgacgctattatagtggactcttctgatcctattggtccagcaaaagatttgtttgagaggccattttttgaggcagtagccaaagcacttagaccaggaggcgttgtgtgcacacaggctgaaagcatttggcttcatatgcatattatcaaacaaattattgccaattgtcgtcaagtctttaagggttctgtcaactatgcttggactactgttcctacttatccaactggtgtaattggttacatgctgtgctctactgagggaccagaagttgacttcaagaatccagtgaatccaattgacaaagatgaaactcatgccaactccaaattaggacctttgaagttctacaacaccgatattcacaaagcagctttcattttgccatcttttgccagaagtatgatagagtcttag

SEQ ID NO: 155114 - protein, 344 aa, Datura stramonium
MEVLSSTHTNGSSLLKNGVITMNGHHNGNSDHRNGGTTVHENGRKLLGNSNSIKPGWFSEFSALWPGEAFSLKIEKLLFQGKSDYQDVMLFESATYGKVLTLDGAIQHTENGGFPYTEMIVHLPLGSIPNPKKVLIIGGGIGFTLFEVLRYPTVEKIDIVEIDDVVVDVSRKFFPYLAANFNDPRVTLVLGDGAAFVKAAQAGYYDAIIVDSSDPIGPAKDLFERPFFEAVAKALRPGGVVCTQAESIWLHMHIIKQIIANCRQVFKGSVNYAWTTVPTYPTGVIGYMLCSTEGPEVDFKNPVNPIDKDETHANSKLGPLKFYNTDIHKAAFILPSFARSMIES

SEQ ID NO: 155115 - DNA, 1071 bp, Solanum lycopersicum
  CDS (1)..(1071)
atggatgggaaggagaataatggtgttaatggttcaaacaaagttggtattcctaaatgttgcttgaaggctagggtatttgatcctgaacttgaagccaattgtcactctactgttgtttctggatggttctctcaacctcctacatcatttgatggtaaagagaaggtactgtacttcaacaatccaatgtggccaggagaagcacattccctgaaagtagaaaaggttttgttcaagggaaagtcagaattccaggaggttttggtttttgagtctgcatcctatggaaaagttctagtgctagatggcattgttcagttgactgagaaagatgaatgtgcctatcaggagatgatagcccatcttcctctttgttcaatcaaatctcctaagaaggttctggttgttgggggtggtgatggtggagttctaagggaaatttctcgacatagctctgtggagctgattgatatttgtgagattgataaaatggttatagatgtcagtaaaaagtattttccagatttggctattggctttgaggatcctcgtgtcaatcttcatgttggtgatgctgttgaatttctgaagaacacacctgaagggaagtatgatgctatcatagttgattcatcagatcctgtaggtcctgcaatagagcttgttgaaggaccattctttgcaaagatagccagggcattaaggcctggcggtgtactttgcaacatggcagagagcatgtggcttcatactcatcttattcaagatatgatctcaatttgccgtgaaacatttagttctgttcattatgcatgggccagtgttcctacatatcctagtggcgttattgggtttcttctgtgctcaactgagggaccatttgttgattttaagcaccctgttaatcctattgagaagttagagggcgctctccagcatcagcgggaactcaagttttacaattctgagatgcatgaagctgcttttgcattgccatgctttttaaggagggaggtgagcggtctccgcgatagcccacgttccgcagggagtggagtcaagatttaa

SEQ ID NO: 155116 - protein, 356 aa, Solanum lycopersicum
MDGKENNGVNGSNKVGIPKCCLKARVFDPELEANCHSTVVSGWFSQPPTSFDGKEKVLYFNNPMWPGEAHSLKVEKVLFKGKSEFQEVLVFESASYGKVLVLDGIVQLTEKDECAYQEMIAHLPLCSIKSPKKVLVVGGGDGGVLREISRHSSVELIDICEIDKMVIDVSKKYFPDLAIGFEDPRVNLHVGDAVEFLKNTPEGKYDAIIVDSSDPVGPAIELVEGPFFAKIARALRPGGVLCNMAESMWLHTHLIQDMISICRETFSSVHYAWASVPTYPSGVIGFLLCSTEGPFVDFKHPVNPIEKLEGALQHQRELKFYNSEMHEAAFALPCFLRREVSGLRDSPRSAGSGVKI

SEQ ID NO: 155117 - DNA, 951 bp, Petunia hybrida
  CDS (1)..(951)
atggaacaagaaaatcacaacaacaataactgtaccaatgacaaagaatcagcttgcatctcttctgttttacctggatggttctctgagattagccccctttggcctggggaagcacactcattgaaggtggagaagattttgtttcaggggaagtctgattatcagaatgtcatggtttttcagtcatcaacttatggaaaggtgcttgttttggatggtgtgatccaactcactgagagggatgaatgtgcttaccaagagatgattactcatcttcctctttgttcaattcccaatcccaaaaaggtgctagttattggaggaggagatggaggtgtcttgcgtgaggtgtcgcgccattcctctattgaacagattgacatatgtgagattgacaagatggtagttgaggtttctaaacagtttttcccagatgttgccgtaggatatgaggatccccgtgtgaatctccacattggtgacggtgttgcattcttgaaagctgttcctgcaggaacatatgatgctgtcatagtagattcttctgaccctattggtccagcacaagagttgttcgaaaagcctttttttgaaactgtagcaagagctcttcgtccaggaggagttgtatctacacaggctgagagcatatggcttcacatggacataattgagaatattgttaccaactgccgccagatctttaaaggctcagtcaattatgcatggactactgttcctacttatccaagtggtatgatcggtttcatgctctgctctaccgagggacttgaagtcgatttcaagaacccagttaacctcatcgaaaacgacgaaatccatagcaaaactctcccacctttgaaattctacaactttgagattcacaaagcatcattcgctttgccatcatttgccaagagggtgattgaatctaaaggaaattga

SEQ ID NO: 155118 - protein, 316 aa, Petunia hybrida
MEQENHNNNNCTNDKESACISSVLPGWFSEISPLWPGEAHSLKVEKILFQGKSDYQNVMVFQSSTYGKVLVLDGVIQLTERDECAYQEMITHLPLCSIPNPKKVLVIGGGDGGVLREVSRHSSIEQIDICEIDKMVVEVSKQFFPDVAVGYEDPRVNLHIGDGVAFLKAVPAGTYDAVIVDSSDPIGPAQELFEKPFFETVARALRPGGVVSTQAESIWLHMDIIENIVTNCRQIFKGSVNYAWTTVPTYPSGMIGFMLCSTEGLEVDFKNPVNLIENDEIHSKTLPPLKFYNFEIHKASFALPSFAKRVIESKGN

SEQ ID NO: 155119 - DNA, 879 bp, Malus domestica
  CDS (1)..(879)
atgataaatttcactcccctgctttcttatatgtcatcaagtgttggaatgcaaggagaggcacactccttgaagatagagaagattttgtttcaaggaaagtccgactatcagaatgtgatggtcttccagtcagcgacatatggaaaggttcttgtcttagatggggtgattcagttaactgaaagggatgaatgtgcctatcaagaaatgatcactcatctcccactctgctcaattccaaacccaaagaaggttttggttattggtgggggagatggtggggtactgcgggaagtggctcgctatgcttcagttgagaagattgatatatgtgagatcgataagatggtggttgatgtgtctaaacagtttttccctgatgtagctattggatacgatgacccacgggtctcacttcatgttggtgatggagttgcgtttttgaaggccgttcctgcaggaacttatgatgcagtaatagtggactcttctgacccaataggtcctgcgaaagaactttttgagaagccctttttccagacagtagctaatgctcttcgtccaggaggagttgtgtgtacacaggcagaaagtatatggcttcacatggacatcattgaggatattgtggaaaactgtcgtgaggtattcaaaggctctgtcaactatgcatggactacagtccctacatatccaagtggggtgattggttttatgctttgttctaccgagggacctgctgtggattttaagcaccctgtgaattcaattgatgcatcaaaacgacccttaaaattttacaactcagagattcatacagctgctttctgtctaccatcttttgcgaagaaggtgattgacgcaaaagcaaagtga

SEQ ID NO: 155120 - protein, 292 aa, Malus domestica
MINFTPLLSYMSSSVGMQGEAHSLKIEKILFQGKSDYQNVMVFQSATYGKVLVLDGVIQLTERDECAYQEMITHLPLCSIPNPKKVLVIGGGDGGVLREVARYASVEKIDICEIDKMVVDVSKQFFPDVAIGYDDPRVSLHVGDGVAFLKAVPAGTYDAVIVDSSDPIGPAKELFEKPFFQTVANALRPGGVVCTQAESIWLHMDIIEDIVENCREVFKGSVNYAWTTVPTYPSGVIGFMLCSTEGPAVDFKHPVNSIDASKRPLKFYNSEIHTAAFCLPSFAKKVIDAKAK

SEQ ID NO: 155121 - DNA, 1008 bp, Malus domestica
  CDS (1)..(1008)
atggcggacgagattgtggtggggtctgctgatttgcccttgaagaggcccagggaggaagaagagaacggcgcggaagctgctgcttcagccgtgtccatggagactgacggtggcaaggagccggattctgtctccgctgttattcccggctggttttctgagattagcccaatgtggccaggagaggcacactccttgaagatagagaagattttgtttcaaggaaagtccgactatcagaatgtgatggtcttccagtcagcgacatatggaaaggttcttgtcttagatggggtgattcagttaactgaaagggatgaatgtgcctatcaagaaatgatcactcatctcccactctgctcaattccaaacccaaagaaggttttggttattggtgggggagatggtggggtactgcgggaagtggctcgctatgcttcagttgagaagattgatatatgtgagatcgataagatggtggttgatgtgtctaaacagtttttccctgatgtagctattggatacgatgacccacgggtctcacttcatgttggtgatggagttgcgtttttgaaggccgttcctgcaggaacttatgatgcagtaatagtggactcttctgacccaataggtcctgcgaaagaactttttgagaagccctttttccagacagtagctaatgctcttcgtccaggaggagttgtgtgtacacaggcagaaagtatatggcttcacatggacatcattgaggatattgtggaaaactgtcgtgaggtattcaaaggctctgtcaactatgcatggactacagtccctacatatccaagtggggtgattggttttatgctttgttctaccgagggacctgctgtggattttaagcaccctgtgaattcaattgatgcatcaaaacgacccttaaaattttacaactcagagattcatacagctgctttctgtctaccatcttttgcgaagaaggtgattgacgcaaaagcaaagtga

SEQ ID NO: 155122 - protein, 335 aa, Malus domestica
MADEIVVGSADLPLKRPREEEENGAEAAASAVSMETDGGKEPDSVSAVIPGWFSEISPMWPGEAHSLKIEKILFQGKSDYQNVMVFQSATYGKVLVLDGVIQLTERDECAYQEMITHLPLCSIPNPKKVLVIGGGDGGVLREVARYASVEKIDICEIDKMVVDVSKQFFPDVAIGYDDPRVSLHVGDGVAFLKAVPAGTYDAVIVDSSDPIGPAKELFEKPFFQTVANALRPGGVVCTQAESIWLHMDIIEDIVENCREVFKGSVNYAWTTVPTYPSGVIGFMLCSTEGPAVDFKHPVNSIDASKRPLKFYNSEIHTAAFCLPSFAKKVIDAKAK

SEQ ID NO: 155123 - DNA, 1008 bp, Malus domestica
  CDS (1)..(1008)
atggcggacgagagtgtggcggggtccgctgattttccggtgaagaggcccagggaggaagaagagaacggctctgcagctgctgcctcagccgtctccatggagcctgacggtggcaaggagcctgattctgtctccgctgtcattcccggctggttttctgagattagctcaatgtggccaggagaggcacactccttgaagatagagaagattttgtttcagggaaagtccgactatcagaatgtgatggtcttccagtcagcgacatatggaaaggttcttgtattggatggggtgattcagttaacagaaagggatgaatgtgcctatcaagaaatgattactcatctcccactctgctcaattccaaatccaaagaaggttttggttattggtggaggagatggtggggtactgagggaagtggctcgctatgcttcagttgagaagattgatatatgtgagatcgataagatggtgattgatgtgtctaaacaatttttccctgaggtagctattggatatgaggacccacgggtcacacttcatgttggtgatggagttgcatttttgaaggctgttcccgcaggaacttatgatgcagtaatagtggactcttctgacccaataggtcctgcaaaagaactttttgagaagccctttttccagacagtagctaatgctcttcgtccgggaggagttgtgtgtacacaggcagagagtatatggcttcacatgcacatcattgaggatattgtggcaaactgtcgcgagatattcaaaggctctgtcaactacgcatggactacagtccctacatatccaagtggggtgattggttttatgctttgttctactgagggaactgctgtggattttaagcaccccgtgaattcaattgatgagtcgaaacggcccttgagattttacaactctgagattcatacagctgctttctgtctaccatcttttgcaaagaaggtgattgacgcaaaagcaaagtga

SEQ ID NO: 155124 - protein, 335 aa, Malus domestica
MADESVAGSADFPVKRPREEEENGSAAAASAVSMEPDGGKEPDSVSAVIPGWFSEISSMWPGEAHSLKIEKILFQGKSDYQNVMVFQSATYGKVLVLDGVIQLTERDECAYQEMITHLPLCSIPNPKKVLVIGGGDGGVLREVARYASVEKIDICEIDKMVIDVSKQFFPEVAIGYEDPRVTLHVGDGVAFLKAVPAGTYDAVIVDSSDPIGPAKELFEKPFFQTVANALRPGGVVCTQAESIWLHMHIIEDIVANCREIFKGSVNYAWTTVPTYPSGVIGFMLCSTEGTAVDFKHPVNSIDESKRPLRFYNSEIHTAAFCLPSFAKKVIDAKAK

SEQ ID NO: 155125 - DNA, 1038 bp, Arabidopsis thaliana
  CDS (1)..(1038)
atggatgggaaggcgagtaatggaaatggtttagagaagactgtaccttcttgttgccttaaggctatggcatgtgtacctgaggatgatgctaagtgtcactccactgttgtttctgggtggttttcggaacctcaccctcgctctgggaaaaaaggcggcaaagcagtctatttcaacaaccctatgtggccaggagaagcacactcactgaaagttgagaaagttctgttcaaagacaagtcggattttcaggaagtcctagtgttcgagtcagccacgtacggaaaggtgcttgttctagatggtatcgtacagctgaccgaaaaagatgaatgtgcatatcaggagatgatagcccatctgcctttatgctctatatcttcccctaaaaatgttcttgttgttggtggaggtgatggtggtgttcttcgagagatttctcgccatagttctgttgaggttattgatatctgtgagatagacaagatggttatagatgtgtctaagaagttcttccccgagttagcggttgggtttgacgatcctcgtgttcaacttcacattagtgatgctgctgagttcctccgtaaatcccctgaagggaagtatgatgccatcattgttgattcttcagatcccgtaggtcctgctcttgcgcttgttgagaagcctttcttcgagacactggctagagcgttgaagcctgggggagttctttgtaacatggcagaaagtatgtggctccatactcatcttattgaagatatgatctccatttgccgtcaaacattcaaaagtgttcactatgcgtggagcagcgtccccacatatccaagcggcgtgattggtttcgtcttgtgctctactgaaggaccagctgttgacttcaagaacccaatcaaccctattgagaaactagacggtgcgatgacccataaaagagaattgaagttctataactctgatatgcacagagccgcatttgctttgcccacattcctgcggagagaagtagcttcacttctggcttcttga

SEQ ID NO: 155126 - protein, 345 aa, Arabidopsis thaliana
MDGKASNGNGLEKTVPSCCLKAMACVPEDDAKCHSTVVSGWFSEPHPRSGKKGGKAVYFNNPMWPGEAHSLKVEKVLFKDKSDFQEVLVFESATYGKVLVLDGIVQLTEKDECAYQEMIAHLPLCSISSPKNVLVVGGGDGGVLREISRHSSVEVIDICEIDKMVIDVSKKFFPELAVGFDDPRVQLHISDAAEFLRKSPEGKYDAIIVDSSDPVGPALALVEKPFFETLARALKPGGVLCNMAESMWLHTHLIEDMISICRQTFKSVHYAWSSVPTYPSGVIGFVLCSTEGPAVDFKNPINPIEKLDGAMTHKRELKFYNSDMHRAAFALPTFLRREVASLLAS

SEQ ID NO: 155127 - DNA, 1044 bp, Solanum tuberosum
  CDS (1)..(1044)
atggcagatgagtgtgctgcttttgtgaagggaactgaattgccagtgaagaggccaagagaggaagaagcagaaacagagatggaggcagccaataacagcaacaacaacaatggttgcagcaccaatgagaaagaggagccatctccttatatctcttctgttttacctggatggttctctgagattagccccctttggcctggggaagcacactcattgaaggttgagaagatactgtttcaggggaagtctgattaccagaatgtcttggtttttcagtcatcaacttatggaaaggtgcttgttttggatggtgtgatccagcttaccgagagggatgaatgtgcttatcaagagatgatcactcatcttcctctttgttcaattcccaaccccaaaaaggtgctggttattggaggaggagatggtggtgtcttgcgtgaggtatcccgtcattcttctgtcgaacagatcgacatatgtgagattgacaaaatggtagttgaggttgctaaacaatttttcccagatgtagctgtaggatatgaggatccacgtgtgaatctccgcattggtgatggagttgcatttttgaaaaatgttcctgccggaacttatgatgctgtcatagtggattcatctgaccctattggtccagcacaagagttgttcgaaaagcctttctttgaatctatagcaaaggctcttcgtcctggaggggttgtagctacacaggctgagagcatatggcttcacatgcacataattgaagaaattgttgctaattgccgccagatcttcaaaggctcagtcaactatgcttggactactgttcctacttatccaagtggcatgattggtttcatgctctgctctactgagggacctgcagttgatttcaagaaccctattaaccccatcgacgatgaaagccctgtcaagaccattgaacctttgaagttctacaactctgagattcaccaagcatcattctgtttgccatcattcgccaagagggtgatcgaaaccaaaggaaaatga

SEQ ID NO: 155128 - protein, 347 aa, Solanum tuberosum
MADECAAFVKGTELPVKRPREEEAETEMEAANNSNNNNGCSTNEKEEPSPYISSVLPGWFSEISPLWPGEAHSLKVEKILFQGKSDYQNVLVFQSSTYGKVLVLDGVIQLTERDECAYQEMITHLPLCSIPNPKKVLVIGGGDGGVLREVSRHSSVEQIDICEIDKMVVEVAKQFFPDVAVGYEDPRVNLRIGDGVAFLKNVPAGTYDAVIVDSSDPIGPAQELFEKPFFESIAKALRPGGVVATQAESIWLHMHIIEEIVANCRQIFKGSVNYAWTTVPTYPSGMIGFMLCSTEGPAVDFKNPINPIDDESPVKTIEPLKFYNSEIHQASFCLPSFAKRVIETKGK

SEQ ID NO: 155129 - DNA, 1116 bp, Nicotiana attenuata
  CDS (1)..(1116)
atggaagtcatatctaccaacacaaatggctctaccatcttcaagaatggtgccattcctatgaatggccaccagaatggcacttccaaacaccaaaatggcacttccgaacatccgaacggccaccagaatgggacttccgaacaccaaaacggccaccagaatgggacttccgaacaacagaacgggacaatcagccatgacaatggcaacaagctagtgggaaactccaactgtattaagcctggttggttttcagagtttagcgcattatggccaggtgaagcattctcacttaaggttgagaagttactattccaggggaagtctgattaccaagatgtcatgctctttgagtcagcaacttatgggaaggttctgactttggatggagcaattcaacacacagagaatggtggatttccatacactgaaatgattgttcatcttccacttggttccatccctaacccaaaaaaagttttgatcatcggcggaggaattggttttacattattcgaaatgcttcgttatccttcaatcgaaaaaattgacattgttgagatagatgacgtggtagttgatgtatccagaaaatttttcccttatctcgcagctaattttaacgatcctcgtgtaaccctagtcctcggagatggggctgcatttgtaaaggctgcacaagcagaatattatgatgctattatagtggactcttctgatcccattggtccagcaaaagatttgtttgagaggccattctttgaggcagtagcgaaagcccttaggccaggaggagttgtatgcacacaggctgaaagcatttggcttcatatgcatattattaagcaaatcattgctaactgtcgtcaagtctttaagggctctgtaaactatgcttggactactgttccaacttatcccactggtgtgatcggttatatgctctgctcaactgaagggccagaagttgacttcaagaatccagtgaatccaattgacaaagagacaactcaagtcaagcccaaattagcccctctcaagttctacaactctgatattcacaaagcagcattcattttgccatctttcgccagaagtatgatcgaatcataa

SEQ ID NO: 155130 - protein, 371 aa, Nicotiana attenuata
MEVISTNTNGSTIFKNGAIPMNGHQNGTSKHQNGTSEHPNGHQNGTSEHQNGHQNGTSEQQNGTISHDNGNKLVGNSNCIKPGWFSEFSALWPGEAFSLKVEKLLFQGKSDYQDVMLFESATYGKVLTLDGAIQHTENGGFPYTEMIVHLPLGSIPNPKKVLIIGGGIGFTLFEMLRYPSIEKIDIVEIDDVVVDVSRKFFPYLAANFNDPRVTLVLGDGAAFVKAAQAEYYDAIIVDSSDPIGPAKDLFERPFFEAVAKALRPGGVVCTQAESIWLHMHIIKQIIANCRQVFKGSVNYAWTTVPTYPTGVIGYMLCSTEGPEVDFKNPVNPIDKETTQVKPKLAPLKFYNSDIHKAAFILPSFARSMIES

SEQ ID NO: 155131 - DNA, 1167 bp, Nicotiana attenuata
  CDS (1)..(1167)
atggaagtcatatctaccaacacaaatggctctactatcttcaagaatggtgccattcccatgaacggctaccagaatggcacttctaaacaccaaaacggccaccagaatggcacttccgaacatcggaacggccaccagaatgggatttccgaacaccaaaacggccacaagaatggcacttccgagcatcagaacggccatcagaatgggacttccgaacaacagaacgggacaatcagccatgacaatggcaacgagctacagctactgggaagctccaactctattaagcctggttggttttcagagtttagcgcattatggccaggtgaagcattctcacttaaggttgagaagttactattccaggggaagtctgactaccaagatgtcatgctctttgagtcagcaacttatgggaaggttctgactttggatggagcaattcaacacacagagaatggtggatttccatacactgaaatgattgttcatctcccacttggttccatcccaaacccgaaaaaagttttgatcatcggcggaggaattggttttacattattcgaaatgcttcgttatccttcaatcgaaaaaattgacattgttgagattgatgacgtggtagttgatgtatccagaaaatttttcccttatctcgcagctaattttaacgatcctcgtgtaaccctagtcctcggagatggggctgcatttgtaaaggctgcacaagcaggatattatgatgctattatagtggactcttctgatcccattggtccagcaaaagacttgtttgagaggccattctttgaggcagtagcgaaagccctaaggccaggaggagttgtatgcacacaggctgaaagcatttggcttcatatgcatattattaagcaaatcatagctaactgtcgtcaagtctttaagggctctgtcaactatgcttggactactgttccaacatatcccactggtgtaattggttatatgctctgctctactgaagggccagaagttgacttcaaaaacccaataaatccaattgacaaagagacaactcaagtcaagtccaaattagcaccactgaagttctacaactttgatattcacaaagcagcattcattttgccatctttcgccagaagtatgatcgagtcttaa

SEQ ID NO: 155132 - protein, 388 aa, Nicotiana attenuata
MEVISTNTNGSTIFKNGAIPMNGYQNGTSKHQNGHQNGTSEHRNGHQNGISEHQNGHKNGTSEHQNGHQNGTSEQQNGTISHDNGNELQLLGSSNSIKPGWFSEFSALWPGEAFSLKVEKLLFQGKSDYQDVMLFESATYGKVLTLDGAIQHTENGGFPYTEMIVHLPLGSIPNPKKVLIIGGGIGFTLFEMLRYPSIEKIDIVEIDDVVVDVSRKFFPYLAANFNDPRVTLVLGDGAAFVKAAQAGYYDAIIVDSSDPIGPAKDLFERPFFEAVAKALRPGGVVCTQAESIWLHMHIIKQIIANCRQVFKGSVNYAWTTVPTYPTGVIGYMLCSTEGPEVDFKNPINPIDKETTQVKSKLAPLKFYNFDIHKAAFILPSFARSMIES

SEQ ID NO: 155133 - DNA, 1080 bp, Arabidopsis thaliana
  CDS (1)..(1080)
atggagggagacgtcggaataggtttggtatgccagaatactatggatgggaaggcgagtaatggaaatggtttagagaagactgtaccttcttgttgccttaaggctatggcatgtgtacctgaggatgatgctaagtgtcactccactgttgtttctgggtggttttcggaacctcaccctcgctctgggaaaaaaggcggcaaagcagtctatttcaacaaccctatgtggccaggagaagcacactcactgaaagttgagaaagttctgttcaaagacaagtcggattttcaggaagtcctagtgttcgagtcagccacgtacggaaaggtgcttgttctagatggtatcgtacagctgaccgaaaaagatgaatgtgcatatcaggagatgatagcccatctgcctttatgctctatatcttcccctaaaaatgttcttgttgttggtggaggtgatggtggtgttcttcgagagatttctcgccatagttctgttgaggttattgatatctgtgagatagacaagatggttatagatgtgtctaagaagttcttccccgagttagcggttgggtttgacgatcctcgtgttcaacttcacattggtgatgctgctgagttcctccgtaaatcccctgaagggaagtatgatgccatcattgttaattcttcagatcccgtaggtcctgctcttgcgcttgttgagaagcctttcttcgagacactggctagagcgttgaagcctgggggagttctttgtaacatggcagaaagtatgtggctccatactcatcttattgaagatatgatctccatttgccgtcaaacattcaaaagtgttcactatgcgtggagcagcgtccccacatatccaagcggcgtgattggtttcgtcttgtgctctactgaaggaccagctgttgacttcaagaacccaatcaaccctattgagaaactagacggtgcgatgacccataaaagagaattgaagttctataactctgatatgcacagagccgcatttgctttgcccacattcctgcggagagaagtagcttcacttctggcttcttga

SEQ ID NO: 155134 - protein, 359 aa, Arabidopsis thaliana
MEGDVGIGLVCQNTMDGKASNGNGLEKTVPSCCLKAMACVPEDDAKCHSTVVSGWFSEPHPRSGKKGGKAVYFNNPMWPGEAHSLKVEKVLFKDKSDFQEVLVFESATYGKVLVLDGIVQLTEKDECAYQEMIAHLPLCSISSPKNVLVVGGGDGGVLREISRHSSVEVIDICEIDKMVIDVSKKFFPELAVGFDDPRVQLHIGDAAEFLRKSPEGKYDAIIVNSSDPVGPALALVEKPFFETLARALKPGGVLCNMAESMWLHTHLIEDMISICRQTFKSVHYAWSSVPTYPSGVIGFVLCSTEGPAVDFKNPINPIEKLDGAMTHKRELKFYNSDMHRAAFALPTFLRREVASLLAS

SEQ ID NO: 155135 - DNA, 1032 bp, Arabidopsis thaliana
  CDS (1)..(1032)
atggagggagacgtcggaataggtttggtatgccagaatactatggatgggaaggcgagtaatggaaatggtttagagaagactgtaccttcttgttgccttaaggctatggcatgtgtacctgaggatgatgctaagtgtcactccactgttgtttctgggtggttttcggaacctcaccctcgctctggagaagcacactcactgaaagttgagaaagttctgttcaaagacaagtcggattttcaggaagtcctagtgttcgagtcagccacgtacggaaaggtgcttgttctagatggtatcgtacagctgaccgaaaaagatgaatgtgcatatcaggagatgatagcccatctgcctttatgctctatatcttcccctaaaaatgttcttgttgttggtggaggtgatggtggtgttcttcgagagatttctcgccatagttctgttgaggttattgatatctgtgagatagacaagatggttatagatgtgtctaagaagttcttccccgagttagcggttgggtttgacgatcctcgtgttcaacttcacattggtgatgctgctgagttcctccgtaaatcccctgaagggaagtatgatgccatcattgttgattcttcagatcccgtaggtcctgctcttgcgcttgttgagaagcctttcttcgagacactggctagagcgttgaagcctgggggagttctttgtaacatggcagaaagtatgtggctccatactcatcttattgaagatatgatctccatttgccgtcaaacattcaaaagtgttcactatgcgtggagcagcgtccccacatatccaagcggcgtgattggtttcgtcttgtgctctactgaaggaccagctgttgacttcaagaacccaatcaaccctattgagaaactagacggtgcgatgacccataaaagagaattgaagttctataactctgatatgcacagagccgcatttgctttgcccacattcctgcggagagaagtagcttcacttctggcttcttga

SEQ ID NO: 155136 - protein, 343 aa, Arabidopsis thaliana
MEGDVGIGLVCQNTMDGKASNGNGLEKTVPSCCLKAMACVPEDDAKCHSTVVSGWFSEPHPRSGEAHSLKVEKVLFKDKSDFQEVLVFESATYGKVLVLDGIVQLTEKDECAYQEMIAHLPLCSISSPKNVLVVGGGDGGVLREISRHSSVEVIDICEIDKMVIDVSKKFFPELAVGFDDPRVQLHIGDAAEFLRKSPEGKYDAIIVDSSDPVGPALALVEKPFFETLARALKPGGVLCNMAESMWLHTHLIEDMISICRQTFKSVHYAWSSVPTYPSGVIGFVLCSTEGPAVDFKNPINPIEKLDGAMTHKRELKFYNSDMHRAAFALPTFLRREVASLLAS

SEQ ID NO: 155137 - DNA, 1011 bp, Atropa belladonna
  CDS (1)..(1011)
atggaggtcaaccacaacaatggcagcaccaccaaaattatcctgaaaaatggcagtatttgcaatggcgatgttaatggcaactcccacacccataagaaaattgagaataagcttgtagagtgtactaactctatcaagcctggttggttttctgagtttagcgcactatggccaggtgaagcattttcacttaaaattgaaaagttactctttcaaggaaagtctgattatcaagatgtcatgctctttgagtcagcaacttatgggaaggtgttaacattggatggggcaattcaacatacagagaatggtggatttccatacactgagatgattgttcatctcccacttggttccattccatcccccaagaaggttttaatcatcggtggagggattggtttcacattgtttgaggtctctcgttacccaactatcgacacaatagacatagttgagatcgatgacgtggttgtagatgtatctagaaagtatttcccgtacttagcagcaggattcgatgatcccagagtaacccttattattggcgatggagctgcattcgtgaaagctgctcaacctggatactatgatgccattattgtggactcttctgatcctattggtccagcaaaagacttgtttgaaaggccattcttcgaagcagtggcgaaagcgctaaggccaggaggagtagtgtgtacacaagcagagagcatttggcttcacatgcatcttattaagcaaattattgctaattgtcgccaagtgtttaagggttctgtcaactatgcatggactacagttcctacttaccctactggtgttatcggttacatgctttgctctacggagggaccagaagttaatttcaagaatccagtgaactctattgacaaagataccagccatgtcaaatccaagggacctttgaagttctacaactctgatattcataaagcagcttttattttgccatctttcgcgagggatttggttgagttttga

SEQ ID NO: 155138 - protein, 336 aa, Atropa belladonna
MEVNHNNGSTTKIILKNGSICNGDVNGNSHTHKKIENKLVECTNSIKPGWFSEFSALWPGEAFSLKIEKLLFQGKSDYQDVMLFESATYGKVLTLDGAIQHTENGGFPYTEMIVHLPLGSIPSPKKVLIIGGGIGFTLFEVSRYPTIDTIDIVEIDDVVVDVSRKYFPYLAAGFDDPRVTLIIGDGAAFVKAAQPGYYDAIIVDSSDPIGPAKDLFERPFFEAVAKALRPGGVVCTQAESIWLHMHLIKQIIANCRQVFKGSVNYAWTTVPTYPTGVIGYMLCSTEGPEVNFKNPVNSIDKDTSHVKSKGPLKFYNSDIHKAAFILPSFARDLVEF

SEQ ID NO: 155139 - DNA, 1023 bp, Atropa belladonna
  CDS (1)..(1023)
atggctttccgcaatggcagcaccaccaccaccatcactaccataaaccacccgaatgacgcttcaactatccctaaaaatggcaccaacatcaccactactctacttaaaaatggcagcactaacgagttcgggtgtattaagcccgggtggttctcggagtttagccaattgtggcccggcgaagcattctcacttaaaattgagaagttactattccaagggaagtctgattatcaagatgttatgctctttgagtcagcaacttatgggaaggttctaacattggatggagcaattcaacacacagagaatggtggatttccatatactgaaatgattgttcatctcccacttggttccatcccaagcccaaaaaaggtgttgattatcggtggaggaattggttttacattattcgaagtgtttcgttaccctacaatcgaaaacatagacatagttgagattgataatgttgtagtcgatgtatccagaaaattcttcccttacctggcagctggttttgatgatcctcgtgtaacactggttcttggtgatggggctgcatttgtgaaggctgcacaagcaggatattatgatgcaattatagtggattcttctgatcctattggtccagcaaaagatttgtttgagaggccattttttgaagcagtagccaaggctcttaggccaggaggagttgtatgcacacaggctgaaagcatatggcttcatatgcatattattaaacaaattattgataactgccgtcaagtctttaagggttctgtcaactatgcttggactactgttccaacctatccaacaggggtaattggttatatgctttgctctactaaaggaccacaagttgacttcaggaatccagtcaatccaattgacaaaaagacttctcatatcaaatccaaaggacctttgaagttctacaattctgatattcataaagcagcttttattttgccatcgttcgcaaggaatttgatggagtctgaattagattaa

SEQ ID NO: 155140 - protein, 340 aa, Atropa belladonna
MAFRNGSTTTTITTINHPNDASTIPKNGTNITTTLLKNGSTNEFGCIKPGWFSEFSQLWPGEAFSLKIEKLLFQGKSDYQDVMLFESATYGKVLTLDGAIQHTENGGFPYTEMIVHLPLGSIPSPKKVLIIGGGIGFTLFEVFRYPTIENIDIVEIDNVVVDVSRKFFPYLAAGFDDPRVTLVLGDGAAFVKAAQAGYYDAIIVDSSDPIGPAKDLFERPFFEAVAKALRPGGVVCTQAESIWLHMHIIKQIIDNCRQVFKGSVNYAWTTVPTYPTGVIGYMLCSTKGPQVDFRNPVNPIDKKTSHIKSKGPLKFYNSDIHKAAFILPSFARNLMESELD

SEQ ID NO: 155141 - DNA, 1293 bp, Nicotiana sylvestris
  CDS (1)..(1293)
atggaagtcatatctaccaacacaaatggctcgaccatcttcaagaatggtgccattcccatgaatggccaccagagtggcacttccaaacacctcaacggctaccagaacggcacttccaaacaccaaaacggccaccataatggcacttccgaacatcggaacggccaccagaatgggatttccgaacaccaaaacggccaccagaatgggacttccgaacatcggaacggccaccagaatgggacttccgaacatcggaacggccaccagaatgggatttccgaacaccaaaacggccaccagaatgggacttccgaacaccaaaacggccaccagaatgggacttccgaacaacagaacgggacaatcagccatgacaatggcaacgagctactgggaaactccaactctattaagcttggttggttttcagagtttagcgcattatggccaggtgaagcattctcccttaaggttgagaagttactatttcaggggaagtctgactaccaagatgtcatgctctttgagtcagcaacatatgggaaggttttgactttggatggagcaattcaacacacagagaatggtggatttccatacactgaaatgattgttcatcttccacttggttccatcccaaacccaaaaaaggttttgatcatcggcggaggaattggttttacattattcgaaatgcttcgttatcctacaatcgaaaaaattgacattgttgaaatcgatgacgtggtagttgatgtatctagaaaatttttcccttatctcgcagctaattttaatgatcctcgtgtaaccctcgttctcggagatggggctgcatttgtaaaggctgcacaagcaggatattatgatgctattatagtggactcttctgatcccattggtccagcaaaagatttgtttgagaggccattctttgaggcagtagccaaagccctaaggccaggaggagttgtatgcacacaggccgaaagcatttggcttcatatgcatattattaagcaaatcattgctaactgtcgtcaagtctttaagggctctgtcaactacgcttggactactgttccaacatatcccactggtgtaattgggtatatgctctgctctactgaagggccagaagttgacttcaagaatccaataaatccaattgacaaagagacaactcaagtcaagtccaaattagcacctctcaagttttacaattctgatattcacaaagcagcattcattttgccatctttcgccagaagtatgatcgagtcttaa

SEQ ID NO: 155142 - protein, 430 aa, Nicotiana sylvestris
MEVISTNTNGSTIFKNGAIPMNGHQSGTSKHLNGYQNGTSKHQNGHHNGTSEHRNGHQNGISEHQNGHQNGTSEHRNGHQNGTSEHRNGHQNGISEHQNGHQNGTSEHQNGHQNGTSEQQNGTISHDNGNELLGNSNSIKLGWFSEFSALWPGEAFSLKVEKLLFQGKSDYQDVMLFESATYGKVLTLDGAIQHTENGGFPYTEMIVHLPLGSIPNPKKVLIIGGGIGFTLFEMLRYPTIEKIDIVEIDDVVVDVSRKFFPYLAANFNDPRVTLVLGDGAAFVKAAQAGYYDAIIVDSSDPIGPAKDLFERPFFEAVAKALRPGGVVCTQAESIWLHMHIIKQIIANCRQVFKGSVNYAWTTVPTYPTGVIGYMLCSTEGPEVDFKNPINPIDKETTQVKSKLAPLKFYNSDIHKAAFILPSFARSMIES

SEQ ID NO: 155143 - DNA, 1062 bp, Nicotiana sylvestris
  CDS (1)..(1062)
atggaagtcatatctaccaacacaaatggctctaccatcttcaagagtggtgccattcccatgaatggccaccagaatggcacttccaaacaccaaaacggccacaagaatgggacttccgaagaacagaacgggacaatcagccatgataatggcaacgagctactgggaaactccaattgtattaagcctggttggttttcagagtttagcgcattatggccaggtgaagcattctcacttaaggttgagaagttactgttccaggggaagtctgactaccaagatgtcatgctctttgagtcagcaacttatgggaaggttctgactttggatggagcaattcaacacacagagaatggtggatttccatacactgaaatgattgttcatcttccacttggttccatcccaaacccaaaaaaggttttgatcatcggcggaggaattggttttacattattcgaaatgcttcgttatcctacaatcgaaaaaattgacattgttgagatcgatgacgtggtagttgatgtatctagaaaatttttcccttatctcgctgctaattttaacgatcctcgtgtaaccctagtccttggagatggggctgcatttgtaaaggctgcacaagcagaatattatgatgctattatagtggactcttctgatcccattggtccagcaaaagatttgtttgagaggccattctttgaggcagtagctaaagccctaaggccaggaggagttgtatgcacacaggctgaaagcatttggcttcatatgcatattattaagcaaatcattgctaactgtcgtcaagtctttaagggctctgtcaactatgcttggactactgttccaacatatccaaccggtgtgattggttatatgctctgctctactgaaggaccagaaattgacttcaagaatccagtaaatccaattgacaaagagacagctcaagtcaagtccaaattagcacctctcaagttctacaactctgatattcacaaagcagcattcattttgccatctttcgccagaagtatgatcgagtcttaa

SEQ ID NO: 155144 - protein, 353 aa, Nicotiana sylvestris
MEVISTNTNGSTIFKSGAIPMNGHQNGTSKHQNGHKNGTSEEQNGTISHDNGNELLGNSNCIKPGWFSEFSALWPGEAFSLKVEKLLFQGKSDYQDVMLFESATYGKVLTLDGAIQHTENGGFPYTEMIVHLPLGSIPNPKKVLIIGGGIGFTLFEMLRYPTIEKIDIVEIDDVVVDVSRKFFPYLAANFNDPRVTLVLGDGAAFVKAAQAEYYDAIIVDSSDPIGPAKDLFERPFFEAVAKALRPGGVVCTQAESIWLHMHIIKQIIANCRQVFKGSVNYAWTTVPTYPTGVIGYMLCSTEGPEIDFKNPVNPIDKETAQVKSKLAPLKFYNSDIHKAAFILPSFARSMIES

SEQ ID NO: 155145 - DNA, 1128 bp, Nicotiana tabacum
  CDS (1)..(1128)
atggaagtcatatctaccaacacaaatggctctaccatcttcaagaatggtgccattcccatgaacggccaccaaaatggcacttctgaacacctcaacggctaccagaatggcacttccaaacaccaaaacgggcaccagaatggcactttcgaacatcggaacggccaccagaatgggacatccgaacaacagaacgggacaatcagccatgacaatggcaacgagctactgggaagctccgactctattaagcctggctggttttcagagtttagcgcattatggccaggtgaagcattctcacttaaggttgagaagttactattccaggggaagtctgattaccaagatgtcatgctctttgagtcagcaacttatgggaaggttctgactttggatggagcaattcaacatacagagaatggtggatttccatacactgaaatgattgttcatctaccacttggttccatcccaaacccaaaaaaggttttgatcatcggcggaggaattggttttacattattcgaaatgcttcgttatccttcaatcgaaaaaattgacattgttgagatcgatgacgtggtagttgatgtatccagaaaatttttcccttatctggcagctaattttaacgatcctcgtgtaaccctagttctcggagatggagctgcatttgtaaaggctgcacaagcgggatattatgatgctattatagtggactcttctgatcccattggtccagcaaaagatttgtttgagaggccattctttgaggcagtagccaaagcccttaggccaggaggagttgtatgcacacaggctgaaagcatttggcttcatatgcatattattaagcaaatcattgctaactgtcgtcaagtctttaagggttctgtcaactatgcttggacaaccgctccaacatatcccaccggtgtgatcggttatatgctctgctctactgaagggccagaagttgacttcaagaatccagtaaatccaattgacaaagagacaactcaagtcaagtccaaattaggacctctcaagttctacaactctgatattcacaaagcagcattcattttaccatctttcgccagaagtatgatcgagtcttaa

SEQ ID NO: 155146 - protein, 375 aa, Nicotiana tabacum
MEVISTNTNGSTIFKNGAIPMNGHQNGTSEHLNGYQNGTSKHQNGHQNGTFEHRNGHQNGTSEQQNGTISHDNGNELLGSSDSIKPGWFSEFSALWPGEAFSLKVEKLLFQGKSDYQDVMLFESATYGKVLTLDGAIQHTENGGFPYTEMIVHLPLGSIPNPKKVLIIGGGIGFTLFEMLRYPSIEKIDIVEIDDVVVDVSRKFFPYLAANFNDPRVTLVLGDGAAFVKAAQAGYYDAIIVDSSDPIGPAKDLFERPFFEAVAKALRPGGVVCTQAESIWLHMHIIKQIIANCRQVFKGSVNYAWTTAPTYPTGVIGYMLCSTEGPEVDFKNPVNPIDKETTQVKSKLGPLKFYNSDIHKAAFILPSFARSMIES

SEQ ID NO: 155147 - DNA, 1062 bp, Nicotiana tabacum
  CDS (1)..(1062)
atggaagtcatatctaccaacacaaatggctctaccatcttcaagagtggtgccattcccatgaatggccaccataatggcacttccaaacaccaaaacggccacaagaatgggacttccgaacaacagaacgggacaatcagccttgataatggcaacgagctactgggaaactccaattgtattaagcctggttggttttcagagtttagcgcattatggccaggtgaagcattctcacttaaggttgagaagttactgttccaggggaagtctgactaccaagatgtcatgctctttgagtcagcaacttatgggaaggttctgactttggatggagcaattcaacacacagagaatggtggatttccatacactgaaatgattgttcatcttccacttggttccatcccaaacccaaaaaaggttttgatcatcggcggaggaattggttttacattattcgaaatgcttcgttatcctacaatcgaaaaaattgacattgttgagatcgatgacgtggtagttgatgtatctagaaaatttttcccttatctcgctgctaattttaacgatcctcgtgtaaccctagtccttggagatggggctgcatttgtaaaggctgcacaagcagaatattatgatgctattatagtggactcttctgatcccattggtccagcaaaagatttgtttgagaggccattctttgaggcagtagctaaagccctaaggccaggaggagttgtatgcacacaggctgaaagcatttggcttcatatgcatattattaagcaaatcattgctaactgtcgtcaagtctttaagggctctgtcaactatgcttggactactgttccaacatatccaaccggtgtgattggttatatgctctgctctactgaaggaccagaaattgacttcaagaatccagtaaatccaattgacaaagagacagctcaagtcaagtccaaattagcacctctcaagttctacaactctgatattcacaaagcagcattcattttgccatctttcgccagaagtatgatcgagtcttaa

SEQ ID NO: 155148 - protein, 353 aa, Nicotiana tabacum
MEVISTNTNGSTIFKSGAIPMNGHHNGTSKHQNGHKNGTSEQQNGTISLDNGNELLGNSNCIKPGWFSEFSALWPGEAFSLKVEKLLFQGKSDYQDVMLFESATYGKVLTLDGAIQHTENGGFPYTEMIVHLPLGSIPNPKKVLIIGGGIGFTLFEMLRYPTIEKIDIVEIDDVVVDVSRKFFPYLAANFNDPRVTLVLGDGAAFVKAAQAEYYDAIIVDSSDPIGPAKDLFERPFFEAVAKALRPGGVVCTQAESIWLHMHIIKQIIANCRQVFKGSVNYAWTTVPTYPTGVIGYMLCSTEGPEIDFKNPVNPIDKETAQVKSKLAPLKFYNSDIHKAAFILPSFARSMIES

SEQ ID NO: 155149 - DNA, 1146 bp, Nicotiana tabacum
  CDS (1)..(1146)
atggaagtcatatctaccaacacaaatggctctactatcttcaagaatggtgccattcccatgaacggttaccagaatggcacttccaaacaccaaaacggccaccagaatggcacttccgaacatcggaacggccaccagaatgggatttccgaacaccaaaacggccaccagaatggcacttccgagcatcagaacggccatcagaatgggacaatcagccatgacaacggcaacgagctacagctactgggaagctccaactctattaagcctggttggttttcagagtttagcgcattatggccaggtgaagcattctcacttaaggttgagaagttactattccaggggaagtctgattaccaagatgtcatgctctttgagtcagcaacatatgggaaggttctgactttggatggagcaattcaacacacagagaatggtggatttccatacactgaaatgattgttcatcttccacttggttccatcccaaaccctaaaaaggttttgatcatcggcggaggaattggttttacattattcgaaatgcttcgttatcctacaatcgaaaaaattgacattgttgagatcgatgacgtggtagttgatgtatctagaaaatttttcccttatcttgctgctaattttagcgatcctcgtgtaaccctagtccttggagatggggctgcatttgtaaaggccgcacaagcaggatattatgatgctattatagtggactcttctgatcccattggtccagcaaaagacttgtttgagaggccattctttgaggcagtagccaaagccctaaggccaggaggagttgtatgcacacaggctgaaagcatttggcttcatatgcatattattaagcaaatcattgctaactgtcgtcaagtctttaagggctctgtcaactatgcttggactactgttccaacatatccaaccggtgtgattggttatatgctctgttctactgaaggaccagaagttgacttcaagaatccagtaaatccaattgacaaagagacaactcaagtcaagtccaaattagcacctctcaagttctacaactctgatattcacaaagcagcattcattttgccatctttcgccagaagtatgatcgagtcttaa

SEQ ID NO: 155150 - protein, 381 aa, Nicotiana tabacum
MEVISTNTNGSTIFKNGAIPMNGYQNGTSKHQNGHQNGTSEHRNGHQNGISEHQNGHQNGTSEHQNGHQNGTISHDNGNELQLLGSSNSIKPGWFSEFSALWPGEAFSLKVEKLLFQGKSDYQDVMLFESATYGKVLTLDGAIQHTENGGFPYTEMIVHLPLGSIPNPKKVLIIGGGIGFTLFEMLRYPTIEKIDIVEIDDVVVDVSRKFFPYLAANFSDPRVTLVLGDGAAFVKAAQAGYYDAIIVDSSDPIGPAKDLFERPFFEAVAKALRPGGVVCTQAESIWLHMHIIKQIIANCRQVFKGSVNYAWTTVPTYPTGVIGYMLCSTEGPEVDFKNPVNPIDKETTQVKSKLAPLKFYNSDIHKAAFILPSFARSMIES

SEQ ID NO: 155151 - DNA, 1260 bp, Nicotiana tabacum
  CDS (1)..(1260)
atggaagtcatatctaccaacacaaatggctcgaccatcttcaagaatggtgccattcccatgaatggccaccagagtggcacttccaaacacctcaacggctaccagaacggcacttccaaacaccaaaacggccaccataatggcacttccgaacatcggaacggccaccagaatgggatttccgaacaccaaaacggccaccagaatgggacttccgaacatcggaacggccaccagaatgggatttccgaacaccaaaacggccaccagaatgggacttccgaacaccaaaacggccaccagaatgggacttccgaacaacagaacgggacaatcagccatgacaatggcaacgagctactgggaaactccaactctattaagcttggttggttttcagagtttagcgcattatggccaggtgaagcattctcccttaaggttgagaagttactatttcaggggaagtctgactaccaagatgtcatgctctttgagtcagcaacatatgggaaggttttgactttggatggagcaattcaacacacagagaatggtggatttccatacactgaaatgattgttcatcttccacttggttccatcccaaacccaaaaaaggttttgatcatcggcggaggaattggttttacattattcgaaatgcttcgttatcctacaatcgaaaaaattgacattgttgaaatcgatgacgtggtagttgatgtatctagaaaatctttcccttatctcgcagctaattttaatgatcctcgtgtaaccctcgttctcggagatggggctgcatttgtaaaggctgcacaagcaggatattatgatgctattatagtggactcttctgatcccattggtccagcaaaagatttgtttgagaggccattctttgaggcagtagccaaagccctaaggccaggaggagttgtatgcacacaggccgaaagcatttggcttcatatgcatattattaagcaaatcattgctaactgtcgtcaagtctttaagggctctgtcaactacgcttggactactgttccaacatatcccactggtgtaattgggtatatgctctgctctactgaagggccagaagttgacttcaagaatccaataaatccaattgacaaagagacaactcaagtcaagtccaaattagcacctctcaagttttacaattctgatattcacaaagcagcattcattttgccatctttcgccagaagtatgatcgagtcttaa

SEQ ID NO: 155152 - protein, 419 aa, Nicotiana tabacum
MEVISTNTNGSTIFKNGAIPMNGHQSGTSKHLNGYQNGTSKHQNGHHNGTSEHRNGHQNGISEHQNGHQNGTSEHRNGHQNGISEHQNGHQNGTSEHQNGHQNGTSEQQNGTISHDNGNELLGNSNSIKLGWFSEFSALWPGEAFSLKVEKLLFQGKSDYQDVMLFESATYGKVLTLDGAIQHTENGGFPYTEMIVHLPLGSIPNPKKVLIIGGGIGFTLFEMLRYPTIEKIDIVEIDDVVVDVSRKSFPYLAANFNDPRVTLVLGDGAAFVKAAQAGYYDAIIVDSSDPIGPAKDLFERPFFEAVAKALRPGGVVCTQAESIWLHMHIIKQIIANCRQVFKGSVNYAWTTVPTYPTGVIGYMLCSTEGPEVDFKNPINPIDKETTQVKSKLAPLKFYNSDIHKAAFILPSFARSMIES

SEQ ID NO: 155153 - DNA, 1005 bp, Arabidopsis thaliana
  CDS (1)..(1005)
atggacgctaaagaaacctctgccaccgatttgaaaagaccgagagaagaggatgataacggcggcgccgctaccatggagacggagaacggagatcagaaaaaggaacctgcttgtttctccactgttattcctgggtggttctctgaaatgagtcctatgtggccaggagaggcacactcattgaaggttgagaaagttttgtttcaagggaaatcagattatcaggatgttattgttttccagtctgcaacatatggaaaagttttggttttggatggagtaatccaacttacggagagagatgaatgtgcttatcaggaaatgatcactcatcttcctttgtgttctatccctaaccctaagaaggttttggtcattggaggaggagatggaggtgtcctgcgggaagttgcacgccatgcttctattgagcagattgacatgtgtgaaattgataaaatggtggtcgacgtgtctaagcaatttttccctgatgtagcaattggatatgaggatcctcgcgtgaaccttgtcattggcgatggtgttgctttcttgaagaatgctgctgaaggatcatacgatgcagttattgttgactcttcagatccaatcggtcctgcaaaggagctgtttgagaaacccttcttccaatctgtggctagagctcttcgtcctggtggagttgtgtgcactcaagctgaaagcttgtggcttcacatggacatcatcgaagacattgtttccaactgccgtgagatcttcaagggttctgtgaactatgcttggaccagcgttccaacataccccagtggggtcattggatttatgctttgttcaactgaaggacctgatgttgacttcaaacacccactgaacccaattgacgagagctccagcaaatcaaatggacctttgaagttttacaatgccgagattcattcagctgcattctgcttgccttctttcgccaagaaggtcattgagtcaaaagccaattga

SEQ ID NO: 155154 - protein, 334 aa, Arabidopsis thaliana
MDAKETSATDLKRPREEDDNGGAATMETENGDQKKEPACFSTVIPGWFSEMSPMWPGEAHSLKVEKVLFQGKSDYQDVIVFQSATYGKVLVLDGVIQLTERDECAYQEMITHLPLCSIPNPKKVLVIGGGDGGVLREVARHASIEQIDMCEIDKMVVDVSKQFFPDVAIGYEDPRVNLVIGDGVAFLKNAAEGSYDAVIVDSSDPIGPAKELFEKPFFQSVARALRPGGVVCTQAESLWLHMDIIEDIVSNCREIFKGSVNYAWTSVPTYPSGVIGFMLCSTEGPDVDFKHPLNPIDESSSKSNGPLKFYNAEIHSAAFCLPSFAKKVIESKAN

SEQ ID NO: 155155 - DNA, 927 bp, Datura stramonium
  CDS (1)..(927)
atggaagaagccaataacaaagaatctccttacatttcttctatcttacctggatggttctctgagattagcccactttggcctggggaagcacactcattgaaggttgaaaagatattatttcaggggaagtcagattaccaaaatgtgatggtttttcagtcatcaacttatggaaaagtgcttattttggatggtgtgatacaactcacagagcgggatgaatgtgcttaccaagaaatgatcactcatctcccactttgctcaattccaaaccccaaaaaggtgttggttattggaggaggtgatggtggtgtcttgcgtgaggtgtctcggcattcttctgttgaacagatagacatatgtgagattgacaagatggtaattgatgtctccaaacaatttttccctaatgtagctataggatatgaggatccccgagttaaactccatgttggtgatggagttgcatttttgaaatttgttgcagaaggaacttatgatgcagttatagtggattcctctgaccccataggtccagcccaagagttgttcgaaaagcctttttttgaatcagtagcaagggctctgcgtcccggaggggttgtctgtacgcaggcggagagcatatggcttcacatgcatataattgaagatatcgtggcaaactgccgccagatcttcaaaggctcagtcaactatgcctggaccacagttcctacttatccaagtggtgttattggtttcatgctctgctctactgagggacctgcggttgatttcaagaatccaattaacccagtcgatgctgatgatagccacaccaaaactagaggacccttgaagttctacaactctgagattcactctgcatcgttctgtttgccatcttttgcgaagagggtgattgaatccaaaggaaaatga

SEQ ID NO: 155156 - protein, 308 aa, Datura stramonium
MEEANNKESPYISSILPGWFSEISPLWPGEAHSLKVEKILFQGKSDYQNVMVFQSSTYGKVLILDGVIQLTERDECAYQEMITHLPLCSIPNPKKVLVIGGGDGGVLREVSRHSSVEQIDICEIDKMVIDVSKQFFPNVAIGYEDPRVKLHVGDGVAFLKFVAEGTYDAVIVDSSDPIGPAQELFEKPFFESVARALRPGGVVCTQAESIWLHMHIIEDIVANCRQIFKGSVNYAWTTVPTYPSGVIGFMLCSTEGPAVDFKNPINPVDADDSHTKTRGPLKFYNSEIHSASFCLPSFAKRVIESKGK

SEQ ID NO: 155157 - DNA, 948 bp, Hyoscyamus niger
  CDS (1)..(948)
atggaagtaaccaatcaaagtaatggttgcagcaataatgagaaagagtctccttatatctcttctgttctacctggatggttctctgagattagccccctttggcctggggaagcacactccttgaaggttgagaagatattgtttcagggaaaatctgactaccaaaatgtcatggttttccagtcatcaacttatggaaaggtgcttgttttggatggtgtgatccaacttaccgagagggatgaatgtgcttaccaagagatgatcactcatctccctctttgttcaattcccaaccccaaaaaggtgctggttattggaggaggagatggtggagtcttgcgtgaggtatcccgtcattcttctgtcgaacagatcgacatatgtgagattgacaagatggtagttgaggttgctaaagaatttttcccagatgtagctgtaggatatgaggatccacgtgtgaatctccacattggtgatggagttgcatttttgaaaaatgttcctgcaggaacttacgatgctgtcatagtggattcatctgaccctataggtccagcacaagaattgtttgaaaagcctttctttgaatctatagcaagagctcttcgtccaggaggggttgtatctacacaggctgagagcatatggcttcacatgcacataattgaagaaattgttgctaattgccgccagatcttcaaaggctctgtcaactatgcatggactactgttcctacttatccgagtggcatgattggtttcatgctttgctctactgagggacctgcagttgatttcaagaaccctattaatcccatcgatgatgaaagcgggcccaaaaccattgcacctttgaagttctacaattctgagattcaccaagcatcgttctgtttgccatcatttgccaagagggtgatcgaatccaaaggaaaatga

SEQ ID NO: 155158 - protein, 315 aa, Hyoscyamus niger
MEVTNQSNGCSNNEKESPYISSVLPGWFSEISPLWPGEAHSLKVEKILFQGKSDYQNVMVFQSSTYGKVLVLDGVIQLTERDECAYQEMITHLPLCSIPNPKKVLVIGGGDGGVLREVSRHSSVEQIDICEIDKMVVEVAKEFFPDVAVGYEDPRVNLHIGDGVAFLKNVPAGTYDAVIVDSSDPIGPAQELFEKPFFESIARALRPGGVVSTQAESIWLHMHIIEEIVANCRQIFKGSVNYAWTTVPTYPSGMIGFMLCSTEGPAVDFKNPINPIDDESGPKTIAPLKFYNSEIHQASFCLPSFAKRVIESKGK

SEQ ID NO: 155159 - DNA, 1005 bp, Pisum sativum
  CDS (1)..(1005)
atggcggcaccagaaaacacacttcattccacagattctcccttaaagaggcaaagagaagatgaagtgaacggtgtctccgatactctctccaaagaaccccagcctaatggtttatcatctgttattcctggatggttctctgaaattagcccaatgtggccaggggaagcacactccttgaaagtggaaaaaattttgtttcaaggaaagtctgattatcaggatgttatggtcttccagtcagcgacatatggcaaggttcttattttggatggagtcattcagctcacagaaagagatgagtgtgcctaccaagagatgatcactcatcttcctctttgctctattccaaaccccaaaaaggttttggttattggtggaggagacgggggagtcctgcgggaagttgcacgccactcttcagtcgaaaagatagacatttgcgaaatagacaagatggttgtcgatgtctccaaagaatatttccctgatatagcagtaggttttgcggatccacgtgtgacacttaatatcggtgatggagttgcatttttgaaggcagctccagaaggaacttatgatgcagttatagtggattcatctgatcctattggccctgctcaagagctttttgaaaagcccttttttgagtcggttgcaagggctcttcgtccaggaggagttgtgtgtactcaagcggaaagtatatggcttcatatgcacatcattgaggacattgtggtgaactgccgccaggtattcaaagggtctgtcaactatgcttggaccacagttcctacatacccaagtgggatgattggttttatgctttgctcaaccgagggaccttccgttgatttcaagcatccggtgaatcctattgatgagaatgatagccagcaggcggcacgaccattgaaattttacaaccgtgagattcattcagcagccttctgtttgccatcttttgccaagagggcaattgcttctaaagaaaattaa

SEQ ID NO: 155160 - protein, 334 aa, Pisum sativum
MAAPENTLHSTDSPLKRQREDEVNGVSDTLSKEPQPNGLSSVIPGWFSEISPMWPGEAHSLKVEKILFQGKSDYQDVMVFQSATYGKVLILDGVIQLTERDECAYQEMITHLPLCSIPNPKKVLVIGGGDGGVLREVARHSSVEKIDICEIDKMVVDVSKEYFPDIAVGFADPRVTLNIGDGVAFLKAAPEGTYDAVIVDSSDPIGPAQELFEKPFFESVARALRPGGVVCTQAESIWLHMHIIEDIVVNCRQVFKGSVNYAWTTVPTYPSGMIGFMLCSTEGPSVDFKHPVNPIDENDSQQAARPLKFYNREIHSAAFCLPSFAKRAIASKEN

SEQ ID NO: 155161 - DNA, 954 bp, Datura stramonium
  CDS (1)..(954)
atggaggtggccaaccacaacaacaacaacaacggttgcaccaatgacaaagagtctccttgtatctcttctgttctacctggatggttctccgagattagccccctctggcctggggaagcacactcgttgaaggttgagaagatattgtttcaggggaagtctgattaccaagatgtcatggtttttcagtcaacaacttatggaaaggtgcttgttttggatggtgtgatccaacttaccgagagggatgaatgtgcttaccaagagatgatcactcatcttcctctttgttcaattcccaaccccaaaaaggtgctggtcattggaggaggagatggcggtgtcttgcgtgaggtatcccgtcattcttctgtcgaacagattgacatatgtgagattgacaagatggtagttgaggttgctaaacaatttttcccagatgtagctgtaggatatgaggatccacgtgtgaatctccacattggtgatggagttgcttttttgaaaaatgttcctgcaggaacttacgatgctgtcatagtggattcatctgatcctataggtccagcacaagagttgtttgaaaagccgttctttgaaactatagcaagagctcttcgtccaggaggggttgtttctacgcaggctgagagcatatggcttcacatgcacataattgaagagattgttgctaattgccgcgaaatcttcaaaggctccgtcaactatgcatggactactgttcctacttatccaagtggcatgattggtttcatgctgtgctctactgagggacctgcagttgatttcaagaaccctattaaccccatcgatgacgaaagccatggccaaaccattggacctttgaagttctacaactctgagattcaccaagcatcattctgtttgccatcatttgctaagagggtgattgaaactaaaggaaaatga

SEQ ID NO: 155162 - protein, 317 aa, Datura stramonium
MEVANHNNNNNGCTNDKESPCISSVLPGWFSEISPLWPGEAHSLKVEKILFQGKSDYQDVMVFQSTTYGKVLVLDGVIQLTERDECAYQEMITHLPLCSIPNPKKVLVIGGGDGGVLREVSRHSSVEQIDICEIDKMVVEVAKQFFPDVAVGYEDPRVNLHIGDGVAFLKNVPAGTYDAVIVDSSDPIGPAQELFEKPFFETIARALRPGGVVSTQAESIWLHMHIIEEIVANCREIFKGSVNYAWTTVPTYPSGMIGFMLCSTEGPAVDFKNPINPIDDESHGQTIGPLKFYNSEIHQASFCLPSFAKRVIETKGK

SEQ ID NO: 155163 - DNA, 927 bp, Hyoscyamus niger
  CDS (1)..(927)
atggaggaacaaggcaataatgaatcagcctacatttcttctatcttacctggatggttctctgagattagcccactttggcctggggaagcacactcgttgaaagttgagaagatactatttcaggggaagtcagattatcaaaatgttgtggtttttcagtcatcaacttatggaaaggtacttgttttggatggtgtgatacaactcacagagcgggatgaatgtgcttaccaagaaatgatcactcatctcccactttgctcgattccaaaccccaaaaaggtgttggttattggaggaggtgatggtggtgtcttgcgtgaggtgtctcggcattcttccgttgaacagatagacatttgtgagattgacaagatggtaattgatgtctctaaacagtttttccctaatgtagctattggatatgaggatccccgagttaaactccatgttggtgatggagttgcgtttctgaaaaatgttcctgaaggaacttatgatgcagttatagtggattcctctgaccccataggtccagcccaagagttgttcgaaaagcctttttttgaatcagtagcaagggctctgtgtcctggaggggttgtctgtacgcaggcggagagcatttggcttcacatgcacataattgaagatatcgtgtcaaactgccgccagatcttcaaaggctcagtcaactatgcctggaccacagttcctacttatccaagtggtgttattggtttcatgctctgctcgactgagggacctgctgttgatttcaagaatccaattaacccaattgatgccgatgatagccacaccaaaactagaggacctttaaagttctacaactctgagattcactctgcatcgttctgtttgccatcttttgctaagagggtgatcgaatccaacgcaaaatga

SEQ ID NO: 155164 - protein, 308 aa, Hyoscyamus niger
MEEQGNNESAYISSILPGWFSEISPLWPGEAHSLKVEKILFQGKSDYQNVVVFQSSTYGKVLVLDGVIQLTERDECAYQEMITHLPLCSIPNPKKVLVIGGGDGGVLREVSRHSSVEQIDICEIDKMVIDVSKQFFPNVAIGYEDPRVKLHVGDGVAFLKNVPEGTYDAVIVDSSDPIGPAQELFEKPFFESVARALCPGGVVCTQAESIWLHMHIIEDIVSNCRQIFKGSVNYAWTTVPTYPSGVIGFMLCSTEGPAVDFKNPINPIDADDSHTKTRGPLKFYNSEIHSASFCLPSFAKRVIESNAK

SEQ ID NO: 155165 - DNA, 1029 bp, Pisum sativum
  CDS (1)..(1029)
atggctgcagagagcacggtggaactggaatcctccatgaaagagcatagagatgacgatgaaaagagtaatggtttttctgtttctgctgtttccatggatgttgaaggcggtgataaggacccgagtggtaatggtgtttcatctgtgattcctgggtggttctctgaaattagcccaatgtggcctggagaagctcattctttgaagatagaaaagattttgtttcaaggaaagtctgaataccagaaagtcatggttttccagtcatcaacatacggtaaagtccttgttttggatggagttattcagctcacagaaagggacgaatgtgcctaccaagaaatgatcactcatcttcctctctgctctattccaaaccccaaaaaggttttggttattggtggaggtgatggaggagtcctgcgggaagtagcacgtcattcttcaattgaaaagatagacatttgtgaaattgacaatatggttgttgaagtctccaaacaatttttccctgaagttgcagtagggtttaacgatccacgcgtgacacttcgcatcggtgatggagttgcatttttgaaggcagctccagaaggaacttatgatgcagttatagtggattcatctgaccctatcggtcctgctcaggagcttttcgaaaagccgttttttcagtcggtagcaagggctctccgtccaggaggagttatgtgcactcaggctgaaagtatatggcttcatatggatataatcgaggacattgtatccaattgtcggcatatctttaaaggctctgtcaactatgcttggactacagttcctacataccctagtgggatgattggttttatgctttgctcaacggagggacctcttgttgatttcaagcatccggtgaatcccattgatcaaaaagactgtcaaaagtcagtaagaccactcaaattctacaactcagagattcatacagcagctttctgtttgccgtcgtttgcgaagaggaagattggttccaaagaaacttga

SEQ ID NO: 155166 - protein, 342 aa, Pisum sativum
MAAESTVELESSMKEHRDDDEKSNGFSVSAVSMDVEGGDKDPSGNGVSSVIPGWFSEISPMWPGEAHSLKIEKILFQGKSEYQKVMVFQSSTYGKVLVLDGVIQLTERDECAYQEMITHLPLCSIPNPKKVLVIGGGDGGVLREVARHSSIEKIDICEIDNMVVEVSKQFFPEVAVGFNDPRVTLRIGDGVAFLKAAPEGTYDAVIVDSSDPIGPAQELFEKPFFQSVARALRPGGVMCTQAESIWLHMDIIEDIVSNCRHIFKGSVNYAWTTVPTYPSGMIGFMLCSTEGPLVDFKHPVNPIDQKDCQKSVRPLKFYNSEIHTAAFCLPSFAKRKIGSKET

SEQ ID NO: 155167 - DNA, 951 bp, Coffea arabica
  CDS (1)..(951)
atggctgatgccgtgaatagcaatagtaaagaggaggcggcgcagcttcccgacggcgtttcttctgttattcctggatggttttctgagatcagcccaatgtggcctggagaggcacactcgctaaaggtagaaaagatactattccagggaaaatctgattaccagaatgtcatggtctttcagtcatcaacctacgggaaggtgcttgttttggatggagtaattcaattaaccgagagagatgaatgtgcatatcaagaaatgattgcgcatcttcctctctgctctattccaagcccaaagaaggttttggttattggtggaggagatgggggtgtcctgcgtgaagttgctcgtcatttgtctgttgaacagatagacatctgtgagattgataagatggtagttgatgtatccaaacagtttttccctgatgttgctgttggatttgaggatccacgtgtagtccttcatattggtgatggagttgcatttttgaaggctgttcctgaaggaacttatgatgcgattatagtagattcttctgatcctattggcccagcacaagagttgtttgagaagccgttctttgagtcagttgcaaaagctctgcgtcctggtggagttgtatgtacacaggctgaaagtatatggcttcacatgcacattatcgaagatatcgttgcaaactgcaggcagatcttcaagggatcagtcaactatgcatggactacagttcctacttacccaagtggagtaattggtttcatgctctgttctactgaggggccaccagtagatttcaagcatccaatcaacccaattgatgcaaatgatggccgttccaaaactatgaaaccgttgaagttctacaactctgagatccattctgcagctttctgtttgccatcttttgcaaagaaggtcatcgattcaaaagcaaattga

SEQ ID NO: 155168 - protein, 316 aa, Coffea arabica
MADAVNSNSKEEAAQLPDGVSSVIPGWFSEISPMWPGEAHSLKVEKILFQGKSDYQNVMVFQSSTYGKVLVLDGVIQLTERDECAYQEMIAHLPLCSIPSPKKVLVIGGGDGGVLREVARHLSVEQIDICEIDKMVVDVSKQFFPDVAVGFEDPRVVLHIGDGVAFLKAVPEGTYDAIIVDSSDPIGPAQELFEKPFFESVAKALRPGGVVCTQAESIWLHMHIIEDIVANCRQIFKGSVNYAWTTVPTYPSGVIGFMLCSTEGPPVDFKHPINPIDANDGRSKTMKPLKFYNSEIHSAAFCLPSFAKKVIDSKAN

SEQ ID NO: 155169 - DNA, 945 bp, Nicotiana sylvestris
  CDS (1)..(945)
atggaagcagcaaaccacaacaacaacggctgcaccaatgaatctccttatatctcttctgttcttcctggctggttctctgagattagccccctttggcctggggaagcacactcgttgaaggttgagaagatattgttccaagggaagtctgattatcagaatgtcatggtttttcagtcatcaacttatggaaaggtgcttgttttggatggtgtgatccaactcacagaaagggatgaatgtgcttaccaagagatgatcgctcatcttcctctttgttcaattccaaatcccaaaaaggtgctggttattggaggaggagatggtggtgtcttgcgtgaggtgtcgcgtcattcttctgttgagcagattgacatatgtgagattgacaagatggtagttgaggtttctaaacaatttttcccagatgtggctgtaggatacgaggatccacgtgtgaatctacacattggtgatggagttgcatttttgaaaaatgttgctgcaggaacttacgatgctgtcatagtggattcatctgaccctataggtccagcacaagagttgttcgaaaagcctttctttgaatctatagcaagagctctgcgtccaggaggggttgtatctacacaggctgagagcatatggcttcacatgcacattattgaagaaattgttgccaattgccgccaaatcttcaaaggctcagtcaactatgcatggactacagttcctacttatccaagcggtatgattggtttcatgctctgctctaccgagggacctgcagttgatttcaagaacccaattaaccccatcgatgacgatgccagccataacaaaactcttggacctatgaagttctacaactctgagcttcacaaagcatcattctgtttgccatcatttgccaagagggtgattgaatccaaaggaaaatga

SEQ ID NO: 155170 - protein, 314 aa, Nicotiana sylvestris
MEAANHNNNGCTNESPYISSVLPGWFSEISPLWPGEAHSLKVEKILFQGKSDYQNVMVFQSSTYGKVLVLDGVIQLTERDECAYQEMIAHLPLCSIPNPKKVLVIGGGDGGVLREVSRHSSVEQIDICEIDKMVVEVSKQFFPDVAVGYEDPRVNLHIGDGVAFLKNVAAGTYDAVIVDSSDPIGPAQELFEKPFFESIARALRPGGVVSTQAESIWLHMHIIEEIVANCRQIFKGSVNYAWTTVPTYPSGMIGFMLCSTEGPAVDFKNPINPIDDDASHNKTLGPMKFYNSELHKASFCLPSFAKRVIESKGK

SEQ ID NO: 155171 - DNA, 1029 bp, Solanum lycopersicum
  CDS (1)..(1029)
atggcagatgagtgtgctgcttttatgaagggaactgaattgccagtgaagaggccaagagaggaagaagcagaaacagagatggaggcagccaataacagcaacaatggttgtgagaaagaggagtcatctccttatatctcttctgttttacctggatggttctctgagattagccccctttggcctggggaagcacactcattgaaggttgagaagatattgtttcaggggaagtctgattaccagaatgtcttggtttttcagtcatcaacttatgggaaggtgcttgttttggatggtgtgatccaacttacagagagggatgaatgtgcttatcaagagatgatcactcatcttcctctttgttcaattcccaaccctaaaaaggtgctggttattggaggaggagatggtggtgtcctgcgtgaggtatcccgtcactcttctgtcgaacagatcgacatatgtgagattgacaaaatggtagttgaggttgctaaacaatttttcccagatgtagctgtaggatatgaggatccacgtgtgaatctccacattggtgacggagttgcatttttgaaaaatgtacctgccggaacttacgatgctgtcatagtggattcatctgaccctatcggtccagcgcaagagttgtttgaaaagcctttctttgaatctatagcaaaggctcttcgtcctggaggggttgtatctacgcaggctgagagcatatggcttcacatgcacatcattgaagaaattgttgctaattgccgccagatcttcaaaggctctgtcaactatgcatggactactgttcctacttatccaagtggcatgattggtttcatgctctgctctactgagggacctgcagttgatttcaagaaccctattaaccccatcgacgatgaatcccctgccaagtccattgaacctttgaagttttacaactctgagattcaccaagcatcattctgtttgccatcattcgccaagagggtgatcgaaaccaaaggaaaataa

SEQ ID NO: 155172 - protein, 342 aa, Solanum lycopersicum
MADECAAFMKGTELPVKRPREEEAETEMEAANNSNNGCEKEESSPYISSVLPGWFSEISPLWPGEAHSLKVEKILFQGKSDYQNVLVFQSSTYGKVLVLDGVIQLTERDECAYQEMITHLPLCSIPNPKKVLVIGGGDGGVLREVSRHSSVEQIDICEIDKMVVEVAKQFFPDVAVGYEDPRVNLHIGDGVAFLKNVPAGTYDAVIVDSSDPIGPAQELFEKPFFESIAKALRPGGVVSTQAESIWLHMHIIEEIVANCRQIFKGSVNYAWTTVPTYPSGMIGFMLCSTEGPAVDFKNPINPIDDESPAKSIEPLKFYNSEIHQASFCLPSFAKRVIETKGK

SEQ ID NO: 155173 - DNA, 993 bp, Brassica napus
  CDS (1)..(993)
atggatgccaccagagaagcctctgtcaccgatttgaagcgaccgagagaagaggatgataacaacaacaccgccgccgtcgcctccatggagacaaaggagccggcttgtttctcctccgtgattcccgggtggttctccgagatgagtcccatgtggccaggagaggcacactctttgaaggttgagaaggttttgtttcagggcaaatcagattaccaagatgtcattgtttttcagtctgcgacgtatgggaaagtgttggttttggatggagtcatacaacttacggagagagacgagtgcgcttatcaggagatgatcactcatcttcctttgtgctctatccctaacccaaagaaggtgttggtcattggaggaggagatggaggtgtcctgcgggaagtggcacgccattcctctgttgagcagattgacatgtgtgagattgataaaatggtggttgatgtctctaagcagtttttccctaacgtagcaattggattcgaggatcctcgtgtcaacctcgtcattggcgatggtgttgcttacttgaagaatgctgctggaggatcatatgatgcagtcattgttgactcctcggatccaattggtcctgctaaggagctgtttgagaaacctttcttccaatctgtggcgagagcgcttcgtcctggtggagttgtgtgcactcaggccgaaagcttgtggcttcacatggacataatcgaagacattgtttccaattgtcgtgagatcttcaagggctctgtgaactacgcgtggaccagtgttccaacatacccgagtggggttattggattcatgctatgttcaactgagggacctgacgttgacttcaaacaccctgtgaacccaattgatgacagcaaatcaagtggaccgttgaagttttacaacgctgagattcattcagctgccttctgtttgccttctttcgccaagaaggtgattgagtcaaaagccaattga

SEQ ID NO: 155174 - protein, 330 aa, Brassica napus
MDATREASVTDLKRPREEDDNNNTAAVASMETKEPACFSSVIPGWFSEMSPMWPGEAHSLKVEKVLFQGKSDYQDVIVFQSATYGKVLVLDGVIQLTERDECAYQEMITHLPLCSIPNPKKVLVIGGGDGGVLREVARHSSVEQIDMCEIDKMVVDVSKQFFPNVAIGFEDPRVNLVIGDGVAYLKNAAGGSYDAVIVDSSDPIGPAKELFEKPFFQSVARALRPGGVVCTQAESLWLHMDIIEDIVSNCREIFKGSVNYAWTSVPTYPSGVIGFMLCSTEGPDVDFKHPVNPIDDSKSSGPLKFYNAEIHSAAFCLPSFAKKVIESKAN

SEQ ID NO: 155175 - DNA, 1086 bp, Brassica napus
  CDS (1)..(1086)
atggagggagacggcgtaaaaggtttggcatgccagaagactatggatgggaatgcgagtaatgggaatggtgtggagaagactgtaccttcttgttgcctcaaggccatgtcttgcttaccagaggaagatgctaagtgccactccactgttgtctctggatggttctccgaacctcctcaccttcgctctgggaaaagaggcaaagcagtgtatttcaataaccctatgtggccaggagaagcacactcactgaaagttgagaaagttctattcaaagacaagtcagactatcaggaagtcctagtgtttgagtcagctacctatgggaaagtgcttgttctagatggtattctacagctgactgaaaaagatgaatttgcatatcaggagatgatagcccatctacctctatgctccacaccttcacctaaaaatgtcctggttgttggtggaggtgatggtggtgttctcagggagatttctcgccatagttctgttgaggttattgacatctgtgagattgacaagatggttatagatgtgtctaagaaattcttccctgagttagcggttggatttgaggatcctcgtgttcaacttcacattggtgatgctgttgagttccttcaacaatccccagaagggaagtatgatgccattattgtggattcttcagatcctgttggtcctgctcaggcgctagttgagaagcctttctttgaaacgttagctagagcgttgaagcctggaggagttctttgcaacatggcggaaagcatgtggctccacactcatctcattgaagacatgatctcggtttgccgccaaacattcaaaacggttcactatgcgtggagcagcgtcccaacatatcctagcggcgtgattggtttcatcttgtgctctaccgatggtccggctgttgacttcaagaaccctatcaatcccattgagaaactagacggtgccatgacttataagcgagaaatgaagttttataactctgatatgcacagagcagctttcgctttgcccacattccttagaagagaagtggcttcacttctgtcttcttcttcttga

SEQ ID NO: 155176 - protein, 361 aa, Brassica napus
MEGDGVKGLACQKTMDGNASNGNGVEKTVPSCCLKAMSCLPEEDAKCHSTVVSGWFSEPPHLRSGKRGKAVYFNNPMWPGEAHSLKVEKVLFKDKSDYQEVLVFESATYGKVLVLDGILQLTEKDEFAYQEMIAHLPLCSTPSPKNVLVVGGGDGGVLREISRHSSVEVIDICEIDKMVIDVSKKFFPELAVGFEDPRVQLHIGDAVEFLQQSPEGKYDAIIVDSSDPVGPAQALVEKPFFETLARALKPGGVLCNMAESMWLHTHLIEDMISVCRQTFKTVHYAWSSVPTYPSGVIGFILCSTDGPAVDFKNPINPIEKLDGAMTYKREMKFYNSDMHRAAFALPTFLRREVASLLSSSS

SEQ ID NO: 155177 - DNA, 1020 bp, Brassica napus
  CDS (1)..(1020)
atgggagaagccgtagagatcatgtttggaaatgggttcccggagattcacaaagacacctcacccattcaaaccctcctgtctaaccagaaggactgccattggtacgaagaaaccatcgatgatgatctcaagtggtcttttgctctcaacagtgtgctccatacaggaaccagtgagtaccaagaaattgctcttctggacaccaaacatttcgacaaggtgcttgtgattgacggaaaaatgcaaagtgcagagagagatgagtttatctaccatgaatgtttgatccaccctgccctccttttccaccccaaccccaagacagtgttcataatgggaggaggtgaaggctctgctgcaagagaaatactaaaacacaagacgatcgagaaagtggtcatgtgtgatattgatcaggaagttgttgaattttgcaggagatttctgaccgttaatagtgaagctttttgtagcaagaagcttgaacttgtgatcaaagatgcaaaggctgaactggagaaaagggatgagaagtttgatatcatagtgggagatttagcagacccagtagaaggtggaccttgttaccaactctacaccaaatcctcctaccaaaacatcctcaaacccaagcttagccctaatggcatttttgtgactcaggctggaccagcaggaattttcactcataaagaggtctttacatcaatctacaacaccatgaaacacgtcttcaagcacgtgaaggcttacactgcacatgtaccgtcatttgcggacacatggggatgggtgatggcatcggaccaagagtttgaggtccaaatggatgaaatagatcaaagaattgaagagagagtgaaaggagagttgatgtatctaaacgctccttctttcctatctgctgctacgctcaacaagaccatctctcttgcgctggagaaggagacagaagtttatagcgaagagaacgcaagattcattcatggtcatggtgtggcataccggcatacttga

SEQ ID NO: 155178 - protein, 339 aa, Brassica napus
MGEAVEIMFGNGFPEIHKDTSPIQTLLSNQKDCHWYEETIDDDLKWSFALNSVLHTGTSEYQEIALLDTKHFDKVLVIDGKMQSAERDEFIYHECLIHPALLFHPNPKTVFIMGGGEGSAAREILKHKTIEKVVMCDIDQEVVEFCRRFLTVNSEAFCSKKLELVIKDAKAELEKRDEKFDIIVGDLADPVEGGPCYQLYTKSSYQNILKPKLSPNGIFVTQAGPAGIFTHKEVFTSIYNTMKHVFKHVKAYTAHVPSFADTWGWVMASDQEFEVQMDEIDQRIEERVKGELMYLNAPSFLSAATLNKTISLALEKETEVYSEENARFIHGHGVAYRHT

SEQ ID NO: 155179 - DNA, 1023 bp, Triticum aestivum
  CDS (1)..(1023)
atgaaccaccggctcgaggcgaatgggcacggcaagccggtggccatggcgaagcaggagcagctgcagcagaggggagatcatgaggagaccctgtggtacgaggaggagatccatgacgacctcaagatctgctacgccttgaacagcgtgctgcaccgagggaaaagcaagtaccaggagattgccctggttgataccaagtgtttcggaaaggctctgataatcgacgggaagatgcagagcgcggacgcggacgagttcatctaccacgagtccttgatacacccgccgcttctcttccatcccaacccggagacggtgttcatcatgggcggcggcgagggatcagcggcgagggaggcgctgaagcaaaagaccgtccagagggtggtgatgtgcgacatagacgaggaggtggtgcacttctgccggacgcacctcagcgtcaactgggacgcgttcgccagcgacaagctctgcctcgtcatcaacgacgccagggctgagctagagaagatgcgggaggagaagttcgacgtgatagtgggggacctcgcggatcccatggagggaggcccctgctaccagctctacaccaggtccttctacgagcaggtcctcaagcccaggctccacgacggtggcatcttcgtcacacaggctggaccagcgggcgtcctgacgcacaaggaggtcttctcatccatctacaacacccttaggcacgtcttcaagcatgtgaaagcatacactgcccacgtaccgtccttggctgacacctggggctgggtcatggcatcagatcatcccttcaccctcaccgcccagcagatcaacgagaggatcacggacaggattgatggcgagctgtcgtacctcgacggggagacccttatttcttcaaccactctcaacaagaccgtcttccactcactattgaatgaaaggcatgtgtacacggaggatgacgcgaggttcgtccacggacatgggactgggagggcagccatgcttaactga

SEQ ID NO: 155180 - protein, 340 aa, Triticum aestivum
MNHRLEANGHGKPVAMAKQEQLQQRGDHEETLWYEEEIHDDLKICYALNSVLHRGKSKYQEIALVDTKCFGKALIIDGKMQSADADEFIYHESLIHPPLLFHPNPETVFIMGGGEGSAAREALKQKTVQRVVMCDIDEEVVHFCRTHLSVNWDAFASDKLCLVINDARAELEKMREEKFDVIVGDLADPMEGGPCYQLYTRSFYEQVLKPRLHDGGIFVTQAGPAGVLTHKEVFSSIYNTLRHVFKHVKAYTAHVPSLADTWGWVMASDHPFTLTAQQINERITDRIDGELSYLDGETLISSTTLNKTVFHSLLNERHVYTEDDARFVHGHGTGRAAMLN

SEQ ID NO: 155181 - DNA, 1020 bp, Glycine max
  CDS (1)..(1020)
atgggagaagctccagaggtgttctacattaatgggttctcaaagtttggccatgaaattgaaacccaacaaaaccatgtcaatgatcagaaccatgattcttcttggtacgaggaaatcatcgatgatgatctcaaatggtcttttaaactcaacagtgtgctccataaagccattagcgagtaccaggacatagctctcttagatacaaaacgttttggaaaggccttggtgcttgatgggaagatgcagagtgctgaaacggacgaatttgtttatcatgaatgcttgattcatccacctcttttatgccaccctaaccccaagactgtgtttataatggggggaggtgaaggttctgctgctagggaagcccttaagcacaggtcaatggacagagtgatcatgtgcgatatagacaaggaggtggtaaatttttgccgaaaatacttgattgtaaataaggaggcgttttctcataagaagctggaccttgtcatcaatgatgccaaggctgaattggagaagagaaaggaaaagtttgatatcattgttggagatttggcagacccacttgaagatgggccatgctatcaactctacaccaaatccttctatgagaagatcctgaagcccaagctcaatgataatggcatttttgtgacccaggctggaccagcaggtatcttcacacacaaggaggtcttcacttctatatataacacgatcaaacaggttttcaaatatgtgattgcatacacgactcatgtaccatcatttgccgacacatggggttgggttatggcttcggaccaaccactatcgatttgcgctaatgaaatggacagaagaatcgaagcaagaatagatggggaacttctatatctaaatggtgcttggttccattcatctacaaccatgaataaaactgtttaccaatcgctgcaaaatgaaactcacgtgtacacggaagaaagtgctagatttattcctggacatggcatggcttttcatctctaa

SEQ ID NO: 155182 - protein, 339 aa, Glycine max
MGEAPEVFYINGFSKFGHEIETQQNHVNDQNHDSSWYEEIIDDDLKWSFKLNSVLHKAISEYQDIALLDTKRFGKALVLDGKMQSAETDEFVYHECLIHPPLLCHPNPKTVFIMGGGEGSAAREALKHRSMDRVIMCDIDKEVVNFCRKYLIVNKEAFSHKKLDLVINDAKAELEKRKEKFDIIVGDLADPLEDGPCYQLYTKSFYEKILKPKLNDNGIFVTQAGPAGIFTHKEVFTSIYNTIKQVFKYVIAYTTHVPSFADTWGWVMASDQPLSICANEMDRRIEARIDGELLYLNGAWFHSSTTMNKTVYQSLQNETHVYTEESARFIPGHGMAFHL

SEQ ID NO: 155183 - DNA, 948 bp, Linum usitatissimum
  CDS (1)..(948)
atggcatcagagaccgccgccaccgctgccgccgccgagaacggaacctccaatctgtcatccgtcatgcccggatggttctccgagattagccccatgtggccaggggaggcacattctttgaaggtggagaagatcttgttccaagggaagtctgactaccagaatgttattgtgtttcagtctgcaacgtacggaaaggtcctggttttggatggagtgattcagctcactgagagggatgaatgtgcttaccaagaaatgatcactcacctcccgctcgcctccattcccaaccccaagaaggtgttggttatcggtggaggtgacggtggggtcttgagggaagttggtcggtatccttccatcgagcagattgatatctgcgagatcgataagatggttgttgatgtttccaaagagtacttcccgaaagtggcagttggctacgcggatccccgtgttaccctccgtatcggtgatggagtcgcatttctgaaggctgttcctgaagggacttatgatgcagtcatagtggattcatctgatcctattggcccagcacaagagctgtttgagaagccgttcttccagtcggtagctaaggctcttcgtcccggaggagttgtgtgtactcaggctgaaagcatttggcttcatatgcacatcattgaagatattgtatcgaactgtcgccaaatcttcaaaggctctgtcaactatgcatggaccactgtccctacatatcccagtggtgtgatcggtttcatgctttgctcgactgaggggccggctgttgatttcaagaacccggttggttcgatagacatggacactgaatataacaaagctactggaccactaaaattctacaaccccgagcttcatggcgcggctttctgtctgccatctttcgcaaagaaggtgatcgatgcgaagtcgaagtaa

SEQ ID NO: 155184 - protein, 315 aa, Linum usitatissimum
MASETAATAAAAENGTSNLSSVMPGWFSEISPMWPGEAHSLKVEKILFQGKSDYQNVIVFQSATYGKVLVLDGVIQLTERDECAYQEMITHLPLASIPNPKKVLVIGGGDGGVLREVGRYPSIEQIDICEIDKMVVDVSKEYFPKVAVGYADPRVTLRIGDGVAFLKAVPEGTYDAVIVDSSDPIGPAQELFEKPFFQSVAKALRPGGVVCTQAESIWLHMHIIEDIVSNCRQIFKGSVNYAWTTVPTYPSGVIGFMLCSTEGPAVDFKNPVGSIDMDTEYNKATGPLKFYNPELHGAAFCLPSFAKKVIDAKSK

SEQ ID NO: 155185 - DNA, 951 bp, Helianthus annuus
  CDS (1)..(951)
atgacggaccaaaaccccaccgccgccaccccttctccgatcaacggagccgccgtcaatggcggtggaaccatctcctctgttattcccggttggttttcagaaattagcccaatgtggcctggagaagcacactctttgaaggttgaaaagatactgtttcagggcaaatccgattaccaagacgttatggtttttcagtctgcaacatatggaaaggttcttgtgttggatggtgtaattcaacttacagaaagagatgaatgtgcgtatcaagaaatgattactcatcttccactttgttcaattcccaaccctaagaaggttttggttattggtggaggagatggtggtgttttgcgtgaagtggctcgccattcgtcagttgaacatattgatatatgtgagattgataaaatggtagttgatgtttctaaacaacattttcctgatgtggctgttggatacgaagatccccgtgtcaccctccatgttggtgatggagttgctttcctaaaggctgcccaagaaggaagttatgatgctgttatagttgattcttcagatccaatagggcccgcagaggaattgtttaagaagccgttttttgagtcagttgcaaaatcgcttcgtccaggtggcgtcatgtgtactcaggctgaaagcatatggctgcacatggatatcattgaaggtattgttgaaaattgccgtcaagtgtttaaaggttctgttaactatgcatggaccacggttcctacatatccgagcggggtcatcggcttcatgttgtgttcaactgagggaccagaagttgatttcaagaacccaataaacccgatagatgtacaggaaaaccaaatcaagtcaacgatacccttgaaattctacaaccaagagattcattcagctgctttttgtttgccttcatttgcaaaaaaaactgattga

SEQ ID NO: 155186 - protein, 316 aa, Helianthus annuus
MTDQNPTAATPSPINGAAVNGGGTISSVIPGWFSEISPMWPGEAHSLKVEKILFQGKSDYQDVMVFQSATYGKVLVLDGVIQLTERDECAYQEMITHLPLCSIPNPKKVLVIGGGDGGVLREVARHSSVEHIDICEIDKMVVDVSKQHFPDVAVGYEDPRVTLHVGDGVAFLKAAQEGSYDAVIVDSSDPIGPAEELFKKPFFESVAKSLRPGGVMCTQAESIWLHMDIIEGIVENCRQVFKGSVNYAWTTVPTYPSGVIGFMLCSTEGPEVDFKNPINPIDVQENQIKSTIPLKFYNQEIHSAAFCLPSFAKKTD

SEQ ID NO: 155187 - DNA, 1020 bp, Brassica napus
  CDS (1)..(1020)
atgggagaagccgtagagatcatgtttggaaatgggttcccggagattcacaaagacacctcacccattcaaaccctccactccaaccagaaggactgccattggtacgaagaaaccatcgatgatgatctcaagtggtcttttgccctcaacagtgtgctccataaaggaaccagtgaataccaagaaattgctcttctggacaccaaacatttcggaaaggtgcttgtgattgacgggaaaatgcaaagtgcagaaagagatgagtttatctaccatgaatgtctgatccacccggccctcctttgccaccccaaccccaagacagtgttcataatgggaggaggtgaaggctcagccgcaagagaaatactaaaacacaagacgatcgaaaaagtggtcatgtgtgatattgatcaggaagttgttgaattttgcaggagatttctgaccgttaatagtgaagctttttgtaacaagaagcttgaacttgtgatcaaagatgcaaaggctgaattggagaaaagggaagagaagtttgatatcatagtgggagatttagcagacccagtagaaggtgggccttgttatcagctctacaccaaatccttctaccaaaacatcctcaaacccaagcttacccctaatggcatttttgtgacacaggctggaccagcaggaatattcactcataaagaagtctttacatcaatctacaacaccatgaagcaagtcttcaaacacgtgaaggcttacacagcacatgtaccgtcatttgcggacaccgggggatgggtgatggcatcagaccaagagtttgaggtccaagtgaatgaaatagatcaaagaatcgaagagagagtgaaaggagagttgatgtatctaaacgctccttctttcctctctgctgctactctcaacaaaaccatctctctcgcgctggagaaggagacagaagtttatagcgaagagaacgcaagattcattcatggtcatggtgtggcgtaccggcatacttga

SEQ ID NO: 155188 - protein, 339 aa, Brassica napus
MGEAVEIMFGNGFPEIHKDTSPIQTLHSNQKDCHWYEETIDDDLKWSFALNSVLHKGTSEYQEIALLDTKHFGKVLVIDGKMQSAERDEFIYHECLIHPALLCHPNPKTVFIMGGGEGSAAREILKHKTIEKVVMCDIDQEVVEFCRRFLTVNSEAFCNKKLELVIKDAKAELEKREEKFDIIVGDLADPVEGGPCYQLYTKSFYQNILKPKLTPNGIFVTQAGPAGIFTHKEVFTSIYNTMKQVFKHVKAYTAHVPSFADTGGWVMASDQEFEVQVNEIDQRIEERVKGELMYLNAPSFLSAATLNKTISLALEKETEVYSEENARFIHGHGVAYRHT

SEQ ID NO: 155189 - DNA, 1080 bp, Brassica napus
  CDS (1)..(1080)
atggagggagacggcgtaaaaggtttggcatgccagaagactatggatgggaatgcgagtaatgggaatggtgtggagaagactgtaccttcttgttgcctcaaggccatgtcttgcttaccagaggaagatgctaagtgccactccactgttgtctctggatggttctccgaacctcctcaccttcgctctgggaaaagaggcaaagcagtgtatttcaataaccctatgtggccaggagaagcacactcactgaaagttgagaaagttctattcaaagacaagtcagactatcaggaagtcctagtgtttgagtcagctacctatgggaaagtgcttgttctagatggtattctacagctgactgaaaaagatgaatttgcatatcaggagatgatagcccatctacctctatgctccacaccttcacctaaaaatgtcctggttgttggtggaggtgatggtggtgttctcagggagatatctcgccatagctctgttgaggttattgacatctgtgagatagacaagatggttatagatgtgtctaagaaattcttccccgagttagcggttggatttgaagatcctcgtgttcaacttcacattggtgatgcagttgagttcctccgcaactcccctgaagggaagtatgatgccattattgtcgattcttcagatcctgttggtcctgctcaggcgcttgttgagaagcctttctttgaaacgttagctagagcgttgaagcctggaggagttctttgcaacatggcggaaagcatgtggctccacactcatctcattgaagacatgatctcggtttgccgccaaacattcaaaaccgttcagtatgcgtggagcagcgtcccaacatatcctagcggcgtgattggtttcatcttgtgctctaccgatggtccggctgttgacttcaagaaccctatcaatcccattgagaaactagacggtgccatgacttataagcgagaaatgaagttttataactctgatatgcacagagcagctttcgctttgcccacattccttagaagagaagtggcttcacttcttgcttcttga

SEQ ID NO: 155190 - protein, 359 aa, Brassica napus
MEGDGVKGLACQKTMDGNASNGNGVEKTVPSCCLKAMSCLPEEDAKCHSTVVSGWFSEPPHLRSGKRGKAVYFNNPMWPGEAHSLKVEKVLFKDKSDYQEVLVFESATYGKVLVLDGILQLTEKDEFAYQEMIAHLPLCSTPSPKNVLVVGGGDGGVLREISRHSSVEVIDICEIDKMVIDVSKKFFPELAVGFEDPRVQLHIGDAVEFLRNSPEGKYDAIIVDSSDPVGPAQALVEKPFFETLARALKPGGVLCNMAESMWLHTHLIEDMISVCRQTFKTVQYAWSSVPTYPSGVIGFILCSTDGPAVDFKNPINPIEKLDGAMTYKREMKFYNSDMHRAAFALPTFLRREVASLLAS

SEQ ID NO: 155191 - DNA, 999 bp, Brassica napus
  CDS (1)..(999)
atggatgccaccagagaagcctctgtcaccgatttgaagcgaccgagagaagaggatgataacaacaacaccgccgccgtcgcctccatggagacaaaggagccggcttgtttctcctccgtgattcccgggtggttctccgagatgagtcccatgtggccaggagaggcacactctttgaaggttgagaaggttttgtttcagggcaaatcagattaccaagatgtcattgtttttcagtctgcgacgtatgggaaagtgttggttttggatggagtcatacaacttacggagagagacgagtgcgcttatcaggagatgatcactcatcttcctttgtgctctatccctaacccaaagaaggtgttggtcattggaggaggagatggaggtgtcctgagggaagttgcacgccatgcttctgttgagcagattgacatgtgtgagattgataaaatggtggtcgacgtctctaagcagtttttccctaatgtagcaattggattcgaggatcctcgcgttaacctcgtcattggcgatggtgttgctttcttgaagaatgctgctgaaggatcatatgatgcagttattgttgactcatcagatccaattggtccagcaaaggagctgtttgagaagcccttcttccaatctgtggctagagctcttcgaccgggtggagttgtgtgcactcaagctgaaagcttgtggcttcacatggacatcatcgaagacattgtttccaattgccgtgagatcttcaagggttctgtgaactacgcgtggaccagtgttccaacatacccgagtggggttatcgggtttatgctctgttcaactgaagggcctgacgttgacttcaagaaccctgtgaacccaattgatgacagctccagcaaatcaaatggacccttaaagttttacaacgctgagattcattcagctgcgttctgcttgccttctttcgccaagaaggtaatagagtcaaaagctaattga

SEQ ID NO: 155192 - protein, 332 aa, Brassica napus
MDATREASVTDLKRPREEDDNNNTAAVASMETKEPACFSSVIPGWFSEMSPMWPGEAHSLKVEKVLFQGKSDYQDVIVFQSATYGKVLVLDGVIQLTERDECAYQEMITHLPLCSIPNPKKVLVIGGGDGGVLREVARHASVEQIDMCEIDKMVVDVSKQFFPNVAIGFEDPRVNLVIGDGVAFLKNAAEGSYDAVIVDSSDPIGPAKELFEKPFFQSVARALRPGGVVCTQAESLWLHMDIIEDIVSNCREIFKGSVNYAWTSVPTYPSGVIGFMLCSTEGPDVDFKNPVNPIDDSSSKSNGPLKFYNAEIHSAAFCLPSFAKKVIESKAN

SEQ ID NO: 155193 - DNA, 1020 bp, Brassica napus
  CDS (1)..(1020)
atgggagaagccgtagagatcatgtttggaaatgggttcccggagattcacaaagacacctcacccattcaaaccctccactccaaccagaaggactgccattggtacgaagaaaccatcgatgatgatctcaagtggtcttttgccctcaacagtgtgctccataaaggaaccagtgaataccaagaaattgctcttctggacaccaaacatttcggaaaggtgcttgtgattgacgggaaaatgcaaagtgcagaaagagatgagtttatctaccatgaatgtctgatccacccggccctcctttgccaccccaaccccaagacagtgttcataatgggaggaggtgaaggctcagccgcaagagaaatactaaaacacaagacgatcgaaaaagtggtcatgtgtgatattgatcaggaagttgttgaattttgcaggagatttctgaccgttaacagcgaagctttttgtaacaagaagcttgaacttgtgatcaaagatgcaaaggctgaactggagaaaagggaagagaagtttgatatcatagtgggagatttagcagacccagtaaaaggtggaccttgttaccaactctacaccaaatccttctaccaaaacatcctcaaacccaagcttagccctaatggcatttttgtgactcaggctggaccagcaggaattttcactcataaagaggtctttacatcaatctacaacaccatgaagcaagtcttcaagcacgtgaaggcttacacagcacatgtaccgtcatttgcggacacatggggatgggtgatggcatcagaccaagagtttgaggtccaagtgaatgaaatagatcaaagaatcgaagagagagtgaaaggagagttgatgtatctaaacgctccttctttcctctctgctgctactctcaacaagaccatctctctcgcgctggagaaggagacagaagtttatagcgaagagaacgcaagattcattcatggtcatggtgtggcataccggcatacttga

SEQ ID NO: 155194 - protein, 339 aa, Brassica napus
MGEAVEIMFGNGFPEIHKDTSPIQTLHSNQKDCHWYEETIDDDLKWSFALNSVLHKGTSEYQEIALLDTKHFGKVLVIDGKMQSAERDEFIYHECLIHPALLCHPNPKTVFIMGGGEGSAAREILKHKTIEKVVMCDIDQEVVEFCRRFLTVNSEAFCNKKLELVIKDAKAELEKREEKFDIIVGDLADPVKGGPCYQLYTKSFYQNILKPKLSPNGIFVTQAGPAGIFTHKEVFTSIYNTMKQVFKHVKAYTAHVPSFADTWGWVMASDQEFEVQVNEIDQRIEERVKGELMYLNAPSFLSAATLNKTISLALEKETEVYSEENARFIHGHGVAYRHT

SEQ ID NO: 155195 - DNA, 1086 bp, Brassica napus
  CDS (1)..(1086)
atggagggagacggcgtaaaaggtttggcatgccagaagactatggatgggaatgcgagtaatgggaatggtgtggagaagactgtaccttcttgttgcctcaaggccatgtcttgcttaccagaggaagatgctaagtgccactccactgttgtctctggatggttctccgaacctcctcaccttcgctctgggaaaagaggcaaagcagtgtatttcaataaccctatgtggccaggagaagcacactcactgaaagttgagaaagttctattcaaagacaagtcagactatcaggaagtcctagtgtttgagtcagctacctatgggaaagtgcttgttctagatggtattctacagctgactgaaaaagatgaatttgcatatcaggagatgatagcccatctacctctatgctccacaccttcacctaaaaatgtcctggttgttggtggaggtgatggtggtgttctcagggagatatctcgccatagctctgttgaggttattgacatctgtgagatagacaagatggttatagatgtgtctaagaaattcttccccgagttagcggttggatttgaagatcctcgtgttcaacttcacattggtgatgctgttgagttcctccgcaagtcccctgaagggaagtatgatgccattattgtcgattcttcagatcctgttggtcctgctcaggcgctagttgagaagcctttctttgaaacgttagctagagcgttgaagcctggaggagttctttgcaacatggcggaaagcatgtggctccacactcatctcattgaagacatgatctcggtttgccgccaaacattcaaaacggttcactatgcgtggagcagcgtcccaacatatcctagcggcgtgattggtttcatcttgtgctctaccgatggtccggctgttgacttcaagaaccctatcaatcccattgagaaactagacggtgccatgacttataagcgagaaatgaagttttataactctgatatgcacagagcagctttcgctttgcccacattccttagaagagaagtggcttcacttctgtcttcttcttcttga

SEQ ID NO: 155196 - protein, 361 aa, Brassica napus
MEGDGVKGLACQKTMDGNASNGNGVEKTVPSCCLKAMSCLPEEDAKCHSTVVSGWFSEPPHLRSGKRGKAVYFNNPMWPGEAHSLKVEKVLFKDKSDYQEVLVFESATYGKVLVLDGILQLTEKDEFAYQEMIAHLPLCSTPSPKNVLVVGGGDGGVLREISRHSSVEVIDICEIDKMVIDVSKKFFPELAVGFEDPRVQLHIGDAVEFLRKSPEGKYDAIIVDSSDPVGPAQALVEKPFFETLARALKPGGVLCNMAESMWLHTHLIEDMISVCRQTFKTVHYAWSSVPTYPSGVIGFILCSTDGPAVDFKNPINPIEKLDGAMTYKREMKFYNSDMHRAAFALPTFLRREVASLLSSSS

SEQ ID NO: 155197 - DNA, 1020 bp, Brassica napus
  CDS (1)..(1020)
atgggagaagccgtagagatcatgtttggaaatgggttcccggagattcacaaagacacctcacccattcaaaccctcctgtctaaccagaaggactgccattggtacgaagaaaccatcgatgatgatctcaagtggtcttttgctctcaacagtgtgctccatacaggaaccagtgagtaccaagaaattgctcttctggacaccaaacatttcggcaaggtgcttgtgattgacgggaaaatgcaaagtgcagagagagatgagtttatctaccatgaatgtttgatccaccctgccctccttttccaccccaaccccaagacagtgttcataatgggaggaggtgaaggctctgctgcaagagaaatactaaaacacaagacgatcgagaaagtggtcatgtgtgatattgatcaggaagttgttgaattttgcaggagatttctgaccgttaatagtgaagctttttgtagcaagaagcttgaacttgtgatcaaagatgcaaaggctgaactggagaaaagggatgagaagtttgatatcatagtgggagatttagcagacccagtagaaggtggaccttgttaccaactctacaccaaatccttctaccaaaacatcctcaaacccaagcttagccctaatggcatttttgtgactcaggctggaccagcaggaattttcactcataaagaggtctttacatcaatctacaacaccatgaagcaagtcttcaagcacgtgaaggcttacacagcacatgtaccgtcatttgcggacacatggggatgggtgatggcatcagaccaagagtttgaggtccaagtgaatgaaatagatcaaagaatcgaagagagagtgaaaggagagttgatgtatctaaacgctccttctttcctctctgctgctactctcaacaagaccatctctctcgcgctggagaaggagacagaagtttatagcgaagagaacgcaagattcattcatggtcatggtgtggcataccggcatacttga

SEQ ID NO: 155198 - protein, 339 aa, Brassica napus
MGEAVEIMFGNGFPEIHKDTSPIQTLLSNQKDCHWYEETIDDDLKWSFALNSVLHTGTSEYQEIALLDTKHFGKVLVIDGKMQSAERDEFIYHECLIHPALLFHPNPKTVFIMGGGEGSAAREILKHKTIEKVVMCDIDQEVVEFCRRFLTVNSEAFCSKKLELVIKDAKAELEKRDEKFDIIVGDLADPVEGGPCYQLYTKSFYQNILKPKLSPNGIFVTQAGPAGIFTHKEVFTSIYNTMKQVFKHVKAYTAHVPSFADTWGWVMASDQEFEVQVNEIDQRIEERVKGELMYLNAPSFLSAATLNKTISLALEKETEVYSEENARFIHGHGVAYRHT

SEQ ID NO: 155199 - DNA, 1089 bp, Glycine max
  CDS (1)..(1089)
atggaggacggcgcaggaagaggtttggaatgccagaagactatggatgggaaggtgagtaacagtaatgggccagagaaggaaattccttcttgttgtctgaaggccaaggcttcaatccccgagtcagaggcaaaattccattccactgttgtttctgggtggttctcagcttctcaaacttgctctgggaaatctgggaaagctgtttatttcaacaacccaatgtggccaggagaagcccattcaatcaaagtagaaaagatcttatacaaggaaaagtcggagtaccaggaggtcttggtttttgagtcatcaacttatgggaaagtgcttgtacttgatggaatagttcaattgactgagaaggatgaatgtgcttaccaggagatgatagctcatcttcccctctgttcaattcagtcccccaaaactgttttagttgttggtggtggagatggtggtgttctcagggaagtagcccgccacagctctgttgaacatattgatatttgtgagatagataagatggttattgatgtttctaggaaattttttccacagttagctattgggtttgaagattctcgagtgcatctgcatgttggtgatgctgttgattttcttaaatccgctcctgaagggaagtatgatgccataattgttgattcctcagatccagtgggtcctgcccaggaacttgttgagaaacctttttttgatacaatagctagggcactaaggcctggcggagttctttgtaatatggcagaaagtatgtggcttcatacacaccttattcaagatatgatctctatttgccgagaaacattcaaaggttctgtatgttatgcttgggccagtgtaccaacatatcctagtggtgtgataggctttcttctctgtgcaacagaagggccgcctgttgattttgtgaatcctatcaatcccattgaaaagttggaaggtgctaatgagcacaaaagagaacttcgattctacaattcagagatgcactcagctgcttttgcgttgcctgcgttcttgaagagagaagtgagtgtgctccgtgatctctcccttcagtag

SEQ ID NO: 155200 - protein, 362 aa, Glycine max
MEDGAGRGLECQKTMDGKVSNSNGPEKEIPSCCLKAKASIPESEAKFHSTVVSGWFSASQTCSGKSGKAVYFNNPMWPGEAHSIKVEKILYKEKSEYQEVLVFESSTYGKVLVLDGIVQLTEKDECAYQEMIAHLPLCSIQSPKTVLVVGGGDGGVLREVARHSSVEHIDICEIDKMVIDVSRKFFPQLAIGFEDSRVHLHVGDAVDFLKSAPEGKYDAIIVDSSDPVGPAQELVEKPFFDTIARALRPGGVLCNMAESMWLHTHLIQDMISICRETFKGSVCYAWASVPTYPSGVIGFLLCATEGPPVDFVNPINPIEKLEGANEHKRELRFYNSEMHSAAFALPAFLKREVSVLRDLSLQ

SEQ ID NO: 155201 - DNA, 1023 bp, Glycine max
  CDS (1)..(1023)
atgggtgaagctccagaggtgttctacattaatgggttctcaaagtttgaacatgaaattgaaacccaacaaaaccatcatgtgaatgatcagaaccatgattcttcttggtacgaggaaatcatcgatgaggatctaaaatggtcttttaaactcaacagtgtgctccataaagccattagcgagtaccaggacatagctctcttagatacaaagcgttttggaaaggccttggtgcttgatggaaagatgcagagtgctgaaacggacgaatttatttatcatgaatgcttgattcatccacctcttttatgccatcctaaccccaagactgtgtttataatggggggaggtgaaggttctgctgctagggaaaaccctaagcaaaggtcaatggacagagtgatcatgtgcgatatagacaaggaggtggtaaatttctgccgaaaatacttgattgtaaataaggaggcgttttctcataagaagctggaccttgtcatcaatgatgccaaggctgaattggagaagagaaaggaaaagtttgatatcattgttggagatttggcagacccacttgaagatgggccatgctatcaactctacaccaaatccttctatgagaagatcctgaagcccaagctcaatgataatggcatttttgtgacccaggctggaccagcaggtatcttcacacacaaggaggtcttcacttctatatataacacgatcaaacaggttttcaaatatgtgattgcatacacgactcatgtaccatcatttgccgacacatggggttgggttatggcttcggaccaaccactatcgatttgcgctaatgaaatggacagaagaatcgaagcaagaatagatggggaacttctatatctaaatggtgcttggttccattcatctacaaccatgaataaaactgtttaccaatcgctgcaaaatgaaactcacgtgtacacggaagaaagtgctagatttattcctggacatggcatggcttttcatctctaa

SEQ ID NO: 155202 - protein, 340 aa, Glycine max
MGEAPEVFYINGFSKFEHEIETQQNHHVNDQNHDSSWYEEIIDEDLKWSFKLNSVLHKAISEYQDIALLDTKRFGKALVLDGKMQSAETDEFIYHECLIHPPLLCHPNPKTVFIMGGGEGSAARENPKQRSMDRVIMCDIDKEVVNFCRKYLIVNKEAFSHKKLDLVINDAKAELEKRKEKFDIIVGDLADPLEDGPCYQLYTKSFYEKILKPKLNDNGIFVTQAGPAGIFTHKEVFTSIYNTIKQVFKYVIAYTTHVPSFADTWGWVMASDQPLSICANEMDRRIEARIDGELLYLNGAWFHSSTTMNKTVYQSLQNETHVYTEESARFIPGHGMAFHL

SEQ ID NO: 155203 - DNA, 1005 bp, Glycine max
  CDS (1)..(1005)
atgggtgagatagctttaccaaatggcattagcaatggcaatattaatggagtcaatggacaaagccattctcttaatggttacaggaagagttgttggtatgaagaagagattgaagaggacttaagatggtgctttgctctcaatagtatattgcatacaggagctagccagtaccaagacattgcattgttggacacaaagccctttggaaaggctttggtaattgatggaaagcttcagagtgcagagacagatgaatttatctaccacgagtgtctagttcatccggctctgcttcacaatcctagcccaaagaatgtttttattatgggaggaggagaaggctccactgcaagggaattgcttaggcataagactatagacaaagttgtaatgtgtgacatagatgaggaggtggtgaatttctgcaaatcgtactttgtggtgaacaaggaagcattccgtgacacaagacttgaggtcgtgatcaacgatgccagggttgaactagaagccagagatgagagctatgatgtgataattggcgacttggcagacccaattgatggaggtccttgctataaactttacaccaagtccttctatgagttgattgtcaagcctagactgaagcaaggtggcatatttgtaacacaggcaggaccagctggaatatttagtcacacagaagtcttctcatgtatctacaacaccttaagacaagttttcaagtatgttgtgccttattcagctcacatcccatcctatgctgatatttggggatgggttatggcttcagattctccattagacctgagtgcagaagagctagacctcagaatgagacataggattaagggggagaatggatatcttgatgggaaaacattcacatcagcctcaactttgagcaaaactgttcgcaactcgctggacaatgaaactcatgtatacacagaggaaagtgctaggttcatatatggccatggcaagcatgcataa

SEQ ID NO: 155204 - protein, 334 aa, Glycine max
MGEIALPNGISNGNINGVNGQSHSLNGYRKSCWYEEEIEEDLRWCFALNSILHTGASQYQDIALLDTKPFGKALVIDGKLQSAETDEFIYHECLVHPALLHNPSPKNVFIMGGGEGSTARELLRHKTIDKVVMCDIDEEVVNFCKSYFVVNKEAFRDTRLEVVINDARVELEARDESYDVIIGDLADPIDGGPCYKLYTKSFYELIVKPRLKQGGIFVTQAGPAGIFSHTEVFSCIYNTLRQVFKYVVPYSAHIPSYADIWGWVMASDSPLDLSAEELDLRMRHRIKGENGYLDGKTFTSASTLSKTVRNSLDNETHVYTEESARFIYGHGKHA

SEQ ID NO: 155205 - DNA, 1017 bp, Glycine max
  CDS (1)..(1017)
atggctgcggaaaacgttgttgagttcacagacttacccgtcaagaggccaagagaagaagaagaaggaaccaatggcgtctccaacgacgccgtttcagcgctccccaatgaccctcaataccctggcatctctgcggttattcccggttggttctccgaaatcagcccaatgtggcccggggaggcacattccttgaagatggaaaagattttgtttcaagggaagtctgactatcagaatgtcatggtcttccagtcatcaacatatggcaaagttcttgttttggatggagtcattcagcttacagaaagggatgagtgtgcctaccaagagatgatcactcatcttcctctttgctctattccaaatcccaaaaaggttttggttattggtggaggagatggtggagtgctgcgggaagtagctcgccatgcctcagtagagaagatagacatctgcgaaatagacaagatggttgttgatgtctccaaacaatttttccccgatatagcagtaggttttgaggaccctcgtgtaacacttactgttggtgatggagttgcatttttgaaggatgttccagaaggaacttacgatgcagttatagtggattcatctgaccctattggtcctgctcaagagctgtttgaaaagcccttttttgcgtccgttgcaaaggctctccgtccaggaggtgttgtgtgtactcaagcagaaagtatatggcttcatatgcacatcattgaggacattgtggctaattgtcgccaaatattcaaaggttctgtcaactatgcatggaccacagttcctacatatcctagtgggatgattggttttatgctttgctcaactgagggtcctcttgttgatttcaagcatccagtgaatcctttaagtgagaatgatagtcaacagtcaagaccattgaaattttacaattctgagattcatacagcggctttctgtttgccatcttttgctaagaggaagattggttctaaaacaaattga

SEQ ID NO: 155206 - protein, 338 aa, Glycine max
MAAENVVEFTDLPVKRPREEEEGTNGVSNDAVSALPNDPQYPGISAVIPGWFSEISPMWPGEAHSLKMEKILFQGKSDYQNVMVFQSSTYGKVLVLDGVIQLTERDECAYQEMITHLPLCSIPNPKKVLVIGGGDGGVLREVARHASVEKIDICEIDKMVVDVSKQFFPDIAVGFEDPRVTLTVGDGVAFLKDVPEGTYDAVIVDSSDPIGPAQELFEKPFFASVAKALRPGGVVCTQAESIWLHMHIIEDIVANCRQIFKGSVNYAWTTVPTYPSGMIGFMLCSTEGPLVDFKHPVNPLSENDSQQSRPLKFYNSEIHTAAFCLPSFAKRKIGSKTN

SEQ ID NO: 155207 - DNA, 1029 bp, Glycine max
  CDS (1)..(1029)
atggctgcggaaaacgttgtagagttcacagacttacccgtcaagagacctagagaagaagaagaagaagaagaagaacaaaccaatggagtctccaacgacgccgtttcaacgctacccaatgaccctcaataccctggtatctctgctgttattcccggttggttctcagaaatcagcccaatgtggcctggggaggcgcactccttgaaggtggaaaagattttgtttcaagggaagtctgactatcagaatgtcatggtcttccagtcatcaacatatggcaaggttcttgttttggatggagtcattcagctcacagaaagggatgagtgtgcctaccaagagatgatcactcatcttcctctttgctctatttcaaaccccaaaaaggttttggttattggtggaggagatggtggagtgctgcgggaagtagctcgccatgcctcagtagagaagatagacatctgcgaaatagacaagatggttgttgatgtctctaaacaatttttccctgatatagcagtaggttttgaggaccctcgtgtaacacttactgttggtgatggagttgcattcttgaagaatgttccagaaggaacttacgatgcagttatagtggattcatccgaccctattggccctgctcaagagctgtttgaaaaacccttttttgcgtccgttgcaaaggctcttcgtcctggaggagttgtgtgtactcaagcagaaagtatatggcttcatatgcacatcattgaggacattgtggctaattgtcgccaaatattcaaaggttctatcaactatgcatggaccacagttcctacatacccaagtgggatgattggttttatgctttgctcaactgagggtcctcttgttgatttcaagcatccagtgaatcctataaatgagaatgatagtcagcaatcaagaccattgaaattttacaactctgagattcatacagcggctttctgcttgccatcttttgctaagaggaagattggttctaaaacaaattga

SEQ ID NO: 155208 - protein, 342 aa, Glycine max
MAAENVVEFTDLPVKRPREEEEEEEEQTNGVSNDAVSTLPNDPQYPGISAVIPGWFSEISPMWPGEAHSLKVEKILFQGKSDYQNVMVFQSSTYGKVLVLDGVIQLTERDECAYQEMITHLPLCSISNPKKVLVIGGGDGGVLREVARHASVEKIDICEIDKMVVDVSKQFFPDIAVGFEDPRVTLTVGDGVAFLKNVPEGTYDAVIVDSSDPIGPAQELFEKPFFASVAKALRPGGVVCTQAESIWLHMHIIEDIVANCRQIFKGSINYAWTTVPTYPSGMIGFMLCSTEGPLVDFKHPVNPINENDSQQSRPLKFYNSEIHTAAFCLPSFAKRKIGSKTN

SEQ ID NO: 155209 - DNA, 1158 bp, Triticum aestivum
  CDS (1)..(1158)
atggagggtggagacgcaagaaatggtttgactgggacatcacagacaacgggaagtggggttgagaccccagcaaagccactgcctccttgctgtgtcaaggcgagggctgcagcacctgaatctgaggccaagtgccatgccactgtggtatcgggatggttcacggagacccgctcacgatgtggtaaagcgaacaaactgcagtattacaataatccaatgtggccaggagagacccattccttgaaagtggaaaagatcctgtaccaggggaagtcaccataccaagaagtcttgatttttgagtcgttaacctatggaaaagtccttgcgcttgatggtattgtacaattgactgataaggatgaatgtgcctaccaggaaatgattactcatctcccactctgttcaattccttctcctaagaaggttttggttattggaggtggagatggtggtgtacttcgagagatagccagacatggttcagtggagtctattgatatatgtgaaattgaccagctagttattgatgtttgtaaagatttcttcccagacttatctgttggatttgaggatcctcgtgttcgacttcatgttggtgatgctgtggagttcctaagaaattctcctgaagggacatatgatgctattattgttgattcatcagatcctatagggcctgctcaggaacttgtagagaagccattttttgagacaattgctagagctttgagacctggcggtgttctttgtaatcaagctgagagtatgtggttgcatacacatctgattcaggacatgctttcgatctgctgtgagactttcaagggttctgtccactatgcctgggcaagtgtcccaacatatcctagtggtgcaattgggtttttgctatgtgccaaagagggtcgaccagtcaacttcctggcacccataaatccaattgaaaaaatagaaggcgctatgacagcagggagggacatcagattttataatactgagatgcatagggcagcgtttgttcttccaacctttgcaaagagagagctagaagcatatagttgctccactataggggcacaacaagaggaaaaatcagcagaaccagcgaaggttgccgtcgcgccacacagtgaaattcttaccgcttag

SEQ ID NO: 155210 - protein, 385 aa, Triticum aestivum
MEGGDARNGLTGTSQTTGSGVETPAKPLPPCCVKARAAAPESEAKCHATVVSGWFTETRSRCGKANKLQYYNNPMWPGETHSLKVEKILYQGKSPYQEVLIFESLTYGKVLALDGIVQLTDKDECAYQEMITHLPLCSIPSPKKVLVIGGGDGGVLREIARHGSVESIDICEIDQLVIDVCKDFFPDLSVGFEDPRVRLHVGDAVEFLRNSPEGTYDAIIVDSSDPIGPAQELVEKPFFETIARALRPGGVLCNQAESMWLHTHLIQDMLSICCETFKGSVHYAWASVPTYPSGAIGFLLCAKEGRPVNFLAPINPIEKIEGAMTAGRDIRFYNTEMHRAAFVLPTFAKRELEAYSCSTIGAQQEEKSAEPAKVAVAPHSEILTA

SEQ ID NO: 155211 - DNA, 1158 bp, Triticum aestivum
  CDS (1)..(1158)
atggagggtggaggcgcaagaaatgtttctgcagcggcagcacagacaaagggaagtgcggatgatggctcctgcaagccactgcctccttgctgtgtcaaggcgcaggctgctgcgccggaatccgaggccaagtgccacgcaactgtggtgtccgggtggttcacaggaacccgctcacgctctggtaaaccaagcaaagcgcagtacttcaacaatccaatgtggcctggggaggctcattcgttgaaagtagagaagattttgtaccaggggaaatcgccataccaagaagttttagtattcgagtcttcaacctatgggaatgtccttgtgctcgatggaattgttcagctgactgacaaggatgaatgtgcataccaggaaatggttactcaccttgcactgtgctcaattccatctcctaaaaatgttttggttgtcgggggtggtgatggtggtgtactacgagaaatagccaagcatgattcagtggagactatagacatatgcgagattgatcagctagttattgatgtttgtaaagattttttcccacgtctgtatgttggatataaagaccctcgtgtccgacttcatgttggtgatgctgtggagttcttgagaaattctccagaaggaaaatacgatgccattattgttgattcatcagacccaattgggccagctcaggagcttgtggagaagcccttctttcagacaattgctagggctttaaagcctggcggtgttctttctaatctagctgaaagtatgtggctgcacacacatctaatccaggatatgctttctatctgtcgggaggtattcaagggtggcgtgcactatgcctgggcgagtgttccgacatatcctagtggtgtcattggatttttgctatgcgcgaaggacggtccaccggtggacttcctgactcctgtgaacccaatcgagaaaattgaaggagctactaaagatggacgagagatgagattttacaattcagagattcatagggctgcttttattctgccaacgtttgtaaagagggagctggaggcatataacacttccactgaaaaggagaaaccggagaagccagcagcaaaaccagtgaagatgaaggtaatgcgggacagcgcaattaccgcttcctag

SEQ ID NO: 155212 - protein, 385 aa, Triticum aestivum
MEGGGARNVSAAAAQTKGSADDGSCKPLPPCCVKAQAAAPESEAKCHATVVSGWFTGTRSRSGKPSKAQYFNNPMWPGEAHSLKVEKILYQGKSPYQEVLVFESSTYGNVLVLDGIVQLTDKDECAYQEMVTHLALCSIPSPKNVLVVGGGDGGVLREIAKHDSVETIDICEIDQLVIDVCKDFFPRLYVGYKDPRVRLHVGDAVEFLRNSPEGKYDAIIVDSSDPIGPAQELVEKPFFQTIARALKPGGVLSNLAESMWLHTHLIQDMLSICREVFKGGVHYAWASVPTYPSGVIGFLLCAKDGPPVDFLTPVNPIEKIEGATKDGREMRFYNSEIHRAAFILPTFVKRELEAYNTSTEKEKPEKPAAKPVKMKVMRDSAITAS

SEQ ID NO: 155213 - DNA, 1014 bp, Glycine max
  CDS (1)..(1014)
atggccaaagagactagtgttgtttatctatatcccagcaaatcacaagtttggggtgagaattttgatcataaaaaacttgtaataacaacactagctgctaatggaaagaaggaggagagtaatggagcacctaatgacacatatcctgcgtttcccgggtggtatgctgatgtttcctggccaggagaagcacacacatataaaatagaaaagattctattccacgggaaatcagaattccaagagcttcttgtatttgagtcttctagacaaggcaaggttgcaattcttgatgggcatatccagctgacagaaaacgatgaatttgcttaccaagagatgctcactcaccttgcactctgttccattccagatccaaagaaggtgctgcttattggagggggagatggtggaattcttagggaaatatcacgccattcttctgttgagcatattgatatatgcgaactagaccaaatggtcattgatgtttattcggagtttttcccggatatagctgttggttacgaggatccccgagtgcatgttcatatcagcgatggagttgcgtttatcaattctgttcctgagggcacttacgatgtcattatatcggatgcttttccagcaatggggcatagtgctgatgttcttgctgatgaatgcttcttagaatcagtagcaaaggctcttcgacccggaggagtgttctctgctccagcagacagcctgtggcataagaactttgtggttgcagacaccatagcaaattgcaagaagatattcaaaggctccgttaactatgcttggaccacggttcctacatatgcaagtggggtgattggattcatgctttgctctacggagggtccaccagtgaacttcaaacatccaataaataaattgaatccagagaaaaatggggtggcaaagggacctactaagttttataacccagagatccatgctgctgcattctgtctgccttcttttgtggacaaggttgattga

SEQ ID NO: 155214 - protein, 337 aa, Glycine max
MAKETSVVYLYPSKSQVWGENFDHKKLVITTLAANGKKEESNGAPNDTYPAFPGWYADVSWPGEAHTYKIEKILFHGKSEFQELLVFESSRQGKVAILDGHIQLTENDEFAYQEMLTHLALCSIPDPKKVLLIGGGDGGILREISRHSSVEHIDICELDQMVIDVYSEFFPDIAVGYEDPRVHVHISDGVAFINSVPEGTYDVIISDAFPAMGHSADVLADECFLESVAKALRPGGVFSAPADSLWHKNFVVADTIANCKKIFKGSVNYAWTTVPTYASGVIGFMLCSTEGPPVNFKHPINKLNPEKNGVAKGPTKFYNPEIHAAAFCLPSFVDKVD

SEQ ID NO: 155215 - DNA, 1164 bp, Zea mays
  CDS (1)..(1164)
atggctggaggcgcaggaaatggttcgaacgaggcggtgcaggcaaaggggagtgggggtgatagctccgccgccaagccgctgcccccttgctgcgtcaaggcgagagcggcggcgcccgagtctgaggccaagtgccatgccaccgtggtttcgggatggttcaccgagccacgatcacactgcggtaaagccagcaaggttcagtattacaataacccaatgtggccaggagaggcccattccttgaaagtggagaacatattgtaccaggggaaatcaccataccaggaagtcctggtctttgagtcgtcaacctatgggaaagtccttgtgcttgatggtattgttcaattgactgataaggatgaatgtgcgtaccaggaaatgattactcacctcccactctgttcaattccatcccctaaaaaggttttggttattggtggtggtgatggaggtgtacttcgagagatttccagacacagctcagtggagtctattgacatatgtgaaattgatcagctggttattgatatctgcaaggaattcttcccacatttgtctgttggatttgaagatcctcgtgttcaacttcatgttggtgacgctgtggagttcttgagaaatgctcctgaagggacatatgatgctatcattgttgattcatctgacccaatagggcctgctcaggaactgggggagaagcctttttttgagaccatcgctagagctttgaggcctggtggtgttctttgtaatcaagctgagagtatgtggttgcatacacatttgattcaggacatgctttcaatttgccgtgagactttcaagggttctgtccgctatgcatgggctagtgtcccaacatacccgagtggggtgattgggtttctgttatgcgccaaggatggcccaccggtcaactttctgactcctgtaaatccaattgaagaagtggaaggagctactaaagcgggaagggagatcaggttttataattcagagatgcatatggcagcgtttgttcttccgacatttgccaagagggagctagaagcatactgtgcttccacggaaacggagcaggcggaggaagtagcggccacggcaccacaaaagctaactgcggcgcccaagcgtggaattaccaccgcatcctag

SEQ ID NO: 155216 - protein, 387 aa, Zea mays
MAGGAGNGSNEAVQAKGSGGDSSAAKPLPPCCVKARAAAPESEAKCHATVVSGWFTEPRSHCGKASKVQYYNNPMWPGEAHSLKVENILYQGKSPYQEVLVFESSTYGKVLVLDGIVQLTDKDECAYQEMITHLPLCSIPSPKKVLVIGGGDGGVLREISRHSSVESIDICEIDQLVIDICKEFFPHLSVGFEDPRVQLHVGDAVEFLRNAPEGTYDAIIVDSSDPIGPAQELGEKPFFETIARALRPGGVLCNQAESMWLHTHLIQDMLSICRETFKGSVRYAWASVPTYPSGVIGFLLCAKDGPPVNFLTPVNPIEEVEGATKAGREIRFYNSEMHMAAFVLPTFAKRELEAYCASTETEQAEEVAATAPQKLTAAPKRGITTAS

SEQ ID NO: 155217 - DNA, 1164 bp, Zea mays
  CDS (1)..(1164)
atggaggctggaggcgcaggaagtggtttgaatggggcggtgcaggcaaaggggactggggctgatgatggctctgccaagcggctgccgccttgctgcgtcaaggccagagccgccgcgccggagtccgaggccaggtgccacgccaccgtcgtttcaggatggttcactgaaccgcgatcgcgctgtggcaaagccagcaaagttcagtattacaataacccgatgtggccaggagaggccaattctttgaaagtggagaagatcttataccaggggaaatcgctataccaagaagtcttagtcttcgagtcgtcgacctatggtaaagtccttgtgcttgatggtattgttcagttgactgacaaggatgaatgtgcataccaggaaatgattactcacctgccactttgctcaattccatcccctaaaaaagttttggttattggtggtggtgatggaggtgtacttcgagaggtatccaggcatagttcagtggagtccattgacatatgtgagattgatcagctggttattgatgtgtgcaaagatttcttcccacacttgtctgttggatttcaagatcctcgtgttcaacttcatgtcggcgatgctgtggagttcttgagaaatgctcctgaagggacatatgatgctatcattgttgattcgtcagatccaatagggcctgctcaggaacttgtagagaagcctttttttgatacgattgctagagctttgaggcctggaggcgttctttgtaatcaagctgagagtatgtggttacatacacatttgattcaggatatgctttcaatttgccgtgaaactttcaagggttctgtacgctatgcatggacaagtgtcccaacatacccgagtggggtgattggatttttactatgtgccaaagaaggtccattggtgaactttctgactcctataaatccaattgaaaagctggaaggagctacaaaagctggaagggagatcagattttataactcagagatgcatagggcagcatttgttctcccgacctttgcaaggagagagctagaagcatattacgtttccactgaaacagagcaagcggaggaaacagcggcggcaccactgaagttgactcttgcatccaggagtgaaattttcgctacatcctag

SEQ ID NO: 155218 - protein, 387 aa, Zea mays
MEAGGAGSGLNGAVQAKGTGADDGSAKRLPPCCVKARAAAPESEARCHATVVSGWFTEPRSRCGKASKVQYYNNPMWPGEANSLKVEKILYQGKSLYQEVLVFESSTYGKVLVLDGIVQLTDKDECAYQEMITHLPLCSIPSPKKVLVIGGGDGGVLREVSRHSSVESIDICEIDQLVIDVCKDFFPHLSVGFQDPRVQLHVGDAVEFLRNAPEGTYDAIIVDSSDPIGPAQELVEKPFFDTIARALRPGGVLCNQAESMWLHTHLIQDMLSICRETFKGSVRYAWTSVPTYPSGVIGFLLCAKEGPLVNFLTPINPIEKLEGATKAGREIRFYNSEMHRAAFVLPTFARRELEAYYVSTETEQAEETAAAPLKLTLASRSEIFATS

SEQ ID NO: 155219 - DNA, 957 bp, Zea mays
  CDS (1)..(957)
atggaagccgaggcggcggccaagaggacgcgggacagcggggaggacgccgccgcggcggggatctccgccgtcatcccgggatggttctccgagatcagccccatgtggcccggtgaggcgcactctttgaaggtggacaaggtgctgttccaagggaagtcagactaccaaagcgttatggtctttcagtcctctacgtacgggaaggtgctcgtcctcgatggagttattcaggtgacggagagggatgagtgtgcgtaccaagagatgatcactcacctgcccctttgctccatcaaagaccccaagaaggtgttggttattggagggggtgacggtggtgttctgcgtgaggtttcacggcattcctctgtggaacaaattgacatctgtgaaattgacaagatggtggtagatgtctccaaacaatttttccctcatttagctgttggatttgaagaccctcgtgtgtcattacacattggagatggggttgcctttttgaaaaatgctccagagggtacatatgatgcagtaattgtggattcttctgatccgataggtcctgctcaggagctttttgagaagcctttcttccagtcggtggccagagctttgcgtccaggtggagttgtatgcacccaggcagagagcatatggctacatatgcacatcattgaagatattttcgtcaattgccgccaagttttcaaaggctcagttaactatgcttggacaacagtacctacataccctagcggagttattgggttcatgctttgctccaccgaagggcctgctgttgatttccagcaccctgttttcaacatcgaggaggatgaacattctacgaaatcaaaaggaccccttaagttctacaactcggagatccacacggcatcattctgtttgccctcttttgcaaagagggtaattgagtcaaaggcaagctag

SEQ ID NO: 155220 - protein, 318 aa, Zea mays
MEAEAAAKRTRDSGEDAAAAGISAVIPGWFSEISPMWPGEAHSLKVDKVLFQGKSDYQSVMVFQSSTYGKVLVLDGVIQVTERDECAYQEMITHLPLCSIKDPKKVLVIGGGDGGVLREVSRHSSVEQIDICEIDKMVVDVSKQFFPHLAVGFEDPRVSLHIGDGVAFLKNAPEGTYDAVIVDSSDPIGPAQELFEKPFFQSVARALRPGGVVCTQAESIWLHMHIIEDIFVNCRQVFKGSVNYAWTTVPTYPSGVIGFMLCSTEGPAVDFQHPVFNIEEDEHSTKSKGPLKFYNSEIHTASFCLPSFAKRVIESKAS

SEQ ID NO: 155221 - DNA, 1125 bp, Zea mays
  CDS (1)..(1125)
atggaggttggagacgcaagaaacggttctgcagcagcggcactgacaaagggaggtgcggatgatgccgcccgcaaaccgctccctccttgctgcgtcaaggccaaggcgcgggtgcctgaaaccgaggccaactgccatgatactgtggtttcagggtggttcacggaacccagatcgcgttttggagaggcccattcattgaaagtggagaagatcttgtttcaagggaaatcgccttaccaagaaattttagtttttgagtcttcaacctatggaaatgttcttgtgcttgatggtatagttcagttgactgacaaggatgaatgcgcataccaggaaatggttactcaccttccactgtgctcaattcctgcaccgaagaatgttttggttgttggaggtggtgatggtggtgtactgcgcgaaatagccagacatgattcagtggaaactattgatatatgtgagattgatcaactagttattgatgtttccaaagaattctttccaaacttatccattggattcaaagatcctcgtgtccgacttcatgttggtgatgctgttgatttcctgaggaattctcccgaaggaaaatatgatgctattattgtagattcatcagatccaattgggccagcacaggcactcgtggagaaaccgtttattcagacaattgctagagctttgaagcctggtggtgttctttgtaatcttgctgagagcatgtggctgcacacacatctaatccaggatatgcttgctatctgtcgacagacattcaaaggtgctgtgcactatgcctggacaagtgttccaacatatcccagtggtgtcattggatttttgctatgtgcaaaagaaggtcgtgcagtgaacttcttgactcctgcgaatccaattgagaaaatagaaggagcagcaaaagctggaagggaactcagattttacaattccgagatccatagggctgcttttgttctgccaacatttgtaagaagagaactggaagcatataccactcctattagttttgctgaaaacgagaaaccgaaagaatcagtgtcagaaccgcagaagataaagatattgtcaaacaacgccattcttacagcttcctag

SEQ ID NO: 155222 - protein, 374 aa, Zea mays
MEVGDARNGSAAAALTKGGADDAARKPLPPCCVKAKARVPETEANCHDTVVSGWFTEPRSRFGEAHSLKVEKILFQGKSPYQEILVFESSTYGNVLVLDGIVQLTDKDECAYQEMVTHLPLCSIPAPKNVLVVGGGDGGVLREIARHDSVETIDICEIDQLVIDVSKEFFPNLSIGFKDPRVRLHVGDAVDFLRNSPEGKYDAIIVDSSDPIGPAQALVEKPFIQTIARALKPGGVLCNLAESMWLHTHLIQDMLAICRQTFKGAVHYAWTSVPTYPSGVIGFLLCAKEGRAVNFLTPANPIEKIEGAAKAGRELRFYNSEIHRAAFVLPTFVRRELEAYTTPISFAENEKPKESVSEPQKIKILSNNAILTAS

SEQ ID NO: 155223 - DNA, 21 bp, Artificial sequence
  primer
atggccgaaaaaaaacagtgg

SEQ ID NO: 155224 - DNA, 23 bp, Artificial sequence
  primer
ttaggacggctgtgaagccagtg

SEQ ID NO: 155225 - protein, 353 aa, Artificial sequence
  consensus sequence
  Variant (2)..(15): Xaa in position 2 to 15 is any amino acid
  Variant (16)..(64): Xaa in position 16 to 64 is any or no amino acid
  Variant (66)..(71): Xaa in position 66 to 71 is any amino acid
  Variant (72)..(72): Xaa in position 72 is any or no amino acid
  Variant (74)..(83): Xaa in position 74 to 83 is any amino acid
  Variant (85)..(88): Xaa in position 85 to 88 is any amino acid
  Variant (92)..(93): Xaa in position 92 to 93 is any amino acid
  Variant (95)..(95): Xaa in position 95 is any amino acid
  Variant (97)..(98): Xaa in position 97 to 98 is any amino acid
  Variant (101)..(102): Xaa in position 101 to 102 is any amino acid
  Variant (104)..(104): Xaa in position 104 is any amino acid
  Variant (107)..(108): Xaa in position 107 to 108 is any amino acid
  Variant (110)..(120): Xaa in position 110 to 120 is any amino acid
  Variant (121)..(124): Xaa in position 121 to 124 is any or no amino acid
  Variant (127)..(128): Xaa in position 127 to 128 is any amino acid
  Variant (134)..(136): Xaa in position 134 to 136 is any amino acid
  Variant (139)..(141): Xaa in position 139 to 141 is any amino acid
  Variant (143)..(144): Xaa in position 143 to 144 is any amino acid
  Variant (145)..(148): Xaa in position 145 to 148 is any or no amino acid
  Variant (150)..(154): Xaa in position 150 to 154 is any amino acid
  Variant (158)..(159): Xaa in position 158 to 159 is any amino acid
  Variant (161)..(168): Xaa in position 161 to 168 is any amino acid
  Variant (170)..(184): Xaa in position 170 to 184 is any amino acid
  Variant (185)..(191): Xaa in position 185 to 191 is any or no amino acid
  Variant (194)..(204): Xaa in position 194 to 204 is any amino acid
  Variant (205)..(209): Xaa in position 205 to 209 is any or no amino acid
  Variant (211)..(211): Xaa in position 211 is any amino acid
  Variant (214)..(214): Xaa in position 214 is any amino acid
  Variant (216)..(217): Xaa in position 216 to 217 is any amino acid
  Variant (220)..(221): Xaa in position 220 to 221 is any amino acid
  Variant (222)..(228): Xaa in position 222 to 228 is any or no amino acid
  Variant (231)..(233): Xaa in position 231 to 233 is any amino acid
  Variant (235)..(240): Xaa in position 235 to 240 is any amino acid
  Variant (241)..(241): Xaa in position 241 is any or no amino acid
  Variant (243)..(243): Xaa in position 243 is any amino acid
  Variant (244)..(245): Xaa in position 244 to 245 is any or no amino acid
  Variant (247)..(250): Xaa in position 247 to 250 is any amino acid
  Variant (252)..(272): Xaa in position 252 to 272 is any amino acid
  Variant (273)..(275): Xaa in position 273 to 275 is any or no amino acid
  Variant (277)..(286): Xaa in position 277 to 286 is any amino acid
  Variant (287)..(288): Xaa in position 287 to 288 is any or no amino acid
  Variant (292)..(293): Xaa in position 292 to 293 is any amino acid
  Variant (295)..(317): Xaa in position 295 to 317 is any amino acid
  Variant (318)..(339): Xaa in position 318 to 339 is any or no amino acid
  Variant (341)..(344): Xaa in position 341 to 344 is any amino acid
  Variant (346)..(348): Xaa in position 346 to 348 is any amino acid
  Variant (349)..(349): Xaa in position 349 is any or no amino acid
  Variant (351)..(351): Xaa in position 351 is any amino acid
WXXXXXXXXXXXXXXXXXXXXXXXXXXXXXXXXXXXXXXXXXXXXXXXXXXXXXXXXXXXXXXXLXXXXXXXQXXXXXXXXXXGXXXXLDGXXQXTXXDEXXYXEMXXHXXXXXXXXXXXXXXXVLXXGGGDGXXXREXXXHXXXXXXEXXXXXEIDXXVXXXXXXXXPXXXXXXXXXXXXXXXXXXXXXXDGXXXXXXXXXXXXXXXXDXIIXDXXDPXXXXXXXXXLFXXXFXXXXXXXLXXXGXXXXQXXXXXXXXXXXXXXXXXXXXXXXXFXXXXXXXXXXXXPTYXXGXXXXXXXXXXXXXXXXXXXXXXXXXXXXXXXXXXXXXXXXXXXXXYXXXXHXXXXFXLP

SEQ ID NO: 155226 - protein, 24 aa, Artificial sequence
  protein pattern
  Variant (2)..(3): Xaa in position 2 to 3 is any amino acid
  Variant (4)..(4): Xaa in position 4 is Phe, Leu or Met
  Variant (5)..(5): Xaa in position 5 is any amino acid
  Variant (6)..(6): Xaa in position 6 is Ile or Leu
  Variant (7)..(7): Xaa in position 7 is Asp or Asn
  Variant (8)..(8): Xaa in position 8 is Asp, Gly or Asn
  Variant (9)..(15): Xaa in position 9 to 15 is any amino acid
  Variant (18)..(19): Xaa in position 18 to 19 is any amino acid
  Variant (21)..(21): Xaa in position 21 is any amino acid
  Variant (23)..(23): Xaa in position 23 is any amino acid
  Variant (24)..(24): Xaa in position 24 is Ile, Leu, Met or Val
GXXXXXXXXXXXXXXDEXXYXEXX

SEQ ID NO: 155227 - protein, 14 aa, Artificial sequence
  protein pattern
  Variant (3)..(4): Xaa in position 3 to 4 is Ile or Val
  Variant (6)..(6): Xaa in position 6 is Ala or Gly
  Variant (8)..(8): Xaa in position 8 is any amino acid
  Variant (10)..(11): Xaa in position 10 to 11 is any amino acid
  Variant (12)..(12): Xaa in position 12 is Ala, Ile, Leu or Val
  Variant (13)..(13): Xaa in position 13 is any amino acid
  Variant (14)..(14): Xaa in position 14 is Glu or Arg
VLXXGXGXGXXXXX

SEQ ID NO: 155228 - protein, 13 aa, Artificial sequence
  protein pattern
  Variant (2)..(2): Xaa in position 2 is Ala, Leu or Val
  Variant (3)..(3): Xaa in position 3 is Ile or Val
  Variant (5)..(5): Xaa in position 5 is any amino acid
  Variant (7)..(7): Xaa in position 7 is any amino acid
  Variant (8)..(8): Xaa in position 8 is Ala, Asn, Pro, Ser or Thr
  Variant (11)..(11): Xaa in position 11 is any amino acid
  Variant (12)..(12): Xaa in position 12 is any or no amino acid
DXXIXDXXDPXXG

SEQ ID NO: 155229 - protein, 16 aa, Artificial sequence
  protein pattern
  Variant (2)..(2): Xaa in position 2 is Asn, Ser or Thr
  Variant (3)..(4): Xaa in position 3 to 4 is any amino acid
  Variant (5)..(5): Xaa in position 5 is Ile, Leu, Met or Val
  Variant (7)..(7): Xaa in position 7 is any amino acid
  Variant (8)..(8): Xaa in position 8 is Ala, Gly, Ser, Thr or Val
  Variant (9)..(9): Xaa in position 9 is any amino acid
  Variant (11)..(11): Xaa in position 11 is any amino acid
  Variant (14)..(15): Xaa in position 14 to 15 is any amino acid
  Variant (16)..(16): Xaa in position 16 is Ala, Ile, Leu or Val
YXXXXHXXXFXLPXXX

SEQ ID NO: 155230 - DNA, 501 bp, ESCHERICHIA COLI
  CDS (1)..(501): transl_table=11
atgctggaaacagaaacgggccgctactctgacacactgcgttcggcgctggtttctctcgatggcgataacgcatgggcattaagcgaaagctggtgtggcactattcagtggatttgtccgagtccgtatcggcctcatcatgggcgcaaaaactggtttctgggcattgggcgttttaccgctgatgagcaggaacaatcggatgcaatccgttatgagacgctgcgttcgtcggggccgggcggtcaacatgtcaataaaaccgactcggcggtacgcgccacgcatttggcatccggtattagcgtgaaggttcagtcagagcgtagtcagcatgctaacaagcggctggcacgattgctgattgcctggaagctggagcaacagcaacaggaaaatagcgcggcgctgaaatcgcagcggcgaatgttccatcaccagattgaacgtggcaacccgcgacggacatttacagggatggcttttatcgaaggataa

SEQ ID NO: 155231 - protein, 166 aa, ESCHERICHIA COLI
MLETETGRYSDTLRSALVSLDGDNAWALSESWCGTIQWICPSPYRPHHGRKNWFLGIGRFTADEQEQSDAIRYETLRSSGPGGQHVNKTDSAVRATHLASGISVKVQSERSQHANKRLARLLIAWKLEQQQQENSAALKSQRRMFHHQIERGNPRRTFTGMAFIEG

SEQ ID NO: 155232 - DNA, 1407 bp, Oryza sativa
  CDS (1)..(1407)
atggcttcccgcctcctaaccagatcaaccgccgcgcgcctcctctcccacctccgctcctccggggccctgagccctacccaccaccaccaccaccacctcgataatggcgccgccttggcctccctcctgggactcggccgcggtggcctccctgcggcggccggaccatggtcccctcgagacccgccgacgcggtggttctcttccccggctacggtggcggaggcgccgatgaccgcggacgggctcacggtggactcgatcgcggggaaggggtggacgatcctccccgaggccgagagcgactggcgcagccacgccgccgccgtcgcgcagtccgtcaagctcatcaagaagcggctcaagtggggatggatacttgagagatcaaggcagttgtctgtggtgttggagaggccggacctctgggatgatccagttttcgctgggaaggttagccgtgaacatggtgagctcatgggcaagattaaatcagtgaaccaattcgagcaggagttgatggagcacattgacatgttgaggcttgcaagagaagaggacgataatgaacttgagacggaaaccatgagggcattagccgaaatgagaagaagtgcaaaggagaaagaactgaatgcattgctttctggagataatgactcttgctcttgcttcattgaggttcaggcaggagctggaggtactgagagcatggattgggctgcaatggttatgaacatgtacagctcatgggcccaacgacgaggatacacagtcagtattatagaagaaatgcctggtgaaatagcaggaatcaagagggcaactatcaaagtggatggtgaatatgcatttggatatgctaaagccgaagtaggtgttcatagattggtacggatttctccatttgacagtggaaagaggcggcacacttcctttgctgctgtggctgttgtacctattcttggtgatggttctacccgataccagataaaagattcagatcttcggatagagcgtttccgctctggtggtcctggtggccaacatgccaactgcacagaaagtgctgttagaattgtgcacattccaactggtataactgcaacttgtcaaaatgaaagatcacagcatatgaataaggcatcagcaatggcagtgctccagtctcggctggaccagcttgagattgcccgccaagcacagatgaatgcagaccacacgcaatcactctctgaaatcagctggggaaaccaaataagatcttatgtactccatccatatcgtatggtcaaagatctccggacaaactacgaagtatccgaccctgattcagtcctcaatggggacctagatgatttcatcttgaactttttgtcaacgtcactggatgaagctgattga

SEQ ID NO: 155233 - protein, 468 aa, Oryza sativa
MASRLLTRSTAARLLSHLRSSGALSPTHHHHHHLDNGAALASLLGLGRGGLPAAAGPWSPRDPPTRWFSSPATVAEAPMTADGLTVDSIAGKGWTILPEAESDWRSHAAAVAQSVKLIKKRLKWGWILERSRQLSVVLERPDLWDDPVFAGKVSREHGELMGKIKSVNQFEQELMEHIDMLRLAREEDDNELETETMRALAEMRRSAKEKELNALLSGDNDSCSCFIEVQAGAGGTESMDWAAMVMNMYSSWAQRRGYTVSIIEEMPGEIAGIKRATIKVDGEYAFGYAKAEVGVHRLVRISPFDSGKRRHTSFAAVAVVPILGDGSTRYQIKDSDLRIERFRSGGPGGQHANCTESAVRIVHIPTGITATCQNERSQHMNKASAMAVLQSRLDQLEIARQAQMNADHTQSLSEISWGNQIRSYVLHPYRMVKDLRTNYEVSDPDSVLNGDLDDFILNFLSTSLDEAD

SEQ ID NO: 155234 - DNA, 1383 bp, Oryza sativa
  CDS (1)..(1383)
atgtcctgtagccgaagtgcggcaatgattgactgcccgcggctgctcctggcggccgcgcgcgcctctccgtaccccagctccgccgctcaccggagggtctgcaccgccggagtccctcccgtacccgtatattgccgtgtcagccaccgccgcaggtcctccgttcctgtgcaatctgcatcctctgggtcaggaagccaatcaagcgttgcagaaagttcggaggctaccgaatgggccatgcaggatttctacgctttgcggaaggatgtcgagctggctgtagcgcgcgtcagtgaagtcaggcagtctgctggtttggatcagcttgaggaggaaatcgcttcgctcgagaagaaatctgcagatagttccttgtgggatgatccttccaaggcacaggagatacttgttgctctgacagaggtcaaagacagagtcaagcttctcaacgatttgaagttgcaggttgaagaagctgagaccattgtaaagcttactgaggagttagattccatagatactggccttcttgaagaagcctcaaagatcataaaggcattaaacaaagcactagataactttgagatgacacagcttctttctggaccttatgacaaggaaggtgctgtgattaatattactgcaggtgctggtggcaccgatgcccaggattgggctgacatgttactgaggatgtatgttaggtggggagagaagcagcggtacaagacaagagtggttgagaaatcccctggtgaagaagctggaataaaatcagctaccattgaattagaaggaagatatgcctatgggtatctctctggggagaaagggacacacagaattgttcgtcagtccccattcaatgctaaagggcttaggcagacaagctttgctggtgttgaagtaatgcctctactgccagaagagtccatggatgtagaaatacccgaagaggatctggagataagcttcactagagcaggcggcaaaggaggccagaatgtgaacaaggtggagacggctgttcgcatggtccatatacccacgggcatcgctgttcgttgcacagaggagaggagccagttggccaacaagataaaggccctgagccggctgaaggcgaagctgctggtgatcgccgaggagcagcgggcgtcggagatcaagcagatccgcggcgacgcggtgaaggcggagtgggggcagcagatccgcaactacgtcttccacccctacaagctcgtcaaggacgtccgcaccgcctgcgagacgtcggacatcaccggcgtcatggacggcgagctggacaccttcatcagagcctacctcaagtacaagctctctgccgctgctgaggagcaaagcgtcaagtga

SEQ ID NO: 155235 - protein, 460 aa, Oryza sativa
MSCSRSAAMIDCPRLLLAAARASPYPSSAAHRRVCTAGVPPVPVYCRVSHRRRSSVPVQSASSGSGSQSSVAESSEATEWAMQDFYALRKDVELAVARVSEVRQSAGLDQLEEEIASLEKKSADSSLWDDPSKAQEILVALTEVKDRVKLLNDLKLQVEEAETIVKLTEELDSIDTGLLEEASKIIKALNKALDNFEMTQLLSGPYDKEGAVINITAGAGGTDAQDWADMLLRMYVRWGEKQRYKTRVVEKSPGEEAGIKSATIELEGRYAYGYLSGEKGTHRIVRQSPFNAKGLRQTSFAGVEVMPLLPEESMDVEIPEEDLEISFTRAGGKGGQNVNKVETAVRMVHIPTGIAVRCTEERSQLANKIKALSRLKAKLLVIAEEQRASEIKQIRGDAVKAEWGQQIRNYVFHPYKLVKDVRTACETSDITGVMDGELDTFIRAYLKYKLSAAAEEQSVK

SEQ ID NO: 155236 - DNA, 1140 bp, Oryza sativa
  CDS (1)..(1140)
atgcaggatttctacgctttgcggaaggatgtcgagctggctgtagcgcgcgtcagtgaagtcaggcagtctgctggtttggatcagcttgaggaggaaatcgcttcgctcgagaagaaatctgcagatagttccttgtgggatgatccttccaaggcacaggagatacttgttgctctgacagaggtcaaagacagagtcaagcttctcaacgatttgaagttgcaggttgaagaagctgagaccattgtaaagcttactgaggagttagattccatagatactggccttcttgaagaagcctcaaagatcataaaggcattaaacaaagcactagataactttgagatgacacagcttctttctggaccttatgacaaggaaggtgctgtgattaatattactgcaggtgctggtggcaccgatgcccaggattgggctgacatgttactgaggatgtatgttaggtggggagagaagcagcggtacaagacaagagtggttgagaaatcccctggtgaagaagctggaataaaatcagctaccattgaattagaaggaagatatgcctatgggtatctctctggggagaaagggacacacagaattgttcgtcagtccccattcaatgctaaagggcttaggcagacaagctttgctggtgttgaagtaatgcctctactgccagaagagtccatggatgtagaaatacccgaagaggatctggagataagcttcactagagcaggcggcaaaggaggccagaatgtgaacaaggtggagacggctgttcgcatggtccatatacccacgggcatcgctgttcgttgcacagaggagaggagccagttggccaacaagataaaggccctgagccggctgaaggcgaagctgctggtgatcgccgaggagcagcgggcgtcggagatcaagcagatccgcggcgacgcggtgaaggcggagtgggggcagcagatccgcaactacgtcttccacccctacaagctcgtcaaggacgtccgcaccgcctgcgagacgtcggacatcaccggcgtcatggacggcgagctggacaccttcatcagagcctacctcaagtacaagctctctgccgctgctgaggagcaaagcgtcaagtga

SEQ ID NO: 155237 - protein, 379 aa, Oryza sativa
MQDFYALRKDVELAVARVSEVRQSAGLDQLEEEIASLEKKSADSSLWDDPSKAQEILVALTEVKDRVKLLNDLKLQVEEAETIVKLTEELDSIDTGLLEEASKIIKALNKALDNFEMTQLLSGPYDKEGAVINITAGAGGTDAQDWADMLLRMYVRWGEKQRYKTRVVEKSPGEEAGIKSATIELEGRYAYGYLSGEKGTHRIVRQSPFNAKGLRQTSFAGVEVMPLLPEESMDVEIPEEDLEISFTRAGGKGGQNVNKVETAVRMVHIPTGIAVRCTEERSQLANKIKALSRLKAKLLVIAEEQRASEIKQIRGDAVKAEWGQQIRNYVFHPYKLVKDVRTACETSDITGVMDGELDTFIRAYLKYKLSAAAEEQSVK

SEQ ID NO: 155238 - DNA, 1326 bp, Glycine max
  CDS (1)..(1326)
atgctacaccagaaagtaacaaacatgtgtttaattactttaaagcaagttacaatccgaaaagctaatccaaaatataatattacatttttttcaaaaagtaaaagaagtgcagaaagcaatgccgctgctgccaccactgaaccctcaacctccgatgggctcacggtccaaggaattctggccaataattggaacattctcgacgaaaacgacggcgattggaagagtcatgccaccgccatagctcaatctattcacttgatcaaacgccgtttacattgggaaaaattgaaggtgaggttggatatgttatcattccagctgagtaaggaagacctttgggatgatccggtgcgtgcaggtaaaataagccgagagcacggttcgctcttgggaaaaatgaaagaggtaaatgcatttgaacaagagttgcttgagcacattgacatgataaagcttgcgcgcgaagagaatgatgcggatttggaatcggaatcactgaaagcgttgcttaacatgagaagaaatgcaaaagagaaagagctagaggcattgctttctggggagcaagattcttgttcgtgctacattgaggttcaagctggtgctgggggtactgagagcatggactgggctgcaatggtcatgcagatgtataagtcatgggcacagcaacgtggatataaagtaactgtagtggatgaaatgcctggtgagattgcaggaatcaagcgagctaccatcaaagtagatggtgagtttgcatttggatatgccaaagcagaaataggagtgcacaggctggtgcgcatatcaccttttgacagtaataagcgccggcatacttcatttgccgctgtggcagtgattccaatccttggtgatggatctacccatgtacaaattaatgaatctgatcttcgaattgaacgatttcgtgctggtggtgctggtggccaacatgttaacacaactgagagtgctgtaagaatagttcatattcctacaggagttactgcaacttgtcagaatgaaagatcgcagcatcagaataaggcttcagcaatggctgtacttcagtcaagattagaccaactggagatggcacgccaggcacagttcaatgcacaacatacacaatctctcaccgacataacatggggcagtcagattcgtagttatgttctccatccttaccgtatggtgaaagatcttagaactaactatgaggtttcagatcctgactctgtccttgagggagatctagacagtttcatcttaagctatctgtcagcttctttggataaagatgatgatgcttaa

SEQ ID NO: 155239 - protein, 441 aa, Glycine max
MLHQKVTNMCLITLKQVTIRKANPKYNITFFSKSKRSAESNAAAATTEPSTSDGLTVQGILANNWNILDENDGDWKSHATAIAQSIHLIKRRLHWEKLKVRLDMLSFQLSKEDLWDDPVRAGKISREHGSLLGKMKEVNAFEQELLEHIDMIKLAREENDADLESESLKALLNMRRNAKEKELEALLSGEQDSCSCYIEVQAGAGGTESMDWAAMVMQMYKSWAQQRGYKVTVVDEMPGEIAGIKRATIKVDGEFAFGYAKAEIGVHRLVRISPFDSNKRRHTSFAAVAVIPILGDGSTHVQINESDLRIERFRAGGAGGQHVNTTESAVRIVHIPTGVTATCQNERSQHQNKASAMAVLQSRLDQLEMARQAQFNAQHTQSLTDITWGSQIRSYVLHPYRMVKDLRTNYEVSDPDSVLEGDLDSFILSYLSASLDKDDDA

SEQ ID NO: 155240 - DNA, 1371 bp, Glycine max
  CDS (1)..(1371)
atggaggttgtttcgcagcctctgtgcacaattcttacccccacgcgcaaacactcacttctcattccacaacaaatccccaatccttctaaacattttcccttcttatcctttcgcgccaccactctctccacttcttcgcgtttttctcctccacctcttttgttcgcgacgccggaaaaccaattgagcatcggggaaggagagaacaccgatgcaagtgattgggcactacaagatttttattccctgaggaaggatgttgaaattatgtcacagcgtgttggagagattagagaatcttctggtctacagctattggagcaagaacttggcaatttggaggagcaagcagctgatagctccttttgggacaatcggggcaaagctcaagagactctctcgaccttggctgatgtcaaagataagataaaattactcaatgatttcaaaacacaggttgaggatgcagaaacaatagttagcttgactgaggaaatggactccattgatagagggctttttgaggaggcttccaatcttattaaagaactgaataaatcaatagatcgatatgagctgactcaacttctatctggtccttatgataaagaaggtgctgttatctctattacagcaggtgctggtggtactgatgcacaggattgggccgacatgcttcttaggatgtacatgagatggggtgagaaacagaaatacaagaccagagtggttgagaaatcccccggagaagaagctggaattaaatctgctaccattgaagttgaaggtcgttatgcatatggatatttgtctggggagaaaggaacgcatcgcattgttcgtcaatcaccttttaatgccaaaggccttcgtcagacaagcttttctggtgttgaggtcatgcctcttcttccagatgaatctatgaatgttgaaattcctgaggaggacctggaaattagtttttcaagagcaggtggaaagggaggtcagaatgtgaacaaggttgaaactgcagttcggatcactcacattccaactggtgtcactgttcgctgcacagaggagagatcccaactggcaaataagatcagagctttaagccgtttgaaagccaagttgttggttatagctgaagagcaacgcgcatcagaaattaagcagattcggggggacgcagtcaaggctgaatgggggcaacaaatacggaactatgtattccatccgtacaaactagtaaaagatgtaagaacggggcatgaaacgacagatatcacctctgttatggatggcgagttggatcccttcatcaaatcttacctcaaacacaaatacaatatgtcactgtctacaagtggggttaactaa

SEQ ID NO: 155241 - protein, 456 aa, Glycine max
MEVVSQPLCTILTPTRKHSLLIPQQIPNPSKHFPFLSFRATTLSTSSRFSPPPLLFATPENQLSIGEGENTDASDWALQDFYSLRKDVEIMSQRVGEIRESSGLQLLEQELGNLEEQAADSSFWDNRGKAQETLSTLADVKDKIKLLNDFKTQVEDAETIVSLTEEMDSIDRGLFEEASNLIKELNKSIDRYELTQLLSGPYDKEGAVISITAGAGGTDAQDWADMLLRMYMRWGEKQKYKTRVVEKSPGEEAGIKSATIEVEGRYAYGYLSGEKGTHRIVRQSPFNAKGLRQTSFSGVEVMPLLPDESMNVEIPEEDLEISFSRAGGKGGQNVNKVETAVRITHIPTGVTVRCTEERSQLANKIRALSRLKAKLLVIAEEQRASEIKQIRGDAVKAEWGQQIRNYVFHPYKLVKDVRTGHETTDITSVMDGELDPFIKSYLKHKYNMSLSTSGVN

SEQ ID NO: 155242 - DNA, 615 bp, Pseudomonas aeruginosa PAO1
  CDS (1)..(615): transl_table=11
atgatcctgctgcaactctccgcggcccaggggccggcggaatgctgcctggcggtggcgaaggcgttcgagcggctgtgcctcgaggcggcgcaagccggcgtcgaggtcgaggtaatcgaggaggtggccggcgagcgtccgcgcacctggcgttcgctgctcctggggctgcgcggcactgccgccgaagcgctcgccgagcgctggtgcggcggtatccagtggatctgccccagcccctaccgggcaaggcatgcgcgcaagaactggttcatcggcgcggagcgcttcgccgcgccgccggccagtctggagggcgagatccgtttcgagaccctgcgctcttccggccccggcggccagcatgtcaacaccaccgactcggcggtgcgcgccacccacctggccagcggcatcagcgtcagggtgcagagccagcgtagccagcacgccaacaaacgcctggcgatcctgctgatcgcccggcgcctcgcggaccaggcgagcagcgcggccgacgcgctgcgcgcggagcgccgccgggcccacggtcggatcagtcgcggcgcggctcgccgggtattccgcggcgagcgtttcgagccggcctga

SEQ ID NO: 155243 - protein, 204 aa, Pseudomonas aeruginosa PAO1
MILLQLSAAQGPAECCLAVAKAFERLCLEAAQAGVEVEVIEEVAGERPRTWRSLLLGLRGTAAEALAERWCGGIQWICPSPYRARHARKNWFIGAERFAAPPASLEGEIRFETLRSSGPGGQHVNTTDSAVRATHLASGISVRVQSQRSQHANKRLAILLIARRLADQASSAADALRAERRRAHGRISRGAARRVFRGERFEPA

SEQ ID NO: 155244 - DNA, 501 bp, Escherichia coli O157:H7 EDL933
  CDS (1)..(501): transl_table=11
gtgctggaaacagaaacgggccgctactctgacacgctgcgttcggcgctgatttctctggatggcgacaacgcatgggcgttaagcgaaagttggtgcggcactattcagtggatttgtctgagtccgtatcggcctcatcatgggcgcaaaaactggtttctgggcattgggcgttttaccgctgatgagcaggaacaatcggatgcaatccgttatgagacgctgcgtccgtcggggccgggcggtcaacatgtcaataaaaccgactcggcggtacgcgccacgcatctggcaaccgggattagcgtgaaggttcagtcagaacgcagccagcatgctaacaaacggctggcgcgattgctgattgcctggaagctggagcagcagcaacaggaaaatagcgcagtgctgaaatcgcagcggcgaatgttccatcaccagattgaacgtggcaacccgcgacgaacgttcacagggatggcttttatcgaaggataa

SEQ ID NO: 155245 - protein, 166 aa, Escherichia coli O157:H7 EDL933
MLETETGRYSDTLRSALISLDGDNAWALSESWCGTIQWICLSPYRPHHGRKNWFLGIGRFTADEQEQSDAIRYETLRPSGPGGQHVNKTDSAVRATHLATGISVKVQSERSQHANKRLARLLIAWKLEQQQQENSAVLKSQRRMFHHQIERGNPRRTFTGMAFIEG

SEQ ID NO: 155246 - DNA, 615 bp, Unknown
  Unidentified
  CDS (1)..(615)
atgtggctacaaattagtgcaggcacagggcctgttgaaagctgtagattcgtatacttatttttaaacttagtaaaaaaagaatgcaaatatagaaatataaaaattgaagttttagactttgtacctggtgaaaaaatcggcactcttaaatctgtatttttaaagcttagtggagaaggtgctaagacgtatgctagctcaattacgggaactcatcttcttatttgggaaagcgaatacagaaaaaatcacaggagaaaaaattggtttatagctgttaattcttttagttatgaaactaacgaggacctaaacgataaggatattattattgaaaaaatgcgaagcagtggtaaaggtggacaacacgttaacaaaactgaaaccgctgtaagaataactcataaaaagaccggtatagttgtgaactcaagcgaagaaagaagtcagtttgcaaatataaaacttgcaaaggctagattaatcattgaacttaagaaattatcagatgagaggcgcaaaagaaatcgcagtgaaagatggactgctggaataaatatagttcgtggcaatccagttaacgtatatacttacaaggaactaaattcttag

SEQ ID NO: 155247 - protein, 204 aa, Unknown
  Unidentified
MWLQISAGTGPVESCRFVYLFLNLVKKECKYRNIKIEVLDFVPGEKIGTLKSVFLKLSGEGAKTYASSITGTHLLIWESEYRKNHRRKNWFIAVNSFSYETNEDLNDKDIIIEKMRSSGKGGQHVNKTETAVRITHKKTGIVVNSSEERSQFANIKLAKARLIIELKKLSDERRKRNRSERWTAGINIVRGNPVNVYTYKELNS

SEQ ID NO: 155248 - DNA, 1029 bp, Sinorhizobium meliloti 1021
  CDS (1)..(1029): transl_table=11
ttgaacaacaaggcggaagacccgtcgctctggaacgacgcggccgaggcgcagaagctgatgcgggagcgccagcagctcgatgacggcatcaatggcctgcgccgcttcgagcagcagctcaacgacaacatcgagctcatcgaactcggtgaagaggagggcgattcggcgatcgtcgcggaggccgaggaagcgcttcgccaactgcgcggcgaggcggcgaaaaagcaggtcgaggccatgctttcgggcgaggccgaccagaacgacacatatctcgaagtccattcgggcgccggcggcacggaaagccaggactgggcgaacatgctgcttcgcatgtatacccgatgggccgaacgccagggctacaaggtcgagctcatggaaatccaggacggggaagaagcgggcatcaaatcggccacgctcctcgtcaaggggcacaatgcctatggctggctgaagacggaatcgggcgtgcatcgcctcgtccgcatttctccgtatgacagcaacgctcgccgtcatacgtccttttcgtccatctgggtctatcccgtcgtggacgaatcgatccagatcgacatcaacgaaagcgattgccggatcgatacctaccgctcctcgggcgccggcggtcagcacgtcaatacgaccgattcggccgtgcgcatcacgcatatgccgagcggcatcgtggtgcagtgccagcaggaacgctcgcagcacaagaaccgcgccaaggcatgggacatgcttcgcgcgcggctctacgaggctgaactgaagaagcgcgaggaggcggccaacgccgaggcggcatcgaagaccgatatcggctggggtcaccagatccgctcctacgtcctgcagccctaccagctggtgaaggatttgaggacgggagtcgaaagcagcagcccgggcgacgtgctcgacggtgaactgaatgaattcatggaggcagcccttgcgcatcgcgtcagcggcggcgcggatgcggccgtcgacgacctgagctaa

SEQ ID NO: 155249 - protein, 342 aa, Sinorhizobium meliloti 1021
MNNKAEDPSLWNDAAEAQKLMRERQQLDDGINGLRRFEQQLNDNIELIELGEEEGDSAIVAEAEEALRQLRGEAAKKQVEAMLSGEADQNDTYLEVHSGAGGTESQDWANMLLRMYTRWAERQGYKVELMEIQDGEEAGIKSATLLVKGHNAYGWLKTESGVHRLVRISPYDSNARRHTSFSSIWVYPVVDESIQIDINESDCRIDTYRSSGAGGQHVNTTDSAVRITHMPSGIVVQCQQERSQHKNRAKAWDMLRARLYEAELKKREEAANAEAASKTDIGWGHQIRSYVLQPYQLVKDLRTGVESSSPGDVLDGELNEFMEAALAHRVSGGADAAVDDLS

SEQ ID NO: 155250 - DNA, 615 bp, Salmonella enterica subsp. enterica serovar Typhi str. CT18
  CDS (1)..(615): transl_table=11
atgatcctactgcaactttcttccgcacagggaccggacgagtgttgtctggcggtaaaaaaagcgctggactgtctgacgaaagaagccgccagagaaaaggtatcgttgacgcgacttgaaacggagccgggacgattaccagacacgctgcgttccgcgctggtctcgctggacggcgaaaaagctatggctttcagtgaacgttggtgcggcacgttactgtggatttgtaccagcccgtatcgcccgcaccatgggcgcaaaaactggtacgtcggcattgggcgcttttccgccgacgaacacatacagtctgatgagattcgtttcgagactctgcgctcttccggcccgggtgggcagcacgttaataaaaccgactcggcagtgcgggccacgcacctggcgagcgggattagcgtgaaggttcagtcggagcgcagtcaacatgcgaataagcgtctggcccggctgctgattgcctggcggctggaacagcaacggcaaaatgagtgtgcggcgttgaagtctgaaaggcgtctgttccatcatcagattgagcgcggcaatccgctacggatatttaaaggaatggcgtttacgccacaataa

SEQ ID NO: 155251 - protein, 204 aa, Salmonella enterica subsp. enterica serovar Typhi str. CT18
MILLQLSSAQGPDECCLAVKKALDCLTKEAAREKVSLTRLETEPGRLPDTLRSALVSLDGEKAMAFSERWCGTLLWICTSPYRPHHGRKNWYVGIGRFSADEHIQSDEIRFETLRSSGPGGQHVNKTDSAVRATHLASGISVKVQSERSQHANKRLARLLIAWRLEQQRQNECAALKSERRLFHHQIERGNPLRIFKGMAFTPQ

SEQ ID NO: 155252 - DNA, 624 bp, Ralstonia solanacearum GMI1000
  CDS (1)..(624): transl_table=11
atgatcctgctgcaattctcttccgcgcaagggccggccgaatgcgaactggctgtgctcaaggggctggcttgcctgcaacgcgaatcggcgctggccggcgtgcgggtcgaagtgctcgaacaggaggacggcgaacaccccggcacgctgcgctccgcgctggtcagcctggagggcgatgccgaggcggccgtggcgcaacggtgggagggcacgatccagtggacctgccccagcccctatcgcccgcgccacgcacgcaagaactggttcttcggcgtggcacgctgcgccgcgcccgcggccaccctgccgagcgaaatccggttcgagacggcccgcgcatccggcccgggcgggcagcacgtcaacaagacagaatcggcagtgcgagccatccacctggccaccggcatcagcgtcaaggtgcagaccgagcgcagccagcacgccaacaagcgcctggctgtcctgctgctggcgcacaagctggcgagccatgacgcagcggccagcgccgcgcagcgcgcccaccggcgcacgctccaccatcaggtggcgcggggcaacccgcggcgcgtgttcaagggcgagcggttcgagccggccgggggcgattag

SEQ ID NO: 155253 - protein, 207 aa, Ralstonia solanacearum GMI1000
MILLQFSSAQGPAECELAVLKGLACLQRESALAGVRVEVLEQEDGEHPGTLRSALVSLEGDAEAAVAQRWEGTIQWTCPSPYRPRHARKNWFFGVARCAAPAATLPSEIRFETARASGPGGQHVNKTESAVRAIHLATGISVKVQTERSQHANKRLAVLLLAHKLASHDAAASAAQRAHRRTLHHQVARGNPRRVFKGERFEPAGGD

SEQ ID NO: 155254 - DNA, 456 bp, Shigella flexneri 2a str. 301
  CDS (1)..(456): transl_table=11
atgaaaaaggcgctggacaggctaattaaagaagctgcccgacaagacgtcgcggtaacggtgctggaaacagaaacaggccgctactctgacacgctgcgttcggcgctgatttctctggatggcgacaacgcatgggcgttaagcgaaagctggtgtggcactattcagtggatttgcccgagcccgtatcgcccacatcacgggcgtaaaaactggtttctgggcattgggcgttttaccgctgatgagcaggagcaatccgatgcgatccggtatgagacgctgcgttcgtcggggccgggcggtcaacatgtcaataaaaccgactcggcggtacgcgccacgcatttggcatccggtattagcgtgaaggttcagtcagagcgcagccagcatgctaacaaacggctggcgcgattgctgattgcctggaagctggatcagcagcaatag

SEQ ID NO: 155255 - protein, 151 aa, Shigella flexneri 2a str. 301
MKKALDRLIKEAARQDVAVTVLETETGRYSDTLRSALISLDGDNAWALSESWCGTIQWICPSPYRPHHGRKNWFLGIGRFTADEQEQSDAIRYETLRSSGPGGQHVNKTDSAVRATHLASGISVKVQSERSQHANKRLARLLIAWKLDQQQ

SEQ ID NO: 155256 - DNA, 615 bp, Escherichia coli CFT073
  CDS (115)..(615): transl_table=11
atgatcttgctacaactctcctctgctcaggggccggaagaatgttgtctcgcagtgagaaaagcactggacaggctgattaaagaagctacccgacaggacgtcgcggtaacgatgctggaaacagaaacgggtcgctactctgacacactgcgttcggcgctgatttctctggatggcgataacgcatgggctctaagcgaaagctggtgcggcactattcagtggatttgtccgagtccgtatcggcctcatcatgggcgcaaaaactggtttctgggcattgggcgttttaccgctgatgagcaggaacaatcggatgcaatccgttatgagacgctgcgttcgtcggggccgggcggtcaacatgtcaataaaaccgactcggcggtacgcgccacgcatctggcatccggtattagcgtgaaggttcagtcagagcgcagtcagcatgctaacaaacggctggcgcgattactgattgcctggaagctggaacaacagcaacaggaaaatagcgcggcgctgaaatcgcagcggcgaatgttccatcaccagattgaacgtggcaacccgcgacgaacgtttacagggatggcctttatcgaagggtaa

SEQ ID NO: 155257 - protein, 166 aa, Escherichia coli CFT073
MLETETGRYSDTLRSALISLDGDNAWALSESWCGTIQWICPSPYRPHHGRKNWFLGIGRFTADEQEQSDAIRYETLRSSGPGGQHVNKTDSAVRATHLASGISVKVQSERSQHANKRLARLLIAWKLEQQQQENSAALKSQRRMFHHQIERGNPRRTFTGMAFIEG

SEQ ID NO: 155258 - DNA, 621 bp, Bacteroides thetaiotaomicron VPI-5482
  CDS (1)..(621): transl_table=11
atgaaggagaaagtctatttacagataacttccggcaggggacctgcggaatgttgccgggtggtggcattggtactcgaaagaatagtaagacaggcgcaggcaagcggactgaaaatggaaatgatagaacgtgaagtgggaccggtcaaccggacactgctttcggctaccattgctcttcaaggcgcagcgagcggagaactggcggatgaatgggagggaacggtgcaatggattgcccaaagcccgtatcgcatttatcacaagcggaaaaactggtttgtcggtgtgcattcgtttgtgttgtcggagagtcaggaggctacagaaagagatttccgctatgaaaccttacgggcttccggtccgggcgggcagcatgtcaacaagacagagtccgcggtccgtgccgttcacatcccgtccgggatgagtgtggtagcttccgaccaacgttcacaatggcagaacaagaagctggcaacggaacgcctgttggtgaaactttcgtcatggacgatggaacaggcgatgattcaggcgcaggaaaactggagtaatcataatcatcttcaacgggggaatcccgtgaaggtgattcgggaaccgctgatttag

SEQ ID NO: 155259 - protein, 206 aa, Bacteroides thetaiotaomicron VPI-5482
MKEKVYLQITSGRGPAECCRVVALVLERIVRQAQASGLKMEMIEREVGPVNRTLLSATIALQGAASGELADEWEGTVQWIAQSPYRIYHKRKNWFVGVHSFVLSESQEATERDFRYETLRASGPGGQHVNKTESAVRAVHIPSGMSVVASDQRSQWQNKKLATERLLVKLSSWTMEQAMIQAQENWSNHNHLQRGNPVKVIREPLI

SEQ ID NO: 155260 - DNA, 609 bp, Salinispora tropica CNB-440
  CDS (1)..(609): transl_table=11
atgaacctgcacctgctgctgtcagccggccggggtccccaggagtgtgcctgggcgctggcccggctgctgagccggctggaggccgacgccgtccgcaacgacgtggacgtggtacggctggacagcgtcgtcggcgaccgacccggcacctatcggtcggtgttggtccgactgaccggtacgggtgtggaggcgttcgccgccaggtggaccgggacgttgtgctggcaggcccccagcccctaccgcaccggccacggcagaaagaactggtacgtcgcagcccggcagtgcgaggtcgacgtcccggtcaccccgttcaccgaggcggacgtggaggtgcttgccgtacgtacgggtgggccgggcggccagcaccgcaacaaggccagcaccgccgtacgggcaacccaccgcccgaccggcaccgtcgtcgtggtcgacaccgagcgacagctcagcctcaaccgcagcattgccctacggctgttacgccaacggatcacggccggtgacgaggcggcccggcgggcgctggtggccatccgaagacgcgcccacgacgaggtggtccggggcggtccgacgcggaccgaacgtccctga

SEQ ID NO: 155261 - protein, 202 aa, Salinispora tropica CNB-440
MNLHLLLSAGRGPQECAWALARLLSRLEADAVRNDVDVVRLDSVVGDRPGTYRSVLVRLTGTGVEAFAARWTGTLCWQAPSPYRTGHGRKNWYVAARQCEVDVPVTPFTEADVEVLAVRTGGPGGQHRNKASTAVRATHRPTGTVVVVDTERQLSLNRSIALRLLRQRITAGDEAARRALVAIRRRAHDEVVRGGPTRTERP

SEQ ID NO: 155262 - DNA, 690 bp, Flavobacterium johnsoniae UW101
  CDS (1)..(690): transl_table=11
atggaaagaataattcagataacagcgggtcgcggacctgcagaatgcacttgggttgtcgctcaagtgcttaaaaaagttttggaagaagcacaagatcagaatttagatgtggttttactgcaaagagagaaaggagaagagaacggaacaattgaaaccgcatcgatttctgtaaagggaaaaaatgcagatcaatttgtgaaatcttggataggaacgattcaatggattgggcagagtcagtttaggaaaatgcataaacgcaaaaactggtttattgggatttttgaaatcgaaccgcaaaaaaatgcatcagtttcagaaaacgacattcaatatcaggcgatgcgaagttccggcgccggcggtcagcatgtaaacaaagtgagttcagcaattcgtgcaacacatattccaacaggaattgcagttgtggcaatggacagccgttcgcagcaccaaaacaaaaaactggctacagaaagattattaaaaaaattagaagacgagaaactagttcagcttaaaaatcacgtaggaaagcaatgggaaaatcagcttaatgtagagcgtggaaatccaattagagtttttacaggaagtgattttaaaaagattaaagttgagaaaagctacaaaggaactcgtcagaaattaaaaaacgatttacgaaatgaaaacaattga

SEQ ID NO: 155263 - protein, 229 aa, Flavobacterium johnsoniae UW101
MERIIQITAGRGPAECTWVVAQVLKKVLEEAQDQNLDVVLLQREKGEENGTIETASISVKGKNADQFVKSWIGTIQWIGQSQFRKMHKRKNWFIGIFEIEPQKNASVSENDIQYQAMRSSGAGGQHVNKVSSAIRATHIPTGIAVVAMDSRSQHQNKKLATERLLKKLEDEKLVQLKNHVGKQWENQLNVERGNPIRVFTGSDFKKIKVEKSYKGTRQKLKNDLRNENN

SEQ ID NO: 155264 - DNA, 624 bp, Bradyrhizobium sp. BTAi1
  CDS (1)..(624): transl_table=11
atgaggcggctccttctcacggcggggcgcggtcccgccgagtgcaggctcgcggtcgcgcatgcactccaagcgctcgcagccgaagccgatgcagcggattgcgattgcgcgatcgctcaaaacgaggcggaccggctcggcccggccagcgcgatcgtcgtgctcgatggacctctcgcggaccagatcgcgcagcgctggacgcagggcccgctgctctgggtgtgccgcagtccgctgcggccgcatcacggccgcaagaactggttcgtcggcatcgtcgatctgccgctgccgcaccaggtgccggacctcgcggccgccgacgtcaggtgcgagagctttcgcgccggcgggcccggcggccagcaccagaacaagacggagagcgctgtgcgcgccatccacctgccgaccgggctcaccgcaatcgcgcgcgacggccgctcccagcatcgcaaccgagcgctggcgctcacgcgccttgccgcgttgctggacggccgcgcgcgcctggccgaggccggcgaagcgcggctggtccacgccgcgcatgatcgcgtccagcgcggcgccgcgggcctgcgcttcgaaggtccggcgttcagagcggttgaatga

SEQ ID NO: 155265 - protein, 207 aa, Bradyrhizobium sp. BTAi1
MRRLLLTAGRGPAECRLAVAHALQALAAEADAADCDCAIAQNEADRLGPASAIVVLDGPLADQIAQRWTQGPLLWVCRSPLRPHHGRKNWFVGIVDLPLPHQVPDLAAADVRCESFRAGGPGGQHQNKTESAVRAIHLPTGLTAIARDGRSQHRNRALALTRLAALLDGRARLAEAGEARLVHAAHDRVQRGAAGLRFEGPAFRAVE

SEQ ID NO: 155266 - DNA, 1029 bp, Sinorhizobium medicae WSM419
  CDS (1)..(1029): transl_table=11
ttgaacaacaaggccgaagacccgtcgctctggaacgacgcggcagaggcacagaaactgatgcgggagcgccagcagctcgacgatggcatcagtggcctgcgtcggttcgagcagcagctcaacgacaacatcgagctcatcgaactcggcgaagaggaaggcgattcggcaatcgtctcggaggccgaggaagcgctccgccaactgcgcaacgacgcagctaaaaagcaggtggaggccatgctctccggggaggccgaccagaacgatacctatgtcgaagtccattcgggcgccggtggcacggaaagccaggactgggccaacatgctgcttcgcatgtatacgcgatgggccgagcgccagggctacaaggtcgagctcatggaaatccaggatggggaagaggccggcatcaagtccgcaacgctcctggtcaagggccacaatgcctatggctggctgaagacggaatcgggcgtgcaccggctggtccgcatttccccctatgacagcaatgcgcgccgtcatacgtccttctcgtccatctgggtctatcccgtggtggacgaatcgatccaggtcgacatcaatgaaagcgattgcaggatcgatacctaccgctcctccggcgccggcggtcagcacgtcaacacgaccgattcggccgtgcgcatcacgcatatgccgagcggcatcgtggtgcagtgccagcaggaacgctcacagcataagaaccgcgccaaggcatgggacatgctccgtgcgcggctttacgaggccgaactgaagaagcgcgaggaggcggccaacgccgaggcggcatcgaagaccgagatcggctggggtcaccagatccgctcctacgtcctgcagccctaccagctcgtgaaggacttgaggacaggcgtcgaaagcacaagcccgggcgacgtgctggacggtgaactgagcgagttcatggaggcagcccttgcgcatcgcgtaagcggtggggcggatgcggcggtcgacgatttgagttga

SEQ ID NO: 155267 - protein, 342 aa, Sinorhizobium medicae WSM419
MNNKAEDPSLWNDAAEAQKLMRERQQLDDGISGLRRFEQQLNDNIELIELGEEEGDSAIVSEAEEALRQLRNDAAKKQVEAMLSGEADQNDTYVEVHSGAGGTESQDWANMLLRMYTRWAERQGYKVELMEIQDGEEAGIKSATLLVKGHNAYGWLKTESGVHRLVRISPYDSNARRHTSFSSIWVYPVVDESIQVDINESDCRIDTYRSSGAGGQHVNTTDSAVRITHMPSGIVVQCQQERSQHKNRAKAWDMLRARLYEAELKKREEAANAEAASKTEIGWGHQIRSYVLQPYQLVKDLRTGVESTSPGDVLDGELSEFMEAALAHRVSGGADAAVDDLS

SEQ ID NO: 155268 - DNA, 870 bp, Coxiella burnetii Dugway 5J108-111
  CDS (1)..(870): transl_table=11
atggcgcaactgagcaagcaagaaaaagagacggatttaattaccgatttaaataaagacttcaaacagcttgaaaaaacaatcgcagaaatggaatttcagcgtatgttttccggtgaaatggactcgaataatgcttatcttgacattcaggccggctcaggcgggacagaagcgcaggattgggcggaaatgctgttacgaatgtatttgcgctggggcgataaacacggcttcacgaccacgctaatggaggcttctcctggcgaagtagctggaataaaaagcgcgactatcgaatttacaggcagttatgcgtatggttggctgcgtagcgagacgggcgtacatcggctggtccgtaaatctccttttgattcgggcaatcgtcgtcatacttcgtttgcttcggtctttgtgtcacccgaaatcgatgatgatattgaaattgaaatcaacccggcggaattacgtattgacacttatcgcgctagcggtgcgggagggcagcacgtaaaccggacggattcggccgtccgcatcacgcatttgccctctgggattgtggtccagtgtcaaaatgaccgatcacagcataaaaataaagcgcaagccatgaaacagcttcgggcaaagctttatgagatggaaatgatgaaacaacaggaaaaacaagctttgctagaagtctctaaatccgaaatcagttggggcaatcaaattcgctcgtacgttttagacgcttcccgtgtgaaagatttgcgaaccggcgttgaaaccagtaatacccaggctgtgttggatggcgatatcgatttattcatcgaggcctgtctaaaacaaggagattttaatgacgctgctcgatga

SEQ ID NO: 155269 - protein, 289 aa, Coxiella burnetii Dugway 5J108-111
MAQLSKQEKETDLITDLNKDFKQLEKTIAEMEFQRMFSGEMDSNNAYLDIQAGSGGTEAQDWAEMLLRMYLRWGDKHGFTTTLMEASPGEVAGIKSATIEFTGSYAYGWLRSETGVHRLVRKSPFDSGNRRHTSFASVFVSPEIDDDIEIEINPAELRIDTYRASGAGGQHVNRTDSAVRITHLPSGIVVQCQNDRSQHKNKAQAMKQLRAKLYEMEMMKQQEKQALLEVSKSEISWGNQIRSYVLDASRVKDLRTGVETSNTQAVLDGDIDLFIEACLKQGDFNDAAR

SEQ ID NO: 155270 - DNA, 615 bp, Escherichia coli HS
  CDS (1)..(615): transl_table=11
atgatcttgctacaactctcctcagcgcaggggccggaagaatgttgtctcgcagtgaaaaaggcgctggagcgattaattaaagaagctgcccgacaagacgtcgcggtaacggtgttggaaacagaaacgggccgctactctgacacgctgcgttcagctctggtttctctggatggcgataacgcatgggcattaagcgaaagctggtgcggcactattcagtggatttgtccgagtccgtatcggcctcatcatgggcgcaaaaactggtttctgggcattgggcgttttaccgctgatgagcaggaacaatcggatgcaatccgttatgagacgttgcgttcgtcggggccgggcggtcaacatgtcaataaaaccgactcggcggtacgcgccacgcatttggcatccggtattagcgtgaaggttcagtcagagcgtagtcagcatgctaacaagcggctggcacgattgctgattgcctggaagctggagcagcagcaacaggaaaatagcgcggtgctgaaatcgcagcggcgaatgttccatcaccagattgaacgtggcaacccgagacggacatttacagggatggcttttatcgaaggataa

SEQ ID NO: 155271 - protein, 204 aa, Escherichia coli HS
MILLQLSSAQGPEECCLAVKKALERLIKEAARQDVAVTVLETETGRYSDTLRSALVSLDGDNAWALSESWCGTIQWICPSPYRPHHGRKNWFLGIGRFTADEQEQSDAIRYETLRSSGPGGQHVNKTDSAVRATHLASGISVKVQSERSQHANKRLARLLIAWKLEQQQQENSAVLKSQRRMFHHQIERGNPRRTFTGMAFIEG

SEQ ID NO: 155272 - DNA, 615 bp, Escherichia coli E24377A
  CDS (1)..(615): transl_table=11
atgatcttgctacaactctcctcagcgcaggggccggaagaatgttgtctcgcagtgaaaaaggcgctggacaggctaattaaagaagctgcccgacaagacgtcgcggtaacggtgttggaaacagaaacgggccgctactctgacacgctgcgttcagctctggtttctctggatggcgataacgcatgggcattaagcgaaagctggtgcggcactattcagtggatttgtccgagtccgtatcggcctcatcatgggcgcaaaaactggtttctgggcattgggcgttttaccgctgatgagcaggaacaatcggatgcaatccgttatgagacgttgcgttcgtcggggccgggcggtcaacatgtcaataaaaccgactcggcggtacgcgccacgcatttggcatccggtattagcgtgaaggttcagtcagagcgtagtcagcatgctaacaagcggctggcacgattgctgattgcctggaagctggagcagcagcaacaggaaaatagcgcggtgctgaaatcgcagcggcgaatgttccatcaccagattgaacgtggcaacccgagacggacatttacagggatggcttttatcgaaggataa

SEQ ID NO: 155273 - protein, 204 aa, Escherichia coli E24377A
MILLQLSSAQGPEECCLAVKKALDRLIKEAARQDVAVTVLETETGRYSDTLRSALVSLDGDNAWALSESWCGTIQWICPSPYRPHHGRKNWFLGIGRFTADEQEQSDAIRYETLRSSGPGGQHVNKTDSAVRATHLASGISVKVQSERSQHANKRLARLLIAWKLEQQQQENSAVLKSQRRMFHHQIERGNPRRTFTGMAFIEG

SEQ ID NO: 155274 - DNA, 600 bp, Delftia acidovorans SPH-1
  CDS (1)..(600): transl_table=11
atgctgctgatccagctgaccgcatcccacggccctgccgagtgcgagcatgccgtgcgcctgaccctgcgcgagctgctgcgcgactgcgccgccagcggcatcgccgtggacgtgctggaggaaacgcccacgccggccggctacaagtccgtgctgctgcgctgcgagggcgacacgggcctgcttcacggcacgctgggcgcctggctgggcaccatccagtgggtcttcgacagccccctgcggccccaccacccgcgcaggaactggtttgttgccgtgcagaagtgcgagccgccccggcagttgccggcagacggcgaaatcgtcttccaggcctgcaaggcctcgggcaagggcggccagcatgtcaacaccacggactccgccgtccatgccctgcatgtgcccagcgggatctcggtgaaggtcatgagcgagcgcagccagcacgccaacaagcggctggcgcgcgagctgctggccctgaagctggcgcgcctcaacgcgcagggcgagggccaggcccggcgcacgcgcagccagcagcactgggaggtggagcgcggcagcccggtgaaggtgttccgcgcctga

SEQ ID NO: 155275 - protein, 199 aa, Delftia acidovorans SPH-1
MLLIQLTASHGPAECEHAVRLTLRELLRDCAASGIAVDVLEETPTPAGYKSVLLRCEGDTGLLHGTLGAWLGTIQWVFDSPLRPHHPRRNWFVAVQKCEPPRQLPADGEIVFQACKASGKGGQHVNTTDSAVHALHVPSGISVKVMSERSQHANKRLARELLALKLARLNAQGEGQARRTRSQQHWEVERGSPVKVFRA

SEQ ID NO: 155276 - DNA, 669 bp, Sorangium cellulosum 'So ce 56'
  CDS (1)..(669): transl_table=11
atgagccggtcgtgggtgcagatcagcgcggggagggggcctatcgaggtgcggcgcttcgtggcgcggctcgccgagcgcatggaggcgctctgccaggagcgcgggctcgcggtggtcgacgtcacgctgcacggcgacgaggacgcgccggcgtcggtcgagatcctggtggagggcgacgcgcggcgctgcctggagggcgagctcgggacgcacgcgctggtcgagcggagcgcggcgcgggggaaggcggcgcgcaagcggtggttcgcgggggtggcgatccacgccgcgggggcggacgccggggcgggcgcgggcgagggcgtgggcgtcgacctgcgcgagctcgagatctcggcctgccgggcgagcgggccgggagggcagcacgtgaacaagacgttatcggcggtccggatccaccaccggccgagcgggatcacggtgcgtgtcgccgacgagcgctcgcagcgcgcgaacgtccgccgcggggtggagcgcatcgccgagcggcttgccgagcgcgccgcccggcgggttgcggaaggggaggccgcgcgctggagcgagcacgaccggatcgtccggggagagccggtgaggacgtaccgggtggggcggaagagcacgctcgtggtggcggaggcgcgggagtcgcggtga

SEQ ID NO: 155277 - protein, 222 aa, Sorangium cellulosum 'So ce 56'
MSRSWVQISAGRGPIEVRRFVARLAERMEALCQERGLAVVDVTLHGDEDAPASVEILVEGDARRCLEGELGTHALVERSAARGKAARKRWFAGVAIHAAGADAGAGAGEGVGVDLRELEISACRASGPGGQHVNKTLSAVRIHHRPSGITVRVADERSQRANVRRGVERIAERLAERAARRVAEGEAARWSEHDRIVRGEPVRTYRVGRKSTLVVAEARESR

SEQ ID NO: 155278 - DNA, 615 bp, Escherichia coli SMS-3-5
  CDS (1)..(615): transl_table=11
atgatcttgctacaactctcctcagctcaggggccggaagaatgttgcctggcagtgaaaaaggcgctggacaggttgattaaagaagctacccgacaagacgtcgcgataacggtgctggaaacagaagcggggcgctatcctgacacaatgcgttcggcgctgatttctctggatggcgataacgcatgggctctaagcgaaagctggtgtggcactatccagtggatttgtccgagtccgtatcggcctcatcatgggcgcaaaaactggtttctgggcattgggcgttttaccgctgatgagcaggaacaatccgacgcgatccgttatgagacgctgcgttcgtcggggccgggcggtcaacatgtcaataaaaccgactcggcggtacgcgccacgcatctggcatccggtattagcgtgaaggttcagtcagagcgcagtcagcatgctaacaaacggctggcgcgattactgattgcctggaagctggaacaacagcaacaggaaaatagcgcggcgctgaaatcgcagcggcgaatgttccatcaccagattgaacgtggcaacccgcgacgaacgttcacagggatggcttttatcgaaggataa

SEQ ID NO: 155279 - protein, 204 aa, Escherichia coli SMS-3-5
MILLQLSSAQGPEECCLAVKKALDRLIKEATRQDVAITVLETEAGRYPDTMRSALISLDGDNAWALSESWCGTIQWICPSPYRPHHGRKNWFLGIGRFTADEQEQSDAIRYETLRSSGPGGQHVNKTDSAVRATHLASGISVKVQSERSQHANKRLARLLIAWKLEQQQQENSAALKSQRRMFHHQIERGNPRRTFTGMAFIEG

SEQ ID NO: 155280 - DNA, 657 bp, Shewanella woodyi ATCC 51908
  CDS (1)..(657): transl_table=11
atgattttattgcaactgtctgctggtcaaggccctgctgcgtgctgtaaagcgattggtttagcgttgaaggagattgagaagcagtgcagagaaaaaggtgttgcttttgaccttattgaagcgattgaaacaaaggagcgattttgctttaagtccgtgctgcttcagcttgagtcaaagcagtcagtgttgggggaagatgacttagctaaacagctagctaagtcatggcaaggagcaatgttgtggatctgtcaaagcccctttcagcttgaaaagaatagagttaaaaataagcgaaagaactggtttttcagtgggcagatgtatgagtttaatgaaactgaattagacaaagaggttagctttcaaacatgcagagcgtcaggcgcaggtgggcagcatgttaacaccacggattctgccgtgcgtgcgattcatgttgcaactggtatttcagtaagagttgagagtgaaaggagccagcatgcaaataaacgtcttgcccgtgctttgctattccaaaagcttgagtcgaccaaggttgaacagatgtcattgcaagaaaaagcccgttggcagcagcattgggaagttgagcgtggtaacccagttaaaacatttaaaggagaaaaattcacccttgttaattga

SEQ ID NO: 155281 - protein, 218 aa, Shewanella woodyi ATCC 51908
MILLQLSAGQGPAACCKAIGLALKEIEKQCREKGVAFDLIEAIETKERFCFKSVLLQLESKQSVLGEDDLAKQLAKSWQGAMLWICQSPFQLEKNRVKNKRKNWFFSGQMYEFNETELDKEVSFQTCRASGAGGQHVNTTDSAVRAIHVATGISVRVESERSQHANKRLARALLFQKLESTKVEQMSLQEKARWQQHWEVERGNPVKTFKGEKFTLVN

SEQ ID NO: 155282 - DNA, 615 bp, Salmonella enterica subsp. enterica serovar Agona str. SL483
  CDS (1)..(615): transl_table=11
atgatcttactgcaactttcttctgcgcaggggccggacgagtgttgtctggcggtaaaaaaagcgctggattgtctgacgaaagaagccgccagagaaaaggtatcgttgacgcgacttgaaacagagccgggacgattaccagacacgctgcgttccgcgctggtctcgctggacggcgaaaaagctatggctttcagtgaacgttggtgtggcacgttactgtggatttgtaccagcccgtatcgtccgcaccatgggcgaaaaaactggtacgtcggcattgggcgcttttccgccgacgaacagatgcagtctgatgagattcgtttcgagactctgcgctcttccggcccgggtgggcagcacgttaataaaaccgactcggcagtgcgggccacgcacctggcgagcgggattagcgtgaaggttcagtcagagcgcagtcaacatgcgaataagcgtctggcccggctgctgattgcctggcggctggaacagcaacggcaaaatgagtgtgcggcgttgaagtctgaaaggcgtctgttccatcatcagattgagcgcggcaatccgctacggatatttaaaggaatggcgtttacgccacaataa

SEQ ID NO: 155283 - protein, 204 aa, Salmonella enterica subsp. enterica serovar Agona str. SL483
MILLQLSSAQGPDECCLAVKKALDCLTKEAAREKVSLTRLETEPGRLPDTLRSALVSLDGEKAMAFSERWCGTLLWICTSPYRPHHGRKNWYVGIGRFSADEQMQSDEIRFETLRSSGPGGQHVNKTDSAVRATHLASGISVKVQSERSQHANKRLARLLIAWRLEQQRQNECAALKSERRLFHHQIERGNPLRIFKGMAFTPQ

SEQ ID NO: 155284 - DNA, 612 bp, Proteus mirabilis HI4320
  CDS (1)..(612): transl_table=11
atgttattacaattttcttcagcacaaggccccgaagaatgctgtatagcggtagaaaaaacattgaattattttctaaccgtcacagagcagcggcaagttgatgtgataattcttgagcaagagccatctcgttatggtttaaagtcagtattagtatcgcttaaaggtgcagaggctaaagctatcgcacaacaatggtcaggcacagtgcaatggcaatgtacaagtactttaagacctaaacataaacgcaaaaattggtttatcggtatcgcttattttgacccaccacaagaaatccaagacaccgaaattttatttgaaaccatgcgtgccaatggccccggaggacaacatgttaataaaacgagttcagctgtcagagcgacgcatattgcaacaggcattagcgtcaagatccagtctcagcgaatccaacatgctaataaaaaattagcgaaacagcttattgcttggcatctaactcattatctatcccaacagcaagcttcatttaataaccagcgacacctagctcatcaccgagtgatccgtggtaatgcaactcattgtttttatggacgtgagtttttaccaataacgaaataa

SEQ ID NO: 155285 - protein, 203 aa, Proteus mirabilis HI4320
MLLQFSSAQGPEECCIAVEKTLNYFLTVTEQRQVDVIILEQEPSRYGLKSVLVSLKGAEAKAIAQQWSGTVQWQCTSTLRPKHKRKNWFIGIAYFDPPQEIQDTEILFETMRANGPGGQHVNKTSSAVRATHIATGISVKIQSQRIQHANKKLAKQLIAWHLTHYLSQQQASFNNQRHLAHHRVIRGNATHCFYGREFLPITK

SEQ ID NO: 155286 - DNA, 615 bp, Salmonella enterica subsp. enterica serovar Gallinarum str. 287/91
  CDS (1)..(615): transl_table=11
atgatcttactgcaactttcttccgcacagggaccggacgagtgttgtctggcggtaaaaaaagcgctggattgtctgacgaaagaagccgccagagaaaaggtatcgctgacacggcttgaaacagagccgggacgattaccagacacgctgcgttccgcgctggtctcgctggacggcgaaaaagccatggctttcagtgagcgttggtgcggcacgttactgtggatttgtaccagcccgtatcgcccgcaccatgggcgaaaaaactggtacgtcggcattgggcgcttttccgccgacgaacacatacagtctgatgagattcgtttcgagactctgcgctcttccggcccgggtgggcagcacgttaataaaaccgactcggcagtgcgggccacgcacctggtgagcgggattagcgtgaaggttcagtcggagcgcagtcaacatgcgaataagcgtctggcccggctgctgattgcctggcggctggaacagcaacggcaaaatgggtgtgcggcgttgaagtctgaaaggcgtctgttccatcatcagattgagcgcggcaatccgctacggatatttaaaggaatggcgtttacgccacaataa

SEQ ID NO: 155287 - protein, 204 aa, Salmonella enterica subsp. enterica serovar Gallinarum str. 287/91
MILLQLSSAQGPDECCLAVKKALDCLTKEAAREKVSLTRLETEPGRLPDTLRSALVSLDGEKAMAFSERWCGTLLWICTSPYRPHHGRKNWYVGIGRFSADEHIQSDEIRFETLRSSGPGGQHVNKTDSAVRATHLVSGISVKVQSERSQHANKRLARLLIAWRLEQQRQNGCAALKSERRLFHHQIERGNPLRIFKGMAFTPQ

SEQ ID NO: 155288 - DNA, 624 bp, Ralstonia solanacearum MolK2
  CDS (1)..(624): transl_table=11
atgatcctgctgcaattctcatccgcgcaagggccggccgaatgcgagctggccgtggtcaaggcactggcttgcctgctgcgcgaatcggcgcgggccggggtgcgggccgaaatcgtcgagcaggaggacggcgagcatgccggcacgctgcgctccgcgctggtcagcctggagggcgatgccgaggcggacatcgcgcagcgatgggaaggcacgatccagtggacgtgccccagcccctaccgtccgcgccacgcacgcaagaactggttcttcggcgtggcacgctgcgcggcgcccgcggtcacgctgccgagcgaaatccgcttcgagacgacccgcgcgtccggtcccggcgggcagcacgtcaacaagacggaatcggcggtgcgggccgtccatgtggccaccgggatcagcgtcaaggtgcagaccgagcgcagccagcacgccaacaagcgcctggccgtcctgctgctggcgcacaggctggcgagccacgaagagaccatgaacgccgcccagcgggcccagcgtcgcacgctccaccatcaggtggaacggggcaacccgcggcgcgtgttcaagggcgagcggttcgagccggcggaaggcggttag

SEQ ID NO: 155289 - protein, 207 aa, Ralstonia solanacearum MolK2
MILLQFSSAQGPAECELAVVKALACLLRESARAGVRAEIVEQEDGEHAGTLRSALVSLEGDAEADIAQRWEGTIQWTCPSPYRPRHARKNWFFGVARCAAPAVTLPSEIRFETTRASGPGGQHVNKTESAVRAVHVATGISVKVQTERSQHANKRLAVLLLAHRLASHEETMNAAQRAQRRTLHHQVERGNPRRVFKGERFEPAEGG

SEQ ID NO: 155290 - DNA, 609 bp, Escherichia coli SE11
  CDS (1)..(609): transl_table=11
ttgctacaactctcctcagcgcaggggccggaagaatgttgtctcgcagtgaaaaaggcgctggagcgattaattaaagaagctgcccgacaagacgtcgcggtaacggtgttggaaacagaaacgggccgctactctgacacgctgcgttcagctctggtttctctggatggcgataacgcatgggcattaagcgaaagctggtgcggcactattcagtggatttgtccgagtccgtatcggcctcatcatgggcgcaaaaactggtttctgggcattgggcgttttaccgctgatgagcaggaacaatcggatgcaatccgttatgagacgttgcgttcgtcggggccgggcggtcaacatgtcaataaaaccgactcggcggtacgcgccacgcatttggcatccggtattagcgtgaaggttcagtcagagcgtagtcagcatgctaacaagcggctggcacgattgctgattgcctggaagctggagcagcagcaacaggaaaatagcgcggtgctgaaatcgcagcggcgaatgttccatcaccagattgaacgtggcaacccgagacggacatttacagggatggcttttatcgaaggataa

SEQ ID NO: 155291 - protein, 202 aa, Escherichia coli SE11
MLQLSSAQGPEECCLAVKKALERLIKEAARQDVAVTVLETETGRYSDTLRSALVSLDGDNAWALSESWCGTIQWICPSPYRPHHGRKNWFLGIGRFTADEQEQSDAIRYETLRSSGPGGQHVNKTDSAVRATHLASGISVKVQSERSQHANKRLARLLIAWKLEQQQQENSAVLKSQRRMFHHQIERGNPRRTFTGMAFIEG

SEQ ID NO: 155292 - DNA, 870 bp, Coxiella burnetii CbuG_Q212
  CDS (1)..(870): transl_table=11
atggcgcaactgagcaagcaagaaaaagatacggatttaattaccgatttaaataaagacttcaaacagcttgaaaaaacaatcgcagaaatggaatttcagcgtatgttttccggtgaaatggactcgaataatgcttatcttgacattcaggccggctcaggcgggacagaagcgcaggattgggcggaaatgctgttacgaatgtatttgcgctggggcgataaacacggcttcacgaccacgctaatggaggcttctcctggcgaagtagctggaataaaaagcgcgactatcgaatttacaggcagttatgcgtatggttggctgcgtagcgagacgggcgtacatcggctggtccgtaaatctccttttgattcgggcaatcgtcgtcatacttcgtttgcttcggtctttgtgtcacccgaaatcgatgatgatattgaaattgaaatcaacccggcggaattacgtattgacacttatcgcgctagcggtgcgggagggcagcacgtaaaccggacggattcggccgtccgcatcacgcatttgccctctgggattgtggtccagtgtcaaaatgaccgatcacagcataaaaataaagcgcaagccatgaaacagcttcgggcaaagctttatgagatggaaatgatgaaacaacaggaaaaacaagctttgctagaagcctctaaatccgaaatcagttggggcaatcaaattcgctcgtacgttttagacgcttcccgtgtgaaagatttgcgaaccggcgttgaaaccagtaatacccaggctgtgttggatggcgatatcgatttattcatcgaggcctgtctaaaacaaggagattttaatgacgctgctcgatga

SEQ ID NO: 155293 - protein, 289 aa, Coxiella burnetii CbuG_Q212
MAQLSKQEKDTDLITDLNKDFKQLEKTIAEMEFQRMFSGEMDSNNAYLDIQAGSGGTEAQDWAEMLLRMYLRWGDKHGFTTTLMEASPGEVAGIKSATIEFTGSYAYGWLRSETGVHRLVRKSPFDSGNRRHTSFASVFVSPEIDDDIEIEINPAELRIDTYRASGAGGQHVNRTDSAVRITHLPSGIVVQCQNDRSQHKNKAQAMKQLRAKLYEMEMMKQQEKQALLEASKSEISWGNQIRSYVLDASRVKDLRTGVETSNTQAVLDGDIDLFIEACLKQGDFNDAAR

SEQ ID NO: 155294 - DNA, 582 bp, Escherichia coli O127:H6 str. E2348/69
  CDS (1)..(582): transl_table=11
atgatcttgctacaactctcctcagctcaggggccggaagaatgttgtctcgcagtgaaaaaggcactggacaggctgattaaagaagctgcccgacaagacgtcgcggtaacggtgctggaaacagaaacgggtcgctactctgacacactacgttcggcgctggtttcacttgatggcgacaacgcatgggctctaagcgaaagctggtgcggcactattcagtggatttgtccgagtccgtatcggcctcatcatgggcgcaaaaactggtttctgggcattgggcgttttaccgctgatgagcaggaacaatcggatgcaatccgttatgagacgctgcgttcgtcggggccgggcggtcaacatgtcaataaaaccgactcggcggtacgcgccacgcatctggcatccggtattagcgtgaaggttcagtcagagcgcagtcagcatgctaacaaacggctggcgcgattactgattgcctggaagctggaacaacagcaacaggaaaatagcgcggcgctgaaatcgcagcggcgaatgttccatcaccagattgaacgtggcaacccgcgatga

SEQ ID NO: 155295 - protein, 193 aa, Escherichia coli O127:H6 str. E2348/69
MILLQLSSAQGPEECCLAVKKALDRLIKEAARQDVAVTVLETETGRYSDTLRSALVSLDGDNAWALSESWCGTIQWICPSPYRPHHGRKNWFLGIGRFTADEQEQSDAIRYETLRSSGPGGQHVNKTDSAVRATHLASGISVKVQSERSQHANKRLARLLIAWKLEQQQQENSAALKSQRRMFHHQIERGNPR

SEQ ID NO: 155296 - DNA, 501 bp, Escherichia fergusonii ATCC 35469
  CDS (1)..(501): transl_table=11
atgctggaaacagaaacgggtcgctactctgacacactgcgttcggcgctggtttcacttgatggcgataacgcatgggcattaagcgaaagttggtgcggcactattcagtggatttgcccaagcccgtatcggcctcatcatgggcgcaaaaactggtttctgggcattgggcgttttaccgctgatgagcaggaacaatcggatgcaatccgttatgagacgctgcgttcgtcggggccgggcggtcaacatgtcaataaaaccgactcggcggtacgcgccacgcatctggcatccgggattagcgtgaaggttcagtcagagcgcagccaacatgccaacaagcgactggcgcgattactgattgcctggaagctggaacaacagcaacaggaaaatagtgcggcgctgaaatcgcagcggcgaatgttccatcatcaaattgaacgtggcaatccgcgacggatatttaccgggatggcttttgttgctgtgtaa

SEQ ID NO: 155297 - protein, 166 aa, Escherichia fergusonii ATCC 35469
MLETETGRYSDTLRSALVSLDGDNAWALSESWCGTIQWICPSPYRPHHGRKNWFLGIGRFTADEQEQSDAIRYETLRSSGPGGQHVNKTDSAVRATHLASGISVKVQSERSQHANKRLARLLIAWKLEQQQQENSAALKSQRRMFHHQIERGNPRRIFTGMAFVAV

SEQ ID NO: 155298 - DNA, 501 bp, Escherichia coli IAI1
  CDS (1)..(501): transl_table=11
atgctggaaacagaaacgggccactactctgacacgctgcgttcggcgctgatttctctggatggcgataacgcatgggcattaagcgaaagctggtgtggcactattcagtggatttgtccgagtccgtatcggcctcatcatgggcgcaaaaactggtttctgggcattgggcgttttaccgctgatgagcaggaacaatcggatgcaatccgttatgagacgttgcgttcgtcggggccgggcggtcaacatgtcaataaaaccgactcggcggtacgcgccacgcatttggcatccggtattagcgtgaaggttcagtcagagcgtagtcagcatgctaacaagcggctggcacgattgctgattgcctggaagctggagcagcagcaacaggaaaatagcgcggtgctgaaatcgcagcggcgaatgttccatcaccagattgaacgtggcaacccgagacggacatttacagggatggcttttatcgaaggataa

SEQ ID NO: 155299 - protein, 166 aa, Escherichia coli IAI1
MLETETGHYSDTLRSALISLDGDNAWALSESWCGTIQWICPSPYRPHHGRKNWFLGIGRFTADEQEQSDAIRYETLRSSGPGGQHVNKTDSAVRATHLASGISVKVQSERSQHANKRLARLLIAWKLEQQQQENSAVLKSQRRMFHHQIERGNPRRTFTGMAFIEG

SEQ ID NO: 155300 - DNA, 615 bp, Pseudomonas aeruginosa LESB58
  CDS (1)..(615): transl_table=11
atgatcctgctgcaactctccgcggcccagggcccggcggaatgctgcctggcggtggcgaaggcgttcgagcggctgtgcctcgaggcggcgcaagccggcgtcgaggtcgaggtgctcgaggaggtgaccggcgagcgtccgcgcacctggcgttcgctgctcctggggctgcgcggcattgccgccgaagcgctcgccgagcactggtgcggcggtatccagtggatctgcaccagtccctaccgggcgaggcatgcgcgcaagaactggttcatcggcgcggagcgtttcgccgcgccgccggccagcctggagggcgagatccgtttcgagaccctgcgctcttccggccccggcggccagcatgtcaacaccaccgactcggcggtgcgcgccacccacctggccagcggcatcagcgtcagggtgcagagccagcgtagccagcacgccaacaaacgcctggcgatcctgctgatcgcccggcgcctcgcggaccaggcgagcagcgcggccgacgcgctgcgcgcggagcgccgccaggcccacggccggatcagtcgcggcgcggctcgccgggtattccgcggcgagcgtttcgagccggcctga

SEQ ID NO: 155301 - protein, 204 aa, Pseudomonas aeruginosa LESB58
MILLQLSAAQGPAECCLAVAKAFERLCLEAAQAGVEVEVLEEVTGERPRTWRSLLLGLRGIAAEALAEHWCGGIQWICTSPYRARHARKNWFIGAERFAAPPASLEGEIRFETLRSSGPGGQHVNTTDSAVRATHLASGISVRVQSQRSQHANKRLAILLIARRLADQASSAADALRAERRQAHGRISRGAARRVFRGERFEPA

SEQ ID NO: 155302 - DNA, 621 bp, Bacteroides fragilis YCH46
  CDS (1)..(621): transl_table=11
atggaaaagacgtatttacaaatcacttcaggacgtggtcctgtagagtgttgccgtgtagtggctttggtactcgaaaaaatattgagagaagcacagaaacggaaattgagagtagaaatcctggaaaaagagactggtcctgtcaatcgcactttgttgtcggtagtcgttgcactcgaaggtgcaggttgcgatgtattggctgacgaatgggaagggactgtgctgtggattgcccgtagcccgtatcggattcatcacaggcggaagaactggtttgtcggtgtgcagacttttctcctgtccgaaagtcgtgaggctaccgaagatgatatccggtatgaaaccttacgggcgtccgggcccggagggcaacatgtcaacaagacagaatctgccgtaagagctgttcatatccccagcggaatcagtgtagtggcatccgaccagcgttcgcaatggcagaataaaaaactggctactgaacgattgttggtcaagctgaccgcttggaacatagagcaagcgatgattcaggcacagaccaattggagcaatcacaacagccttcaaaggggaaacccggtgaagatcattcaggaagaactccggttttaa

SEQ ID NO: 155303 - protein, 206 aa, Bacteroides fragilis YCH46
MEKTYLQITSGRGPVECCRVVALVLEKILREAQKRKLRVEILEKETGPVNRTLLSVVVALEGAGCDVLADEWEGTVLWIARSPYRIHHRRKNWFVGVQTFLLSESREATEDDIRYETLRASGPGGQHVNKTESAVRAVHIPSGISVVASDQRSQWQNKKLATERLLVKLTAWNIEQAMIQAQTNWSNHNSLQRGNPVKIIQEELRF

SEQ ID NO: 155304 - DNA, 615 bp, Salmonella enterica
  subsp. enterica serovar Paratyphi A str. ATCC 9150
  CDS (1)..(615): transl_table=11
atgatcttactgcaactttcttccgcacagggaccggacgagtgttgtctggcggtaaaaaaagcgctggattgtctgacgaaagaagccgccagagaaaaggtatcgttgacgcgacttgaaacggagccgggacgattaccagacacgctgcgttccgcgctggtctcgctggacggcgaaaaagctatggctttcagtgaacgttggtgcggcacgttactgtggatttgtaccagcccgtatcgcccgcaccatgggcgaaaaaactggtacgtcggcattgggcgcttttccgccgacgaacacatacagtctgatgagattcgtttcgagactctgcgctcttccggcccgggtgggcagcacgttaataaaagcgactcggcagtgcgggccacgcacctggcgagcgggattagcgtgaaggttcagtcggagcgcagtcaacatgcgaataagcgtctggcccggctgctgattgcctggcggctggaacagcaacggcaaaatgagtgtgcggcgttgaagtctgaaaggcgtctgttccatcatcagattgagcgcggcaatccgctacggatatttaaaggaatggcgtttacgccacaataa

SEQ ID NO: 155305 - protein, 204 aa, Salmonella enterica
  subsp. enterica serovar Paratyphi A str. ATCC 9150
MILLQLSSAQGPDECCLAVKKALDCLTKEAAREKVSLTRLETEPGRLPDTLRSALVSLDGEKAMAFSERWCGTLLWICTSPYRPHHGRKNWYVGIGRFSADEHIQSDEIRFETLRSSGPGGQHVNKSDSAVRATHLASGISVKVQSERSQHANKRLARLLIAWRLEQQRQNECAALKSERRLFHHQIERGNPLRIFKGMAFTPQ

SEQ ID NO: 155306 - DNA, 621 bp, Bacteroides fragilis NCTC 9343
  CDS (1)..(621): transl_table=11
atggaaaagacgtatttacaaatcacttcaggacgtggtcctgtagagtgttgtcgtgtagtggctttggtactcgaaaaaatattgagagaagcacagaaacggaaattgagagtagaaatcctggaaaaagagactggtcctgtcaatcgcactttgttgtcggtagtcgttgcactcgaaggtgcaggttgcgatgtattggctgacgaatgggaagggactgtgctatggattgcccgtagcccgtatcggattcatcacaggcggaagaactggtttgtcggtgtgcagactttcctcctgtccgaaagttgtgaggctaccgaagatgatatccggtatgaaaccttacgggcgtccggacccggagggcaacatgtcaacaagacagaatctgccgtaagagctgttcatatccccagcggaatcagtgtagtggcatccgaccagcgttcgcaatggcagaataaaaaactggctactgaacgattgttggtcaagctgaccgcttggaacatagagcaagcgatgattcaggcacagaccaattggagcaatcacaacagccttcaaaggggaaacccggtgaagatcattcaggaagaactccggttttaa

SEQ ID NO: 155307 - protein, 206 aa, Bacteroides fragilis NCTC 9343
MEKTYLQITSGRGPVECCRVVALVLEKILREAQKRKLRVEILEKETGPVNRTLLSVVVALEGAGCDVLADEWEGTVLWIARSPYRIHHRRKNWFVGVQTFLLSESCEATEDDIRYETLRASGPGGQHVNKTESAVRAVHIPSGISVVASDQRSQWQNKKLATERLLVKLTAWNIEQAMIQAQTNWSNHNSLQRGNPVKIIQEELRF

SEQ ID NO: 155308 - DNA, 621 bp, Pseudomonas fluorescens Pf-5
  CDS (1)..(621): transl_table=11
atgatgatgttgctacagctgtcctccgcccaagggcctgccgaatgcgaattggcagtaacccacgcattacgccgcctgcatcacgaagccgaagcgcagaacgtgcgcctcggcatcatcgagcaggttgccagccaggctcgcgacgcccatcgctcggtgctggtcagcctggatggcgagcacgccgcaaacctggctcgacgctggacaggcaccctgctgtggatctgcaaaagccctctgcggcccgcacatcgacgcaagaactggtatttcgccggccagccattctgcgccctggaagaagccgagggcggcgagatccgcttcgaggccatgcgcgcttccggccccggcgggcagcacgtgaacaagaccgactccgcggtacgcgccacccatgtagcgaccggcatcagcgtcaaggtgcagtccgaacgcagccagcacgataacaagcgcctggctcgtctactgatccagcaacggcttgccgatcggcaagagcaatccgtacaggaactgcgcttgcagcgtcgtgacgcccatcaccgggttgaacggggcaatgccgtgcgtaccttcagtggtagcgccttcacccctctggactga

SEQ ID NO: 155309 - protein, 206 aa, Pseudomonas fluorescens Pf-5
MMMLLQLSSAQGPAECELAVTHALRRLHHEAEAQNVRLGIIEQVASQARDAHRSVLVSLDGEHAANLARRWTGTLLWICKSPLRPAHRRKNWYFAGQPFCALEEAEGGEIRFEAMRASGPGGQHVNKTDSAVRATHVATGISVKVQSERSQHDNKRLARLLIQQRLADRQEQSVQELRLQRRDAHHRVERGNAVRTFSGSAFTPLD

SEQ ID NO: 155310 - DNA, 615 bp, Burkholderia sp. 383
  CDS (1)..(615): transl_table=11
atgctgatgcagatttcttcggcgcacggcccgctcgaatgccagctggccgcggccaatgcgttgcggcgcctgcaggcggaagccgatgcgcagcgtgtcgtcgtcacggtgctcgatgcggagccgggcgaacggcccggtacgctgcgctcggcgctgctcgatctcgacggcgccggcgcgcaggcgctcgcggaccgctggaccggcacgctgcaatggatttgcgcgagcccgtaccggttgcgccatccgcgcaagaactggttcatcggcgtcacgcgctgtgccgacgcgcagccgctgccggatggcgacgtgcggttcgaagcgatgcgcgcacgcgggccgggcggccagcacgtgaacaagacgagctctgcgattcgtgcgacccatgtcgcgaccggcctgtcggtgcgcgtggaaagcgagcgcagccagcacgcgaacaagcgcctggcgctgcagttgctgcaggttcgactgcagcaggaagccgaccgtcacgcatcggatgcgcgccggcagcggcggatgcagcactttgcgctggagcgcggcaaccccgtgcgcgtgtttcacggggcggcgttcgtgccggctgattga

SEQ ID NO: 155311 - protein, 204 aa, Burkholderia sp. 383
MLMQISSAHGPLECQLAAANALRRLQAEADAQRVVVTVLDAEPGERPGTLRSALLDLDGAGAQALADRWTGTLQWICASPYRLRHPRKNWFIGVTRCADAQPLPDGDVRFEAMRARGPGGQHVNKTSSAIRATHVATGLSVRVESERSQHANKRLALQLLQVRLQQEADRHASDARRQRRMQHFALERGNPVRVFHGAAFVPAD

SEQ ID NO: 155312 - DNA, 621 bp, Pseudomonas entomophila L48
  CDS (1)..(621): transl_table=11
atgatcctactgcaactctcggcggctcaggggccggacgaatgtgccctggcagtggccaaggcattgctcaggctgcaggccgaagcggatgcccaggccgtggcggtacggatactcgaagaagagccggggccgcggcgcggtaccttgcgctcggtgttgctggcactggatggcgagcaggccgagcgcctggcggatcactggacgggctcgctgcaatggacgtgcagcagtccgtaccggccggggcatgcgcgcaagaactggttctttgggggcgcacggtttgcgccaccggcaccggaattggcgagcgagatccacttcgagaccttgcgttcgtccgggccgggtggtcagcatgtcaacaccaccgactcggcagtgcgcgccacgcacctggccagcggcgtcagcgtcaaggtacagagcgagcgtagccagcacgccaacaaacgcttggcgctgctgctcatcggtcaacgcctggcgcaacaggcagagcaggtcgacagcgaactgcgcgcggagcggcggttgttccatcaccgcatcgagcgtggcaatccacgtcgggtgtttcgtggcgagcgcttcgagccggctgacgagtag

SEQ ID NO: 155313 - protein, 206 aa, Pseudomonas entomophila L48
MILLQLSAAQGPDECALAVAKALLRLQAEADAQAVAVRILEEEPGPRRGTLRSVLLALDGEQAERLADHWTGSLQWTCSSPYRPGHARKNWFFGGARFAPPAPELASEIHFETLRSSGPGGQHVNTTDSAVRATHLASGVSVKVQSERSQHANKRLALLLIGQRLAQQAEQVDSELRAERRLFHHRIERGNPRRVFRGERFEPADE

SEQ ID NO: 155314 - DNA, 615 bp, Pseudomonas aeruginosa UCBPP-PA14
  CDS (1)..(615): transl_table=11
atgatcctgctgcaactctccgcggcccagggcccggcggaatgctgcctggcggtggcgaaggcgttcgagcggctgtgcctcgaggcggcgcaagccggcgtcgaggtcgaggtgctcgaggaggtggccggcgagcgtccgcgcacctggcgttcgctgctcctggggctgcgcggcattgccgccgaagcgctcgccgagcactggtgcggcggtatccagtggatctgcaccagtccctaccgggcgaggcatgcgcgcaagaactggttcatcggcgcggagcgcttcgccgcgccgccggccagcctggagggcgagatccgtttcgagaccctgcgctcttccggccccggcggccagcatgtcaacaccaccgactcggcggtgcgcgccacccacctggccagcggcatcagcgtcagggtgcagagccagcgtagccagcacgccaacaaacgcctggcgatcctgctgatcgcccggcgcctcgcggaccaggcgagcagcgcggccgacgcgctgcgcgcggagcgccgccaggcccacggccggatcagtcgcggcgcggctcgccgggtattccgcggcgagcgtttcgagccggcctga

SEQ ID NO: 155315 - protein, 204 aa, Pseudomonas aeruginosa UCBPP-PA14
MILLQLSAAQGPAECCLAVAKAFERLCLEAAQAGVEVEVLEEVAGERPRTWRSLLLGLRGIAAEALAEHWCGGIQWICTSPYRARHARKNWFIGAERFAAPPASLEGEIRFETLRSSGPGGQHVNTTDSAVRATHLASGISVRVQSQRSQHANKRLAILLIARRLADQASSAADALRAERRQAHGRISRGAARRVFRGERFEPA

SEQ ID NO: 155316 - DNA, 699 bp, Escherichia coli APEC O1
  CDS (1)..(699): transl_table=11
atgtctggtgctggctgggttaattattcctgtcgcgcgactgcgcccggtgctgacgctcaaaaacagtggagggaaaaaaggatgatcttgctacaactctcctctgctcaggggccggaagaatgttgtctcgcagtgaaaaaagcactggacaggctgattaaagaagctacccgacaggacgtcgcggtaacggtgctggaaacagaaacgggtcgctactctgacacactgcgttcggcgctgatttctctggatggcgataacgcatgggctctaagcgaaagctggtgcggcactatccagtggatttgtccgagtccgtatcggcctcatcatgggcgcaaaaactggtttctgggcattgggcgttttaccgctgatgagcaggaacaatcggatgcaatccgttatgagacgctgcgttcgtcggggccgggcggtcaacatgtcaataaaaccgactcggcggtacgcgccacgcatctggcatccggtattagcgtgaaggttcagtcagagcgcagtcagcatgctaacaaacggctggcgcgattactgattgcctggaagctggaacaacagcaacaggaaaatagcgcggcgctgaaatcgcagcggcgaatgttccatcaccagattgaacgtggcaacccgcgacgaacgtttacagggatggcttttatcgaagggtaa

SEQ ID NO: 155317 - protein, 232 aa, Escherichia coli APEC O1
MSGAGWVNYSCRATAPGADAQKQWREKRMILLQLSSAQGPEECCLAVKKALDRLIKEATRQDVAVTVLETETGRYSDTLRSALISLDGDNAWALSESWCGTIQWICPSPYRPHHGRKNWFLGIGRFTADEQEQSDAIRYETLRSSGPGGQHVNKTDSAVRATHLASGISVKVQSERSQHANKRLARLLIAWKLEQQQQENSAALKSQRRMFHHQIERGNPRRTFTGMAFIEG

SEQ ID NO: 155318 - DNA, 624 bp, Neptuniibacter caesariensis
  CDS (1)..(624): transl_table=11
atgatattgctgcaattatctgctgggcagggaccagatgagtgcgcttatgcggtgggcctggctttaaagcagctggataaggatgccaaagcgcaggctgtctctattaagttgatcagtggtacgccatctgagaaaaggggcgggtataaatcactgttgttgcagtgtgatgccgatagccctcagagggcgaagcagtttgctgaaacatggcaaggggtcttgttatggatctgtcagagtcctttcaggccaaaacataaacgtaaaaactggttttttagcggccaggtttatgagatagcggaagagaccaacgacggtgaaataacctatcaaacgtgcagggcttccggagctggtggtcagcatgtgaatacaactgattctgctgttcgggcgacacatgtcagctcgggcatcagtgtcagggtggaaagcgaacgcagccaacatgcgaataagcgtttagctaaactgcttatcttgcagaagctcgctgagcaagtgcgggaggagcaatccaggttagataaagcccactggttgcagcatcaggaattagagcgggggaacccggctcgcgtattcaaggggctgaaatttgtggctgtgtga

SEQ ID NO: 155319 - protein, 207 aa, Neptuniibacter caesariensis
MILLQLSAGQGPDECAYAVGLALKQLDKDAKAQAVSIKLISGTPSEKRGGYKSLLLQCDADSPQRAKQFAETWQGVLLWICQSPFRPKHKRKNWFFSGQVYEIAEETNDGEITYQTCRASGAGGQHVNTTDSAVRATHVSSGISVRVESERSQHANKRLAKLLILQKLAEQVREEQSRLDKAHWLQHQELERGNPARVFKGLKFVAV

SEQ ID NO: 155320 - DNA, 588 bp, Comamonas testosteroni KF-1
  CDS (1)..(588): transl_table=11
atgctgctgatgcaactgagctccgcccacggtcccgccgagtgcgaatacgcactgcagctgaccctgcgcaagctgctgcaggcctgcgccgccgaggatctcgcggtcgaggtgctggaggagttccgcaccccggccggctacaggtcggtgctgctgcgctgcgagcgcgagacgcccgcactgcgcgaatggctgggcaccatccagtggatcttcgccagccccttccggccccggcatccgcgcaagaactggttcgtcgccgtgcagcgctgcgagccgccgcgccagctgaccatggacggcgagatccagttccagtcctgcaaggcttcaggcaagggcggccagcatgtcaacaccacggactcggccgtccatgccctgcatgtgcccagcgggatggccgtcaaggtcatgagcgaacgcagccagcatgccaacaagcagctggcgcgcgagctgctggccatcaagctggcccggcacaatgcgcgcagccaggggcaggcccagcgcctgcgcagccagcagcaccgggaagtcgagcgcggccaggccgtcaaggtcttccgcctgtaa

SEQ ID NO: 155321 - protein, 195 aa, Comamonas testosteroni KF-1
MLLMQLSSAHGPAECEYALQLTLRKLLQACAAEDLAVEVLEEFRTPAGYRSVLLRCERETPALREWLGTIQWIFASPFRPRHPRKNWFVAVQRCEPPRQLTMDGEIQFQSCKASGKGGQHVNTTDSAVHALHVPSGMAVKVMSERSQHANKQLARELLAIKLARHNARSQGQAQRLRSQQHREVERGQAVKVFRL

SEQ ID NO: 155322 - DNA, 642 bp, Roseobacter sp. SK209-2-6
  CDS (1)..(642): transl_table=11
atgactgcatcccggcatatctctgtcttggtcaccagtggcagcggtcctgccgaatgccagcaagccgtagcaaatgtactgaatgttatgcgtaccgaggcggagctcctcgccgtggacttcgacaccaatggagcacgttcaaaacatggctataaatccgctgtggttctggtcagcggtgccgaggccgaggccttcgccaagaattggcgcggtacgatccagtggcgggcgcaaagcaatttgcgtccgaagcataaacgggccaattggttcattggggtgttcgacctgcccgcatcggtgcggacgcctgaacgcattcaagcaagcgacgtcatcttggataccttccgggcgggcggccctggtgggcagcaccagaatacaaccgacagcgcagtgcgggcgacgcacaggccaacggggctttcagcggtggcacgtgaggagcgttcacaacaccgcaataaggcactggcattggagcgccttcagcacctgatggcagcccaggccgcagcggatgaagccgcacaaaaagcgagccgaaatgaattgcactatgcgctcgagcggggaaatccggtgcggtgcttcaaaggtcacgactttcgtgaagtgaaaggaggctag

SEQ ID NO: 155323 - protein, 213 aa, Roseobacter sp. SK209-2-6
MTASRHISVLVTSGSGPAECQQAVANVLNVMRTEAELLAVDFDTNGARSKHGYKSAVVLVSGAEAEAFAKNWRGTIQWRAQSNLRPKHKRANWFIGVFDLPASVRTPERIQASDVILDTFRAGGPGGQHQNTTDSAVRATHRPTGLSAVAREERSQHRNKALALERLQHLMAAQAAADEAAQKASRNELHYALERGNPVRCFKGHDFREVKGG

SEQ ID NO: 155324 - DNA, 612 bp, Lentisphaera araneosa HTCC2155
  CDS (1)..(612): transl_table=11
atgaatgcttggattcaattttcttctggtcaagggccgcgtgaatgtgaacgggtactctggcatattttcaaaatcttctgccgtgaggctgaagacgaaaatatccaatgcgagctaattaaagcggaaaagggtagtgagaaaaactcttttcgctccttgctcataagcttggaaggaaatcagctcgaaacgctgcgaaaaaactgggaaggaagcctactttggcgagctcccagtccctttcgtccccaccacaaacgacgcaattggtttgtgcaggcgagtttttttgcgatccccgcaaaagctgaacttgatttgtcgcaaatcaagtttgaagcccaacgaggatcgggtcccggcggccagcatgtcaacaaatgtgctacggccattcgagcttattatgcaccacttcagctctcgattctttgtaatgaagagcgctctcagtatcgcaataaaatgctcgcgatggcccgcgttctcgaagccttaaatttgcatcattcgcaaaaagaaggcgaagagagcaaagctcaaaggcaaaagcattatcaactcgaacgcggcaatccctgccgtactttcaaagctaaactctaa

SEQ ID NO: 155325 - protein, 203 aa, Lentisphaera araneosa HTCC2155
MNAWIQFSSGQGPRECERVLWHIFKIFCREAEDENIQCELIKAEKGSEKNSFRSLLISLEGNQLETLRKNWEGSLLWRAPSPFRPHHKRRNWFVQASFFAIPAKAELDLSQIKFEAQRGSGPGGQHVNKCATAIRAYYAPLQLSILCNEERSQYRNKMLAMARVLEALNLHHSQKEGEESKAQRQKHYQLERGNPCRTFKAKL

SEQ ID NO: 155326 - DNA, 1065 bp, Plesiocystis pacifica SIR-1
  CDS (1)..(1065): transl_table=11
atgagttgcggaggcatctttgactacgctggcaagcgtgagcgcctagaggaatacgagatcgccacgggcgacccctccttttgggaggacaacgagcgcgcgcagaagatcctgcgcgagcagtcgacgctcaagaagctcgtcgagcagatcgacgacgttcagcagaccatcgacgacggccgcgagctctacgagctcggccgtgaagagagcgacaccgagagcatcgtcgaggcctgggagaacctcggccaggccgacgcgttgctgggcaagctcgagtttcggcgcatgctcagcgggacccacgacgaagacagcgcgctgctgtcgatcaacgctggcgcgggcggcgtcgacagccaggactgggcggagatgctcctgcgcatgtaccagcgctggggcgagcgccagggcttcgacgtcaaggtcctcgacatccaagagggcgaccaggccggcatccgcggcgcggacctggccatcgagggggactacgcctacggctggctgcgctcggagatcggcgtgcaccgcctcgtgcgcatctcgcccttcgactcccaggctcggcgccagaccagcttcgccagcatcatggtcttgcccgacctcggcgacggcaaggacttcgagatcgaggtcaaccccgcggacctgcgcgtcgacaagtaccgggcctcgggcgcgggcggccagcacgtcaacaagacggagtcggccgttcgcctgacccacgaacccacgggtatcgtggtggcttgccagatggagcgctcgcagcacaagaacatggccacggcgatgcgcatgctcaaggccaagctgtgggacctcgagcagcagcggcgcagcgacgagatttcggccctcgagggcgacaagaaggccatcgagtggggcagccagatccgctcctacgtcatccacccctaccagcaggtcaacgatcaccgcacggagctcaagcagggcaacgtcgacgccgtcctcgacggcgatcttggcagctacatggaggccttcctgctgatgcagggcaacgctggcaagtag

SEQ ID NO: 155327 - protein, 354 aa, Plesiocystis pacifica SIR-1
MSCGGIFDYAGKRERLEEYEIATGDPSFWEDNERAQKILREQSTLKKLVEQIDDVQQTIDDGRELYELGREESDTESIVEAWENLGQADALLGKLEFRRMLSGTHDEDSALLSINAGAGGVDSQDWAEMLLRMYQRWGERQGFDVKVLDIQEGDQAGIRGADLAIEGDYAYGWLRSEIGVHRLVRISPFDSQARRQTSFASIMVLPDLGDGKDFEIEVNPADLRVDKYRASGAGGQHVNKTESAVRLTHEPTGIVVACQMERSQHKNMATAMRMLKAKLWDLEQQRRSDEISALEGDKKAIEWGSQIRSYVIHPYQQVNDHRTELKQGNVDAVLDGDLGSYMEAFLLMQGNAGK

SEQ ID NO: 155328 - DNA, 615 bp, Victivallis vadensis ATCC BAA-548
  CDS (1)..(615): transl_table=11
atgaagcggttgtttctggaaatctcctccgggcagggaccggaggagtgcgagcttctggtcgcgaaactgatggtacgcctgacttcggagctgcggcgggaggtgcgcttccgcgaggtggcgttgaatggcaaccgggaaaagtcgctggtcaaatcggtgctgttcgagctggaaggggagggcgcggccgtgtcggtcgcgccgtggctggggacgattcagtggatcgccgccagtccgttccgcccccatcacaaacggcgcaactggtatgccggaatccggctctttgaggcggagccggaactggcgttcgatccgaacgacgtggagttttcggcgtcgcgttcaagcgggccgggcggacagcacgtgaataccagcaacacccggattcaggcgttccatcgtccgaccggccagtgcgcggttgcaggcgaggaacgctcgcagttgcgcaaccgggagctggcgctggcgcggctggcggcgaaagtggcgacgcgcggcagcgccggttccgcccggctcggcctggaggcatggcgggcgcaccgggagctggaacgcggcaagccggtccgggtgttccgggaagatgaactgtag

SEQ ID NO: 155329 - protein, 204 aa, Victivallis vadensis ATCC BAA-548
MKRLFLEISSGQGPEECELLVAKLMVRLTSELRREVRFREVALNGNREKSLVKSVLFELEGEGAAVSVAPWLGTIQWIAASPFRPHHKRRNWYAGIRLFEAEPELAFDPNDVEFSASRSSGPGGQHVNTSNTRIQAFHRPTGQCAVAGEERSQLRNRELALARLAAKVATRGSAGSARLGLEAWRAHRELERGKPVRVFREDEL

SEQ ID NO: 155330 - DNA, 870 bp, Coxiella burnetii 'MSU Goat Q177'
  CDS (1)..(870): transl_table=11
atggcgcaactgagcaagcaagaaaaagagacggatttaattaccgatttaaataaagacttcaaacagcttgaaaaaacaatcgcagaaatggaatttcagcgtatgttttccggtgaaatggactcgaataatgcttatcttgacattcaggccggctcaggcgggacagaagcgcaggattgggcggaaatgctgttacgaatgtatttgcgctggggcgataaacacggcttcacgaccacgctaatggaggcttctcctggcgaagtagctggaataaaaagcgcgactatcgaatttacaggcagttatgcgtatggttggctgcgtagcgagacgggcgtacatcggctggtccgtaaatctccttttgattcgggcaatcgtcgtcatacttcgtttgcttcggtctttgtgtcacccgaaatcgatgatgatattgaaattgaaatcaacccggcggaattacgtattgacacttatcgcgctagcggtgcgggagggcagcacgtaaaccggacggattcggccgtccgcatcacgcatttgccctctgggattgtggtccagtgtcaaaatgaccgatcacagcataaaaataaagcgcaagccatgaaacagcttcgggcaaagctttatgagatggaaatgatgaaacaacaggaaaaacaagctttgctagaagcctctaaatccgaaatcagttggggcaatcaaattcgctcgtacgttttagacgcttcccgtgtgaaagatttgcgaaccggcgttgaaaccagtaatacccaggctgtgttggatggcgatatcgatttattcatcgaggcctgtctaaaacaaggagattttaatgacgctgctcgatga

SEQ ID NO: 155331 - protein, 289 aa, Coxiella burnetii 'MSU Goat Q177'
MAQLSKQEKETDLITDLNKDFKQLEKTIAEMEFQRMFSGEMDSNNAYLDIQAGSGGTEAQDWAEMLLRMYLRWGDKHGFTTTLMEASPGEVAGIKSATIEFTGSYAYGWLRSETGVHRLVRKSPFDSGNRRHTSFASVFVSPEIDDDIEIEINPAELRIDTYRASGAGGQHVNRTDSAVRITHLPSGIVVQCQNDRSQHKNKAQAMKQLRAKLYEMEMMKQQEKQALLEASKSEISWGNQIRSYVLDASRVKDLRTGVETSNTQAVLDGDIDLFIEACLKQGDFNDAAR

SEQ ID NO: 155332 - DNA, 1050 bp, Parvimonas micra ATCC 33270
  CDS (1)..(1050): transl_table=11
gtgattcactttgacatttccaagttagaggatgagtataaaaatcttgaatctcagagctttaaggaagatttttggaatgattccaaaagtgcaaagtcaattttggataatatgaaaaatttaaaatttaagattgaaacatttactagtctaagtcgaaaaattgaagattctatagaatttttagaaattttatctgacgaagaatttatggaatatgaaaaagaagcgttaaaaaatatttataatatcgaaaaggaatatttatctttaaagttaaataccttaatggttggagagtatgattcaaacaatgctattttagaaattcatgccggagctggtggtacagatgctcaggattggactgaaatgttacaacgtctttatacaagatggattaacagtaaaggtttttcattttcaattttggattataattctgatactgaaggaggaattaaatctgttactttaaaagttgatggcaaaaatgcttatggatttttaaaaggggaaaaaggagttcatagacttgttagaatttctccttatgattcttcaaataagaggcatacaagttttgcaagtgtagatgtttttccggagattgaagaaattaccgatattgaaataaatcctaaagatttacggattgatacttatagatccggaggagcaggaggacaacatgtaaacaaaacagattctgcagttagaataacacatattccaacgggagtaactgtttcttgtcaatccgaaagaagtcaaatgtttaatagagatacggcgatgagacaacttattgcgaaacttttgattataaagcaggaagaaaatagagaaaaaatagaagatattcaaggaaaatattcccaaattgcatgggggtcacagataagatcttatgtttttcaaccctatacacttgtcaaagatcatcgtacaggttatgaaacaggaaatgtcgagtctgttatgaatgggaatattgatgaatttataaatcaatatttatgtgaattaataaaaaagagcaggtga

SEQ ID NO: 155333 - protein, 349 aa, Parvimonas micra ATCC 33270
MIHFDISKLEDEYKNLESQSFKEDFWNDSKSAKSILDNMKNLKFKIETFTSLSRKIEDSIEFLEILSDEEFMEYEKEALKNIYNIEKEYLSLKLNTLMVGEYDSNNAILEIHAGAGGTDAQDWTEMLQRLYTRWINSKGFSFSILDYNSDTEGGIKSVTLKVDGKNAYGFLKGEKGVHRLVRISPYDSSNKRHTSFASVDVFPEIEEITDIEINPKDLRIDTYRSGGAGGQHVNKTDSAVRITHIPTGVTVSCQSERSQMFNRDTAMRQLIAKLLIIKQEENREKIEDIQGKYSQIAWGSQIRSYVFQPYTLVKDHRTGYETGNVESVMNGNIDEFINQYLCELIKKSR

SEQ ID NO: 155334 - DNA, 597 bp, Kordia algicida OT-1
  CDS (1)..(597): transl_table=11
atggacaatcaattttgggtacaaatttcctcaggttcaggacctgaagaatgctgtctcgccgtaaaatacttaacagaaaagctatcacgattaccaaattatacattcaatgtcatcgaattggttgctacaaaataccaaaactacaaatcagtttggttgcgtgccacaggcgattcggcagagtttaaaaatcattggcaaggaagtattcaatttattttcagaagtccgtatcgcgcacatcatcagcgtaaaaactggtttgttgatgtaaaagtatacgtgatgccaacacaaatttcatggtctccaaaagagattcaagtgaaaacggcacgaagttctggagctggcggacaacatgtaaataaagtagaaactgctgtaagtatgatacacattccaacaggaatcactgtgcaagcaagcgaagaacgctcgcaatttttaaacaaaaaactagcatttgcacgattagatattgcaataaaagcacaaaatcaaaagcaacaaaacgcgatcgaaaagcaaaagtggatgcaacacaaacagttgcaattaggaaatccggtgcaagtttttaaaaaataa

SEQ ID NO: 155335 - protein, 198 aa, Kordia algicida OT-1
MDNQFWVQISSGSGPEECCLAVKYLTEKLSRLPNYTFNVIELVATKYQNYKSVWLRATGDSAEFKNHWQGSIQFIFRSPYRAHHQRKNWFVDVKVYVMPTQISWSPKEIQVKTARSSGAGGQHVNKVETAVSMIHIPTGITVQASEERSQFLNKKLAFARLDIAIKAQNQKQQNAIEKQKWMQHKQLQLGNPVQVFKK

SEQ ID NO: 155336 - DNA, 615 bp, Rhizobium leguminosarum bv. trifolii WSM1325
  CDS (1)..(615): transl_table=11
atgagcgctattgatcttctcattaccgcaggcaacggcccggtggaatgccgcatggcgctggcggcgcttctcggcattctcgagcgggaggctgtacggctcgggtgctctttcgaaaccaatcttggcccgatgccggatcagcacggtgcaaagtcggcaatcgtcagcctcaatggtttcgaggcggagcagattgccaatgactattgcgggacgatccgttttaccttcaagagccaggtgcgtccgggtcacaaacggcagaactggtatgtctcggttcagcgtatcgatacaaaaccggaaggcggcgaggtgacgattgatccagccgacctgcgtttcgagacgctgagagccggcggaccgggcgggcagcaccagaatacgaccgacagtgcggttcgcgtcctgcatcggcctacgggtcttgtcgcgaccgcgcgcgatgagcgttcccagcatcgcaacaaggccctggcgctccggcgtctggaggcaatgctgcgccatctcgaagtggagaagcaggaggcggccaaatccgggcgcttcatcgccaaccgaaccatcgagagaggcaacgaagtcaagagtttcaagctgtga

SEQ ID NO: 155337 - protein, 204 aa, Rhizobium leguminosarum bv. trifolii WSM1325
MSAIDLLITAGNGPVECRMALAALLGILEREAVRLGCSFETNLGPMPDQHGAKSAIVSLNGFEAEQIANDYCGTIRFTFKSQVRPGHKRQNWYVSVQRIDTKPEGGEVTIDPADLRFETLRAGGPGGQHQNTTDSAVRVLHRPTGLVATARDERSQHRNKALALRRLEAMLRHLEVEKQEAAKSGRFIANRTIERGNEVKSFKL

SEQ ID NO: 155338 - DNA, 615 bp, Salmonella enterica subsp. enterica serovar Saintpaul str. SARA29
  CDS (1)..(615): transl_table=11
atgatcttactgcaactttcttccgcacagggaccggacgagtgttgtctggcggtaaaaaaaacgctggattgtctgacgaaagaagccgccagagaaaaggtatcgttgacgcgacttgaaacggagccgggacgattaccagacacgctgcgttccgcgctggtctcgctggacggcgaaaaagctatggctttcagtgaacgttggtgcggcacgttactgtggatttgtaccagcccgtatcgcccgcaccatgggcgaaaaaactggtacgtaggcattgggcgcttttccgccgacgaacacatacagtctgatgagattcgtttcgagactctgcgctcttccggcccgggtgggcagcacgttaataaaaccgactcggcagtgcgggccacgcacctggcgagcgggattagcgtgaaggttcagtcggagcgcagtcaacatgcgaataagcgtctggcccggctgctgattgcctggcggctggaacagcaacggcaaaatgagtgtgcggcgttgaagtctgaaaggcgtctgttccatcatcagattgagcgcggcaatccgctacggatatttaaaggaatggcgtttacgccacaataa

SEQ ID NO: 155339 - protein, 204 aa, Salmonella enterica subsp. enterica serovar Saintpaul str. SARA29
MILLQLSSAQGPDECCLAVKKTLDCLTKEAAREKVSLTRLETEPGRLPDTLRSALVSLDGEKAMAFSERWCGTLLWICTSPYRPHHGRKNWYVGIGRFSADEHIQSDEIRFETLRSSGPGGQHVNKTDSAVRATHLASGISVKVQSERSQHANKRLARLLIAWRLEQQRQNECAALKSERRLFHHQIERGNPLRIFKGMAFTPQ

SEQ ID NO: 155340 - DNA, 615 bp, Salmonella enterica
  subsp. enterica serovar Schwarzengrund str. SL480
  CDS (1)..(615): transl_table=11
atgatcttactgcaactttcttccgcacagggaccggacgagtgttgtctggcggtaaaaaaagcgctggattgtctgacgaaagaagctgccagagaaaaggtatcgctgacacgacttgaaacggagccgggacgattaccagacacgctgcgctccgcactggtctcgctggacggtgaaaaagctatggctttcagtgaacgttggtgtggaacgttactgtggatttgtaccagcccgtatcgcccgcaccatgggcgaaaaaactggtacgtcggcattgggcgcttttccgccgacgaacagatgcagtctgatgagattcatttcgagactctgcgctcttccggcccgggtgggcagcacgttaataaaaccgactcggcagtgcgggccacgcacctggcgagcgggattagcgtgaaggttcagtcggagcgcagtcaacatgcgaataagcgtctggcccggctgctgattgcctggcggctggaacagcaacggcaaaatgagtgtgcggcgttgaagtctgaaaggcgtctgttccatcatcagattgagcgcggcaatccgctgcggatatttaaaggaatggcgtttacgccacaataa

SEQ ID NO: 155341 - protein, 204 aa, Salmonella enterica
  subsp. enterica serovar Schwarzengrund str. SL480
MILLQLSSAQGPDECCLAVKKALDCLTKEAAREKVSLTRLETEPGRLPDTLRSALVSLDGEKAMAFSERWCGTLLWICTSPYRPHHGRKNWYVGIGRFSADEQMQSDEIHFETLRSSGPGGQHVNKTDSAVRATHLASGISVKVQSERSQHANKRLARLLIAWRLEQQRQNECAALKSERRLFHHQIERGNPLRIFKGMAFTPQ

SEQ ID NO: 155342 - DNA, 615 bp, Salmonella enterica subsp. enterica serovar Heidelberg str. SL486
  CDS (1)..(615): transl_table=11
atgatcttactgcaactttcttctgcgcagggaccggacgagtgttgtctggcggtaaaaaaagcgctggattgtctgacgaaagaagccgccagagaaaaggtatcgctgacgcgacttgaaacagagccgggacgattaccagacacgctgcgttccgcgctggtctcgctggacggcgaaaaagctatggctttcagtgaacgttggtgcggcacgttactgtggatttgtaccagcccgtatcgtccgcaccatgggcgaaaaaactggtacgtcggcattgggcgcttttccgccgacgagcacatacagtctgatgagattcgtttcgagactttgcgctcttccggcccgggtgggcagcacgttaataaaaccgactcggcagtgcgggccacgcacctggtgagcgggattagcgtgaaggttcagtcggagcgcagtcaacatgcgaataagcgtctggcccggctgctgattgcctggcggctggaacagcaacggcaaaatgagtgtgcggcgttgaagtctgaaaggcgtctgttccatcatcagattgagcgcggcaatccgctacggatatttaaaggaatggcgtttacgccacaataa

SEQ ID NO: 155343 - protein, 204 aa, Salmonella enterica subsp. enterica serovar Heidelberg str. SL486
MILLQLSSAQGPDECCLAVKKALDCLTKEAAREKVSLTRLETEPGRLPDTLRSALVSLDGEKAMAFSERWCGTLLWICTSPYRPHHGRKNWYVGIGRFSADEHIQSDEIRFETLRSSGPGGQHVNKTDSAVRATHLVSGISVKVQSERSQHANKRLARLLIAWRLEQQRQNECAALKSERRLFHHQIERGNPLRIFKGMAFTPQ

SEQ ID NO: 155344 - DNA, 615 bp, Salmonella enterica subsp. enterica serovar Hadar str. RI_05P066
  CDS (1)..(615): transl_table=11
atgatcttactgcaactttcttccgcacagggaccggacgagtgttgtctggcggtaaaaaaagcgctggattgtctgacgaaagaagccgccagagaaaaggtatcgttgacgcgacttgaaacggagccgggacgattaccagacacgctgcgttccgcgctggtctcgctggacggcgaaaaagctatggctttcagtgaacgttggtgcggcacgttactgtggatttgtaccagcccgtatcgcccgcaccatgggcgaaaaaactggtacgtcggcattgggcgcttttccgccgacgagcacatacagtctgatgagattcgtttcgagactctgcgctcttccggcccgggtgggcagcacgttaataaaaccgactcggcagtgcgggccacgcacctggtgagcgggattagcgtgaaggttcagtcggagcgcagtcaacatgcgaataagcgtctggcccggctgctgattgcctggcggctggaacagcaacggcaaaatgagtgtgcggtgttgaagtctgaaaggcgtctgttccatcatcagattgagcgcggcaatccgctacggatatttaaaggaatggcgtttacgccacaataa

SEQ ID NO: 155345 - protein, 204 aa, Salmonella enterica subsp. enterica serovar Hadar str. RI_05P066
MILLQLSSAQGPDECCLAVKKALDCLTKEAAREKVSLTRLETEPGRLPDTLRSALVSLDGEKAMAFSERWCGTLLWICTSPYRPHHGRKNWYVGIGRFSADEHIQSDEIRFETLRSSGPGGQHVNKTDSAVRATHLVSGISVKVQSERSQHANKRLARLLIAWRLEQQRQNECAVLKSERRLFHHQIERGNPLRIFKGMAFTPQ

SEQ ID NO: 155346 - DNA, 1131 bp, Methylocella silvestris BL2
  CDS (163)..(1131): transl_table=11
atgcgcgccgaagccgaagccttggtcgaatccatcaagcaatccatgggattgctgaggaggcatcttgacgtcgcgaccgctgaacgccgtctcgccgaactgaacgccaaggtcgaggatccgaatctctgggacgacgccgacgccgcgcaaaaaatcatgcgcgagcgcaccgaccttgaagatcggctcggctcgctcgcccgtttcgatagcgaactcgatgacgccgtaacgctcgtcgagctcgccgaggcggaagaggatacggcgaccgaaaaggaagccatcgggcagctgaagagcctgaagctcgaagccgaacggcgccagatcgaggcgctgctgtccggcgaggtcgacggcaacgacacctatatcgaagtgcattccggcgccggcggaacggagagctgcgactgggcgcgcatgctgtttcgcatgtatgcgcgctgggccgagcggcacaaattcaaggtcgaggtgatcgaggagaccgctggcgacgaggcgggcctcaaatccggcacgctgctggtcaagggccataatgcgcatggctgggccaagacagagtcaggcgtgcatcggctggtgcgcatctcgccgttcgattccaacgcgcggcgccacacgagcttcgcctcggtctgggtctatccggtgatcgacgacaagatcgacatcgacgtgaaggagagcgactgccgcatcgacacctatcgctcgtcgggcgccggcggacagcacgtcaacacgaccgattccgcggtgcgcatcacgcatattccgtcgggcatcgtcgtcgcctgccagggcgagcggtcgcagcacaagaaccgggcgaccgcctggaacatgctccgcgcgcgcctttatgagcaggagatcgaaaagcgcgaggcggcggccaacgccaccgaagcgtcaaagaccgagatcggctggggtcaccagatccgctcctacgtattgcaaccctatcagctcgtgaaggatttgcgctcgggcgtcacctctggaacgcccgacgacgtgcttgacggcgatctcgattccttcatggaggcggctcttgcgcaaagggtatcgggaggcgcgccgcttgcggtggaagacgtcgactag

SEQ ID NO: 155347 - protein, 322 aa, Methylocella silvestris BL2
MRERTDLEDRLGSLARFDSELDDAVTLVELAEAEEDTATEKEAIGQLKSLKLEAERRQIEALLSGEVDGNDTYIEVHSGAGGTESCDWARMLFRMYARWAERHKFKVEVIEETAGDEAGLKSGTLLVKGHNAHGWAKTESGVHRLVRISPFDSNARRHTSFASVWVYPVIDDKIDIDVKESDCRIDTYRSSGAGGQHVNTTDSAVRITHIPSGIVVACQGERSQHKNRATAWNMLRARLYEQEIEKREAAANATEASKTEIGWGHQIRSYVLQPYQLVKDLRSGVTSGTPDDVLDGDLDSFMEAALAQRVSGGAPLAVEDVD

SEQ ID NO: 155348 - DNA, 615 bp, Escherichia coli F11
  CDS (1)..(615): transl_table=11
atgatcttgctacaactctcctctgctcaggggccggaagaatgttgtctcgcagtgaaaaaagcactggacaggctgattaaagaagctacccgacaggacgtcgcggtaacggtgctggaaacagaaacgggtcgctactctgacacactgcgttcggcgctgatttctctggatggcgataacgcatgggctttaagcgaaagctggtgcggcactattcagtggatttgtccgagtccgtatcggcctcatcatgggcgcaaaaactggtttctgggcattgggcgttttaccgctgatgagcaggaacaatcggatgcaatccgttatgagacgctgcgttcgtcagggccgggcggtcaacatgtcaataaaaccgactcggcggtacgcgccacgcatctgtcatccggtattagcgtgaaggttcagtcagagcgcagtcagcatgctaacaaacggctggcgcgattactgattgcctggaagctggaacaacagcaacaggaaaatagcgcggcgctgaaatcgcagcggcgaatgttccatcaccagattgaacgtggcaacccgcgacgaacgttcacagggatggcttttatcgaaggataa

SEQ ID NO: 155349 - protein, 204 aa, Escherichia coli F11
MILLQLSSAQGPEECCLAVKKALDRLIKEATRQDVAVTVLETETGRYSDTLRSALISLDGDNAWALSESWCGTIQWICPSPYRPHHGRKNWFLGIGRFTADEQEQSDAIRYETLRSSGPGGQHVNKTDSAVRATHLSSGISVKVQSERSQHANKRLARLLIAWKLEQQQQENSAALKSQRRMFHHQIERGNPRRTFTGMAFIEG

SEQ ID NO: 155350 - DNA, 501 bp, Escherichia coli 101-1
  CDS (1)..(501): transl_table=11
atgctggaaacagaaacgggccgctactctgacacgctgcgttcggcgctggtttctctggatggcgataacgcatgggcattaagcgaaagctggtgtggcactattcagtggatttgtccgagtccgtatcggcctcatcatgggcgcaaaaactggtttctgggcattgggcgttttaccgctgatgagaaggaacaatcggatgcaatccgttatgagacgctgcgttcgtcggggccgggcggtcaacatgtcaataaaaccgactcggcggtacgcgccacgcatctggcatccggtattagcgtgaaggttcagtcagagcgcagccagcatgctaacaaacggctggcgcgattgctgattgcctggaagctggagcagcagcaacaggaaaatagcgcggcgctgaaatcgcagcggcgaatgttccatcaccagattgaacgtggcaacccgcgacggacatttacagggatggcttttatcgaaggataa

SEQ ID NO: 155351 - protein, 166 aa, Escherichia coli 101-1
MLETETGRYSDTLRSALVSLDGDNAWALSESWCGTIQWICPSPYRPHHGRKNWFLGIGRFTADEKEQSDAIRYETLRSSGPGGQHVNKTDSAVRATHLASGISVKVQSERSQHANKRLARLLIAWKLEQQQQENSAALKSQRRMFHHQIERGNPRRTFTGMAFIEG

SEQ ID NO: 155352 - DNA, 612 bp, Providencia rustigianii DSM 4541
  CDS (1)..(612): transl_table=11
atgacattattacaattttcctcagctcaagggccggatgaatgttgcatcgccgtggaaaaagctttttcctgctttttaaaagaggccgctttgttagatgttcaaattgatgtgttggagtcttttccctcaaaacaggggttaaagtccgtgttagtctccttagaggggaaacagagcgagcaactggtcaacgtgtggagtggaaccgttcaatggcaatgccaaagccccttacgaccacgtcataaacgcaaaaactggtttatcagcgtgattgcattttcgcctatccagcctttagaagagagtgaaatcgaatatgaatttacgaaatctcaaggtgccggtggccagcatgtgaataaaacctgttctgcggtacgtgccaagcatgtctcaacagggattagtgtgaaagtccaatcagagcgtagccaacatgccaataagaggctagcgaaagagttaatccattggaagctcagtgaatttcaatctcaacagagaacggatctcgataaacaacgtcatcattctcactatcagattgagcgtggaaatgcatcaataacgtttgttgggaatgagtttaaacgagttaactaa

SEQ ID NO: 155353 - protein, 203 aa, Providencia rustigianii DSM 4541
MTLLQFSSAQGPDECCIAVEKAFSCFLKEAALLDVQIDVLESFPSKQGLKSVLVSLEGKQSEQLVNVWSGTVQWQCQSPLRPRHKRKNWFISVIAFSPIQPLEESEIEYEFTKSQGAGGQHVNKTCSAVRAKHVSTGISVKVQSERSQHANKRLAKELIHWKLSEFQSQQRTDLDKQRHHSHYQIERGNASITFVGNEFKRVN

SEQ ID NO: 155354 - DNA, 612 bp, Providencia alcalifaciens DSM 30120
  CDS (1)..(612): transl_table=11
atgatcttattacagttttcttctgctcaaggtcctgaagaatgttgcattgcagtagaaaatgcatttgcatgttttgtaaaagaggctgctttactcaaggtgaataccgaattactagagtcatgcccatctaagcaagggctaaaatcagtgctgattgctttagacggtatacatgccgaaaaaatggcagaacgttggagtgggacgattcaatggcaatgtcaaagcccgctgagaccacgccataagcgcaagaactggttcatcagtgtgatgatgtttacaccaatacaacctttagaaaacagtgaaatcgaatatgaatttactcaatctcaaggtgcagggggacagcatgtgaataaaacatgttccgccgttcgtgccaaacacgtagcaaccggaattagtgtcaaagtacaatcggagcgtagtcaacatgctaataaaaaattagccaaggaactcatccattggaagctttgcgaatatcaatctcaacagctaaacacgttagataaacaacgccacctttctcactaccagattgaacgaggaaatgcggcattaattttcaccggcaaagaatttaagcaaatgaactaa

SEQ ID NO: 155355 - protein, 203 aa, Providencia alcalifaciens DSM 30120
MILLQFSSAQGPEECCIAVENAFACFVKEAALLKVNTELLESCPSKQGLKSVLIALDGIHAEKMAERWSGTIQWQCQSPLRPRHKRKNWFISVMMFTPIQPLENSEIEYEFTQSQGAGGQHVNKTCSAVRAKHVATGISVKVQSERSQHANKKLAKELIHWKLCEYQSQQLNTLDKQRHLSHYQIERGNAALIFTGKEFKQMN

SEQ ID NO: 155356 - DNA, 639 bp, Pseudovibrio sp. JE062
  CDS (1)..(639): transl_table=11
atgacggaaaaaacaaccgttcgtctgctgttgtcatccggagacgggcctgcggaatgcaggctcgccctttgccacagcgttgcagctatggagaaaacagcaaaaaagcttgggctctcctttgccagtgatccggagcgctctgacctttccgcaaatgttgcttctgctgaagtgacacttgcgggtgagggagccaagacttttgccaaggcatggtgcggcacgatcaagtggacctgccagagcccctttcgccccaaccataaacggcagaactggttcatcggcgtctatgagctgccggtctctgcagcagaagccggagagttcaacgcagaagatctgcgctttgaaactctgcgggctggtggcccgggcgggcagcaccagaacaagaccgaaagtgcggtacgggtcacccacgtgcccacaggtctttctgttgtggcgcgtgacgaacgctctcaacaccgcaacaaacagattgccctgcagcgtttgcaggaaaagctctctggtctttcagcggaagaaggtgcacgcctgcgaaaatctgaacgcttgctccaccaccaactggaacgcggcaatccggtacggtgcttcaaaggagagcggtttaaggaagtctga

SEQ ID NO: 155357 - protein, 212 aa, Pseudovibrio sp. JE062
MTEKTTVRLLLSSGDGPAECRLALCHSVAAMEKTAKKLGLSFASDPERSDLSANVASAEVTLAGEGAKTFAKAWCGTIKWTCQSPFRPNHKRQNWFIGVYELPVSAAEAGEFNAEDLRFETLRAGGPGGQHQNKTESAVRVTHVPTGLSVVARDERSQHRNKQIALQRLQEKLSGLSAEEGARLRKSERLLHHQLERGNPVRCFKGERFKEV

SEQ ID NO: 155358 - DNA, 615 bp, Escherichia coli (strain UTI89 / UPEC)
  CDS (1)..(615): transl_table=11
atgatcttgctacaactctcctctgctcaggggccggaagaatgttgtctcgcagtgaaaaaagcactggacaggctgattaaagaagctacccgacaggacgtcgcggtaacggtgctggaaacagaaacgggtcgctactctgacacactgcgttcggcgctgatttctctggatggcgataacgcatgggctctaagcgaaagctggtgcggcactatccagtggatttgtccgagtccgtatcggcctcatcatgggcgcaaaaactggtttctgggcattgggcgttttaccgctgatgagcaggaacaatcggatgcaatccgttatgagacgctgcgttcgtcggggccgggcggtcaacatgtcaataaaaccgactcggcggtacgcgccacgcatctggcatccggtattagcgtgaaggttcagtcagagcgcagtcagcatgctaacaaacggctggcgcgattactgattgcctggaagctggaacaacagcaacaggaaaatagcgcggcgctgaaatcgcagcggcgaatgttccatcaccagattgaacgtggcaacccgcgacgaacgtttacagggatggcttttatcgaagggtaa

SEQ ID NO: 155359 - protein, 204 aa, Escherichia coli (strain UTI89 / UPEC)
MILLQLSSAQGPEECCLAVKKALDRLIKEATRQDVAVTVLETETGRYSDTLRSALISLDGDNAWALSESWCGTIQWICPSPYRPHHGRKNWFLGIGRFTADEQEQSDAIRYETLRSSGPGGQHVNKTDSAVRATHLASGISVKVQSERSQHANKRLARLLIAWKLEQQQQENSAALKSQRRMFHHQIERGNPRRTFTGMAFIEG

SEQ ID NO: 155360 - DNA, 615 bp, Escherichia coli
  CDS (1)..(615): transl_table=11
atgatcttgctacaactctcctcagcgcaggggccggaagaatgttgcctcgcagtgaaaaaggcgctggacaggttgattaaagaagctacccgacaagacgtcgcgataacggtgctggaaacagaaacgggtcgctactctgacacgttgcgttcagcgctgatttctctggatggcgataacgcatgggcattaagcgaaagttggtgcggcactatccagtggatttgtccgagtccgtatcggcctcatcatgggcgcaaaaactggtttctgggcattgggcgttttactgctgatgagcaggaacaatcggatgcaatccgttatgagacgctgcgttcgtcggggccgggcggtcaacatgtcaataaaaccgactcggcggtacgcgccacgcatctggcatccgggattagcgtgaaggttcagtcagagcgcagccaacatgccaacaaacggctggcgcgattgctgattgcctggaagctggagcaacagcaacaggaaaatagcgcggcgctgaaatcgcagcggcgaatgttccatcaccagattgaacgtggcaacccgcgacgaacgtttacagggatggcttttgtcgctgtgtaa

SEQ ID NO: 155361 - protein, 204 aa, Escherichia coli
MILLQLSSAQGPEECCLAVKKALDRLIKEATRQDVAITVLETETGRYSDTLRSALISLDGDNAWALSESWCGTIQWICPSPYRPHHGRKNWFLGIGRFTADEQEQSDAIRYETLRSSGPGGQHVNKTDSAVRATHLASGISVKVQSERSQHANKRLARLLIAWKLEQQQQENSAALKSQRRMFHHQIERGNPRRTFTGMAFVAV

SEQ ID NO: 155362 - DNA, 615 bp, Escherichia coli O6
  CDS (1)..(615): transl_table=11
atgatcttgctacaactctcctctgctcaggggccggaagaatgttgtctcgcagtgagaaaagcactggacaggctgattaaagaagctacccgacaggacgtcgcggtaacggtgctggaaacagaaacgggtcgctactctgacacactgcgttcggcgctgatttctctggatggcgataacgcatgggctctaagcgaaagctggtgcggcactattcagtggatttgtccgagtccgtatcggcctcatcatgggcgcaaaaactggtttctgggcattgggcgttttaccgctgatgagcaggaacaatcggatgcaatccgttatgagacgctgcgttcgtcggggccgggcggtcaacatgtcaataaaaccgactcggcggtacgcgccacgcatctggcatccggtattagcgtgaaggttcagtcagagcgcagtcagcatgctaacaaacggctggcgcgattactgattgcctggaagctggaacaacagcaacaggaaaatagcgcggcgctgaaatcgcagcggcgaatgttccatcaccagattgaacgtggcaacccgcgacgaacgtttacagggatggcctttatcgaagggtaa

SEQ ID NO: 155363 - protein, 204 aa, Escherichia coli O6
MILLQLSSAQGPEECCLAVRKALDRLIKEATRQDVAVTVLETETGRYSDTLRSALISLDGDNAWALSESWCGTIQWICPSPYRPHHGRKNWFLGIGRFTADEQEQSDAIRYETLRSSGPGGQHVNKTDSAVRATHLASGISVKVQSERSQHANKRLARLLIAWKLEQQQQENSAALKSQRRMFHHQIERGNPRRTFTGMAFIEG

SEQ ID NO: 155364 - DNA, 1404 bp, Zea mays
  CDS (1)..(1404)
atggcctcccgcctcttaaccagatcagcggcgtcgcgcctcgtttcccacctccaccgcaagacgccaggcattactccctgcctcctcacccgtggccctgccttggcgtccctcttggggcccactgatggcctcccccacgccgctgactccactctgctccgcgttccgatgcggtggctctcctctccgtcctcggaggcggtggcggaggctccgatgaccgcggacggcctgactgtagactcaatcgccgacaaggggtggacgattcttcccgaagccgagagcgactggcgcagccatgccgcggccgtcgcacagtcagtcaaggtcatcaaaaagcgcctcaagtggggatggatacttgagagaacgaagcaattggctgtggtgttggagaagccagacctctgggaagacccagtttttgctgggagggttagccgtgagcagggtgagctcatgggcaagattaagtcagtgaaccaatttgagcaggaattgattgaacacattgagatgctacggcttgcacgtgaagaaaacgataatgaacttgagatggaaagcatgaaggctttagctgatatgagaagaagtgcaaaggagaaagaacttaatgcgttactttctggagacaatgactcttgttcttgcttcattgaggttcaggcaggggctggcggcactgagagcatggactgggctgcaatggtcatgaacatgtataggtcatgggcccagcgacgaggatataaaatcactgtggtagaagagatgtctggtgaagtagcagggatcaagagggccactatcaaagttgatggtgaatatgcatttggatatgccaaagctgaagtaggagttcatagattagtgcgaatttctccatttgacagtggaaagcgacggcacacttcctttgcggctgttgctgtaatacctattcttggggataccactagccggtaccagatcaaagattctgatcttaggattgaacgtttccgatctggtggccctggtggtcagcatgccaacactacagagagtgccattcgaattgtgcacattccgactggtataagtgcaacatctcaaaatgaaagatcacagcacatgaacaaggcatcagcaatggcagtgctccaatctcgtcttgatcagcttgagattgcccgccaggcacagatgaatgcagagcacacacaatcactcaacgaaatcagctggggcaaccaaataagatcttatgttctccatccataccgtatggtcaaagatctccggacgaactatgaagtatctgacccggattcagttctagaaggagatctagacgatttcatcttgaactatttgtcttcgtcactggatgaagctgatgtaagtacctga

SEQ ID NO: 155365 - protein, 467 aa, Zea mays
MASRLLTRSAASRLVSHLHRKTPGITPCLLTRGPALASLLGPTDGLPHAADSTLLRVPMRWLSSPSSEAVAEAPMTADGLTVDSIADKGWTILPEAESDWRSHAAAVAQSVKVIKKRLKWGWILERTKQLAVVLEKPDLWEDPVFAGRVSREQGELMGKIKSVNQFEQELIEHIEMLRLAREENDNELEMESMKALADMRRSAKEKELNALLSGDNDSCSCFIEVQAGAGGTESMDWAAMVMNMYRSWAQRRGYKITVVEEMSGEVAGIKRATIKVDGEYAFGYAKAEVGVHRLVRISPFDSGKRRHTSFAAVAVIPILGDTTSRYQIKDSDLRIERFRSGGPGGQHANTTESAIRIVHIPTGISATSQNERSQHMNKASAMAVLQSRLDQLEIARQAQMNAEHTQSLNEISWGNQIRSYVLHPYRMVKDLRTNYEVSDPDSVLEGDLDDFILNYLSSSLDEADVST

SEQ ID NO: 155366 - DNA, 23 bp, Artificial sequence
  primer
atgctggaaacagaaacgggccg

SEQ ID NO: 155367 - DNA, 25 bp, Artificial sequence
  primer
ttatccttcgataaaagccatccct

SEQ ID NO: 155368 - protein, 203 aa, Artificial sequence
  consensus sequence
  Variant (2)..(3): Xaa in position 2 to 3 is any amino acid
  Variant (5)..(18): Xaa in position 5 to 18 is any amino acid
  Variant (19)..(42): Xaa in position 19 to 42 is any or no amino acid
  Variant (44)..(49): Xaa in position 44 to 49 is any amino acid
  Variant (51)..(52): Xaa in position 51 to 52 is any amino acid
  Variant (54)..(59): Xaa in position 54 to 59 is any amino acid
  Variant (60)..(69): Xaa in position 60 to 69 is any or no amino acid
  Variant (71)..(77): Xaa in position 71 to 77 is any amino acid
  Variant (80)..(85): Xaa in position 80 to 85 is any amino acid
  Variant (86)..(90): Xaa in position 86 to 90 is any or no amino acid
  Variant (92)..(94): Xaa in position 92 to 94 is any amino acid
  Variant (96)..(117): Xaa in position 96 to 117 is any amino acid
  Variant (118)..(127): Xaa in position 118 to 127 is any or no amino acid
  Variant (129)..(130): Xaa in position 129 to 130 is any amino acid
  Variant (132)..(132): Xaa in position 132 is any amino acid
  Variant (139)..(139): Xaa in position 139 is any amino acid
  Variant (141)..(141): Xaa in position 141 is any amino acid
  Variant (146)..(147): Xaa in position 146 to 147 is any amino acid
  Variant (149)..(151): Xaa in position 149 to 151 is any amino acid
  Variant (153)..(154): Xaa in position 153 to 154 is any amino acid
  Variant (156)..(159): Xaa in position 156 to 159 is any amino acid
  Variant (165)..(165): Xaa in position 165 is any amino acid
  Variant (168)..(169): Xaa in position 168 to 169 is any amino acid
  Variant (171)..(177): Xaa in position 171 to 177 is any amino acid
  Variant (179)..(202): Xaa in position 179 to 202 is any amino acid
GXXEXXXXXXXXXXXXXXXXXXXXXXXXXXXXXXXXXXXXXXSXXXXXXGXXAXXXXXXXXXXXXXXXXGXXXXXXXSPXXXXXXXXXXXRXXXFXXXXXXXXXXXXXXXXXXXXXXXXXXXXXXXXRXXGXGGQHVNXTXSAVRXXHXXXGXXVXXXXERSQHXNKXXAXXXXXXXLXXXXXXXXXXXXXXXXXXXXXXXXG

SEQ ID NO: 155369 - protein, 53 aa, Artificial sequence
  protein pattern
  Variant (2)..(3): Xaa in position 2 to 3 is any amino acid
  Variant (4)..(5): Xaa in position 4 to 5 is any or no amino acid
  Variant (7)..(7): Xaa in position 7 is any amino acid
  Variant (12)..(12): Xaa in position 12 is any amino acid
  Variant (14)..(14): Xaa in position 14 is any amino acid
  Variant (16)..(16): Xaa in position 16 is any amino acid
  Variant (17)..(17): Xaa in position 17 is Ser or Thr
  Variant (19)..(19): Xaa in position 19 is Ile or Val
  Variant (21)..(21): Xaa in position 21 is Ala, Ile, Leu or Val
  Variant (22)..(22): Xaa in position 22 is any amino acid
  Variant (24)..(25): Xaa in position 24 to 25 is any amino acid
  Variant (26)..(26): Xaa in position 26 is Ser or Thr
  Variant (28)..(28): Xaa in position 28 is Ile, Leu, Met or Val
  Variant (29)..(29): Xaa in position 29 is Ser, Thr or Val
  Variant (30)..(30): Xaa in position 30 is Ala or Val
  Variant (31)..(34): Xaa in position 31 to 34 is any amino acid
  Variant (35)..(35): Xaa in position 35 is Asp, Glu, Gly or Gln
  Variant (37)..(37): Xaa in position 37 is any amino acid
  Variant (39)..(40): Xaa in position 39 to 40 is any amino acid
  Variant (42)..(51): Xaa in position 42 to 51 is any amino acid
  Variant (52)..(52): Xaa in position 52 is any or no amino acid
RXXXXGXGGQHXNXTXXAXRXXHXXXGXXXXXXXXRXQXXNXXXXXXXXXXXL

SEQ ID NO: 155370 - DNA, 1248 bp, ESCHERICHIA COLI
  CDS (1)..(1248): transl_table=11
atgcaggatttaatatcccaggttgaagatttagcgggtattgagatcgatcacaccacctcgatggtgatgattttcggtattatttttctgaccgccgtcgtggtgcatattattttgcattgggtggtactgcggaccttcgaaaaacgtgccatcgccagttcacggctttggttgcaaatcattacccagaataaactcttccaccgtttagcttttaccctgcaggggattatcgtcaatattcaggcggtattctggctgcaaaaaggcaccgaagcggcagatattctgactacctgcgcgcagttgtggatcatgatgtatgcgctgctttcagtcttctcgttgctggatgttattttgaatctggcgcagaaattcccggcagcatctcagttaccgctgaaagggatatttcaggggattaaactgatcggcgcgattctggtcggcattttgatgatctcgctgctgattggtcagtcgccagcgattctgatcagcggtcttggtgcaatggctgccgtgctgatgttggtatttaaagatccgattcttggtctggtggcaggtattcagctttccgcgaacgatatgctgaaactgggcgactggctggagatgccgaaatacggcgcggatggcgcggtgatcgatattgggttaaccaccgtcaaagtgcgtaactgggacaataccattaccactattcccacctggtctctggtttctgactcctttaaaaactggagcgggatgtcagcatctggcgggcgacgtattaagcgcagtatcagtattgatgtcaccagtattcgttttcttgatgaagacgaaatgcaacgtctgaataaagcgcatttgttaaagccttatttaaccagccgccatcaggaaattaatgagtggaatcgccagcaaggttctacggagtcggtattaaatctgcgccgaatgaccaatattggaacctttcgtgcctatctgaacgaatatctgcgtaaccatccgcggattcgtaaagatatgaccttaatggtacgccaactggctccaggtgataacggtttaccgctcgagatctacgcgtttactaacaccgtggtgtggctggaatatgaaagcattcaggctgatatattcgatcacatatttgcgattgtcgaagagtttggtctgcgacttcatcagtcgccaaccggcaatgatattcgctctctggcgggtgcatttaagcagtaa

SEQ ID NO: 155371 - protein, 415 aa, ESCHERICHIA COLI
MQDLISQVEDLAGIEIDHTTSMVMIFGIIFLTAVVVHIILHWVVLRTFEKRAIASSRLWLQIITQNKLFHRLAFTLQGIIVNIQAVFWLQKGTEAADILTTCAQLWIMMYALLSVFSLLDVILNLAQKFPAASQLPLKGIFQGIKLIGAILVGILMISLLIGQSPAILISGLGAMAAVLMLVFKDPILGLVAGIQLSANDMLKLGDWLEMPKYGADGAVIDIGLTTVKVRNWDNTITTIPTWSLVSDSFKNWSGMSASGGRRIKRSISIDVTSIRFLDEDEMQRLNKAHLLKPYLTSRHQEINEWNRQQGSTESVLNLRRMTNIGTFRAYLNEYLRNHPRIRKDMTLMVRQLAPGDNGLPLEIYAFTNTVVWLEYESIQADIFDHIFAIVEEFGLRLHQSPTGNDIRSLAGAFKQ

SEQ ID NO: 155372 - DNA, 1239 bp, Vibrio cholerae O1 biovar El Tor str. N16961
  CDS (1)..(1239): transl_table=11
atgcttgaaacattaaccttgtggttacagaagtttgatattgaaattgaacgcgtgatccagcttgcggaagcgctcgggctgatcgcagccatttcgattgccattcatctcgtgttacaccgtggagtgctgctgtggctcaaacgccatacccaccatgagcaaagcgtttggcgcaatgctctgtttaaagagcacctatttagccgcgttgccttactgatccaaggtgtggtgattgcggtgcaaacccagttgtggctaagccctaacacctttgcttacgatgttctgcacaccctaacctcattgtggattgtggtgtttggcatgctggccacttactccgtactcaacgtgctggaactgctgatcagccgaacccaagtgggtaaaaacctgccgacacgcggcattttgcaaagcatcaagctgattgtgtttattatcgcggcgctgtttttcacctcaattttgatcggtaaatcgccagtgattctgctcagcggcttaggtgcgatgaccgccgtctttatgttggtatttaaagacccgatcctcggcttagttgcaggggtacaactttcggccaacaaaatgctctcggtcggtgactggttggaaatgcccaaatatggcgcagatggctctgtgattgatatcagcctaaccacagtcaaagtgcagaactgggataaaaccatcaccaccattccaagctacgccctgatttcagattcctttaaaaactggaaaggcatgcaagagtctggcggtcgccgtatcaaacgcagcattttgattgatgccaccagcgtgcattttttaacagaagaagagaaacaagcgctgaaaaaagcgcaactgcttgagccctacttggtcgagaaagagcaagagatcagcagctacaaccaacaaaaacattgggatttggcctgccgtatcaatggccgccgcctgaccaacatcggcagtttccgcgcttatttagagcgctacctgcgtactcaccccaatattcaccaagatatgacgctgatggtgcgtcagttagcgcccactcacgatggcatttcgctagaggtgtactgctttaccagcaccacagtgtgggtggagtatgagcgtattcagtcggatatttttgatcatatttacgcggtactgcctgagtttgacctgcgcgtctcgcaagcccccacaggcaatgactttcgcgctctgagaggctaa

SEQ ID NO: 155373 - protein, 412 aa, Vibrio cholerae O1 biovar El Tor str. N16961
MLETLTLWLQKFDIEIERVIQLAEALGLIAAISIAIHLVLHRGVLLWLKRHTHHEQSVWRNALFKEHLFSRVALLIQGVVIAVQTQLWLSPNTFAYDVLHTLTSLWIVVFGMLATYSVLNVLELLISRTQVGKNLPTRGILQSIKLIVFIIAALFFTSILIGKSPVILLSGLGAMTAVFMLVFKDPILGLVAGVQLSANKMLSVGDWLEMPKYGADGSVIDISLTTVKVQNWDKTITTIPSYALISDSFKNWKGMQESGGRRIKRSILIDATSVHFLTEEEKQALKKAQLLEPYLVEKEQEISSYNQQKHWDLACRINGRRLTNIGSFRAYLERYLRTHPNIHQDMTLMVRQLAPTHDGISLEVYCFTSTTVWVEYERIQSDIFDHIYAVLPEFDLRVSQAPTGNDFRALRG

SEQ ID NO: 155374 - DNA, 1248 bp, Escherichia coli O157:H7 EDL933
  CDS (1)..(1248): transl_table=11
atgcaggatttaatatcccatgttgaagatttagcgggtattgagatcgatcacaccacctcgatggtgatgattttcggtattatttttctgaccgccgtcgtggtgcatattattttgcattgggtggtactgcggaccttcgaaaaacgtgccatcgccagttcacggctttggttgcaaatcattacccagaataaactcttccaccgtttagcttttaccctgcaggggattatcgtcaatattcaggcggtattctggctgcaaaaaggcaccgaagcggcagatattctgactacctgcgcgcagttgtggatcatgatgtatgcgctgctttcagtcttctcgctgctggatgttattttgaatctggcgcagaaattcccggcagcatctcagttaccgctgaaagggatatttcaggggattaaactgatcggcgcgattctggtcggcattttgatgatctcgctgctgattggtcagtcgccagcgattctgatcagcggtcttggtgcaatggctgccgtgctgatgttggtatttaaagatccgattcttggtctggtggcaggtattcagctttccgcgaacgatatgctgaaactgggcgactggctggagatgccgaaatacggcgcggatggcgcggtgatcgatattgggttaaccaccgtcaaggtgcgtaactgggacaataccattaccactattcccacctggtctctggtttctgactcctttaaaaactggagcgggatgtcagcatctggcgggcgacgtattaagcgcagtatcagtattgatgtcaccagtattcgttttcttgatgaagacgaaatgcaacgtctgaataaagcgcatttgttaaagccttatttaaccagccgccatcaggaaattaatgagtggaatcgccagcaaggttctacggagtcggtattaaacctgcgccgaatgaccaatattggaacctttcgtgcctatctgaacgaatatctgcgtaaccatccgcggattcgtaaagatatgaccttaatggtacgccaactggctccaggtgataacggtttaccgctcgagatctatgcgtttaccaacaccgtggtgtggctggaatatgaaagcattcaggctgatatattcgatcacatatttgcgattgtcgaagagtttggtctgcgacttcatcagtcgccaaccggcaatgatattcgctctctggcgggtgcatttaagcagtaa

SEQ ID NO: 155375 - protein, 415 aa, Escherichia coli O157:H7 EDL933
MQDLISHVEDLAGIEIDHTTSMVMIFGIIFLTAVVVHIILHWVVLRTFEKRAIASSRLWLQIITQNKLFHRLAFTLQGIIVNIQAVFWLQKGTEAADILTTCAQLWIMMYALLSVFSLLDVILNLAQKFPAASQLPLKGIFQGIKLIGAILVGILMISLLIGQSPAILISGLGAMAAVLMLVFKDPILGLVAGIQLSANDMLKLGDWLEMPKYGADGAVIDIGLTTVKVRNWDNTITTIPTWSLVSDSFKNWSGMSASGGRRIKRSISIDVTSIRFLDEDEMQRLNKAHLLKPYLTSRHQEINEWNRQQGSTESVLNLRRMTNIGTFRAYLNEYLRNHPRIRKDMTLMVRQLAPGDNGLPLEIYAFTNTVVWLEYESIQADIFDHIFAIVEEFGLRLHQSPTGNDIRSLAGAFKQ

SEQ ID NO: 155376 - DNA, 1248 bp, Salmonella enterica subsp. enterica serovar Typhi str. CT18
  CDS (1)..(1248): transl_table=11
atgcaggaattgatatcccaggtagaagatttagcgggaattgaaatgaatcacaccacgtcgctggtggtgatatttggtattatttttctgacagcagttgtcgtgcatattattttgcactggatagtactgcgcgcttttgaaaaacgtgccagcgccagttcccgcctgtggctgcaaattattacccagaataaattattccatcgtctggcttttacgctacaaggcatcattgtcaatattcaagccgcgctctggctacaaaaaggcagtgaggctgcggatatcctgacgacctgcgcgcagttatggattatgacctacgccctgctgtcgttattttcgctgctggacgtgattttcaatctatcgcaaaaatggcccgccgcctctcagttaccgctaaaaggaatatttcagggcattaagctcatcggcgcaattatcgtcggcattctgatgatctcactgctgattggccagtcaccagcaattttaatcagcgggctgggcgcgatggccgcggtattaatgctggtctttaaagacccgattcttggcctggttgctggtatacagctttccgccaacgatatgctcaaactgggcgactggctggagatgccaaaatatggcgcagatggcgcggtcattgatattggcttaaccacggtaaaagtacgcaactgggataataccatcaccaccattcccacctggtcgctggtttccgactcgttcaaaaactggagcggcatgtctgcgtccggcggacgccggattaaacgcagcattaatattgacgcgaccagtatccattttctggatgatgatgaaaaacagcggctgttaaccgcgcaactgttaaagccgtaccttaccagccgtcatcaggaaatcgatgaatggaataaacaactggatgcgccggaatcagccttaaatcaccgccgaatgaccaatatcgggacatttcgcgcctatctgaacgaatatttacgccaccatccgcgcatccgtaaagacatgacgctgatggtacgccaactggcgcctgacgatcatggtttgccgatagagatctacgcctttaccaataccgtcgtgtggctggaatatgagagcattcaggccgatattttcgaccatatttttgccgtggtggaagagttcggcttgcgtattcatcagacgccgaccggcagcgatattcgcgcgctgtcagggacattgcgccattaa

SEQ ID NO: 155377 - protein, 415 aa, Salmonella enterica subsp. enterica serovar Typhi str. CT18
MQELISQVEDLAGIEMNHTTSLVVIFGIIFLTAVVVHIILHWIVLRAFEKRASASSRLWLQIITQNKLFHRLAFTLQGIIVNIQAALWLQKGSEAADILTTCAQLWIMTYALLSLFSLLDVIFNLSQKWPAASQLPLKGIFQGIKLIGAIIVGILMISLLIGQSPAILISGLGAMAAVLMLVFKDPILGLVAGIQLSANDMLKLGDWLEMPKYGADGAVIDIGLTTVKVRNWDNTITTIPTWSLVSDSFKNWSGMSASGGRRIKRSINIDATSIHFLDDDEKQRLLTAQLLKPYLTSRHQEIDEWNKQLDAPESALNHRRMTNIGTFRAYLNEYLRHHPRIRKDMTLMVRQLAPDDHGLPIEIYAFTNTVVWLEYESIQADIFDHIFAVVEEFGLRIHQTPTGSDIRALSGTLRH

SEQ ID NO: 155378 - DNA, 1248 bp, Salmonella enterica subsp. enterica serovar Typhimurium str. LT2
  CDS (1)..(1248): transl_table=11
atgcaggaattgatatcccgggtagaagatttagcgggaattgaaatgaatcacaccacgtcgctggtggtgatatttggtattatttttctgacagcagttgtcgtgcatattattttgcactggatagtactgcgcgctttcgaaaaacgtgccagcgccagttcccgcctgtggctgcaaattattacccagaataaattattccatcgtctggcttttacgctgcaaggcatcattgtcaatattcaggccgcgctctggctacaaaaaggcagtgaggctgcggatatcctgacgacctgcgcgcagttatggattatgacctacgccctgctgtcgttattttccttgctggacgtgattttcaatctatcgcaaaaatggcccgccgcctctcagttaccgctaaaaggaatatttcagggtattaagctcatcggcgcaattatcgtcggcattctgatgatctcactgctgattggccagtcaccagcaattttaatcagcgggctgggcgcgatggccgcggtattaatgctggtctttaaagacccgattcttggcctggttgccggtatccagctttccgccaacgatatgctcaaactgggcgactggctggaaatgccgaaatatggcgcagatggcgcggtcattgatattggcttaaccacggtaaaagtacgcaactgggataataccatcaccaccattcccacctggtcgctggtttccgactcattcaaaaactggagcggcatgtctgcgtccggcggacgccggattaaacgcagcattaatattgacgcgaccagtatccattttctggatgatgatgaaaaacagcggctgttaaccgcgcaactgttaaagccgtaccttaccagccgtcatcaggaaatcgatgaatggaataaacaactggatgcgccggaatcagccttaaatcaccgccgcatgaccaatatcgggacatttcgcgcctatctgaacgaatatttacgccaccatccgcgcatccgtaaagacatgacgctgatggtacgccaactggcgcctgacgatcatggtttgccgatagagatctacgcctttaccaataccgtcgtgtggctggaatatgagagcattcaggccgatattttcgaccatatttttgccgtggtggaagagtttggcttgcgtattcatcagacgccgaccggcagcgatattcgcgcgctgtcagggacattgcggcattaa

SEQ ID NO: 155379 - protein, 415 aa, Salmonella enterica subsp. enterica serovar Typhimurium str. LT2
MQELISRVEDLAGIEMNHTTSLVVIFGIIFLTAVVVHIILHWIVLRAFEKRASASSRLWLQIITQNKLFHRLAFTLQGIIVNIQAALWLQKGSEAADILTTCAQLWIMTYALLSLFSLLDVIFNLSQKWPAASQLPLKGIFQGIKLIGAIIVGILMISLLIGQSPAILISGLGAMAAVLMLVFKDPILGLVAGIQLSANDMLKLGDWLEMPKYGADGAVIDIGLTTVKVRNWDNTITTIPTWSLVSDSFKNWSGMSASGGRRIKRSINIDATSIHFLDDDEKQRLLTAQLLKPYLTSRHQEIDEWNKQLDAPESALNHRRMTNIGTFRAYLNEYLRHHPRIRKDMTLMVRQLAPDDHGLPIEIYAFTNTVVWLEYESIQADIFDHIFAVVEEFGLRIHQTPTGSDIRALSGTLRH

SEQ ID NO: 155380 - DNA, 1227 bp, Brucella melitensis 16M
  CDS (1)..(1227): transl_table=11
ttgacggaattcattcttgagcatccctgggctgagacgcttatagctcttggcggtttgtttttttcagctttcattgccaattttttgattaaggcaattctgctgaagatgctcaagcacatcattcagaaaacctcgttcggtcaggatgaggagctgaaaaaccttggtgttatcagccgtctggcgaatatcgttccggcgctgattatcgcatccggcattcttgccgttccggggctgcccgacggcgcattgacgatcattcggaatgtgtcgatttccttcatcattctgacactggcgctggcggtaaattctgcgctgagcgtagtcgacacgctttaccatcgccgcaccgaggcgcgaagccggccgataaagggttatattcaggtcacgaaactggccatatatcttattgcaacggttcttatcatcgcgacattgctggaccgttcgcctgttattctgctttcaggcgtcggcgccatggctgcggttctcattctggtttttcaggataccctgctgtcgcttgtcgccagtatgcagatcgcctcgtcaaatatggtgcgggtgggcgactggatcgaaatgaagaacctggacgcgaatggcgatgtcaccgaaatcgcgctttatacggtcaaggtgcagaatttcgataaaaccattaccaccatccccatccgcaagctcattaccgaaccgatgaagaattatcggggaatgcaggaatcaggcgggcggcgtatcaagcgcgctctttacatcgatcagaacacgattggctttctggatgaggctgaacgcaagcgcctcgcttccatcggtctgctggaagattatctgccccgcaaggaaaaggaaattgccgagtggaatgcgaagcttggagaacgcgctaaaaacccagtcaacacgcgccgtgtgaccaatatcggcacattccgcgcctatgttgaaacctatctgcgcaatcatccggggattcacaaaagcatgacgctgcttgtgcgccagatggatccgacgccggaaggcctgccgcttgaaatatattgttttacgaatacgaccaattgggccgcattcgagcaaattcagtcagatattttcgatcatctctatgccatattgccggaattcgggctgaatgctttccagaaccccagcggcaaggatttccgaagccttctggtcaaggataaagcgccttga

SEQ ID NO: 155381 - protein, 408 aa, Brucella melitensis 16M
MTEFILEHPWAETLIALGGLFFSAFIANFLIKAILLKMLKHIIQKTSFGQDEELKNLGVISRLANIVPALIIASGILAVPGLPDGALTIIRNVSISFIILTLALAVNSALSVVDTLYHRRTEARSRPIKGYIQVTKLAIYLIATVLIIATLLDRSPVILLSGVGAMAAVLILVFQDTLLSLVASMQIASSNMVRVGDWIEMKNLDANGDVTEIALYTVKVQNFDKTITTIPIRKLITEPMKNYRGMQESGGRRIKRALYIDQNTIGFLDEAERKRLASIGLLEDYLPRKEKEIAEWNAKLGERAKNPVNTRRVTNIGTFRAYVETYLRNHPGIHKSMTLLVRQMDPTPEGLPLEIYCFTNTTNWAAFEQIQSDIFDHLYAILPEFGLNAFQNPSGKDFRSLLVKDKAP

SEQ ID NO: 155382 - DNA, 1179 bp, Shewanella oneidensis MR-1
  CDS (1)..(1179): transl_table=11
atgctgcttgcttgtgtactggtggcggcaatctcctattttattatgcaccgtggggtgatccgcgcggtcaatatggtgatcctgcgctctagagtgacgtgggacgatgtatttatgcgctacaaagtgctcgaaaagttggcgatgttagtgcccgctatcgtgctcaatctgctggtgcctatcacgttaaccgaacatcccgtactcagcagtttagttgaccgcttactgagcatttggttggtgatcttgatgatccgcgctatctacgcggggctggatgccgtcaatgaaatctctgatatcaatgaggtgagtcgccgcctgccggttaaaagctttgtgcagttgtttaagttgttcctattctttgtcggccttatcgtttgcctttctgtgttggccgatcagtcccccgtgtacttcctcagcggacttggtgtagcaaccggttttgtgatgttagtgttccgcgacacgattttgggttttgtggcggggattcagttagcggcgaaccgtatggtaagcaagggcgactggatccaaatggataagtacggcgccgatggtgcggtggaggaggtgtccttaactacagttaaagtgcgtaactgggataagaccatcaccatgatccccgcctatgccctagtttcggatgcttttcgtaactggcgtggcatgtccgaatcgggcgggcgtcgtattaagcgtgcggtcaatatcgatattaatagcatcaaatttttaactgaaaatgatcggaagcgcctcagtaaaatcaattgcttaaaagagtatttccccgccaagatcagcgagatccaagcgtcgaacgccaaagtgtcagatctggatatgatggtcaatggtcgccatctgaccaacgtaggaaccttccgtgcctatctgcaggaatatctacagcgccacgataaagtgcacaaagatatgaccctaatggtacgccagctagcaccgaccaccgagggtctaccgattgaggtttatatctttaccaatgatacccgctgggctttttatgaggcgatacaagcggatatcttcgaccatatctttgccgtactgcctgagtttggtttacaggccttccaagcgccgacgggcaacgatatccgcagtctcaaatcggttaaggtcgagggttag

SEQ ID NO: 155383 - protein, 392 aa, Shewanella oneidensis MR-1
MLLACVLVAAISYFIMHRGVIRAVNMVILRSRVTWDDVFMRYKVLEKLAMLVPAIVLNLLVPITLTEHPVLSSLVDRLLSIWLVILMIRAIYAGLDAVNEISDINEVSRRLPVKSFVQLFKLFLFFVGLIVCLSVLADQSPVYFLSGLGVATGFVMLVFRDTILGFVAGIQLAANRMVSKGDWIQMDKYGADGAVEEVSLTTVKVRNWDKTITMIPAYALVSDAFRNWRGMSESGGRRIKRAVNIDINSIKFLTENDRKRLSKINCLKEYFPAKISEIQASNAKVSDLDMMVNGRHLTNVGTFRAYLQEYLQRHDKVHKDMTLMVRQLAPTTEGLPIEVYIFTNDTRWAFYEAIQADIFDHIFAVLPEFGLQAFQAPTGNDIRSLKSVKVEG

SEQ ID NO: 155384 - DNA, 1302 bp, Pseudomonas putida KT2440
  CDS (1)..(1302): transl_table=11
atggatatccaacgaatctggcgtgactccctcgacctgtggggcaccctcgaccaacatcccatgctgcacgccgccatcggtctggcggtactgctgctcatctccctggtagtcggccgcctggcgcgcttcctgatactgcacggcgcgcgcctgctggcccgccagcctgcactgaagtggctggacgacctgcgccacaacaaggtgttccaccgcctggcacaaacgaccccgtccctggtgctgcagttcggcctgaagctggtgcctgagctgtccgacaccgctcagcacttcctcggcaatgtcgccctggcctttaccctgttgttcatgaccatggcgctgtcatgcctgctggatgccctgctcgacatctatgcccgcaccgaacacgcccgcacccgctcgatcaagggctacgtgcaactggccaagatgatgttgtggatcttcgcctcgatcatcatcgtcgccaccctgatcgaccgctcgccgctgttgctgctgtccggtctgggtgcgatgtcggcggtattgctgttggtgtacaaggacaccctgctgtcattcgtcgccagcgtgcaactgaccagcaacgacatgctgcatgtcggggactggatcgaaatgccgcaggtaggcgccgatggcgacgtggtggacatcaccttgcacacggtgaaagtacagaacttcgacaagaccatcgtgtccatccccacctggcgcctgatgagcgagtcattccgcaattaccgcggcatgcagcagtccggtggccggcgcatcaagcgcagcctgttcatcgacgccgccggcgtgcgcttcctcacccgcgaagaagaacagcgcctgagccaggtgcagctactgagtgactacctggcgggcaagcgccaggaactgcaaaactggaacgaggcgctggggccggtggcggacctgtcggccaaccgccgcaagctgaccaacatcggcaccttccgcgcgtttgccctggcctatctgaagaaccatcccaacgtgcaccccaacatgacctgcatggtgcggcagatgcagaccaccgccgaaggcgtgccgctggagatctactgcttcaccaccaccacggtgtgggcggattacgagcgcatccagggggatatcttcgactacctgctggcggtgttgccggagttcggcttgagcctgtatcagcagccgagtggcaatgacatgcgcgtggggttggccgggcgtacggcggcggagccgatgccgcgacaccttgaagaaatgagcgaggcctga

SEQ ID NO: 155385 - protein, 433 aa, Pseudomonas putida KT2440
MDIQRIWRDSLDLWGTLDQHPMLHAAIGLAVLLLISLVVGRLARFLILHGARLLARQPALKWLDDLRHNKVFHRLAQTTPSLVLQFGLKLVPELSDTAQHFLGNVALAFTLLFMTMALSCLLDALLDIYARTEHARTRSIKGYVQLAKMMLWIFASIIIVATLIDRSPLLLLSGLGAMSAVLLLVYKDTLLSFVASVQLTSNDMLHVGDWIEMPQVGADGDVVDITLHTVKVQNFDKTIVSIPTWRLMSESFRNYRGMQQSGGRRIKRSLFIDAAGVRFLTREEEQRLSQVQLLSDYLAGKRQELQNWNEALGPVADLSANRRKLTNIGTFRAFALAYLKNHPNVHPNMTCMVRQMQTTAEGVPLEIYCFTTTTVWADYERIQGDIFDYLLAVLPEFGLSLYQQPSGNDMRVGLAGRTAAEPMPRHLEEMSEA

SEQ ID NO: 155386 - DNA, 1248 bp, Escherichia coli CFT073
  CDS (1)..(1248): transl_table=11
atgcaggatttaatatcccaggttgaagatttagcgggtattgagattgatcacaccacctcgatggtgatgattttcggtattatttttctgaccgccgtcgtggtgcatatttttttgcactgggtggtactgcggaccttcgaaaaacgcgccatcgccagttcacggctttggttgcaaatcattacccagaataaactcttccaccgtttagcttttaccttgcaggggattatcgtcaatattcaggcggtattctggctacaaaaaggcaccgaagcggcagatattctgactacctgcgcgcagttgtggatcatgatgtatgcgctgctttcagtcttctcgttgctggatgtgattttgaatctggcgcagaaattcccggcggcatctcagttaccgctgaaagggatttttcaggggattaaactgatcggcgcgattctggtcggcattttgatgatctcgctgctgattggtcagtcgccagcgattctgatcagcggtcttggtgcaatggctgccgtgctaatgttggtatttaaagatccgattcttggtctggtggcaggtattcagctttccgcgaacgatatgctgaaactgggcgactggctggagatgccgaaatacggcgcggatggcgcggtgatcgatattgggttaaccaccgtcaaagtacgtaactgggacaataccattaccactattcccacctggtctctggtttctgactcctttaaaaactggagcgggatgtcagcatctggcgggcgacgtattaagcgcagtatcagtattgatgtcaccagtattcgttttcttgatgaagacgaaatgcaacgtctgaataaagcgcatttgttaaagccttatttaaccagccgccatcaggaaattaatgagtggaatcgccagcaaggttctacggagtcggtattaaacctgcgccgaatgaccaatattggaacctttcgtgcctatctgaacgaatatctgcggaatcatccgcggattcgcaaagatatgaccttaatggtgcgccaattagctccgggcgacaacggtttaccgcttgagatctacgcgtttaccaacaccgtggtgtggctggaatatgaaagcattcaggctgatatattcgatcacatatttgcgattgtcgaagagtttggtctgcgacttcatcagtcgccaaccggcaatgatattcgctctctggcgggtgcatttaagcagtaa

SEQ ID NO: 155387 - protein, 415 aa, Escherichia coli CFT073
MQDLISQVEDLAGIEIDHTTSMVMIFGIIFLTAVVVHIFLHWVVLRTFEKRAIASSRLWLQIITQNKLFHRLAFTLQGIIVNIQAVFWLQKGTEAADILTTCAQLWIMMYALLSVFSLLDVILNLAQKFPAASQLPLKGIFQGIKLIGAILVGILMISLLIGQSPAILISGLGAMAAVLMLVFKDPILGLVAGIQLSANDMLKLGDWLEMPKYGADGAVIDIGLTTVKVRNWDNTITTIPTWSLVSDSFKNWSGMSASGGRRIKRSISIDVTSIRFLDEDEMQRLNKAHLLKPYLTSRHQEINEWNRQQGSTESVLNLRRMTNIGTFRAYLNEYLRNHPRIRKDMTLMVRQLAPGDNGLPLEIYAFTNTVVWLEYESIQADIFDHIFAIVEEFGLRLHQSPTGNDIRSLAGAFKQ

SEQ ID NO: 155388 - DNA, 1311 bp, Pseudomonas syringae pv. tomato str. DC3000
  CDS (1)..(1311): transl_table=11
atggatattcaatcgctttggcttcgtactcaggaactatggggcatgctcgaccagcatccgtgggtgcgcaccgggctggcgctgatcctgttgctgaccaccgcgctggtgctcggccgcgtggcgcgctttgtggtgctgtacaccgtcaggatgctcggtcgtcagccgtcgttgcactggatcaacgattttcgccataacaaggttttccaccgactggcgcaaatggtgccttcgctggttgtccagttcgggctcaacctggtgcccggcctgaccgccacgggcaagaacgtcatcggcaacctggccatggcgttcaccattctgttcatgaccctggccatcggcgcactgctcaacgccctgctggacatctacgcccgcaccgagcacgcccgcacccgctcgatcaaaggctacgtgcaactgtcgaagatgattctgtatgtgttcgccgcgatcatcatcgtcgccacactgatcgaccgttcgccgctgttgctgctgtccggcctcggcgccatgtcggcggtcattctgttggtctacaaagacaccctgctgtcgttcgtcgccagcgtacagctgaccagcaacgacatgctgcgcgtcggcgactggatcgaaatgccgcaagtgggcgccgatggcgacgtggtggacatcaccctgcataccgtgaaggtgcagaacttcgacaaaaccatcgtctccatcccgacctggcgcttgatgtccgagtcgttccgcaactggcgcggcatgcagcaatccggcggacggcgcatcaaacgcagcctattcatcgacgccagcggcgtgcgcttcgtacgcgacgatgaagaacaacaactcatgcaaatccacctgctcaccgactacatcggccgcaaacaagccgaactgctggcctggaacgaagcgcaaggcaacgtcgcccaaatgtccgccaaccgccgacgcatgaccaacatcggcaccttccgcgcctacgccctggcgtacctgaaaagccatgtggacatcaactccggcatgacctgcatggtccgccagctggagccgacttcgcagggcatcccgctggaaatctactgcttcacgcgtactacggtgtgggtggattacgagcggatacagggggatattttcgactatctgactacggtgatgccggagttcgggttgagtttgtatcagcagccgagtggggcggatatgcgggttgggttgcgggggcagtccgaccggggcgggaatgcgcagacggcagagacgtttcctacagaacgtcaaggctga

SEQ ID NO: 155389 - protein, 436 aa, Pseudomonas syringae pv. tomato str. DC3000
MDIQSLWLRTQELWGMLDQHPWVRTGLALILLLTTALVLGRVARFVVLYTVRMLGRQPSLHWINDFRHNKVFHRLAQMVPSLVVQFGLNLVPGLTATGKNVIGNLAMAFTILFMTLAIGALLNALLDIYARTEHARTRSIKGYVQLSKMILYVFAAIIIVATLIDRSPLLLLSGLGAMSAVILLVYKDTLLSFVASVQLTSNDMLRVGDWIEMPQVGADGDVVDITLHTVKVQNFDKTIVSIPTWRLMSESFRNWRGMQQSGGRRIKRSLFIDASGVRFVRDDEEQQLMQIHLLTDYIGRKQAELLAWNEAQGNVAQMSANRRRMTNIGTFRAYALAYLKSHVDINSGMTCMVRQLEPTSQGIPLEIYCFTRTTVWVDYERIQGDIFDYLTTVMPEFGLSLYQQPSGADMRVGLRGQSDRGGNAQTAETFPTERQG

SEQ ID NO: 155390 - DNA, 1332 bp, Bacteroides thetaiotaomicron VPI-5482
  CDS (1)..(1332): transl_table=11
atgaaagaagtgattgatacagtgagtgtggcattggcaaatggagatacggagaatgttggcaatgtcgtgatgcaggaggtcaaccgtacgttgctctcggcaggtgtggatgaagtatgggcggacaaaatagataatctgatcgtattgctgtttattatcggaatagccttgttggctaacataatctgccgtaaaatcattttacgggtggtagccaagttggtgaagcagaccaaagctacctgggacgacattgtattcaaccataaagtgatggtgaatgtcagccggatggtagcgcctatcctgatttatatcgccattcctatcgcattccccgagcatgcggattctgatttgctcgattttctgaggcgtctctgtctgatatatatcattgccgtttttcttcgtttcatcagcgctttgtttacggctgtctatcaagtctacagtgagcgggagcagtatcgggacaaaccgttgaaaggacttttgcagacggcgcaagtgattcttttctttataggagccatcattattataagcattctgatcaatcagagcccgatggtcttgctgaccggattgggagcgtctgccgctattctgatgttggttttcaaagatagtatcatgggatttgtatccggtattcagctttctgccaacaatatgctgaaggtgggcgactggatcaccatgccgaaatatggtgcggacggtacagtgatagaagtaacgctgaataccgtgaaggtgcgtaatttcgataatacgattacgaccattcctccttacctgctgatcagcgattcttttcagaactggcagggaatgcaggagtccggcggacgccgggtgaagcgttccattaatatcgatatgacaagcgtgcgcttttgtactcccgaaatgctggaaaaatatcgcaagatacagttgctggcaaattacgtagatgaaacggagaaagtggtagaagaatataataaggagcatgatattgataattccgtgttggtgaacgggcggaggcagaccaatctgggagtttttcgtgcctatctgaccaattatttgcgaagcctgcccactgttaatcaggatatgacctgtatggtacgccagcttcagcctacagaaaccggcattccgctggaactttatttcttttctgccaacaaagtatgggttgcttacgaaggcatacaggcagacgtgttcgaccatgtacttgccatcattccggagttcggcctgcgcgtctttcagaatccgtcgggtgaagacctgcgacggataggagtgaagatagaacactga

SEQ ID NO: 155391 - protein, 443 aa, Bacteroides thetaiotaomicron VPI-5482
MKEVIDTVSVALANGDTENVGNVVMQEVNRTLLSAGVDEVWADKIDNLIVLLFIIGIALLANIICRKIILRVVAKLVKQTKATWDDIVFNHKVMVNVSRMVAPILIYIAIPIAFPEHADSDLLDFLRRLCLIYIIAVFLRFISALFTAVYQVYSEREQYRDKPLKGLLQTAQVILFFIGAIIIISILINQSPMVLLTGLGASAAILMLVFKDSIMGFVSGIQLSANNMLKVGDWITMPKYGADGTVIEVTLNTVKVRNFDNTITTIPPYLLISDSFQNWQGMQESGGRRVKRSINIDMTSVRFCTPEMLEKYRKIQLLANYVDETEKVVEEYNKEHDIDNSVLVNGRRQTNLGVFRAYLTNYLRSLPTVNQDMTCMVRQLQPTETGIPLELYFFSANKVWVAYEGIQADVFDHVLAIIPEFGLRVFQNPSGEDLRRIGVKIEH

SEQ ID NO: 155392 - DNA, 1347 bp, Bordetella parapertussis 12822
  CDS (1)..(1347): transl_table=11
atgctgccgaaggaattggagaacgtggtcgccacgctggacaactatgtgccggacacggcatggggccagacgctggtcggcatcggcgtgctggtgctgacggcgctgttcgtccaatgggtggtggcgcgcgtcgtgctgtatttcgcccaccggctgctggtgctgagcggccgcgaggactgggaccgcgccctgagccgccgccgcgcctaccagaacttctggtacgcggtgccgttcgcggtggtctccatgggcatagaactggtgccgcatgccgagcgcgcggtcaccgtcgtgggccggctgtcgcacgccggggcctggatctgcgtgttcgtggccttcagcggcgtgctcagcgcctggcaggatacctattcggccaccacgcgggcgcagacgcgctcgatcaagggctatatccagatcggcaagctgatcctgtgcgcggtgggggcggtgctggtgctctccatcctgctggaccgctcgccgctgtggatgatctccggcctgggcgcgctgtcggcggtgctgctgctggtgttcaaggacacgctgctgtcgctggtggccagcacccagctcacgtccaacgacatgctgcgcatcggcgactggatcgagatgccgcaggccaacgccgacggcttcgtcaaggacatcgcgctgcataccgtcaaggtgcagaactgggacaacacggtgaccaccgtgcccacctacaagctgttttccgaaagctaccgcaactaccgccacatgttcgagtcgggcgggcggcgcatcaagcgcaccttgcggctggacgcggccagcgtgcgcttcatgaacgaggaagagggcggacggctcaagcgcttcgtgctgctgcgcgactacctgcaggccaaggaggacgcgctgctggaggccaaccgccaactgggcgaactggccgaggtgccggccaaccgccgccgcctgaccaacatcggcaccttccgcggctatgcgctggcctacctgcgccagcaccccgaggtgcgccaggacatggccatgatggtgcgcatgatggagccgcagcccaacggcatcccgatcgagatctattgcttcacggccatcaccgcctgggtcgagtacgagcgcatccagggcgacatcttcgaccatctgctggccatcctgcccgagctggggctgcggctgttccaggagccctccggctcggacctgggcaacctggccggcggcatgcgcgaggcggccctgcacgagttccggcgcgagcaggtggccgcgggcgaggcgccgctggcgctgcgcggcgacggcgccgcgcccgtgcgataa

SEQ ID NO: 155393 - protein, 448 aa, Bordetella parapertussis 12822
MLPKELENVVATLDNYVPDTAWGQTLVGIGVLVLTALFVQWVVARVVLYFAHRLLVLSGREDWDRALSRRRAYQNFWYAVPFAVVSMGIELVPHAERAVTVVGRLSHAGAWICVFVAFSGVLSAWQDTYSATTRAQTRSIKGYIQIGKLILCAVGAVLVLSILLDRSPLWMISGLGALSAVLLLVFKDTLLSLVASTQLTSNDMLRIGDWIEMPQANADGFVKDIALHTVKVQNWDNTVTTVPTYKLFSESYRNYRHMFESGGRRIKRTLRLDAASVRFMNEEEGGRLKRFVLLRDYLQAKEDALLEANRQLGELAEVPANRRRLTNIGTFRGYALAYLRQHPEVRQDMAMMVRMMEPQPNGIPIEIYCFTAITAWVEYERIQGDIFDHLLAILPELGLRLFQEPSGSDLGNLAGGMREAALHEFRREQVAAGEAPLALRGDGAAPVR

SEQ ID NO: 155394 - DNA, 1221 bp, Treponema denticola ATCC 35405
  CDS (1)..(1221): transl_table=11
atgcaaaatttattgggtaatgttcaaaaatggctttcggaagattctgtgagaggcgatattttttggctgtttgccgttttgattgtttcttttattcttcataaagtgttaaaaaaaatactgtcaggaacggtaaaaaaaatactgtcccgcattacagccaaaacgaagagtaaacttgatgattatatttttgataaaattcatatagaacgtgcttcgcttattatatatatttttgcctttaattttttgtcgctaaaattaagttttggagccgggcttatgcaaaaacttgcaagccttatttcgatatggataataataagacttttgcacggcctcttggacgggcttacagcctataccgaaaatgaacctcgatttgcgggaaagccataccgcagttatgttcaggtttttatcttaattgtttatattgcaggctttatcatcgctgcaggaacaatcagcggaaagtccccatggtctcttttaagcggaataggagctatgacggctgttcttcttttggtattccgcgagacgattctttcttttgtggcaagcctccagatttcttcctacgatttggttcgccgcggggactggatttcggttcctaaatatgatgccgacggagatgttaccgaggtcgccttacatacgataaaaattcaaaactgggataagactatttccgttttaccgacaagcgacctaatgcaaagcggttttaaaaactggcggggtatgcaggaaaccggaggaagacgcatcaagcgttcaatctttttggacgtttcttccgtaaaatttatggatgaagaactgagacgcagggtagggaagatagagcttttaaaatcctactttgccgaagttgaaagttccgacataagtgcccaatacggcagcgatacggaacatcccttaaacgatagaaggctcaccaatatcggaacctttaggatgtacgttacgcgctatcttcaaagccttgatactttaagaaaggatttgacatttttggtgcggcagcttgaaccgggagctacaggcgttcccatggagatttatgtttttactgcaaccaccgactggggagaatacgaaaagatccaagccgatatttttgaccatctttttgcgtccgtccacgaattcgatcttagaattttccaatatcctgtaggcggctttttaccaaacaagtaa

SEQ ID NO: 155395 - protein, 406 aa, Treponema denticola ATCC 35405
MQNLLGNVQKWLSEDSVRGDIFWLFAVLIVSFILHKVLKKILSGTVKKILSRITAKTKSKLDDYIFDKIHIERASLIIYIFAFNFLSLKLSFGAGLMQKLASLISIWIIIRLLHGLLDGLTAYTENEPRFAGKPYRSYVQVFILIVYIAGFIIAAGTISGKSPWSLLSGIGAMTAVLLLVFRETILSFVASLQISSYDLVRRGDWISVPKYDADGDVTEVALHTIKIQNWDKTISVLPTSDLMQSGFKNWRGMQETGGRRIKRSIFLDVSSVKFMDEELRRRVGKIELLKSYFAEVESSDISAQYGSDTEHPLNDRRLTNIGTFRMYVTRYLQSLDTLRKDLTFLVRQLEPGATGVPMEIYVFTATTDWGEYEKIQADIFDHLFASVHEFDLRIFQYPVGGFLPNK

SEQ ID NO: 155396 - DNA, 1266 bp, Shewanella baltica OS155
  CDS (1)..(1266): transl_table=11
atggatcaggaaataaggctcgaaatttcggcatggttagcgggctttgggattgatagccaaccctcggacggcatatcaaccagcatcatgatcattgcctgcttactgcttgcaggcatcgcttatttcattgttcgacgcgtggtcatacgtgcggtcaacatggtgatcctccgctccaaagtcacttgggacgatgtgttcatgcgttacaaggtgcttgaaaagctggccatgctagtgcctgcaatcgtgctcaatctattagtgcccatcgccttaaccgaacatcaaatcttaagtagtttagtcgataggctgctgagtatttggctggtggtgctgatgatccgcgctatttatgcgggtttagatgcggtcgatgaaatttcagatgtgaatctggtgagtcggcgtttacccgttaaaagctttgtgcagttaactaagctgtttttattctttgtcggtattatcgtttctatctcaatcttggccgatcagtcccctgtgtacttcctcagcggcttaggtgtggcgacgggttttgtgatgttagtgttccgcgacactatcttaggtttcgtggcgggcattcagttagcggctaaccgtatggtgagcaagggcgattggatccagatggacaaatacggcgccgacggtgcggtagaagaggtctcgctgaccacagttaaagtgcgcaactgggacaaaaccatcactatgatcccagcctatgccttagtgtcggatgcgtttcgtaactggcggggtatgtctgagtcgggtggtcgtaggatcaaacgcgccatcaatattgatatcaacagcattaagtttttgagcgaggaagagcgcgagcgtctgagtaagatcaattgcttaaaagaatattttcccgccaaaatcaacgaaatccgtgagtcgaacgccagagtgtctgacctcgacatgaaagtgaacggtcgccatctgactaatgtcggcaccttccgtgcttacctgcaggaatacctacagcgtcacgataaaatccataaggaaatgaccttaatggtgcgccaattagcgccgaccactgagggattgccgatcgaggtttatatcttcaccaacgatacccgctgggcattttatgaggcgatacaagcggatatcttcgaccatatttttgcgatattgcctgagtttggtctgcaggcattccaagcgccaacgggcaacgatattcgtagcttaaagtcggttaaggttgactag

SEQ ID NO: 155397 - protein, 421 aa, Shewanella baltica OS155
MDQEIRLEISAWLAGFGIDSQPSDGISTSIMIIACLLLAGIAYFIVRRVVIRAVNMVILRSKVTWDDVFMRYKVLEKLAMLVPAIVLNLLVPIALTEHQILSSLVDRLLSIWLVVLMIRAIYAGLDAVDEISDVNLVSRRLPVKSFVQLTKLFLFFVGIIVSISILADQSPVYFLSGLGVATGFVMLVFRDTILGFVAGIQLAANRMVSKGDWIQMDKYGADGAVEEVSLTTVKVRNWDKTITMIPAYALVSDAFRNWRGMSESGGRRIKRAINIDINSIKFLSEEERERLSKINCLKEYFPAKINEIRESNARVSDLDMKVNGRHLTNVGTFRAYLQEYLQRHDKIHKEMTLMVRQLAPTTEGLPIEVYIFTNDTRWAFYEAIQADIFDHIFAILPEFGLQAFQAPTGNDIRSLKSVKVD

SEQ ID NO: 155398 - DNA, 1173 bp, Acinetobacter baumannii ATCC 17978
  CDS (1)..(1173): transl_table=11
atgctagtttcgctcacacttttgatcctttttgctgcattagcaaatttcattgctaaacgaattattgttcggggaatacgtcatttagtgactaaaattaagtcactcaaccagtcggtttttgcccagcatagtgtcattaagcgatttgccaatattgtgccggccattgtcattatgaacggtattactaccgttccgcatttgtcggaaaaagcggttgctttggtacagatgggcgcacaggcatttatttttctcacgattgcgctcaccattagtgaattattaaatatatttaatttaatctatcagcgtaatccaaaatctagaaacaagccgattaaaggttacttgcaactcgttaaactcattatttttgttgtttgcggattaatgattttgggtacattcctgaaaaaggatgtatttacgttgttggctggcttcggtgcaatggcagccgtattaatgttagttttccaaaatacaattttgtcattggttgcgagtgtacaaattgcctcttatgacatggtacgtattggggactggattgaaatgccatcgctcaatgctgatggtgatgtcattgatatttcattgcacacagtgaccgttcaaaactttgataaaacatacaccacgattccaaccaataaactagtgacagacacttttaaaaactggcgtggtatgagtaatgcgggctgtcgccgtatgaagcgttctctttatatcgatcaaactagcgtgcacttcatgaccgaagaagagcaacaaaaactcaaagattttttattgctagatcaatacctcaatgccaagcaatctgagattgacgaatttaataagcatttaggtagtcagtcacgttataacaaaagacgcttaaccaatattggaacatttagagcatatgttgaattctatttgcgccagcataaggggattgctcaaaatcaaacgcttattgttcgccaactacaaccaacgagtgaaggtttaccgttagaaatctatgcatttaccaataccactgcatgggtttcttatgaagcaattcagtccgatatttttgatcatctgattgcgattttgcctgagtttggcttaagagtgtatcaggcaccttcaggccatgattttcagaaattaacagtagaataa

SEQ ID NO: 155399 - protein, 390 aa, Acinetobacter baumannii ATCC 17978
MLVSLTLLILFAALANFIAKRIIVRGIRHLVTKIKSLNQSVFAQHSVIKRFANIVPAIVIMNGITTVPHLSEKAVALVQMGAQAFIFLTIALTISELLNIFNLIYQRNPKSRNKPIKGYLQLVKLIIFVVCGLMILGTFLKKDVFTLLAGFGAMAAVLMLVFQNTILSLVASVQIASYDMVRIGDWIEMPSLNADGDVIDISLHTVTVQNFDKTYTTIPTNKLVTDTFKNWRGMSNAGCRRMKRSLYIDQTSVHFMTEEEQQKLKDFLLLDQYLNAKQSEIDEFNKHLGSQSRYNKRRLTNIGTFRAYVEFYLRQHKGIAQNQTLIVRQLQPTSEGLPLEIYAFTNTTAWVSYEAIQSDIFDHLIAILPEFGLRVYQAPSGHDFQKLTVE

SEQ ID NO: 155400 - DNA, 1251 bp, Shewanella loihica PV-4
  CDS (1)..(1251): transl_table=11
ttggatcaagaattacgcgcacaggtgtcgctctggttgacccacttcggcatagatagcccctcggacggggtctctaccggcgtcatggtctttgcttgtctgttgatcgccttcatcggctatgtagtggtgaaacgcggcgtggtgagcacaatgaacatagtgatccagcgctctaaggtgcgttgggacgacatcttcatgcagcacagggtgctggagaagctggccaagttggtacctgccttgatcctcaacatcttgctgccgctggccttggtggagcatccgctgcttagcagcctggcggatagattgctggatgtggcgatagtgatcctcttcgtgcgcgccgtctacagcgtgctggacgcgggtaacgagatcgccgacgtcaaccagatcagccgccggttgccgatcaagagtttcgtgcagctgctcaagctgtttatgttcttcgtcgccatcgtcatctcgatctccgtactggccgagcagtcgccggtctacttcctcagcggcctgggtgtcgccacgggcctggtgatgttggtgttcaaagacactatcttggggttcgtggccggcattcagctggcggccaaccgcatggtcagcccgggtgactggatccagatggataagtacggcgccgatggcgcggtggaagaggtctcgctgaccacggtcaaggtgcagaattgggacaagacaatcactatgatccccgcctatgccctggtgtccgacgccttcaagaactggcgcggcatgtcagagtctggcggccggcgcatcaagcgggcggtgaatatcgacatcgattccatcgcctttctcagtgatgaacagcttaagcgcctgggtaagatcaacctgctcaaggagtacctggcccgcaaagaggtggagattgccgagttcaacgccaagattcaggatggtgacatgccggtgaatagccgcaacctcaccaatgtcggtaccttcagggcctatctgctggaatatatgcgtaagcaccctaaggtgcatcaggagatgaccctgctggtgcgtcagctggcgccgaccacagaggggttacccatagagatctatatctttaccaatgatacccgctgggcgttttacgaggatattcaggcggatatcttcgaccatatctacgcgattctgccgcagtttaacctgcgggccttccaggcaccgaccggcgccgatgtgcgcagtcttaagggttag

SEQ ID NO: 155401 - protein, 416 aa, Shewanella loihica PV-4
MDQELRAQVSLWLTHFGIDSPSDGVSTGVMVFACLLIAFIGYVVVKRGVVSTMNIVIQRSKVRWDDIFMQHRVLEKLAKLVPALILNILLPLALVEHPLLSSLADRLLDVAIVILFVRAVYSVLDAGNEIADVNQISRRLPIKSFVQLLKLFMFFVAIVISISVLAEQSPVYFLSGLGVATGLVMLVFKDTILGFVAGIQLAANRMVSPGDWIQMDKYGADGAVEEVSLTTVKVQNWDKTITMIPAYALVSDAFKNWRGMSESGGRRIKRAVNIDIDSIAFLSDEQLKRLGKINLLKEYLARKEVEIAEFNAKIQDGDMPVNSRNLTNVGTFRAYLLEYMRKHPKVHQEMTLLVRQLAPTTEGLPIEIYIFTNDTRWAFYEDIQADIFDHIYAILPQFNLRAFQAPTGADVRSLKG

SEQ ID NO: 155402 - DNA, 1191 bp, Francisella tularensis subsp. tularensis WY96-3418
  CDS (1)..(1191): transl_table=11
atgtcgttactaaaaaaatactattttgatattattaataaccatggattttctgtagctttaagctgtttaactattattctaatagtactattattatcatttatcattaatagattatcatcgaaatatatagttttgattgctaaaaaattctttgataaaagtaattccatgctaggaaaatacctattagaatataagttttttgttaagttatctcatattattccaggtatatttgcctatgttataataggttttgctactgataatgattatctttggacacaacatttagtcactggtttacagttattattacaaatttatataactgttactataatttcatttttagtatgttttgtagatgctctttttgactaccttgagaatcttgcttattttaaaaatcattcattacgtagctatgctcaagtaatcaagattatcttatacataataggctttatcttagtagtatcgttattgttaaataaatcacctattgcctttttaacgggattaggagcattatcagcagttcttatgttggtctttaaggatacaatattaggctttgtaaccaatgttcaagttgccgctcttgatttagtaagagttggagattggattactatcccatctgctaatgttgatggtactgttatggatgtatctattaatacagtaaaaatccgtaattttgataaaactatatcgatgataccaacttatacactaactactcatagtgtccaaaattggcgtggtatggtagaaaccggaggtcgtcgtattaagcgctcgataaatatagatatagatacgataaaattctgtgatcaagagcttctagaaagactaggcaaagaaactcttttagcggattttatcaaagctaaagctaatgaaaaacttactaatattagtctatttcgtgcttatattgaaaactatctgagaaatcatcctaagatacatttaggtttgacatttttaattagggagcttcagccgacacagtttggcttacctgttgagttatatatatttacaaatgacactaactgggttaactatgagaaaattcaagctgatatttttgattatgtatttgctagtttacatatgtttgacttaaaagctttccaagctattactggtagaattaataatcaattttaa

SEQ ID NO: 155403 - protein, 396 aa, Francisella tularensis subsp. tularensis WY96-3418
MSLLKKYYFDIINNHGFSVALSCLTIILIVLLLSFIINRLSSKYIVLIAKKFFDKSNSMLGKYLLEYKFFVKLSHIIPGIFAYVIIGFATDNDYLWTQHLVTGLQLLLQIYITVTIISFLVCFVDALFDYLENLAYFKNHSLRSYAQVIKIILYIIGFILVVSLLLNKSPIAFLTGLGALSAVLMLVFKDTILGFVTNVQVAALDLVRVGDWITIPSANVDGTVMDVSINTVKIRNFDKTISMIPTYTLTTHSVQNWRGMVETGGRRIKRSINIDIDTIKFCDQELLERLGKETLLADFIKAKANEKLTNISLFRAYIENYLRNHPKIHLGLTFLIRELQPTQFGLPVELYIFTNDTNWVNYEKIQADIFDYVFASLHMFDLKAFQAITGRINNQF

SEQ ID NO: 155404 - DNA, 1302 bp, Chlorobium phaeovibrioides DSM 265
  CDS (1)..(1302): transl_table=11
atgaaaacactgctggatttttttctctcctacgggttctcttcagccaacgcctcccttctggccaccattttcgcagcacttctggctcttgttgtcattgttgcccttgaggtcagcaccaaaagggtgctccttggtttcatcagccgtttcgccgcaaaaactgcaacccgtcttgatgacatactggttcatcataatgtgttttcagggcttgcccgtcttgttccgcctgttcttcttcacctgctctcagatcctgtgctgcagttcttccctgatcttattcccattgtcaaagatgtatcggttctctggttgacaggaggagttattctggtttcgttttcagcgcttgatgctcttctggaatactcatcaactcacccctcgttttcccgccttcccgtcaagagctttattcaggtcataaagtccctggcaatcggcataggtctcattgtggtgatttcaaaactgctgggaacttcacccattgtctttctcagcggacttggcgcctttaccgcagtgcttcttctggtgttcaaagattccatactcggacttgttgccggcattcagctttccgcaaacaaccttgtccgggtcggcgactggattgaaatgccaaaatatggagctgatggagatgtgattgatatttcgctggtgacggtttctgtccagaactgggacaagaccatcagcaccattcccgcctatgcgctgatttcagaagggttcaaaaactggcgggggatgagcgaggccggagggcggcgcatgaagagatcggtcaacatcgacatgaccagcgtccggttctgtgaccagaagatgctcgctgaactcagagaggttcgtttgcttaaagagtatctggcgcagaaggagcgcgaactggcggaatggaatgcagagatgggtgcaggtgaaaactctcccgtcaatgcccgccgtctgacgaatttcggaacattccgggcctatctggccgcctatcttggcagccacccgaaagtcaattcctccatgacgctcatcatccgacatctgcagccaacagcggaaggtattcctctggaaatctacctcttcagccgcgataccgagtgggcgaagtatgagcaggtacaggcagacatcatggaccatgtcctctccgttcttccatggtttgatctgcgcgtgttccagagccccggcgggtttgacataaaccatgccggacgctatttcgctgaatcgctcggtggccgcaccacccgcacggactcggcagtgccgatggaataa

SEQ ID NO: 155405 - protein, 433 aa, Chlorobium phaeovibrioides DSM 265
MKTLLDFFLSYGFSSANASLLATIFAALLALVVIVALEVSTKRVLLGFISRFAAKTATRLDDILVHHNVFSGLARLVPPVLLHLLSDPVLQFFPDLIPIVKDVSVLWLTGGVILVSFSALDALLEYSSTHPSFSRLPVKSFIQVIKSLAIGIGLIVVISKLLGTSPIVFLSGLGAFTAVLLLVFKDSILGLVAGIQLSANNLVRVGDWIEMPKYGADGDVIDISLVTVSVQNWDKTISTIPAYALISEGFKNWRGMSEAGGRRMKRSVNIDMTSVRFCDQKMLAELREVRLLKEYLAQKERELAEWNAEMGAGENSPVNARRLTNFGTFRAYLAAYLGSHPKVNSSMTLIIRHLQPTAEGIPLEIYLFSRDTEWAKYEQVQADIMDHVLSVLPWFDLRVFQSPGGFDINHAGRYFAESLGGRTTRTDSAVPME

SEQ ID NO: 155406 - DNA, 1251 bp, Aeromonas salmonicida subsp. salmonicida A449
  CDS (1)..(1251): transl_table=11
atgaaggtgatattttttaactggctggcgagcatgggtgttgaagtcagcaacatgatggcgctggtgatcgccctgggctttatcgtccttacctcgctgatattgcatgtgttgttgcaccgggtcctgctggtgcggctggtgactgtgctcgccaagtccaaacaggtgtggctgcccccccagttgcagcagcgcctgttctaccggctcgccttcgtgttgcagggagccgttatgctcggtcaggcggagatctggctgccgagcggttccgacagtttgcagttgatcgagatggtgacccagttctggatcctgctgttcctgctgctggccctgtttgccctgcttgactgcatgtcgtcggtgagccgttacacccggctggggcgggatctgcccctgcgcggcatcttccagggggtgaagctggtggccagcatactggtcggcatcctgatgatcgccctgctgctcggcaagtcaccgctcttcctgttcagtggcctgggtgccatgacagccgtgttgatgctggtgttcaaggaccccatcctggggctggtggcggggatccagctctccgccaaccgcatgctcagcgtcggcgactggttgcagatggacaagtacggtgccgacggcgaggtgaccgatatcggtctcaccaccgtcaaggtgtcgaactgggacaagaccatcaccaccatccccacctatgcgctcatctccgactccttcaagaactggcaggggatgacggaatccggcggtcgccgcatcaagcgcagcgtcaatatcgacatgaccagcgtgcgcttcctgaccgcggatgagcagatgcagctcaaacaggcccagctgctggcgccctacctgggccgcaaggagcaggagctgagcgcctataaccagcagctcagcgatgccctcagttgccccatcaacgggcgccaccttaccaatctcgggaccctgcgcgcctatctggacgcctacctgcgggcccataccggtattcgcaaggacatgacgctgatggtgcgccagctggcaccgactaccgacggtctgccgctggaaatttactgcttcaccgcgaccacggcctgggcggattacgaagggatccaggccgatattttcgaccatatcttcgccatcattgagcaatttcatctgcggttgcatcaatctcccacaggttacgatatgcgtgcctggcagagggagcaaacggagtga

SEQ ID NO: 155407 - protein, 416 aa, Aeromonas salmonicida subsp. salmonicida A449
MKVIFFNWLASMGVEVSNMMALVIALGFIVLTSLILHVLLHRVLLVRLVTVLAKSKQVWLPPQLQQRLFYRLAFVLQGAVMLGQAEIWLPSGSDSLQLIEMVTQFWILLFLLLALFALLDCMSSVSRYTRLGRDLPLRGIFQGVKLVASILVGILMIALLLGKSPLFLFSGLGAMTAVLMLVFKDPILGLVAGIQLSANRMLSVGDWLQMDKYGADGEVTDIGLTTVKVSNWDKTITTIPTYALISDSFKNWQGMTESGGRRIKRSVNIDMTSVRFLTADEQMQLKQAQLLAPYLGRKEQELSAYNQQLSDALSCPINGRHLTNLGTLRAYLDAYLRAHTGIRKDMTLMVRQLAPTTDGLPLEIYCFTATTAWADYEGIQADIFDHIFAIIEQFHLRLHQSPTGYDMRAWQREQTE

SEQ ID NO: 155408 - DNA, 1302 bp, Pseudomonas stutzeri A1501
  CDS (1)..(1302): transl_table=11
atgtccgacgacctggccggctggctggaatggctaagagcccaccccgaactgcagacgctgctcgccagcgccacgctgatcttcgccgcctggctgtccaactggatcgtcaagcgcatcctcgtccgcggcctgtaccacctgttgcagcacacccgcgagaacaagctgcaggacttcggcgtcatcaagcggctgtcgaatatcgtcccggcactggtgctgtcgatcggcgtcacgacggtcccaggcctgccggaaggcgccgtgaccgtggtgcgcaacgtctgcggcggcttcatcgtgctgaccatcgcactggccctgggcgcggtgctggacatcatcaacctgatctaccagcgccggccggatgcgcgcctgcacccgatcaagggctatctgcaggtggtgaagatcgtcgtctatgccatcgcgacgatcctgatcatcgccacgctgatcgaccgctcgccgctgatcctgctatccggccttggcgccatggcggcggtgctgatgctgatcttccaggacaccctgctgtcactggtggccagcgtgcagatcacctccaacgacctgatccgcgtcggcgactgggtggaaatgccgcagctcaatgccgacggcgacgtgatcgacatcgccctgcataccgtcaaggtgcagaactgggacaagacgatcaccagcattcccaccaagcgcttcatttccgactcgttcaagaactggcgcggcatgcaggaaagcggcggccggcgaatcaagcgcagcctgtacctggaccagcagagcgtgcactttctcagccgcgaagaatgcgagcgcctgcatcgcttcaacctgctggacgagtacctgaccgagaaaaccaaggaaatcgaggagtggaacgccaagctcgccgagcgcggcaaggagccggtgaacacgcgccgcatcaccaatatcggcagcttccgcgcgtacgtcgaacgctacctgcgtagccacggcggcatccatcagaacatgacgctgatcgtgcggcagctgagcccgaccgcggacggcctgccgctggaggtctactgcttcaccaatacggtggcatggacgcagtacgaggcgatccagtcggacattttcgatcacctgctggcgatcctgccggaattcggcctgcgcgtgttccagcacccgagcggtgcggacatgcgcaattggggcgaatcgctgacgcaacgcggcacgccggcattgcccgaggcacaaacgcctccgttcgacgcaggtgccgatcgaaccggctaa

SEQ ID NO: 155409 - protein, 433 aa, Pseudomonas stutzeri A1501
MSDDLAGWLEWLRAHPELQTLLASATLIFAAWLSNWIVKRILVRGLYHLLQHTRENKLQDFGVIKRLSNIVPALVLSIGVTTVPGLPEGAVTVVRNVCGGFIVLTIALALGAVLDIINLIYQRRPDARLHPIKGYLQVVKIVVYAIATILIIATLIDRSPLILLSGLGAMAAVLMLIFQDTLLSLVASVQITSNDLIRVGDWVEMPQLNADGDVIDIALHTVKVQNWDKTITSIPTKRFISDSFKNWRGMQESGGRRIKRSLYLDQQSVHFLSREECERLHRFNLLDEYLTEKTKEIEEWNAKLAERGKEPVNTRRITNIGSFRAYVERYLRSHGGIHQNMTLIVRQLSPTADGLPLEVYCFTNTVAWTQYEAIQSDIFDHLLAILPEFGLRVFQHPSGADMRNWGESLTQRGTPALPEAQTPPFDAGADRTG

SEQ ID NO: 155410 - DNA, 1245 bp, Enterobacter sp. 638
  CDS (1)..(1245): transl_table=11
atgcaggaattaattgctcaggttgaagaactggggatcgaaattaaccacaccacttcgctggtgattatctttggcatcattttactgactgccgtgattgtccaccttatattgcataaggtggttttgcgtctgttcgaaaagcgcgcgcaggccagttctcatttatggctgcaaatcattacgcagaataaattatttcaccgtctggccttcactctacaagggattatcgtcaacattcaggcggcgttgtggttacaaaaaggcagtgaagccgcagaaataaccatgacctgcgccaaactgtgggtcatggtctatgccctgctgtcgttcttctctctgctggatgtgatattcaatttttcgcaaaaattagcgacggcatctcagcttccgctcaaaggcatattccagggcgtcaaactggtcagcgcaattgtggttgggatcctgattatttctctgttgattggtcagtctccggccattctgatcagcggtttaggcgctatggccgccgtgctgatgttggtctttaaagatccgattcttggccttgttgctggtattcagctgtctgccaacgatatgctcaagcccggcgactggctggaaatgccgaaatacggcgcagacggggcggtcacggatatcggtctgaccaccgtcaaagtgcgcaactgggataacaccatcagcaatattcccacctgggcgctggtctctgattcgtttaaaaactggagcggcatgtcagcatcgggtggacggcgaattaagcgcagcctgagtattgataccaccagcattcattttttggatgaggacgaacagcaatgtctgattaaggcaaaactacttaagccttatatggccgcgcgccatgaagaaataaatctgtggaatcaggaaaatggcgaaggcgaatcggtattaaatctgcgcaagatgaccaatatcgggacgttccgcgcttacctgaatgaatatctgcgcaaccacccgcgcattcgcaaagatatgacgctgatggttcgtcagttagcgccggacgcgaacggtttgccgattgaaatttatgcgtttaccaacacggtgatctgggcggaatatgaaaccattcaggcggatattttcgatcatatctatgccgtggtggaagaatttggcttgagaatacatcagtcgcccacaggaaacgatatccgttcactggcggacgccttcgcgaaataa

SEQ ID NO: 155411 - protein, 414 aa, Enterobacter sp. 638
MQELIAQVEELGIEINHTTSLVIIFGIILLTAVIVHLILHKVVLRLFEKRAQASSHLWLQIITQNKLFHRLAFTLQGIIVNIQAALWLQKGSEAAEITMTCAKLWVMVYALLSFFSLLDVIFNFSQKLATASQLPLKGIFQGVKLVSAIVVGILIISLLIGQSPAILISGLGAMAAVLMLVFKDPILGLVAGIQLSANDMLKPGDWLEMPKYGADGAVTDIGLTTVKVRNWDNTISNIPTWALVSDSFKNWSGMSASGGRRIKRSLSIDTTSIHFLDEDEQQCLIKAKLLKPYMAARHEEINLWNQENGEGESVLNLRKMTNIGTFRAYLNEYLRNHPRIRKDMTLMVRQLAPDANGLPIEIYAFTNTVIWAEYETIQADIFDHIYAVVEEFGLRIHQSPTGNDIRSLADAFAK

SEQ ID NO: 155412 - DNA, 1302 bp, Pseudomonas mendocina ymp
  CDS (1)..(1302): transl_table=11
atggacatggacgaactgctcagccaaccacaggaactgctcagccgtttcgagcaatatccctggctcagcgcagcggtagggctcctggtgctgctgctgatcgcgctggtggccggacgcctggcgcgctttctgatcctccattcgacccgcctgctggcacgccagccggccctgttctggatcgagcatctgcgccgcaacaaggtgttcaatcgcctggcacagatggtgccgtcgctggtggtgcagttcggcctggtgctggtacccgatctgaacgatcaggccgagcacttcctgcgcaacctggcgctggccttcaccctgctgtcgctgaccctggcgctcaatgcgctgctcaacgccctgctcgatctctatgcaggcaccccgcatgcgcgtacccgctcgatcaagggttacgtgcagctggccaagatgctgctgtacgtgttcgccgccatcgtcatcgtcgccaccctgatcgaccgctcgcccttgctcctgctgtccggcctgggtgcgatgtcggcggtgatcctgctggtgtacaaggacaccctgctgtcgttcgtcgccggtgtgcagctgaccagcaacgattccctgcgcgtcggcgactggatcgagatgccccaggtcggcgccgacggcgatgtggtggacatcaccctgcacacggtcaaggtgcagaacttcgacaagaccatcgtctccattcccacctggcgcctgatggccgagtcgttcaagaactggcgcggcatgacccaggccggcggccgacggatcaagcgcagcctgtatctggacgcaggcctggtgcgctttctcgatgacgccgaggagcaacgcctgagcgacgtgcgcctgctcgccgattacctggcgcgcaagcaggccgaactgcgccagtggaacgccgagcacaaggccgagaacggcccctcggccaaccgccggcgcatgaccaacatcggcaccttccgcgcctatgccgaggcgtacctcaaggaccatccgcagatccgccaggacatgacctgcatggtgcgccagctgcagcccggagccgaaggtatcccgctggaaatctactgtttcaccggcaccaccaactggctggagtacgagcgcatccagagcgatatcttcgattacctgctggctctgctgccggagttcgacctggcgctgtatcagcagcccgccggcaacgacctgcgccagggcctgcaggctctggttcagcgacttccatcacaagcgcaaccggcgcagcaggcccgggattga

SEQ ID NO: 155413 - protein, 433 aa, Pseudomonas mendocina ymp
MDMDELLSQPQELLSRFEQYPWLSAAVGLLVLLLIALVAGRLARFLILHSTRLLARQPALFWIEHLRRNKVFNRLAQMVPSLVVQFGLVLVPDLNDQAEHFLRNLALAFTLLSLTLALNALLNALLDLYAGTPHARTRSIKGYVQLAKMLLYVFAAIVIVATLIDRSPLLLLSGLGAMSAVILLVYKDTLLSFVAGVQLTSNDSLRVGDWIEMPQVGADGDVVDITLHTVKVQNFDKTIVSIPTWRLMAESFKNWRGMTQAGGRRIKRSLYLDAGLVRFLDDAEEQRLSDVRLLADYLARKQAELRQWNAEHKAENGPSANRRRMTNIGTFRAYAEAYLKDHPQIRQDMTCMVRQLQPGAEGIPLEIYCFTGTTNWLEYERIQSDIFDYLLALLPEFDLALYQQPAGNDLRQGLQALVQRLPSQAQPAQQARD

SEQ ID NO: 155414 - DNA, 1236 bp, Alkaliphilus metalliredigens QYMF
  CDS (1)..(1236): transl_table=11
ttgattgaacttattaaggatttattgataaattatggtacaaatgagagggtagcccagtatttctctaatacaatagcggttatcgtgattatcatggtcagcctgatcgttgattcaattgtgcgaaaggttcttcttagaacgttaaagtcttatactgagaaaacaaaagctaaatgggacaatatcattgtagagaaaaaggtttttgatcgactggctcgtattgtgccaataggaatcatacatgcatttgctccagtatttcctgcttatcaaatgtggattcagagaattgcttttgcctgtattgttttcattgttttactagcactcaatcgattcttagatgccataaattatatctactcaagctatggaatagctaaggtaagacctattaaaggatatattcaggtggtagagatcactttatataccattggtattattatcattatcagtgttttgatagatcgttctccgtggattttattaagtggtgtaggtgctgcaacagcagtatttattcttgtttttcaaaactccatactgggacttgtagccagtattcaaattaccacaaataacatgctacaaatcggagactggatcgaaatgcctaagtatggagcggatggagatgtgttagagatctctctgcatacagtaaaggtacaaaactgggatcaaacgattattatgattccaacctatttacttatatcagaatcatttaagaactggagagggatgcaggagtccggtggtagaagaattatgagagctgtctatatagatgtcacaagcatcaaattttgtgatgaagagatgctagcaggatttgaggaaatccaatacattaaagaagaccttcagaataagagaaaagaaatagataaatacaacaaggattataaagtgaattccgcacatgctgctaacggaagacacataaccaatatagggatctttaggagttatatagagaactacttaaaaaatcatcctaaggtaagtcaaaatatgatccaaatggtgagacagcttcaacccactgaaaatggattgcccatagaaatatatgctttcacaaatgaaatcgcatgggcagattatgaggcaatacaagcggatatttttgatcatatattagctgtgcttcctgagtttgatcttaggatttatcaagggcccacaggatatgattttagtaaactgagaagtatatag

SEQ ID NO: 155415 - protein, 411 aa, Alkaliphilus metalliredigens QYMF
MIELIKDLLINYGTNERVAQYFSNTIAVIVIIMVSLIVDSIVRKVLLRTLKSYTEKTKAKWDNIIVEKKVFDRLARIVPIGIIHAFAPVFPAYQMWIQRIAFACIVFIVLLALNRFLDAINYIYSSYGIAKVRPIKGYIQVVEITLYTIGIIIIISVLIDRSPWILLSGVGAATAVFILVFQNSILGLVASIQITTNNMLQIGDWIEMPKYGADGDVLEISLHTVKVQNWDQTIIMIPTYLLISESFKNWRGMQESGGRRIMRAVYIDVTSIKFCDEEMLAGFEEIQYIKEDLQNKRKEIDKYNKDYKVNSAHAANGRHITNIGIFRSYIENYLKNHPKVSQNMIQMVRQLQPTENGLPIEIYAFTNEIAWADYEAIQADIFDHILAVLPEFDLRIYQGPTGYDFSKLRSI

SEQ ID NO: 155416 - DNA, 1245 bp, Klebsiella pneumoniae subsp. pneumoniae MGH 78578
  CDS (1)..(1245): transl_table=11
atgcaggaattaatatcgcaaattgccgccttaggaatcgaaataacccccacccgctcgctgatgattatcttcggcattatcttgttcaccgccgtggtcgtgcatctgatattgcacaaagtggtcctgcgcgcatttgaaaaacgggcgctggccagcagccatctgtggctgcaaatcatcacgcagaataaactctttcaccgactggcctttaccctgcaggggatcatcgtcaacgtccaggcggtgctgtggctgcaaaaaggcagcgaggccgcggaaatattaaccaccgtggcccagctgtgggtgatgatatatgccatgctgtccttcttctcgctgctggatgtcattttaaagctggcgcagaaatttcccgccgcctcacagttgccgctgaagggcatattccagggaattaagctggtgacggcgattattatcggcattctgattatttcgctactgataggccagtcgccagcgatcctgattagcgggctcggcgcgatggccgcggtgctgatgctggtgtttaaagatccgatcctcggtctggtggccggtattcagctctcggccaacgatatgctcaagcttggcgactggctggagatgccaaagtacggcgccgacggcgcggtgatcgatatcggcctcaccacggtcaaggtgcgcaactgggataataccatcaccaccattccgacctggtcgctggtctctgactcgtttaaaaactggagcggcatgtcggcctccggcggccgccgcatcaaacgcagccttaacatcgacaccaccagcattcatttcctcgatgaacaggagcagcagcgcctgatccgggcgaagttacttaaaccctatatggattcacgccacgaagagataagcgcctggaaccagcagtacgccggggagcaatcgatcctcaacgagcggcggatgaccaatgtcggcaccttccgcgcctatctgcaggagtatttacgccatcatccgcgcatccgccaggatatgaccctgatggtgcgccagctggcgccggatgccaacggcttgccgatcgagatctactgcttcaccaacaccgtggtatgggcggaatatgaggggatccaggcggatattttcgaccatgtcttcgccgtggtggatgagtttggcttacgcattcatcaaacgcccaccggcaacgatattcgcgcgctgaccggcgccttctcccgctga

SEQ ID NO: 155417 - protein, 414 aa, Klebsiella pneumoniae subsp. pneumoniae MGH 78578
MQELISQIAALGIEITPTRSLMIIFGIILFTAVVVHLILHKVVLRAFEKRALASSHLWLQIITQNKLFHRLAFTLQGIIVNVQAVLWLQKGSEAAEILTTVAQLWVMIYAMLSFFSLLDVILKLAQKFPAASQLPLKGIFQGIKLVTAIIIGILIISLLIGQSPAILISGLGAMAAVLMLVFKDPILGLVAGIQLSANDMLKLGDWLEMPKYGADGAVIDIGLTTVKVRNWDNTITTIPTWSLVSDSFKNWSGMSASGGRRIKRSLNIDTTSIHFLDEQEQQRLIRAKLLKPYMDSRHEEISAWNQQYAGEQSILNERRMTNVGTFRAYLQEYLRHHPRIRQDMTLMVRQLAPDANGLPIEIYCFTNTVVWAEYEGIQADIFDHVFAVVDEFGLRIHQTPTGNDIRALTGAFSR

SEQ ID NO: 155418 - DNA, 1329 bp, Pseudomonas aeruginosa PA7
  CDS (1)..(1329): transl_table=11
atggactccacatcccttctcgatcagctctccggatactggtcggcgctcgaccagcaccctatcctccacgccagcctggccttcggcctgctgctggtgggcgccctgatcctcggccggatcgcccgctacgtcgttctctacgcggtcaacctgctggcccgccagccggcgctgcactggttcggcgacctgatccgcaacaaggtgttccaacgcctggcgcagaccaccccgtcgctgctggtgcagttcggcctgccatggattcccgagatgccggacaaggccgcgcatttcctcggtaacctggcgctggccttcaccgtgctgttcctgatcctcgccctcaccgcgctgctcaacgccctgctggacatctacgcgcgcaccgagcacgcccgcacccgttcgatcaagggctacgtacaactggcgaagatcgccgtgttcgtgttcggcgcgatcatcatcgtctcgatcatcatcgaccgctcgccgctcctgctgctatcgggcctcggcgcgatgtcggcggtcctcctgctggtctacaaggacaccctgatgtccttcgtcgccagcgtgcagctgaccagcaacgacatgctgcgggtcggcgactggatcgagatgccgcaggtcggcgccgacggcgacgtggtggacatcaccctgtacaccgtgaaggtgcagaacttcgacaagaccatcgtctcggtgccgacctggcgcctgatgtccgagtcgttcaagaactggcgcggcatgcaacagtccggcggacggcggatcaagcgcgcgatctacgtcgactccagccaggtgcgtttcctcgacgagaaggaagagcaacgcctgggccaggtgcgcctgctcaccgagtacatggcgcgcaagcagaccgagttgcaggaatggaacgccgccaacggcggggtcgcgccgctggccgccaaccgccgccggctgaccaacatcggcaccttccgcgcctatgccctggcctacctgcagaaccacccggacatccaccagggcatgacctgcatggtccgccagatgcagccgaccgcccagggcatcccgctggagatatactgcttcacccgcaccaccggctggatcgactacgagcgcatccagggcgacgtgttcgattacctgctggcggtgatgccggagttcggcctcggcgcctaccagcagcccagcggccaggacctgcgccagggcctgcagggcatgctcgacggacgtgaaccggcgacgcgttcgttcgaggcgctggcttcgccgagccgcagcgacgaagccaccgtttga

SEQ ID NO: 155419 - protein, 442 aa, Pseudomonas aeruginosa PA7
MDSTSLLDQLSGYWSALDQHPILHASLAFGLLLVGALILGRIARYVVLYAVNLLARQPALHWFGDLIRNKVFQRLAQTTPSLLVQFGLPWIPEMPDKAAHFLGNLALAFTVLFLILALTALLNALLDIYARTEHARTRSIKGYVQLAKIAVFVFGAIIIVSIIIDRSPLLLLSGLGAMSAVLLLVYKDTLMSFVASVQLTSNDMLRVGDWIEMPQVGADGDVVDITLYTVKVQNFDKTIVSVPTWRLMSESFKNWRGMQQSGGRRIKRAIYVDSSQVRFLDEKEEQRLGQVRLLTEYMARKQTELQEWNAANGGVAPLAANRRRLTNIGTFRAYALAYLQNHPDIHQGMTCMVRQMQPTAQGIPLEIYCFTRTTGWIDYERIQGDVFDYLLAVMPEFGLGAYQQPSGQDLRQGLQGMLDGREPATRSFEALASPSRSDEATV

SEQ ID NO: 155420 - DNA, 1266 bp, Shewanella baltica OS185
  CDS (1)..(1266): transl_table=11
atggatcaggaaataaggttcgaaatttcggcatggttagcgggctttgggattgatagccaaccctcggacggcatatcaaccagcatcatgatcattgcctgcttactgctcgcgggcatcgcttatttcattgttcgacgcgtagtcatacgtgcggtcaacatggtgatcctccgctccaaagtcacttgggacgatgtgttcatgcgttacaaggtgctcgaaaagctggccatgctagtgcctgcaatcgtgctcaatctattagtgcccatcgccttaaccgaacatcaaatcttaagtaatttagtcgatcggctactgagtatttggctggtggtgctgatgatccgcgctatttatgcgggtttagatgcggtcgacgaaatttcagatgtgaatctggtgagccggcgtttacccgttaaaagctttgtgcagttaactaagctgtttttattctttgtcggtattatcgtttctatctcaatcttggccgatcagtcgcctgtgtacttcctcagcggcttaggtgtggcgacgggttttgtgatgttagtgttccgcgacactatcttaggtttcgtggcgggcattcagttagcggctaaccgtatggtgagcaagggcgactggatccagatggacaaatacggcgccgacggtgcggtagaagaagtctcgctgaccacggtcaaagtgcgcaactgggacaaaaccatcactatgatcccagcctatgccttagtgtcggatgcgtttcgcaactggcggggtatgtctgagtcgggtggtcgtaggatcaaacgcgccatcaatatcgatatcaacagcattaagtttttgagcgaggaagagcgcgagcgtctgagtaagatcaattgcttaaaagaatatttccccgccaaaatcaacgaaatccgtgagtcgaatgccagagtgtctgacctcgacatgaaagtaaacggtcgccatttgaccaacgtcggtaccttccgtgcttacctgcaggaatacctacagcgtcacgataaaatccataaggaaatgaccttaatggtgcgccaattagcgccgaccactgagggattgccgatcgaggtttatatcttcaccaacgatactcgctgggcattttatgaagcgatacaagcggatatcttcgaccatatttttgcgatattgcctgagtttggtctgcaggcattccaagcgccaacgggcaacgatattcgtagcttaaagtcggttaaggttgactag

SEQ ID NO: 155421 - protein, 421 aa, Shewanella baltica OS185
MDQEIRFEISAWLAGFGIDSQPSDGISTSIMIIACLLLAGIAYFIVRRVVIRAVNMVILRSKVTWDDVFMRYKVLEKLAMLVPAIVLNLLVPIALTEHQILSNLVDRLLSIWLVVLMIRAIYAGLDAVDEISDVNLVSRRLPVKSFVQLTKLFLFFVGIIVSISILADQSPVYFLSGLGVATGFVMLVFRDTILGFVAGIQLAANRMVSKGDWIQMDKYGADGAVEEVSLTTVKVRNWDKTITMIPAYALVSDAFRNWRGMSESGGRRIKRAINIDINSIKFLSEEERERLSKINCLKEYFPAKINEIRESNARVSDLDMKVNGRHLTNVGTFRAYLQEYLQRHDKIHKEMTLMVRQLAPTTEGLPIEVYIFTNDTRWAFYEAIQADIFDHIFAILPEFGLQAFQAPTGNDIRSLKSVKVD

SEQ ID NO: 155422 - DNA, 1329 bp, Ochrobactrum anthropi ATCC 49188
  CDS (1)..(1329): transl_table=11
ttgtccgaattttttattgctcatccctgggcggaaacccttgtggcgcttggaggattatttctttcagctttcattgcaaactttctaatcaaggcgattttgctcaaactactcgaacgtcttgtccagaaaacctctttcggacaagacgaagagcttaaaagacacagtgtcatcagccgtcttgccaatatcgttccggcgttgattatttcatccgggatcatggcggtgccgggcctgcccgaaggcgtgatcaccgttattcggaatgtagcgatagctttcatcattctgacgctggctttggcggtcaattcagtctttgggctgatcgatacgctctatcatcgccgtcccgaagccagataccgccccataaagggctacattcaggtggccaaacttgctgtctacatcgtggcggcagtccttgtcattgcgacactgctggacaagtcgccggttatccttctttccggtgtcggtgctatggccgcggtgctaatccttgtctttcaggacacattgctttctctggtcgccagtatgcagatcgcctcgtccaacatggttcgtgtcggcgactggattgaaatgaagaatctcgacgccaatggcgatgtcacggaaatcgcgctctataccgtcaaggtccagaatttcgacaagacgatcaccaccattccgatccgcaagctcatcaccgagccgatgaagaactatcgcggcatgcaggaatccggcgggcgccgcatcaagcgcgcgctttatatcgatcaaaacaccattcgttttctgtcggatgacgagcgagccagacttggcacagttgattggctggcggattatctgcccaagaaggccaaggaaatcgccgaatggaaccagaagcttggcgaccgcgccaacaatccggtcaacaggcgtcagttcaccaatgtcggtacgtttcgggcctatgtagacaattatctgcgcaatcaccccggcatacacaaaggcatgacattgctggtgcgccagatggaccctactcccgaaggactgccgctggaaatctactgctttacgaacacgaccgtctgggcgtcattcgaacagattcaatcagatattttcgatcacctttacgcggtgttgccggaattcggcctcagcgccttccagaatccgagcggtaacgattttcgcaaactgacaatcaatgcgcctgtcgagcagcctcaatcaccttggcgttcaaacgttgaacattatagcgtgcccgagacggtgtcaggccaagacggacgacagcaagatgcattgaaggaacgatcatga

SEQ ID NO: 155423 - protein, 442 aa, Ochrobactrum anthropi ATCC 49188
MSEFFIAHPWAETLVALGGLFLSAFIANFLIKAILLKLLERLVQKTSFGQDEELKRHSVISRLANIVPALIISSGIMAVPGLPEGVITVIRNVAIAFIILTLALAVNSVFGLIDTLYHRRPEARYRPIKGYIQVAKLAVYIVAAVLVIATLLDKSPVILLSGVGAMAAVLILVFQDTLLSLVASMQIASSNMVRVGDWIEMKNLDANGDVTEIALYTVKVQNFDKTITTIPIRKLITEPMKNYRGMQESGGRRIKRALYIDQNTIRFLSDDERARLGTVDWLADYLPKKAKEIAEWNQKLGDRANNPVNRRQFTNVGTFRAYVDNYLRNHPGIHKGMTLLVRQMDPTPEGLPLEIYCFTNTTVWASFEQIQSDIFDHLYAVLPEFGLSAFQNPSGNDFRKLTINAPVEQPQSPWRSNVEHYSVPETVSGQDGRQQDALKERS

SEQ ID NO: 155424 - DNA, 1245 bp, Yersinia pseudotuberculosis IP 31758
  CDS (1)..(1245): transl_table=11
atgcaacaaagaataagccagtggctggaaagattggggatggagttctccgatgtgatgtcattgacgatggtgattgggctaatattattgatttctgtggtgatccatctggtgctacaccgtgtagttctggccgccctccagcgccgtgggcagcaatcgcaacgcatctggcaacaggccatcacaaaacacaaactgttccaacgcgtagcgctactgctgcaagggatcatcatcaatctccaggccgtactgtggttgcaaaacggcagccagacgcaggcagttatcgttaccgccgcgcaggtgtggattatggccttcgccctgctggctctattttctttacttgataccttgctagccctgctccgccagagttcagttgctcatcaattacccctgcgcggtatctgccaagggctgaaactggtggctgcgatatttatcggcatcatgatcgtttcgctgttgatgggccgatcacccctgttgctactcagcggcttaggggccatgacggcagtactgatgttggtgttcaaagacccaatccttggtctggtggccggtattcagctctctgctaacgatatgctaaaaattggcgattggctggaaatgccaaaatatggggctgatggcgcagtgaccgatattggcctgactacagtaaaagtaagaaattgggataacaccgtcacgaccatcccaacttatgcgcttatttccgattccttcaagaactggcgctcaatgtcggaatccggtggccgacgtataaaacgcagcatcaatattgataccaccagcgtacattttctgtcagaacaggaacaacagcgcctcaccctcaacccgctgttacaacactaccttagtgaaaaatcgcaggaactgaaccaatataatcagcagatagccctcgacctcagttcaccactcaatggccgccgcctgactaacattggaacgttgcgcgcctatctggtggcttatctgcgggcacatctggggatccatcagtcgatgacattaatggtgcgccaacttgccccaacacccgagggcttgccgctagaagtttatgcttttaccaacaccacgatatgggcagaatacgaaggtattcaggcagatatttttgaccacatctttgccgtggtgagtgagtttgatctgcgaatccaccaaacaccaagcggtaacgatatgcgcagtatgcttgccaaagtctaa

SEQ ID NO: 155425 - protein, 414 aa, Yersinia pseudotuberculosis IP 31758
MQQRISQWLERLGMEFSDVMSLTMVIGLILLISVVIHLVLHRVVLAALQRRGQQSQRIWQQAITKHKLFQRVALLLQGIIINLQAVLWLQNGSQTQAVIVTAAQVWIMAFALLALFSLLDTLLALLRQSSVAHQLPLRGICQGLKLVAAIFIGIMIVSLLMGRSPLLLLSGLGAMTAVLMLVFKDPILGLVAGIQLSANDMLKIGDWLEMPKYGADGAVTDIGLTTVKVRNWDNTVTTIPTYALISDSFKNWRSMSESGGRRIKRSINIDTTSVHFLSEQEQQRLTLNPLLQHYLSEKSQELNQYNQQIALDLSSPLNGRRLTNIGTLRAYLVAYLRAHLGIHQSMTLMVRQLAPTPEGLPLEVYAFTNTTIWAEYEGIQADIFDHIFAVVSEFDLRIHQTPSGNDMRSMLAKV

SEQ ID NO: 155426 - DNA, 1245 bp, Citrobacter koseri ATCC BAA-895
  CDS (1)..(1245): transl_table=11
atgcaggaattaatatctcaggtagaagaactcgggatcgaaatgaatcacaccacttcgctggtgatgatttttggcattatttttctcactgccatcattgtgcatattattttgcattgggtggtgctgcgagcctttgaaaagcgcgccagcgccagttcacgcctgtggctgcaaatcattacccagaataaattatttcaccgcctggcgtttacgctccaggggattatcgtcaatattcaggctgtgctctggctacaaaaggggactgaggcggctgagatattaaccacctgcgcacaactgtggatcatgatgtatgccctgttgtccgtcttttcgttactggatgttattctcaacctgtcgcaaaaattcccggcggcgtctcagcttccgctgaaaggaatattccagggcatcaagctcatcggcgccattatcatcggtattctgatgatctccctgctgataggccagtctccggctattctcattagcggtctcggcgcgatggccgccgtcttaatgctggtgtttaaagaccccattctcggtctggtcgcgggtatacagctttcagcgaacgatatgctgaagctgggcgactggctggaaatgccgaaatacggcgcggacggcgcggtgatcgatatcggcttaaccaccgtgaaagtgcgcaactgggataataccattaccaccatccccacctggtccctggtttcggactctttcaaaaactggagcggcatgtccgcctctggcggtcgccgaattaaacgcagcatcagtatcgacgccaccagcattcattttcttgatgaggatgagcagcagcgtttatataaagcgcatttgttaaagccctatttaaccacccgtcatcaggaaatccaggaatggaaccaacagcagactgcgccggaatccgtactcaatcatcgtcggatgaccaatattggcactttccgcgcctacctgaatgaatatttacgccaccatccgcgtatccgcaaagatatgaccatgatggtacgccagcttgcgccggacgatcagggtttacccattgagatttacgcgtttaccaataccgtggtgtggctggaatatgaaagtattcaggccgatattttcgaccacatttttgccgtggtcgaagagtttggcttacggattcaccagtcccctacaggaaacgatattcgcgcgctgtccggggcgtttcagcgctaa

SEQ ID NO: 155427 - protein, 414 aa, Citrobacter koseri ATCC BAA-895
MQELISQVEELGIEMNHTTSLVMIFGIIFLTAIIVHIILHWVVLRAFEKRASASSRLWLQIITQNKLFHRLAFTLQGIIVNIQAVLWLQKGTEAAEILTTCAQLWIMMYALLSVFSLLDVILNLSQKFPAASQLPLKGIFQGIKLIGAIIIGILMISLLIGQSPAILISGLGAMAAVLMLVFKDPILGLVAGIQLSANDMLKLGDWLEMPKYGADGAVIDIGLTTVKVRNWDNTITTIPTWSLVSDSFKNWSGMSASGGRRIKRSISIDATSIHFLDEDEQQRLYKAHLLKPYLTTRHQEIQEWNQQQTAPESVLNHRRMTNIGTFRAYLNEYLRHHPRIRKDMTMMVRQLAPDDQGLPIEIYAFTNTVVWLEYESIQADIFDHIFAVVEEFGLRIHQSPTGNDIRALSGAFQR

SEQ ID NO: 155428 - DNA, 1248 bp, Escherichia coli E24377A
  CDS (1)..(1248): transl_table=11
atgcaggatttaatatcccaggttgaagatttagcgggtattgagatcgatcacaccacctcgatggtgatgattttcggtattatttttctgaccgccgtcgtggtgcatattattttgcattgggtggtactgcggaccttcgaaaaacgtgccatcgccagttcacggctttggttgcaaatcattacccagaataaactcttccaccgtttagcttttaccctgcaggggattatcgtcaatattcaggcggtattctggctgcaaaaaggcaccgaagcggcagatattctgactacctgcgcgcagttgtggatcatgatgtatgcgctgctttcagtcttctcgttgctggatgttattttgaatctggcgcagaaattcccggcggcatctcagttaccgctgaaagggatatttcaggggattaaactgatcggcgcaatcctggtcggcattttgatgatctcgctgctgattggtcagtcgccagcgattctgatcagcggtcttggtgcaatggctgccgtgctgatgttggtttttaaagatccgattcttggtctggtggcaggtattcagctttccgcgaacgatatgctgaaactgggcgactggctggagatgccgaaatacggcgcggatggcgcggtgatcgatattgggttaaccaccgtcaaagtgcgtaactgggacaataccattaccactattcccacctggtctctggtttctgactcctttaaaaactggagcgggatgtcagcatctggcgggcgacgtattaagcgcagtatcagtattgatgtcaccagtattcgttttcttgatgaagacgaaatgcaacgtctgaataaagcgcacttgttaaaaccttatttaaccagccgccatcaggaaattaatgagtggaatcgccagcaaggttctacggagtcgatattaaacctgcgccgaatgaccaatattggaacctttcgtgcctatctgaacgaatatctgcgtaaccatccgcggattcgtaaagatatgaccttaatggtacgccaactggctccaggtgataacggtttaccgctcgagatctacgcgtttactaacaccgtggtgtggctggaatatgaaagcattcaggctgatatattcgatcacatatttgcgattgtcgaagagtttggtctgcgacttcatcagtcgccaaccggcaatgatattcgctctctggcgggtgcatttaagcagtaa

SEQ ID NO: 155429 - protein, 415 aa, Escherichia coli E24377A
MQDLISQVEDLAGIEIDHTTSMVMIFGIIFLTAVVVHIILHWVVLRTFEKRAIASSRLWLQIITQNKLFHRLAFTLQGIIVNIQAVFWLQKGTEAADILTTCAQLWIMMYALLSVFSLLDVILNLAQKFPAASQLPLKGIFQGIKLIGAILVGILMISLLIGQSPAILISGLGAMAAVLMLVFKDPILGLVAGIQLSANDMLKLGDWLEMPKYGADGAVIDIGLTTVKVRNWDNTITTIPTWSLVSDSFKNWSGMSASGGRRIKRSISIDVTSIRFLDEDEMQRLNKAHLLKPYLTSRHQEINEWNRQQGSTESILNLRRMTNIGTFRAYLNEYLRNHPRIRKDMTLMVRQLAPGDNGLPLEIYAFTNTVVWLEYESIQADIFDHIFAIVEEFGLRLHQSPTGNDIRSLAGAFKQ

SEQ ID NO: 155430 - DNA, 1263 bp, Shewanella sediminis HAW-EB3
  CDS (1)..(1263): transl_table=11
atggatcaagaattaagattacagatctctcagtggttatcggactggggggtaaacagtacgccatcggatggtgtttccacatcggtattggtctttgccagcttggtgctggcaatgatcgcctacctgattgtcaggagaggtgtcgtccgtacgatgaacatcgtcatccagcgctctaaagttaactgggacgatatcttcatggggcacaatgtgttggagaagttttcctatatcgtgccggcgctggtgctcgaccttctgttacccatcgcgctcaccgaacatcatctgatgagctctctgatggatcgcctgctgagtgtgagtatcgttatcatacttatccgcgcggtatatagtgccctggatgccttcaatgagattgccgatgtaaatctggtcagtcgacggcttcccataaagagtttcgtgcagctgtttaagttattcctcttctttgtggccgtcatcatctccatctcggtgattgcggatcagtctccgctctacttcctcagcggtttaggtgtcgcgactggtttggttatgttggtcttcagggacactatcttagggtttgtcgctgggatacagttggcggcgaaccgcatggtgagcaccggcgattggatccagatggataaatatggggccgatggtgcggttgaagaggtctctttgacgaccgttaaggtgcgtaactgggatcagaccatcactatgatccccgcctatgccctggtctctgacgcatttaaaaactggcgcggcatgtctgagtccggtggacgacgcattaagcgttctgtctccatcgacattcactcgatcggcttcctctctgaagaggagagagttcgcctcagtaagatcaatcatcttaaggcctactttgcggctaagaatgatgagttagccgacttcaatagtcaggtcgatgatgccgatatgcctgttaacagtcgacaattgacgaatatcggtacttttagggcctatttgaaggagttcgtgagtaatcacgacaagatccataaagatatgaccctgctggtgcgtcagttagcgccgacatcggaaggggtaccgatagagatctatatctttaccaacgatacccgttgggggttctatgaaggaattcagggggatatcttcgatcatatctttgccatattaccggagttcggcttgagggttttccagggaccgacaggttcagatatcaggagtttgaaagccgataagcgttaa

SEQ ID NO: 155431 - protein, 420 aa, Shewanella sediminis HAW-EB3
MDQELRLQISQWLSDWGVNSTPSDGVSTSVLVFASLVLAMIAYLIVRRGVVRTMNIVIQRSKVNWDDIFMGHNVLEKFSYIVPALVLDLLLPIALTEHHLMSSLMDRLLSVSIVIILIRAVYSALDAFNEIADVNLVSRRLPIKSFVQLFKLFLFFVAVIISISVIADQSPLYFLSGLGVATGLVMLVFRDTILGFVAGIQLAANRMVSTGDWIQMDKYGADGAVEEVSLTTVKVRNWDQTITMIPAYALVSDAFKNWRGMSESGGRRIKRSVSIDIHSIGFLSEEERVRLSKINHLKAYFAAKNDELADFNSQVDDADMPVNSRQLTNIGTFRAYLKEFVSNHDKIHKDMTLLVRQLAPTSEGVPIEIYIFTNDTRWGFYEGIQGDIFDHIFAILPEFGLRVFQGPTGSDIRSLKADKR

SEQ ID NO: 155432 - DNA, 1266 bp, Serratia proteamaculans 568
  CDS (1)..(1266): transl_table=11
atgcaacaacagataaccctgtggctggagaagttcgggctggaatttagcggggtgatgtctctgctgatggtgctggggctgatcgtcctgatttcggtggtgatccatctggtgctgcaccgcgtagtgctgagggcaatccagcgccgtggccagcaatcgcaacgcgtatggcaacaggcaatcacccaatacaagctgttccagcgtatggcgttgttattgcagggggtgatcattaatctgcaggcggtgctgtggttacacgccggtggccagacgcaggcggttatcgtcaccgccgcccaggtgtggatcatgggcttcgccctgctgtcgttgttttccctgttggatacgctgttggcgatgctgcgccaaagcccgatttcaaaccagttgccgctgcgtggcattttccaggggctgaagctggtagccgccatcctgatcggcatcatgatcgtctccttgctgatgggtaagtcacccttgctgctgctcagcggtctgggtgcaatgaccgcggtgctgatgttggtgtttaaagacccgatcctcggtctggtggccggtattcagctttccgccaacgatatgcttagcatcggcgactggctggagatgccgaaatacggcgcagacggtgcggtcaccgacatcggcctgaccacggtaaaagtgcgcaactgggataacaccgtcaccaccatcccgacctacgcgctgatctccgactcttttaaaaactggcgctccatgtcggaatccggcgggcgtcgcatcaagcgcagcatcaatatcgacaccaccagcgtccatttcttgtcggatgaagaacagcagcggctgaaccgcaacccactgctgcaacgctatctgaacgataaaacgcaggagttaagccaacataaccagcagattgccgtagatctcagttcccccctcaacggccgccgcctgaccaaccttggcacgctgcgcgcttatctggtggcatacctgcgcgcccacccgaatattcatcagaatatgacgctgatggtgcgccaattagcgccaacgccggagggcctgccgctggagatttacgccttcaccaacaccacggtctgggcggaatacgaaagtattcaatcagatatcttcgaccatattctggcggtgattaacgaattcgacctgcgtgtccatcaaacgccaaccggcaacgatatgcgcagcatgctgagccaaatgcgccaggcgcccgacctttcctga

SEQ ID NO: 155433 - protein, 421 aa, Serratia proteamaculans 568
MQQQITLWLEKFGLEFSGVMSLLMVLGLIVLISVVIHLVLHRVVLRAIQRRGQQSQRVWQQAITQYKLFQRMALLLQGVIINLQAVLWLHAGGQTQAVIVTAAQVWIMGFALLSLFSLLDTLLAMLRQSPISNQLPLRGIFQGLKLVAAILIGIMIVSLLMGKSPLLLLSGLGAMTAVLMLVFKDPILGLVAGIQLSANDMLSIGDWLEMPKYGADGAVTDIGLTTVKVRNWDNTVTTIPTYALISDSFKNWRSMSESGGRRIKRSINIDTTSVHFLSDEEQQRLNRNPLLQRYLNDKTQELSQHNQQIAVDLSSPLNGRRLTNLGTLRAYLVAYLRAHPNIHQNMTLMVRQLAPTPEGLPLEIYAFTNTTVWAEYESIQSDIFDHILAVINEFDLRVHQTPTGNDMRSMLSQMRQAPDLS

SEQ ID NO: 155434 - DNA, 1209 bp, Arcobacter butzleri RM4018
  CDS (1)..(1209): transl_table=11
atgaaaaaatacttaatagaatttttaaaagatataggtattgaacctacatttattactgtaagttttatatttattgggattattgttttaactgctattgttgttcatataatacttcataaaattattttaaagtctataaaaaaagttgatagaaaaagacataattttataactcaaagcttattagaatataaccttttccaaagattagcgctcgtatttcaaggtttggttgtatattggcaaacatcaatttgggtagataaacaaagtgtcttttatgaaatatttcaaatattttcacttatttggatatctatttttgggcttttatctttttattcgatagttgataaaagtttcaaaacacttcataataaaacaaaaacaccattttttgctatgcaaagtgttattcaaagtataaaacttatctttggaataatatgttttatatatgtaatttctataataatggataaatcaccagttgcaattttgagtggacttggagcaatgtctgctgttttaatgttggtatttaaagatactattttagggttttcagctgggcttcaactttcaactaacaaaatggttcaagttggagattggattgaaatgccaaaatatggtgctgatggagacattatagatattggtttaaatgttgtaaaggttagaaactttgataaaacgataacaacaataccaacttatgctttagtatcagattcttttaaaaactggcaaggaatgagagaatcaggtggaagaagaataaaaagagcagttttaatagatattaattcaatatcttttttaagtgaagaagatataaaaagattagaaaaagcaaatcttttgataccatatttacacactaaacaatcagaaataaaaaattataacgaatcgcataattttgatttaagtgtagcaatgaatggtagaagacttacaaatattggaacattaagagcatatttggttacatatttaaaaaatcatccaaatataaacaaagatatgacaattatggtaagacaattagctcctaatgaatatggaatacctttagaaatatattgttttacggctacaacagtttggattgattatgaaaatattcaagcagatatttttgatcatgtttattctatattgaaagagtttggtataaaaccatatcaatatggttaa

SEQ ID NO: 155435 - protein, 402 aa, Arcobacter butzleri RM4018
MKKYLIEFLKDIGIEPTFITVSFIFIGIIVLTAIVVHIILHKIILKSIKKVDRKRHNFITQSLLEYNLFQRLALVFQGLVVYWQTSIWVDKQSVFYEIFQIFSLIWISIFGLLSFYSIVDKSFKTLHNKTKTPFFAMQSVIQSIKLIFGIICFIYVISIIMDKSPVAILSGLGAMSAVLMLVFKDTILGFSAGLQLSTNKMVQVGDWIEMPKYGADGDIIDIGLNVVKVRNFDKTITTIPTYALVSDSFKNWQGMRESGGRRIKRAVLIDINSISFLSEEDIKRLEKANLLIPYLHTKQSEIKNYNESHNFDLSVAMNGRRLTNIGTLRAYLVTYLKNHPNINKDMTIMVRQLAPNEYGIPLEIYCFTATTVWIDYENIQADIFDHVYSILKEFGIKPYQYG

SEQ ID NO: 155436 - DNA, 1260 bp, Shewanella pealeana ATCC 700345
  CDS (1)..(1260): transl_table=11
atgactttggatcaggaattacgcgctgcgattgctcagtggttaactaatattggcatcaacactcaaccgtctgatggcgtgtcgagcgcgattatggtgctggcatgttttgtggtggcttttatcggttatttcttcgtaaaacgcggagtggtgaccaccatgaatatggttattctgcgttctaaggcgcattgggatgacatctttatgcgtcatcaagtattggagaagatagccatacttgtacccattattatcttgaatattttgttgccgctggccttgaatgaccacaaggttcttagcagtctaagcgatcgcctgctcgatgtgactatcgttatcttgtttgttcgcgcggtttatagcgccttggacgcagctaatgagatagccgattataatttagtcagccgtaggttgccgattaagagctttgtacagctggctaaactcttcatgtttttcgtcgctatcatcatctcaatctcggttttagcagaccaatcgccagtctatttcttaagtggtttaggtgttgcaaccggtttagtcatgttggtatttagggatactatcttgggctttgtggcggggattcagctggctgctaaccgtatggtgagccccggagactggatcgagatggataactttggcgctaacggtacggttgaagaggtgtcgttgaccacggttaaggtacgtaactttgaccaaacactgaccatgctaccagcttacgctttaacttctggctcctttagaaactggcgtggcatgtctgaatccggtggccgtagaattaagcgcgcgctacagatagatattcaatcggtgcgttttttaactgaagaggatatgcgcagtttaagcaagatcaatcatcttaaggactatttctctgctaaatcggcggagatcattacatataacgctcaagttgaagatgcggatatgtacgtgaatagtcgtcatctaaccaatctaggtacctttagagcttatgttcaggagtacctgcaacagcacgataagatccgtaaagatatgacactgatggtacgccagctcgcgccgaccgaactcggtgtaccaatcgagctttatatctttactaacgatacccgctgggaattttacgaggggatccaagccgatattttcgatcatatcttttcgattctgccagagtttggcttgcgagtattccaagggcctacaggagcggatgtgcgcagcttaaagcattag

SEQ ID NO: 155437 - protein, 419 aa, Shewanella pealeana ATCC 700345
MTLDQELRAAIAQWLTNIGINTQPSDGVSSAIMVLACFVVAFIGYFFVKRGVVTTMNMVILRSKAHWDDIFMRHQVLEKIAILVPIIILNILLPLALNDHKVLSSLSDRLLDVTIVILFVRAVYSALDAANEIADYNLVSRRLPIKSFVQLAKLFMFFVAIIISISVLADQSPVYFLSGLGVATGLVMLVFRDTILGFVAGIQLAANRMVSPGDWIEMDNFGANGTVEEVSLTTVKVRNFDQTLTMLPAYALTSGSFRNWRGMSESGGRRIKRALQIDIQSVRFLTEEDMRSLSKINHLKDYFSAKSAEIITYNAQVEDADMYVNSRHLTNLGTFRAYVQEYLQQHDKIRKDMTLMVRQLAPTELGVPIELYIFTNDTRWEFYEGIQADIFDHIFSILPEFGLRVFQGPTGADVRSLKH

SEQ ID NO: 155438 - DNA, 1233 bp, Alkaliphilus oremlandii OhILAs
  CDS (1)..(1233): transl_table=11
ttgattaaatttatttatgatttactactgaattacaattttaatgaaagactctccatctttttatccaatatattggcgattattttcatcatactcacctgcatcgtcgccgattttgttgtgcaaaaagttttacttcgaactttaaccgcctatatcaaaagaacgaaaaataaatgggacgatattttcttagaaaaaaaggtttttgaaaccctgtcccgcattgtgcccggcgctttgattcatctttgggcacctgtatttcctacttatcaaatcttgattcaacgaattgctttttcctatatcatttttattattttgttgaccttggataaatccttagataccatccatcatatttatcaagaatttcctgtttctaaggcaagacccatcaagggatatcttcaggtcattaaaatcgtggtctatgtcattggcattatcgtaatcatcagtgttctaatcaaccgttctccattgatattacttagtggtatcggtgcggctacagcagtttttattttagtttttcagaactcaattttaggtctggtggccagcattcagctcacatccaacaacatgcttcaaataggcgattggattgaaatgcaaaaatatgaagctgacggaaacgttattgatatttctcttcacaccgtaaaggtacagaattgggataaaaccatcactaccattccgactcacgtgttgatatccgattcttttaagaattggagaggtatgcaggaagcaggcgctcgacaaatcaaaagatccattcatatcgacatgaccagcatcaaattttgtaatgaagaaatgctggatcgttttaaagaaattgaatacattaaaaactacatcgaagaaaagactttagaaatcgatcatcataatcaaaagctcaatgccataccatcgaatatggtcaatggaagacatttaaccaatatcggtgtatttagaatgtatatcacaaattatttaaagcatcatccaaatgtgcataaagatatgattcaggttgtaagacagcttcagcctactgcaaacggtttgcctatagaaatctatgttttctcaaaagagatcctttctgtaaaatacgaagccatacagtcggatatattcgatcacattttagctatcattccggagtttgatcttcgtctttatcaaagtccaacaggtcatgatttcaaaaacctcaacagttaa

SEQ ID NO: 155439 - protein, 410 aa, Alkaliphilus oremlandii OhILAs
MIKFIYDLLLNYNFNERLSIFLSNILAIIFIILTCIVADFVVQKVLLRTLTAYIKRTKNKWDDIFLEKKVFETLSRIVPGALIHLWAPVFPTYQILIQRIAFSYIIFIILLTLDKSLDTIHHIYQEFPVSKARPIKGYLQVIKIVVYVIGIIVIISVLINRSPLILLSGIGAATAVFILVFQNSILGLVASIQLTSNNMLQIGDWIEMQKYEADGNVIDISLHTVKVQNWDKTITTIPTHVLISDSFKNWRGMQEAGARQIKRSIHIDMTSIKFCNEEMLDRFKEIEYIKNYIEEKTLEIDHHNQKLNAIPSNMVNGRHLTNIGVFRMYITNYLKHHPNVHKDMIQVVRQLQPTANGLPIEIYVFSKEILSVKYEAIQSDIFDHILAIIPEFDLRLYQSPTGHDFKNLNS

SEQ ID NO: 155440 - DNA, 1248 bp, Salmonella enterica subsp. arizonae serovar 62:z4,z23:--
  CDS (1)..(1248): transl_table=11
atgcaggaattgatatcccaggtagaagatttagcgggtattgaaatgaatcacaccacgtcgctggtggtgatatttggtattatttttctgacggctgttgtcgtgcatattattttgcactggatagtactgcgcgcttttgaaaaacgcgccagcgccagttcccgcctgtggctgcaaattatcacccagaataaattatttcatcgtctggcttttacgctgcaaggcatcattgtcaatattcaggccgcgctctggctgcaaaaaggcagtgaggctgcggatatcctgacgacttgcgcgcagttatggattatgacctacgccctgctgtcgttattttccctgctggacgtgattttcaatctgtcgcaaaaatggcccgccgcttctcaactgccgctaaaaggaatatttcagggcattaagctaatcggcgcgattatcgtcggcattctgatgatctcactgctgattggccagtcaccggcgattttaatcagcgggctgggcgcaatggccgccgtgttaatgctggtctttaaagacccgattcttggactggttgccggtatacagctttccgccaacgatatgctcaaactgggcgactggctggaaatgccgaaatatggcgcagatggtgcggttattgatattggtttaaccacggtaaaagtgcgcaactgggataataccatcaccactattcccacctggtcgctggtttccgattcgtttaaaaactggagcggcatgtccgcttccggcggacgccggattaaacgcagcataaatattgacgcaaccagcatccactttctggatgatgatgaaaaacaacgactgttaaccgcacatctgttaaagccgtatcttaccagccgtcatcaggaaatcgatgaatggaataaacagttgaatgcgcccgaatcagccttaaatcaccgtcggatgactaatattgggacgtttcgcgcctatctgaacgaatatttacgtcaccatccgcgcatccgtaaagatatgacgctgatggtacgccaactggcgcctgacgatcatggtttaccgatagagatctatgcctttaccaataccgtcgtgtggctggaatatgagagcattcaggccgatattttcgaccatatttttgccgtggtggaagagttcggcttgcgcattcatcagacgccgaccggcagcgatattcgtgcgctgtcaggggcattaacgcattaa

SEQ ID NO: 155441 - protein, 415 aa, Salmonella enterica subsp. arizonae serovar 62:z4,z23:--
MQELISQVEDLAGIEMNHTTSLVVIFGIIFLTAVVVHIILHWIVLRAFEKRASASSRLWLQIITQNKLFHRLAFTLQGIIVNIQAALWLQKGSEAADILTTCAQLWIMTYALLSLFSLLDVIFNLSQKWPAASQLPLKGIFQGIKLIGAIIVGILMISLLIGQSPAILISGLGAMAAVLMLVFKDPILGLVAGIQLSANDMLKLGDWLEMPKYGADGAVIDIGLTTVKVRNWDNTITTIPTWSLVSDSFKNWSGMSASGGRRIKRSINIDATSIHFLDDDEKQRLLTAHLLKPYLTSRHQEIDEWNKQLNAPESALNHRRMTNIGTFRAYLNEYLRHHPRIRKDMTLMVRQLAPDDHGLPIEIYAFTNTVVWLEYESIQADIFDHIFAVVEEFGLRIHQTPTGSDIRALSGALTH

SEQ ID NO: 155442 - DNA, 1275 bp, Burkholderia multivorans ATCC 17616
  CDS (1)..(1275): transl_table=11
atgactttgaatgaatcctggtttgcgccgctcgtcggcacgctcatcctgctcgctgccgccggcgtcgtcaccgcggccgtccatttcctgctgtttcgcgtcgtcgcacggctcgcgcggcgctcggccacgcgcatcgacgatgcgctgttccagttcggcgcgttcaagtggctgaaccgcatcgtcccgttcgtcgtgatcaagctcgggctcggcgccgtgcccggcctgccggacgccgccgcgcaggccgccgacaaggtgctgttcgcgctgatcgtgttcgtcgtcacgatgacgatcagcgcgacgctgtccgcgctcgagcatacgtaccgcacgacgcgccgcgaacagccgcgcctgtcgctgaaaggcgcgatgcagctcgtcaagctcgtgatgttcatcacggccgcgctcgtcgtgatcggcgatgcgaccggcaagcagatcggcctgctgctgtccggcatcggcgcgatgtcggcggtgctgatgctgatcttcaaggacacgctgctcgggctcgtcgccggcgtgcagctgtcgtcgaacgacatgctgcggatcggcgactggatcacgatgccgtccgccggcgcggacggcacggtgatcgacatcacgctgaacacggtaaaagtcgcgaacttcgatcacacgatcatcaccgtgccgacctggaagctcatcaccgagagctaccagaactggcgcgggatgaccgaagccggcggccgccggatcaagcgcgcgctcttcatcgacgcgacgagcgtgcgctttctgacgaacgacgagatcgcgcggctcgaacggctcacgctgctgaaggattatctggacgaaaaggtcgacgcgatcgcgcaatggaacggcgcgctcggcccagcggccgagtgcccggcgaaccgccgccagctgacgaacctcggcacgtttcgcgcctacgtcgcgaactatctgcagtggcatccgcgcatccgccgcgacatgacctgcatggcgcgccagctgccgctcaccgccgagggcattccgctcgagctgtactgcttcaccgacacgacgacgtgggtcgactatgaagcgatccagtccgatctgttcgaccatctgatcgcgatcctgccggaattcgggctgcgcgtgtaccagcatccgtcggggttcgacatgcgcgagatgacgggcgccgtgcgcgccgatgcacgccgcgccgccgccgaaccgaccgacgatccggaaactgcgatcgccgcctag

SEQ ID NO: 155443 - protein, 424 aa, Burkholderia multivorans ATCC 17616
MTLNESWFAPLVGTLILLAAAGVVTAAVHFLLFRVVARLARRSATRIDDALFQFGAFKWLNRIVPFVVIKLGLGAVPGLPDAAAQAADKVLFALIVFVVTMTISATLSALEHTYRTTRREQPRLSLKGAMQLVKLVMFITAALVVIGDATGKQIGLLLSGIGAMSAVLMLIFKDTLLGLVAGVQLSSNDMLRIGDWITMPSAGADGTVIDITLNTVKVANFDHTIITVPTWKLITESYQNWRGMTEAGGRRIKRALFIDATSVRFLTNDEIARLERLTLLKDYLDEKVDAIAQWNGALGPAAECPANRRQLTNLGTFRAYVANYLQWHPRIRRDMTCMARQLPLTAEGIPLELYCFTDTTTWVDYEAIQSDLFDHLIAILPEFGLRVYQHPSGFDMREMTGAVRADARRAAAEPTDDPETAIAA

SEQ ID NO: 155444 - DNA, 1302 bp, Pseudomonas putida GB-1
  CDS (1)..(1302): transl_table=11
atggatatacaaagaatctggcgtgactccctcgacctgtggggcaccctcgaccaacatcccatgttgcacgctgccatcggcttggcggtgttgctgctgatttctctggtggtcggccgcctggcgcgcttcctcatgctgcacggcgcgcgcctgctggcccgccagccagcgctgaagtggctggacgacctgcgccacaacaaggtgttccaccgcctggcgcaaaccaccccgtcgctggtactgcagttcggcctgaagctggtgccggagctgtcagataccgcccagcacttcctcggcaatgtcgccctggcgtttaccctgctgttcatgaccatggcgctgtcgtgcctgctggatgccctgctcgacatctatgctcgcaccgaacacgcccgcacccgctcgatcaagggctacgtgcaactggccaagatgatgttgtggatcttcgcctcgatcgtcatcgtcgccaccctgatcgaccgttcgccgttgctgctgctgtcgggtctgggtgccatgtcggcggtgctgctgttggtgtacaaggacaccctgctgtcgttcgtcgccagcgtgcagttgaccagcaacgacatgctgcatgtgggtgactggatcgaaatgccgcaggtgggtgccgatggtgacgtggtggatatcaccctgcacacggtgaaggtgcagaacttcgacaagaccatcgtttccatccccacctggcgcctgatgagcgagtcgttccgcaactatcgcggcatgcagcaatccgggggccggcgaatcaaacgcagcctgttcatcgatgccgccggcgtgcgcttccttacccgcgaagaggaacagcgcctgagccaggttcagttgcttggcgattacctggcaggcaagcgccaggagctgcagaactggaacgaagccctggggcctgtcgccgagctgtcggccaatcgccgcaagctgaccaacatcggcaccttccgcgcgtttgccctggcttacctgaagaaccaccccaacgttcacccgaacatgacctgcatggtgcggcagatgcagaccaccgccgaaggcgtgccgctggaaatctactgcttcaccaccaccacggcatgggctgagtatgagcggatccagggggatatcttcgactacctgctggcggtgttgccagagtttggcttgagcctgtatcagcagccgagcggcaatgacatgcgggtggggttgagcgggcgtttggcgcaagagcctgtccagcatcgcctggaacagctgagcgaagcttga

SEQ ID NO: 155445 - protein, 433 aa, Pseudomonas putida GB-1
MDIQRIWRDSLDLWGTLDQHPMLHAAIGLAVLLLISLVVGRLARFLMLHGARLLARQPALKWLDDLRHNKVFHRLAQTTPSLVLQFGLKLVPELSDTAQHFLGNVALAFTLLFMTMALSCLLDALLDIYARTEHARTRSIKGYVQLAKMMLWIFASIVIVATLIDRSPLLLLSGLGAMSAVLLLVYKDTLLSFVASVQLTSNDMLHVGDWIEMPQVGADGDVVDITLHTVKVQNFDKTIVSIPTWRLMSESFRNYRGMQQSGGRRIKRSLFIDAAGVRFLTREEEQRLSQVQLLGDYLAGKRQELQNWNEALGPVAELSANRRKLTNIGTFRAFALAYLKNHPNVHPNMTCMVRQMQTTAEGVPLEIYCFTTTTAWAEYERIQGDIFDYLLAVLPEFGLSLYQQPSGNDMRVGLSGRLAQEPVQHRLEQLSEA

SEQ ID NO: 155446 - DNA, 1254 bp, Shewanella halifaxensis HAW-EB4
  CDS (1)..(1254): transl_table=11
ttggatcaggaattacgcgctgcgattgctcagtggttaactaatattggtatcgacactcagccatctgatggtgtttcgattacgattatgctgtttgcatgttttgtggtggcatttatcgggtatttcttcgtaaaacgtggtgtcgtgaccacgatgaatctagttatcctgcgctctaaagctcattgggatgacattttcatgcgtcatcaagtattggagaagatggccgtacttgtccccgttattatcttgaatattctgttgccgttagccttgtatgatcacactgttcttagcagcctgactgatcgactactagacgtcactatcgtggtgttatttatccgtactatttacagcgccttagatgccgctaatgagattgcggattataacttagtcagtcgaaggttgccgatcaagagctttgtgcagctagctaaactgttcatgttctttgtggccatcatcatctctatttcagttttggcagaccaatcacccgtctattttctaagcggtttaggtgtcgcgactggtttagtcatgttggtatttagagatactatcttaggcttcgttgcgggtattcagttggcggctaatcgcatggtgagtcctggagactggatcgagatggataacttcggtgccaacggtaccgtcgaagaggtgtcgttaaccacagttaaagtgcgtaacttcgaccaaaccctgaccatgcttcctgcctattctttaacttcagggtcctttagaaactggcgtggcatgtctgaatcaggcggtcgacggattaagcgcgcgatacaaattgatattcaatcggtgcgttttttaactgaagacgatatgcgcagcttaaacaagatcaatcaccttaaagactatttctctgcgaaatcggcggagatcattacatataatgcccatgttgaagatgcggatatgtacgtgaatagccgtcatttgaccaatatcggtacctttagagcctatatccaggagtacttaactcagcacgataagatccgtaaagacatgacactgatggtgcgccaacttgcaccaaccgaactgggtgtacctattgagctctatatctttactaacgatacacgctgggagttttacgagggcattcaagctgatattttcgatcacctctttgcgatattgccagagtttgatcttagggtattccaagggccaacaggggctgatgtgcgtagcttgaagcattag

SEQ ID NO: 155447 - protein, 417 aa, Shewanella halifaxensis HAW-EB4
MDQELRAAIAQWLTNIGIDTQPSDGVSITIMLFACFVVAFIGYFFVKRGVVTTMNLVILRSKAHWDDIFMRHQVLEKMAVLVPVIILNILLPLALYDHTVLSSLTDRLLDVTIVVLFIRTIYSALDAANEIADYNLVSRRLPIKSFVQLAKLFMFFVAIIISISVLADQSPVYFLSGLGVATGLVMLVFRDTILGFVAGIQLAANRMVSPGDWIEMDNFGANGTVEEVSLTTVKVRNFDQTLTMLPAYSLTSGSFRNWRGMSESGGRRIKRAIQIDIQSVRFLTEDDMRSLNKINHLKDYFSAKSAEIITYNAHVEDADMYVNSRHLTNIGTFRAYIQEYLTQHDKIRKDMTLMVRQLAPTELGVPIELYIFTNDTRWEFYEGIQADIFDHLFAILPEFDLRVFQGPTGADVRSLKH

SEQ ID NO: 155448 - DNA, 1236 bp, Acinetobacter baumannii AYE
  CDS (1)..(1236): transl_table=11
ttggatttttttaatttttatcgtgatcttcaagctgagttaagcaactatccttggctagaaatgctagtttcgctcacacttttgatcctttttgctgcattagcaaatttcattgctaaacgaattattgttcggggaatacgtcatttagtgactaaaattaagtcactcaaccagtcggtttttgcccagcatagtgtcattaagcgatttgccaatattgtgccggccattgtcattatgaacggtattactaccgttccgcatttgtcggaaaaagcggttgctttggtacagatgggcgcacaggcatttatttttctcacgattgcgctcaccattagtgaattattaaatatatttaatttaatctatcagcgtaatccaaaatctagaaacaagccgattaaaggttacttgcaactcgttaaactcattatttttgttgtttgcggattaatgattttgggtacattcctgaaaaaggatgtatttacgttgttggctggcttcggtgcaatggcagccgtattaatgttagttttccaaaatacaattttgtcattggttgcgagtgtacaaattgcctcttatgacatggtacgtattggggactggattgaaatgccatcgctcaatgctgatggtgatgtcattgatatttcattgcacacagtgaccgttcaaaactttgataaaacatacaccacgattccaaccaataaactagtgacagacacttttaaaaactggcgtggtatgagtaatgcgggctgtcgccgtatgaagcgttctctttatatcgatcaaactagcgtgcacttcatgaccgaagaagagcaacaaaaactcaaagattttttattgctagatcaatacctcaatgccaagcaatctgagattgacgaatttaataagcatttaggtagtcagtcacgttataacaaaagacgcttaaccaatattggaacatttagagcatatgttgaattctatttgcgccagcataaggggattgctcaaaatcaaacgcttattgttcgccaactacaaccaacgagtgaaggtttaccgttagaaatctatgcatttaccaataccactgcatgggtttcttatgaagcaattcagtccgatatttttgatcatctgattgcgattttgcctgagtttggcttaagagtgtatcaggcaccttcaggccatgattttcagaaattaacagtagaataa

SEQ ID NO: 155449 - protein, 411 aa, Acinetobacter baumannii AYE
MDFFNFYRDLQAELSNYPWLEMLVSLTLLILFAALANFIAKRIIVRGIRHLVTKIKSLNQSVFAQHSVIKRFANIVPAIVIMNGITTVPHLSEKAVALVQMGAQAFIFLTIALTISELLNIFNLIYQRNPKSRNKPIKGYLQLVKLIIFVVCGLMILGTFLKKDVFTLLAGFGAMAAVLMLVFQNTILSLVASVQIASYDMVRIGDWIEMPSLNADGDVIDISLHTVTVQNFDKTYTTIPTNKLVTDTFKNWRGMSNAGCRRMKRSLYIDQTSVHFMTEEEQQKLKDFLLLDQYLNAKQSEIDEFNKHLGSQSRYNKRRLTNIGTFRAYVEFYLRQHKGIAQNQTLIVRQLQPTSEGLPLEIYAFTNTTAWVSYEAIQSDIFDHLIAILPEFGLRVYQAPSGHDFQKLTVE

SEQ ID NO: 155450 - DNA, 1248 bp, Escherichia coli SMS-3-5
  CDS (1)..(1248): transl_table=11
atgcaggatttaatatcccaggttgaagatttagcgggtattgagatcgatcacaccacctcaatggtgatgattttcggtattatttttctgaccgccgtcgtggtgcatatttttttgcattgggtggtactgcggaccttcgaaaaacgtgccatcgccagttcacggctatggttgcaaatcattacccagaataaactcttccaccgtttagcttttaccctgcaggggattatcgtcaatattcaggcggtattctggctgcaaaaaggcaccgaagcggcagatattctgactacctgcgcgcagttgtggatcatgatgtatgcgctgctttcagtcttctcgttgctggatgttattttgaatctggcgcagaaattcccggcggcatctcagttaccgctgaaagggatatttcaggggattaaactgatcggcgcgattctggtcggcattttgatgatctcgctgctgattggtcagtcgccagcgattctgatcagcggtcttggtgcaatggctgccgtgctaatgttggtatttaaagatccgattcttggtctggtggcaggtattcagctttccgcgaacgatatgttgaaactgggcgactggctggagatgccgaaatacggcgcggatggcgcggtgatcgatattgggttaaccaccgtcaaagtgcgtaactgggacaataccattaccactattcccacctggtctctggtctctgactcctttaaaaactggagcgggatgtcagcatctggcgggcgacgtattaagcgcagtatcagtattgatgtcaccagtattcgttttcttgatgaagacgaaatgcaacggctgaataaagcgcacttgttaaagccttatttaaccagccgccacaaggaaattaatgagtggaatcgccagcaaggttctacggagtcggtattaaacctgcgccgaatgaccaatattggaacctttcgtgcctatctgaacgaatatctacgtaaccatccgcgaattcgtaaagatatgaccttaatggtacgccaactggctcctggcgataacggtttaccgctcgagatctatgcgtttaccaacaccgtggtgtggctggaatatgaaagcattcaggctgatatattcgaccacatatttgcgattgtcgaagagtttggtctgcgacttcatcagtcgccaactggcaatgatattcgctctctggcgggtgcatttaagcagtaa

SEQ ID NO: 155451 - protein, 415 aa, Escherichia coli SMS-3-5
MQDLISQVEDLAGIEIDHTTSMVMIFGIIFLTAVVVHIFLHWVVLRTFEKRAIASSRLWLQIITQNKLFHRLAFTLQGIIVNIQAVFWLQKGTEAADILTTCAQLWIMMYALLSVFSLLDVILNLAQKFPAASQLPLKGIFQGIKLIGAILVGILMISLLIGQSPAILISGLGAMAAVLMLVFKDPILGLVAGIQLSANDMLKLGDWLEMPKYGADGAVIDIGLTTVKVRNWDNTITTIPTWSLVSDSFKNWSGMSASGGRRIKRSISIDVTSIRFLDEDEMQRLNKAHLLKPYLTSRHKEINEWNRQQGSTESVLNLRRMTNIGTFRAYLNEYLRNHPRIRKDMTLMVRQLAPGDNGLPLEIYAFTNTVVWLEYESIQADIFDHIFAIVEEFGLRLHQSPTGNDIRSLAGAFKQ

SEQ ID NO: 155452 - DNA, 1302 bp, Pseudomonas putida W619
  CDS (1)..(1302): transl_table=11
atggatatgcaaaaaatctggcgcgacagcctcgacctgtggggcacccttgaccaacaccccatgctccacgccgccatcggcctggccgtgctgctgctggtttccctggtaatcggccgcctggcgcgctttctgatcctgcacggcacacgcttgctggcccgccagcctgcgctcaaatggctcgacgacctgcgccacaacaaggtgtttcaccgcctggcgcagaccacaccgtcgctggtcatccagttcgggctgaaactggtaccggagctgtccgataccgcccagcacttccttggcaatatggcgctggcctttaccctgctgttcatgaccctggcgctgtcgtgcctgctcgatggcctgctcgacatctacgcccgcaccgaacatgcccgcacccgctcgatcaagggctatgtgcaactggcgaagatgatgctgtggattttcgcctccatcgtcatcgtcgccaccctgatcgaccgttcacccctgttgctgctgtcaggcctgggtgcgatgtcggcagtattgctgttggtgtacaaggacaccctgttgtcgttcgtcgccagcgtgcagctcaccagtaacgacatgctgcacgtcggcgactggatcgaaatgccccaggtcggcgccgatggcgatgtggtcgatatcaccctgcacacggttaaggtgcagaacttcgacaagaccattgtctcgatccccacctggcggctgatgagcgagtcgttccgcaactaccgcggcatgcagcaatcgggcggccggcggatcaaacgcagcctgttcatcgatgcggcgggcgtgcgttttctgacccgagaagaagaacagcgcctgagcggggtgcgcctgctcgctgactacctggccggcaagcgccaggagctccatgaatggaacgaagctctggggccggtggccgagctgtcggccaaccgccgccagctgaccaacatcggcaccttccgcgcctttgccctggcttacctgaggaaccaccccaacgtgcaccaaggcatgacctgcatggtccggcagatgcagaccggcgccgagggggtgccgctggagatctactgcttcaccaccacgaccgtgtgggccgagtacgaacggatccagggcgatatcttcgattacttgctggcggtgttgccggagtttgggctgagcttgtatcagcagccgagtggcaatgacatgcgcgtggggctggcggggcgcgtttcggtagagcctgtgccacgtcgcctggaagaaatgagcgaggcttga

SEQ ID NO: 155453 - protein, 433 aa, Pseudomonas putida W619
MDMQKIWRDSLDLWGTLDQHPMLHAAIGLAVLLLVSLVIGRLARFLILHGTRLLARQPALKWLDDLRHNKVFHRLAQTTPSLVIQFGLKLVPELSDTAQHFLGNMALAFTLLFMTLALSCLLDGLLDIYARTEHARTRSIKGYVQLAKMMLWIFASIVIVATLIDRSPLLLLSGLGAMSAVLLLVYKDTLLSFVASVQLTSNDMLHVGDWIEMPQVGADGDVVDITLHTVKVQNFDKTIVSIPTWRLMSESFRNYRGMQQSGGRRIKRSLFIDAAGVRFLTREEEQRLSGVRLLADYLAGKRQELHEWNEALGPVAELSANRRQLTNIGTFRAFALAYLRNHPNVHQGMTCMVRQMQTGAEGVPLEIYCFTTTTVWAEYERIQGDIFDYLLAVLPEFGLSLYQQPSGNDMRVGLAGRVSVEPVPRRLEEMSEA

SEQ ID NO: 155454 - DNA, 1266 bp, Shewanella woodyi ATCC 51908
  CDS (1)..(1266): transl_table=11
atggatcaagaactaagattgcggatctcaaagtggttatccgactggggagttaacagcacaccatcggacgatgtgtcaacttcattgcttgtcgtggtgagccttgtgttggccattatcgcttacctgtttgtcaggcgtggtgttgtgcgcgccatgaatatcgtgatccaccgctctaaagtgagttgggatgatatctttatgaggcataaggtactggagaagttctcctatgttgtaccagcccttgtaatgaacctcttgatcccattggcattgaaagagcatcaactaataagctcactggtggatcgtctgctgagtgtctggattgtggtgatgctggtgcgcgctatctatagtgcactggatgcggtgaatgagattgccgatgtcaatttagtgagtaggcgtctaccgattaagagttttgttcagctatttaagctcttcctcttctttgtagccatcatcatctctatttcggttctggcgaatcaatctccggtctacttcctcagcggcttaggtgttgcgaccggtttggtgatgttagtgtttagagacaccatattaggttttgtcgctggaattcagctggccgctaaccgcatggtgagcacgggcgattggatccagatggataagtatggtgccaatggctcggtcgttgaggtgtcgttaaccacagtcaaggtgcaaaactgggacaatacactgacgatgatccccgcctatgccttggtttctgatgcatttaagaactggcgcggtatgtctgagtctggtggtcggcgcattaaacgtgcggtttccatcgatattcacagcatacactttctctctgaagaggagcaggtcaagttaagtaaaattaactgtttaaaagagtatttctcctcaaaaagagaggagatctcgctctttaatcaaggtgttgaagatgctgatatgccggtaaatagtcgtcacttgaccaatatcggtacctttagggcgtatctgattgaatatgtgaccagacacccgctgatccataatgatatgaccttgctagtgcgtcaattagcaccaacatccgaaggtgttcctattgaggtctatgtgtttactaccgatattcgctggaacaattacgaagatattcaaggtgatatcttcgatcatatctttgcaatcttacctgagtttggcttgaaagttttccaagggccaacaggctcagatattcgaagcttgaagggggaagttaagagttag

SEQ ID NO: 155455 - protein, 421 aa, Shewanella woodyi ATCC 51908
MDQELRLRISKWLSDWGVNSTPSDDVSTSLLVVVSLVLAIIAYLFVRRGVVRAMNIVIHRSKVSWDDIFMRHKVLEKFSYVVPALVMNLLIPLALKEHQLISSLVDRLLSVWIVVMLVRAIYSALDAVNEIADVNLVSRRLPIKSFVQLFKLFLFFVAIIISISVLANQSPVYFLSGLGVATGLVMLVFRDTILGFVAGIQLAANRMVSTGDWIQMDKYGANGSVVEVSLTTVKVQNWDNTLTMIPAYALVSDAFKNWRGMSESGGRRIKRAVSIDIHSIHFLSEEEQVKLSKINCLKEYFSSKREEISLFNQGVEDADMPVNSRHLTNIGTFRAYLIEYVTRHPLIHNDMTLLVRQLAPTSEGVPIEVYVFTTDIRWNNYEDIQGDIFDHIFAILPEFGLKVFQGPTGSDIRSLKGEVKS

SEQ ID NO: 155456 - DNA, 1275 bp, Elusimicrobium minutum Pei191
  CDS (1)..(1275): transl_table=11
atgaaacccatatttaatcttcttgaatatctgcaagtgtctgaattttgggccttgcttttggcaaaattaataagtcttgccatatttatttttttgatatggcttgcgggatatattttcaggctttttacggaaaaatatcttatagacagaattttcaaaggccgctttaaaaaatggcacaccgcgctgcaaaaaggcaacttttttgccgctataggttattttttagccggtattttagcgcagtacgcggttgacttctttttccccggggaatatgccagattcgcctccttcggagtaaaagttgttaacgtgtactttcaaatttgcgtaattataataattaataaagttattgatattataatttccttctacggcaacaaccccaaactccctgttaaagggttaatgcaggctataaaaatagttattaactttttgggcggtcttgtcattttggcgtggatgcttggcaaagaaccgcttttctttatttccgctttaggtttggccgcgtccgttttaatgttggtgtttaaggaccctattttagggttaacggcaagcttccagctttcatttaacgacatgctccgcataggagattggattgaaatgcccaaacacggcgccgacggcgatgttatagatatttctttaacaagcgtgcgcgtgcaaaattgggacaaaactattgtaagcattcccgcctatgatttaatttcctcctcgtttaaaaattggcgcggaatgagcgactccggcggtagaagaataaaaagagccataaatatcgatgtgcagacaattaaatttatggatgaggacctttttaacagacttaaaaaaattgagttattaaaagaatatcttacaaagaaagggcaggaaatagcctcatttaacgaaacttgcaatgtaaaagaaagcatggttaacggcaggcatttaacaaacgtgggcacctttcgcgcttattgcgaagcttatataggcagccgtgattatatacataaaacatatacctccatggtaaggcaacttgagcccggctcacaagggcttcctttggaaatatattgctttaccaatactaccgcgtgggtagcgtatgaggcgcatatgtctgatttatttgaccatttgttcgcggttatgaaagactttgatttaatgcctttccaaaacccgagcagcggagatataagaaatctgagtttaaaggcattgccctccgcggttgccggctctgaaaataaatag

SEQ ID NO: 155457 - protein, 424 aa, Elusimicrobium minutum Pei191
MKPIFNLLEYLQVSEFWALLLAKLISLAIFIFLIWLAGYIFRLFTEKYLIDRIFKGRFKKWHTALQKGNFFAAIGYFLAGILAQYAVDFFFPGEYARFASFGVKVVNVYFQICVIIIINKVIDIIISFYGNNPKLPVKGLMQAIKIVINFLGGLVILAWMLGKEPLFFISALGLAASVLMLVFKDPILGLTASFQLSFNDMLRIGDWIEMPKHGADGDVIDISLTSVRVQNWDKTIVSIPAYDLISSSFKNWRGMSDSGGRRIKRAINIDVQTIKFMDEDLFNRLKKIELLKEYLTKKGQEIASFNETCNVKESMVNGRHLTNVGTFRAYCEAYIGSRDYIHKTYTSMVRQLEPGSQGLPLEIYCFTNTTAWVAYEAHMSDLFDHLFAVMKDFDLMPFQNPSSGDIRNLSLKALPSAVAGSENK

SEQ ID NO: 155458 - DNA, 1248 bp, Shigella boydii CDC 3083-94
  CDS (1)..(1248): transl_table=11
atgcaggatttaatatcccaggttggggatttagcgggtattgagatcgatcacaccacctcgatggtgatgattttcggtattatttttctgaccgccgtcgtggtgcatattattttgcattgggtggtactgcggaccttcgaaaaacgtgccatcgccagttcacggctttggttgcaaatcattacccagaataaactcttccaccgtttagcttttaccctgcaggggattatcgtcaatattcaggcggtattctggctgcaaaaaggcaccgaagcggcagatattctgactacctgcgcgcagttgtggatcatgatgtatgcgctgctttcagtcttctcgttgctggatgttattttgaatctggcgcagaaattcccggcggcatctcagttaccgctgaaagggatatttcaggggattaaactgatcggcgcaatcctggtcggcattttgatgatctcgctgctgattggtcagtcgccagcgattctgatcagcggtcttggtgcaatggctgccgtgctgatgttggtatttaaagatccgattcttggtctggtggcaggtattcagctttccgcgaacgatatgctgaaactgggcgactggctggagatgccgaaatacggcgcggatggcgcggtgatcgatattgggttaaccaccgtcaaagtgcgtaactgggacaataccattaccactattcccacctggtctctggtttctgactcctttaaaaactggagcgggatgtcagcatctggcgggcgacgtattaagcgcagtatcagtattgatgtcaccagtattcgttttcttgatgaagacgaaatgcaacgtctgaataaagcgcacttgttaaaaccttatttaaccagccgccatcaggaaattaatgagtggaatcgccagcaaggttctacggagtcgatattaaacctgcgccgaatgaccaatattggaacctttcgtgcctatctgaacgaatatctgcgtaaccatccgcggattcgtaaagatatgaccttaatggtacgccaactggctccaggtgataacggtttaccgctcgagatctacgcgtttaccaacaccgtggtgtggctggaatatgaaagcattcaggctgatatattcgatcacatatttgcgattgtcgaagagtttggtctgcgacttcatcagtcgccagccggcaatgatattcgctctctggcgggtgcatttaagcagtaa

SEQ ID NO: 155459 - protein, 415 aa, Shigella boydii CDC 3083-94
MQDLISQVGDLAGIEIDHTTSMVMIFGIIFLTAVVVHIILHWVVLRTFEKRAIASSRLWLQIITQNKLFHRLAFTLQGIIVNIQAVFWLQKGTEAADILTTCAQLWIMMYALLSVFSLLDVILNLAQKFPAASQLPLKGIFQGIKLIGAILVGILMISLLIGQSPAILISGLGAMAAVLMLVFKDPILGLVAGIQLSANDMLKLGDWLEMPKYGADGAVIDIGLTTVKVRNWDNTITTIPTWSLVSDSFKNWSGMSASGGRRIKRSISIDVTSIRFLDEDEMQRLNKAHLLKPYLTSRHQEINEWNRQQGSTESILNLRRMTNIGTFRAYLNEYLRNHPRIRKDMTLMVRQLAPGDNGLPLEIYAFTNTVVWLEYESIQADIFDHIFAIVEEFGLRLHQSPAGNDIRSLAGAFKQ

SEQ ID NO: 155460 - DNA, 1245 bp, Erwinia tasmaniensis Et1/99
  CDS (1)..(1245): transl_table=11
atgcagcaattgattgcacaactcaaacagtttggtattgagcctaatcatgctatttcgctgacgattatttttgccatcatttttcttacggcaatcgtcgttcactttatcttgcaccgcatcgttctggccgtctgtgaaaagcgtgctcaggccagctcacatctttggctgcatatcctgaccgaaaataagctctttcaccggctggcctttacgctgcaggggattattgtcaatgtccaggcggtactatggctaaataaggacagcgacgcggcggctattctgtcaacctgtgcgcagctttgggtcatgctctacggcctgatgtcgtttttctcgctgctggatgtggtgaacagcttatcaaaccgtttcgcctttgccgcgcagttcccgctcaaagggctgctacagggcatcaagctgatcgccgctattgtcatcggtattatgatgatttcgctgctgattggaaaatctccggcgatcctgatcagcgggctgggcgcaatggcagccgtcctgatgctggtatttaaagacccaatcctgggcctggtcgcgggcattcagctttctgcaaacaatatgctgaagctgggagactggctggagatgccaaaatatggggctgacggcgcggtgacggatattggtctgaccacggtaaaagtgcgtaactgggataacaccattacgaccataccgacttatgctctggtctccgacgcatttaaaaactggagcggtatgtcggcctctggcggtcgtcgcatcaagcgctgcatcaacattgatacgaccagcatccactttctgacggaggaagagcaggaaaagctggctcatgcgcgcctgctgtcaccttatatggagatgcgccaggaagaaatcgccagttggaatggacagaatgcggggccagcctccattctgaatcagcgtaaaatgacgaatatcggcacttttcgcgcctatctgaatgaatatctgcgccagcatccctccatacgccaggacatgacgctgatggtgcgccagatggcgccaggagcggaaggtttaccgcttgaaatttacgcattcactaacaccgtggcatggctggaatacgaaagcattcaggctgatatttttgaccatgtgtttgccgtggtggacgagtttggcttacgcattcatcaggcacccaccgggagcgacgtgcgcgccatcgcgggcctgaattcatactga

SEQ ID NO: 155461 - protein, 414 aa, Erwinia tasmaniensis Et1/99
MQQLIAQLKQFGIEPNHAISLTIIFAIIFLTAIVVHFILHRIVLAVCEKRAQASSHLWLHILTENKLFHRLAFTLQGIIVNVQAVLWLNKDSDAAAILSTCAQLWVMLYGLMSFFSLLDVVNSLSNRFAFAAQFPLKGLLQGIKLIAAIVIGIMMISLLIGKSPAILISGLGAMAAVLMLVFKDPILGLVAGIQLSANNMLKLGDWLEMPKYGADGAVTDIGLTTVKVRNWDNTITTIPTYALVSDAFKNWSGMSASGGRRIKRCINIDTTSIHFLTEEEQEKLAHARLLSPYMEMRQEEIASWNGQNAGPASILNQRKMTNIGTFRAYLNEYLRQHPSIRQDMTLMVRQMAPGAEGLPLEIYAFTNTVAWLEYESIQADIFDHVFAVVDEFGLRIHQAPTGSDVRAIAGLNSY

SEQ ID NO: 155462 - DNA, 1212 bp, Chlorobium phaeobacteroides BS1
  CDS (1)..(1212): transl_table=11
atggtggtgataagtctgatccttattgttgttgctgaaatagtgacaaaacggatctttctgaggataattatttcagtagcatcaaagacaaaaacaatttatgatgatcttctggtaaagcacaaggttttttcctggcttgctcatgtggtccctcctttgctgctgtataaccttgcggttcctgttctgcagttttttcctcaaagcatcgttgtcgttcaatcgttggcaatgctctatctgacggtgattgtcgtgtttgctattctcagtgccctcgacgctatgcttgagtattacaatcagagcacggtcgcggagaagctgccgctgaaaagctttattcaggttataaaaaccgtggtggtttcagttggagcggtgattgttatttccaggctgatcggaaagtctccagtggtttttttcagcgggctcggtgcgtttaccgcggtgatcattctcgtgttcaaggattccatcctgggatttgtcgcaggaattcagctatccacaaacaaccttgtaaaggttggtgactggatcgaaatgccgaaatataacgtcgatggtgacgttatcgatatttcgctcgtgacggtttctgtgcagaactgggacaagaccatcagcaccattccggcctatgccctcatttcagaaggcttcaagaactggagggggatgagtgattcaggtgggcgcaggatcagacgatcagtcactattgatatgaacagtgtctgtttctgcgatgaagctatggttgaaaaattcagcagggtgcagctgctgcaggactatcttcaggaaaaacagcgtgaagttgacgagtacaatgctcatcacaaggttgatacttcttccccggtcaacggccgcaggctgacaaatcttggtactttcagggcgtatcttgttgcctatcttcgcgaccatccaaagatagaccccgatatgacctttcttgtccgtcatttgcagccctccgaaaacggaattccagttcagatatacgttttcagcagtgatcaggtctgggcaaattacgaggcgatacaggcagatatcatggatcatgttctctctattctgcccttttttgaactcagaatatttcaagctccatcagggagggatattcaactggccggaaattcccttcaaacagcgctttctgcaagcagaaagcctgatggcgtgtga

SEQ ID NO: 155463 - protein, 403 aa, Chlorobium phaeobacteroides BS1
MVVISLILIVVAEIVTKRIFLRIIISVASKTKTIYDDLLVKHKVFSWLAHVVPPLLLYNLAVPVLQFFPQSIVVVQSLAMLYLTVIVVFAILSALDAMLEYYNQSTVAEKLPLKSFIQVIKTVVVSVGAVIVISRLIGKSPVVFFSGLGAFTAVIILVFKDSILGFVAGIQLSTNNLVKVGDWIEMPKYNVDGDVIDISLVTVSVQNWDKTISTIPAYALISEGFKNWRGMSDSGGRRIRRSVTIDMNSVCFCDEAMVEKFSRVQLLQDYLQEKQREVDEYNAHHKVDTSSPVNGRRLTNLGTFRAYLVAYLRDHPKIDPDMTFLVRHLQPSENGIPVQIYVFSSDQVWANYEAIQADIMDHVLSILPFFELRIFQAPSGRDIQLAGNSLQTALSASRKPDGV

SEQ ID NO: 155464 - DNA, 1272 bp, Stenotrophomonas maltophilia K279a
  CDS (1)..(1272): transl_table=11
atggtggacgcggtggtggcggtacagtggctggaacggctgcagaacacactggaaccctatcctggcgcctacctggcgttgatgatctcggcgctgctgatcgccgctggcctggccaactgggtgaccaagcgcatcctgctgcgcgggctgcgacgcctgctcagccgcctgccgggcgctgataccggccgcggcagccacctgatgcgggtgatctcgcgtctgtccaatgtggtgcccagccaggtgatcgcctcgggcatccgcatcgtgccggacctgccgccggggctggtgagcttcatcatcggcgcctgccaggcgtgggcgatcctgaccgtggtgctggccatctcgcatgcgctggatgcggccaatgatctctacgagcgccgccccgaggcacgcaacaagccgatcaaggggtacctgcaggtcgccaagatcgtcatcttcgtgatcgccggcctgtcgatcgttgccaccctggccggcgtcgacctccgctatctggtcaccggtctcggcgccgccactgcagtgctgatgctgatcttccaggacaccatcctgtcgctggtggccagcgtacagatcagtggcgatggtcgcgtgcgcatcggtgactggatcgagatgcccagccagaacgccgatggcgatgtgatcgacatcgccctgcataccatcaccgtgcagaacttcgacaagaccatcaccaccatcccgaccaagaagctggtgaccgagtcgttcaagaactggcgcggcatgcaggaggcgggtgggcgccggatcaagcgcgcgctgtacctggaccagcacagcgtcggcttcctggatgagggcgatctggcattcctcggcgaattcgcgctgctgcgcgactacctgcaggccaaggagcaggagctgggacagtggaacgggcgcctgcgcgagcagggcgtggccgaggtcaacagccgccgggtgaccaacctgggtaccttccgggcctatgtggagcgctacctgcgcagccacccgggcatccataccgacatgaccctgctggtacgtcagctgcagccgaccaccgaaggcctgccgctggagctgtactgcttcacccgcagcaccgcctggggcgagtacgaggcggtgcagtcggacatcttcgaccacctgctggcgatcctgccggccttcggcctgcgggtattccaggcctccagcgacgccatgttgatggccgggcagcgccagctggccggctcggagtaa

SEQ ID NO: 155465 - protein, 423 aa, Stenotrophomonas maltophilia K279a
MVDAVVAVQWLERLQNTLEPYPGAYLALMISALLIAAGLANWVTKRILLRGLRRLLSRLPGADTGRGSHLMRVISRLSNVVPSQVIASGIRIVPDLPPGLVSFIIGACQAWAILTVVLAISHALDAANDLYERRPEARNKPIKGYLQVAKIVIFVIAGLSIVATLAGVDLRYLVTGLGAATAVLMLIFQDTILSLVASVQISGDGRVRIGDWIEMPSQNADGDVIDIALHTITVQNFDKTITTIPTKKLVTESFKNWRGMQEAGGRRIKRALYLDQHSVGFLDEGDLAFLGEFALLRDYLQAKEQELGQWNGRLREQGVAEVNSRRVTNLGTFRAYVERYLRSHPGIHTDMTLLVRQLQPTTEGLPLELYCFTRSTAWGEYEAVQSDIFDHLLAILPAFGLRVFQASSDAMLMAGQRQLAGSE

SEQ ID NO: 155466 - DNA, 1278 bp, Cellvibrio japonicus Ueda107
  CDS (1)..(1278): transl_table=11
atgaaagcgttgattcaaggctggttggagccctatcagttagcccatgcggatttgatttatgttgcgattgtactgggcctgattgtcctgacgtcgctggtgttgcatgttattttgcactctgttgtcctgcgggcgatttcatactccacacgcaattccgagcagctctggcgtcaggcgctttataaaaaccgcttgttcaaccgtattgccctggtttttcagggtgtcattttatatgtccaggccaatatctggctggctcccgacagcgatgcactggcatttatccagatactgactgaactctggatcctgctgtttgccctgctttcgctctttgcattactcaatgcacttgaagaaatatttatgccgaccagtatcggacggcgtatgccactgcgcgggatttcccagagcatcaaattaatcgcggcactggtagccattattttcggcatttccctggtcattgataaatcccccctgattctgttcagtggtctgggtgctatgactgcggtgctgctattggttttcaaggatgccatcctcggttttgtggcaggcatccaattagcggccaacaacatgttgtccctgggtgattggctggagatgcccaaatacggcgccgacggcgatgtgattgatatcagcctgactaccgttaaggtccgcaactgggataacaccatcaccactgttcccgcctatgcactgatttccgattcctttaaaaactggcgcggcatgagtgaatcgggaggtcgacggattaaacgcgccgtctacatcgatgcgaccagtgtgaagttcctccagcaggaagatattcagcgcctgcgccgagccgccttgctaagcgattatatcgaggaaaaaattcgcgacatcgaagctgataaccagcaatccggtatcgatctggagtatccggttaacgggcgccgcctgaccaacctgggtaccttccgcgcttacctcagcgcttatctgcgcaaccacaaaaatatccacaaaggaatgacacagatggtgcgtcagctggagccaaaggcagaggggattcccctggaggtgtatgcgttttccaacgacaccagctgggcgaattacgagcgtatccaggctgatattttcgaccatatctttgcggttattcccgagttcggcctgcgtgtctaccaaagcccgtccggctacgatatgcagcacatggcccaccaggtcggccccttgaactcctccgaccaagcccccacatag

SEQ ID NO: 155467 - protein, 425 aa, Cellvibrio japonicus Ueda107
MKALIQGWLEPYQLAHADLIYVAIVLGLIVLTSLVLHVILHSVVLRAISYSTRNSEQLWRQALYKNRLFNRIALVFQGVILYVQANIWLAPDSDALAFIQILTELWILLFALLSLFALLNALEEIFMPTSIGRRMPLRGISQSIKLIAALVAIIFGISLVIDKSPLILFSGLGAMTAVLLLVFKDAILGFVAGIQLAANNMLSLGDWLEMPKYGADGDVIDISLTTVKVRNWDNTITTVPAYALISDSFKNWRGMSESGGRRIKRAVYIDATSVKFLQQEDIQRLRRAALLSDYIEEKIRDIEADNQQSGIDLEYPVNGRRLTNLGTFRAYLSAYLRNHKNIHKGMTQMVRQLEPKAEGIPLEVYAFSNDTSWANYERIQADIFDHIFAVIPEFGLRVYQSPSGYDMQHMAHQVGPLNSSDQAPT

SEQ ID NO: 155468 - DNA, 1266 bp, Chloroherpeton thalassium ATCC 35110
  CDS (1)..(1266): transl_table=11
atggtcaacgaattgcaatcatggcttttaagccacggacttaatgaagcgggttcggtaattttgtctaatgtgttttctctggcggcgcttgtgctgctaagccttgtcatcaattttctggccaggcgatttttgctttcggtggtgcattatgcggtggcacgcaccgaagccaagtgggatgattatttcgttgagcgaaaattctttagtcagctggcgcatttggtgccggcggttggcgtttatttggccgtccccattattttttccgaatcgccaacgctggtgacaagcttaacacatggcatctacatctacattgttgttgtcagtgttttatccatcgatgcgtttctaaatgccgtgcacgacatttatatgcactttgacgtatcgcgcgaagtgccaatcaaagggatcgttcaagttctaaaaattatcgcctatctaattggcggcatcttcatcatttcgcttgttttagacaaatcgccgttcttcctcatcagcggtttgggtgcgctaaccgccgtgcttttgttggtgttcaaagatgtcattttgggatttgtcgcgggcattcagcttgccgccaataaaatgctggttgaaggcgattggatcgaaatgccaaaatacggcgccgacggcgaggtcatggaaattgcgctaaccaccgtcaaagttcgaaattgggataaaaccatcaccaccatcccgacttacgcgcttatcagcgattcatttaaaaactggcgcggcatgaaagacgctggcggcaggcgaatcaaacgctctcttttgatcgatattcataccatcaagttttgcgatgaggaaatgctggcgcgttttgcaaaaatccgattcatttcaaattacatcgaacagaaaaagcaagaattggctgaatttaactcgctgtattatgtggataacgaaatgctggccaatcgccgccggctaaccaatgttggaacatttcgcgcgtatgtggcaggctatttgaaaaatcatccgagcattcgccaagatatgacgtttctcgtccgccagctcgaacctaacgaacacggcttgccacttgaaatttacgtattcacgaacgatacggtttgggcaaactacgaaggcattcaagccgacattttcgatcatattttggccattcttcccgaattcgatctgagcgttttccaagtcccaagcggcaatgatttcaaaagctttttatccaatagcgcatcgcaaaaaagctaa

SEQ ID NO: 155469 - protein, 421 aa, Chloroherpeton thalassium ATCC 35110
MVNELQSWLLSHGLNEAGSVILSNVFSLAALVLLSLVINFLARRFLLSVVHYAVARTEAKWDDYFVERKFFSQLAHLVPAVGVYLAVPIIFSESPTLVTSLTHGIYIYIVVVSVLSIDAFLNAVHDIYMHFDVSREVPIKGIVQVLKIIAYLIGGIFIISLVLDKSPFFLISGLGALTAVLLLVFKDVILGFVAGIQLAANKMLVEGDWIEMPKYGADGEVMEIALTTVKVRNWDKTITTIPTYALISDSFKNWRGMKDAGGRRIKRSLLIDIHTIKFCDEEMLARFAKIRFISNYIEQKKQELAEFNSLYYVDNEMLANRRRLTNVGTFRAYVAGYLKNHPSIRQDMTFLVRQLEPNEHGLPLEIYVFTNDTVWANYEGIQADIFDHILAILPEFDLSVFQVPSGNDFKSFLSNSASQKS

SEQ ID NO: 155470 - DNA, 1287 bp, Prosthecochloris aestuarii DSM 271
  CDS (1)..(1287): transl_table=11
atggttgatttttttcttgattacctgcaattacacggtttttccaagggtcagtctcagttattcatgacggtggtcatggcagtactctctttgatactgcttgtagcttcagagctcctgacgaaaaaggtccttttgcgatttgtttccgtctttattaagaaaagcaaaacccggttcgatgatttgctgctcagccatggggtgctgaggtgggcagcacatctgattcctcctgttcttctctacaatattgtcgttccggtatttcaattttatcctgatacgatacaggtcttccagtcagttgcgacactctacctgacgattattgtactggttgcgcttttgttcactcttgatgccgttcaggactatttctcggcgcatcctgtttcgcgccgtcttcccctcaaaagctttattcaggttctgaaaactattattgtcacgattgggtcaatcgttgttattgcaaaacttctgggtaagtcaccggttgttttttttagcggtatcggcgcgtttactgcagttattattctgattttcaaggattccatcctcggtttcgtggcaggtattcaactgtcaaccaacaatctggtcagggtcggagactggattgaaatgcctgaatacggcgctgacggtgatgttgtcgatatttctctggttaccgtttccgtgcagaactgggacaaaaccatcagtaccatacccgcttatgcgctgatttcagcagggttcaaaaactggcgcggaatgagtgaatcaggtgggcgtcgtataaagcgttccatcaatatcgatatgcagagtgtcgggttctgcgatgaagagatgctgaaaaaaatacaaggtgtccagctcctgaaagagtacatagaaaagaagcgtcaggaaatcgatgcctataacgcgcaatacgtctttgatacctctgttcctgtcaatggacgccgcatgaccaatcttggtgtctttcgggcttatcttgtggcctatctccggcagcatccgaaaatcaacgacgatatgacatttctggtcaggcacctgcaaccgaccgaaaacggattgccggttgagatctatgtattcagtaacgatgttgagtgggcaaactacgaggctctgcaggctgatatcatggatcacgttctttctgtactctccttttttggtctcagcgtttttcagaacccttcgggtggagatattgtcaatgcaggaaaatctcttcttcaggcttcaacgcaacagaccggctcggcctattga

SEQ ID NO: 155471 - protein, 428 aa, Prosthecochloris aestuarii DSM 271
MVDFFLDYLQLHGFSKGQSQLFMTVVMAVLSLILLVASELLTKKVLLRFVSVFIKKSKTRFDDLLLSHGVLRWAAHLIPPVLLYNIVVPVFQFYPDTIQVFQSVATLYLTIIVLVALLFTLDAVQDYFSAHPVSRRLPLKSFIQVLKTIIVTIGSIVVIAKLLGKSPVVFFSGIGAFTAVIILIFKDSILGFVAGIQLSTNNLVRVGDWIEMPEYGADGDVVDISLVTVSVQNWDKTISTIPAYALISAGFKNWRGMSESGGRRIKRSINIDMQSVGFCDEEMLKKIQGVQLLKEYIEKKRQEIDAYNAQYVFDTSVPVNGRRMTNLGVFRAYLVAYLRQHPKINDDMTFLVRHLQPTENGLPVEIYVFSNDVEWANYEALQADIMDHVLSVLSFFGLSVFQNPSGGDIVNAGKSLLQASTQQTGSAY

SEQ ID NO: 155472 - DNA, 1431 bp, Alteromonas macleodii 'Deep ecotype'
  CDS (1)..(1431): transl_table=11
atggaagtgagtgcttcagtacgcgattactttatacacttggtaaacgacgttttcccaaacttaaccactgaggacccgctttatacagtgcttgcactagggtctaccctgataattgcagcgttcatttatattattgcgcggttattagtacgcccgcaaattgctagctgggtttacaagtctaataataaatgggacaacgcgcttcaagagcatggcttctttagacctttaatgcacctcttccctgcgctattcatctacgttgccactccagtacttatcgatgatgaagccgtcatgcacggtatggtaatcaaaagtgctcagctgtatatgctttacagtggcttactcgctttgtacgccatgctaagcacagtagaagacgtttacaacgcctcagccctttcccgacgagccccgattacagggttcattcaggtgactaaacttgcctttgcaatcattactatactgctgagtatttctttaatagtcgatagaagtccgttgcttattgtatcgggcctaaccgctattgccgcggtgctgttattgatattcagagacactattttaggttttgtggccggtatacagattgccgccaaccgcatgtttaataccggtgattggatagccatgccgaaatacgaagttgacggtgaaatacttgaaataggcttaaccaatgtaaaggtacaaaactgggacaaaacaatctcgacactacctacttatagccttactactgaagcggtgaagaactggcgaggcatgcaggagtccggcggccgcagaattaagcgcgccatttatattgatgtgcactctatcaaactctgcgacaaagatatgttagaccgcttttcaaaaattcgttatatcaacgaatatatcgataaaaagaaaaacgaactgcgtgcttatcacagggattactccattgatgagtcggatttactcaataaccgcaagctaaccaatatcggtacgtttagagcctacttagaagcctatttgcgcaagcatgcgaatatcaaccaagagcttacgcttatggttaggcagcttccccctaatgagctaggtttgcccttagaaatttattgctttagcgcagaaaaagaatgggtcaaatacgagaaagtacagtcggatattttcgaccacgtcatggccatgcttgacctgttcgacctacgcgcctaccagcgagacggtcacctctcgcttttagcccaccgcgagcacagtgcctatcagcaagaggcaaaggtgaacgccaggcaaggtgctgataatagtgccaagcaaagtacaagtgaaagttctgatggaagtgccgatgaaagtgccgatgaaaggacagagcgtagtgtaaacacgcctgcagagcctcacagcacgccgaaagcgtaa

SEQ ID NO: 155473 - protein, 476 aa, Alteromonas macleodii 'Deep ecotype'
MEVSASVRDYFIHLVNDVFPNLTTEDPLYTVLALGSTLIIAAFIYIIARLLVRPQIASWVYKSNNKWDNALQEHGFFRPLMHLFPALFIYVATPVLIDDEAVMHGMVIKSAQLYMLYSGLLALYAMLSTVEDVYNASALSRRAPITGFIQVTKLAFAIITILLSISLIVDRSPLLIVSGLTAIAAVLLLIFRDTILGFVAGIQIAANRMFNTGDWIAMPKYEVDGEILEIGLTNVKVQNWDKTISTLPTYSLTTEAVKNWRGMQESGGRRIKRAIYIDVHSIKLCDKDMLDRFSKIRYINEYIDKKKNELRAYHRDYSIDESDLLNNRKLTNIGTFRAYLEAYLRKHANINQELTLMVRQLPPNELGLPLEIYCFSAEKEWVKYEKVQSDIFDHVMAMLDLFDLRAYQRDGHLSLLAHREHSAYQQEAKVNARQGADNSAKQSTSESSDGSADESADERTERSVNTPAEPHSTPKA

SEQ ID NO: 155474 - DNA, 1257 bp, Proteus mirabilis HI4320
  CDS (1)..(1257): transl_table=11
atgcagcagcaactgcttacatggatacgtcagtttaatgaagagtacgctcaaatcacttctctgttacttgttttattgatcatttttgttgttgctcttgttctccactttattttgcacaaacttgtgctccctaagctttcaaaagctatcagtaaatacgatcaaaagtggcaactctcttttgaaattaataagttattcagtcgatttgcctttcttatccaaggtgtagtcattaatatccaagccttattatggatgggacccggtaagacacaggagatattaaccactacagctcaagcatggtgtttacttttcggtttattgatgattttctcaattatggatctctgtttgcagatcatgagaaattccccttcttttggccgattaccccttagaggtattttccaaagtttaaaattagtcgccagcgtgctgattggtatcatgattgtttcattactgatcggtaaatcaccgcttattttattaagtggtttaggtgccatgactgcggtgttgatgttggtatttaaagatccaattatgggacttgttgccggtattcaactctccgccaataatatgattagcttgggtgattggttagaaatgcctaaatatggtgctgatggtgccgtagtggatattagcctcaccacagtaaaagtacgtaattgggataataccgttacgaccattcctacttattctttaatttctgattcgtttaaaaactggcaagcgatgacacaatcaggtgggcgtcgaattaagcgcagtttatctcttgatatcaatagtatttactttttagatcaagagaatattgataaattagaaaaggcacagcttcttgaaccttatataaaaagcaaagtaggtgaaatctccagctataacgctagcctttgtcatgagcatcaaatgccacttaatcaacgtggtatgacgaatgtcggtacatttcgcgcttacgtggaagcttatctaaaaaatcatccgaagatccataaacagatgaccattatggtaagacagcttgccccaacctctgaagggttacctatcgaaatttatgcctttaccaatacaaccgtgtgggtagagtatgaagctattcagtccgatatttttgatcatatattcgctattcttcctcagtttggtttacgaatacaccaatcaccaacaggtagcgatgttagagcattaaaattccctaccaatatcgacacaccatag

SEQ ID NO: 155475 - protein, 418 aa, Proteus mirabilis HI4320
MQQQLLTWIRQFNEEYAQITSLLLVLLIIFVVALVLHFILHKLVLPKLSKAISKYDQKWQLSFEINKLFSRFAFLIQGVVINIQALLWMGPGKTQEILTTTAQAWCLLFGLLMIFSIMDLCLQIMRNSPSFGRLPLRGIFQSLKLVASVLIGIMIVSLLIGKSPLILLSGLGAMTAVLMLVFKDPIMGLVAGIQLSANNMISLGDWLEMPKYGADGAVVDISLTTVKVRNWDNTVTTIPTYSLISDSFKNWQAMTQSGGRRIKRSLSLDINSIYFLDQENIDKLEKAQLLEPYIKSKVGEISSYNASLCHEHQMPLNQRGMTNVGTFRAYVEAYLKNHPKIHKQMTIMVRQLAPTSEGLPIEIYAFTNTTVWVEYEAIQSDIFDHIFAILPQFGLRIHQSPTGSDVRALKFPTNIDTP

SEQ ID NO: 155476 - DNA, 1239 bp, Vibrio cholerae AM-19226
  CDS (1)..(1239): transl_table=11
atgcttgaaacattaaccttgtggttacagaagtttgatattgaaattgaacgcgtgatccagcttgcggaagcgctcgggctgatcgcagccatttcgattgccattcatctcgtgttacaccgtggagtgctgctgtggctcaaacgccatacccaccatgagcaaagcgtttggcgcaatgctctgtttaaagagcacctatttagccgcgttgccttactgatccaaggtgtggtgattgcggtgcaaacccagttgtggctaagccctaacacctttgcttacgatgttctgcacaccctaacctcactgtggattgtggtgtttggcatgctggcaacttactccgtactcaacgtgctggagctgctgatcagccgaacccaagtgggtaaaaacctgccaacacgcggcattttgcaaagcatcaagctgattgtgtttattatcgcggcgctgtttttcacctcaattttgatcggtaaatcgccggtgattctgctcagcggcttaggtgcgatgaccgccgtctttatgttggtatttaaagacccgatcctcggcttagttgcaggggtacaactttcggccaacaaaatgctctcggtcggtgactggttggaaatgcccaaatatggcgcagatggctcagtgattgatatcagcctaaccacagtcaaagtgcaaaactgggataaaaccatcaccaccattccaagctacgctctgatttcagattcctttaaaaactggaaagggatgcaagagtccggtggtcgccgcatcaaacgcagcattttgattgatgccaccagcgtgcattttttaacagaagaagagaaacaaacgctgaaaaaagcgcaactgcttgagccgtacttgatcgagaaagagcaagagatcagcagctacaaccaacaaaaacattgggatttggcctgtcgtatcaatggccgccgcctgaccaacatcggcagtttccgcgcttatttagagcgctacctgcgtactcaccccaatattcaccaagatatgacgctgatggtgcgtcagttagcgcccactcacgatggcatttcgctagaggtgtactgctttaccagcaccacagtgtgggtggagtatgagcgtattcagtcggatatttttgatcatatttacgcggtactgcccgagtttgacctgcgcgtttcgcaagcccccacaggcaatgactttcgcgcactgagaggctaa

SEQ ID NO: 155477 - protein, 412 aa, Vibrio cholerae AM-19226
MLETLTLWLQKFDIEIERVIQLAEALGLIAAISIAIHLVLHRGVLLWLKRHTHHEQSVWRNALFKEHLFSRVALLIQGVVIAVQTQLWLSPNTFAYDVLHTLTSLWIVVFGMLATYSVLNVLELLISRTQVGKNLPTRGILQSIKLIVFIIAALFFTSILIGKSPVILLSGLGAMTAVFMLVFKDPILGLVAGVQLSANKMLSVGDWLEMPKYGADGSVIDISLTTVKVQNWDKTITTIPSYALISDSFKNWKGMQESGGRRIKRSILIDATSVHFLTEEEKQTLKKAQLLEPYLIEKEQEISSYNQQKHWDLACRINGRRLTNIGSFRAYLERYLRTHPNIHQDMTLMVRQLAPTHDGISLEVYCFTSTTVWVEYERIQSDIFDHIYAVLPEFDLRVSQAPTGNDFRALRG

SEQ ID NO: 155478 - DNA, 1245 bp, Klebsiella pneumoniae 342
  CDS (1)..(1245): transl_table=11
atgcaggaattaatatcgcaaattgccgccttaggaatcgaaataacccccacccgctcgctgatgattatcttcggcattatcttattcaccgccgtggtcgtgcatctgatattgcacaaagtggtcctgcgcgcgttcgaaaaacgggcgttggccagcagccatctgtggctgcaaatcatcacgcagaataaactctttcaccgactggcctttaccctgcaggggatcatcgtcaacgtgcaggcggtgctgtggctgcaaaaaggcagcgaggccgcggaaatattaaccaccgtggctcagctatgggtgatgatatatgccatgctgtccttcttctcgctgctggatgtgatcttaaagctggcgcagaaatttcccgccgcctcacagctgccgctgaagggcatattccaggggattaagctggtgacggcgattattatcggcatcctgattatttccctgctgataggccagtcaccggcgatcctgattagcgggctcggcgcgatggccgcggtgctgatgctggtgtttaaagatccgatcctcggtctggtggccggtatccagctctctgccaacgatatgctcaagcttggcgactggctggagatgccgaagtacggcgccgacggcgcggtgatcgatatcggcctcaccacggtgaaggtacgcaactgggacaacaccatcaccaccattccaacctggtcgctggtctccgactcgtttaaaaactggagcggcatgtcggcctccggcggccgccgcatcaaacgcagcctcaacatcgacaccaccagcattcattttcttgatgaacaggagcagcagcgcctgatccgggcgaagttgcttaagccctatatggattcgcgccacgaggagattagcgcctggaaccagcagtacgccggggaacagtcggttctcaatgagcggcgaatgaccaatgtcggcaccttccgcgcctatctgcaggagtatttacgccatcatccacgtatccgccaggatatgaccctgatggtgcgccagctggcgccggatgccaacgggttgcccatcgagatctactgcttcaccaacaccgtggtgtgggcggaatatgaggggatccaggcggatattttcgaccatgtcttcgccgtggtggaggagtttggcttacgcattcatcaaacgcccaccggcaatgacatccgcgcgctgaccggcgccttctcccgctga

SEQ ID NO: 155479 - protein, 414 aa, Klebsiella pneumoniae 342
MQELISQIAALGIEITPTRSLMIIFGIILFTAVVVHLILHKVVLRAFEKRALASSHLWLQIITQNKLFHRLAFTLQGIIVNVQAVLWLQKGSEAAEILTTVAQLWVMIYAMLSFFSLLDVILKLAQKFPAASQLPLKGIFQGIKLVTAIIIGILIISLLIGQSPAILISGLGAMAAVLMLVFKDPILGLVAGIQLSANDMLKLGDWLEMPKYGADGAVIDIGLTTVKVRNWDNTITTIPTWSLVSDSFKNWSGMSASGGRRIKRSLNIDTTSIHFLDEQEQQRLIRAKLLKPYMDSRHEEISAWNQQYAGEQSVLNERRMTNVGTFRAYLQEYLRHHPRIRQDMTLMVRQLAPDANGLPIEIYCFTNTVVWAEYEGIQADIFDHVFAVVEEFGLRIHQTPTGNDIRALTGAFSR

SEQ ID NO: 155480 - DNA, 1329 bp, Pseudomonas aeruginosa LESB58
  CDS (1)..(1329): transl_table=11
atggactccacatcccttctcgaccagctctccgggtactggtcggcgctcgaccaacaccctatcctgcacgccggcctggccttcggcctgctgctggtgggcgccctgatcctcggccgggtggcccgctacatcgtcctctacgccgccaacctgctcgcccgccagcccgcgctgcactggctcggcgacctgatccgcaacaaggtgttccagcgcctggcgcagaccacgccctcgctgctggtgcaattcggcctgccatggatcccggagatgccggacaaggccgcgcacttcctcggcaacctggcactggccttcaccgtgctgttcctgatcctcgccctcaccgcgctgctgaatgccctgctggacatctacgcgcgtaccgagcacgcccgcacccgctcgatcaagggctacgtgcaactggcgaagatcgccgtgttcgtgttcggcgcgatcatcatcgtctcgatcatcatcgaccgctcgccgctcctgctgctgtccggcctcggcgcgatgtcggcggtcctcctgctggtctacaaggacaccctgatgtccttcgtcgccagcgtgcagctcaccagcaacgacatgctgcgagtcggcgactggatcgagatgccgcaggtcggcgccgacggcgacgtggtggacatcaccctgtacaccgtgaaggtgcagaacttcgacaagaccatcgtctcggtgccgacctggcgcctgatgtcggagtcgttcaagaactggcgcggcatgcagcagtccggcggacggcggatcaagcgggcgatctacgtcgactccagccaggtgcgtttcctcgacgagaaggaagagcggcgcctgagccaggtgcgcctgctcaccgaatacatggcccgcaagcagaccgagttgcaggagtggaatgccgccaacggcggggtcgccccgctggccgccaaccgccgccggctgaccaacatcggtacgttccgcgcctacgtcctcgcctacctgcagaaccatccggacatccatccgcacatgacctgcatggtccgccagttgcagccgaccgcccagggcatcccgctggagatatactgcttcacccgcaccaccgcctgggtcgactacgagcgcatccagggcgacgtgttcgactacctgctggcggtgatgccggagttcggcctcggcgcctaccagcagcccagcggccaggacctgcgccaggggctgcagggcatgctcgaagggcgtgacgccgaggcccgttcgttcgaggcgttggccgcaccgagccgcagcgacgaagccactgtctga

SEQ ID NO: 155481 - protein, 442 aa, Pseudomonas aeruginosa LESB58
MDSTSLLDQLSGYWSALDQHPILHAGLAFGLLLVGALILGRVARYIVLYAANLLARQPALHWLGDLIRNKVFQRLAQTTPSLLVQFGLPWIPEMPDKAAHFLGNLALAFTVLFLILALTALLNALLDIYARTEHARTRSIKGYVQLAKIAVFVFGAIIIVSIIIDRSPLLLLSGLGAMSAVLLLVYKDTLMSFVASVQLTSNDMLRVGDWIEMPQVGADGDVVDITLYTVKVQNFDKTIVSVPTWRLMSESFKNWRGMQQSGGRRIKRAIYVDSSQVRFLDEKEERRLSQVRLLTEYMARKQTELQEWNAANGGVAPLAANRRRLTNIGTFRAYVLAYLQNHPDIHPHMTCMVRQLQPTAQGIPLEIYCFTRTTAWVDYERIQGDVFDYLLAVMPEFGLGAYQQPSGQDLRQGLQGMLEGRDAEARSFEALAAPSRSDEATV

SEQ ID NO: 155482 - DNA, 1380 bp, Diaphorobacter sp. TPSY
  CDS (1)..(1380): transl_table=11
atgggctgtactgcgcccaattctaggcgttcatcccccaatcccctgcatggccgccccgcctgggccggctgtttcctgcatttctggaaagttgtcttgcctgtgtccgtgcccccgctgattgccgatctggatccttggctgcaggccgccctgggcctgtgcggcctggtgctgctggccttcgccctccagtccgtcgcccaatacgtgctgctgaacaccgtgccgcgcctgcgcgaacgcctgggcgcgcgctgggcgcgggtgttctggcacgaccaggtgttgcggcgtctggcgcatgtggcaccgtcgctcgtcatccaggcaggcatcggcaccgtgccccatgtgcaccccgtggcggccgcagtgatcggcaacgtggccgtggcgctcaccgtgctgcagctggtgcggacgctgatcgcgctgctggacgccgtgctgcacgagcatgagcaggccccggacggcgtgcccacggccacgcgctcgatcaagagctatgtgcagttgggcaagctgctgctggcgctggtgggcaccatcgtcatcgtggcggcgctggtggaccgctcgccactgatcctgctgtccggcctgggcgccatgtcggcggtgctgatgctggtgttcaaggacaccatcctctcgttcactgccggcgtgcagctgtcgtccaacgacatgctgcgcgtgggcgactggatcgagatgccccaggtgggcgcggacggcttcgtggtggacatcgcactgcacaccgtgaaggtgcagaactgggacaagaccatcaccaccatccccacctggcggctgatgagcgagagcttcaagaactggcgcggcatgttcagctcgggcgggcggcgcatccgccgcgcgttgcggctggacacgaactcggtacgctttctcaccgaggcggagatcgagcgcctgtcgcgcatcgcgctgctgcgcccctacctggaaggcaagctgcgcgacgtgcagcagaccaacgccgccctgcaggcgcagctgggtgcgcaggcgctggagcccgccaaccagcgccgcctgaccaacatcggcaccttccgcgcctactgcgaggcctatgtgcgcgcgcacccgcgcatccaccagcagatgctgctcatcgtgcgcacgctggagcccacggccgagggggtgccgctggagctgtactgcttcacggccaccaccgcctgggtggagtacgaagccatccagggcgacatcttcgaccacctgatcgccgtgctgccggagttcggcctgcacctgttccagagccccacgggcaacgacatccgcgcgggactgcgccccggcgccccaacagccatggccgcgttgcaataa

SEQ ID NO: 155483 - protein, 459 aa, Diaphorobacter sp. TPSY
MGCTAPNSRRSSPNPLHGRPAWAGCFLHFWKVVLPVSVPPLIADLDPWLQAALGLCGLVLLAFALQSVAQYVLLNTVPRLRERLGARWARVFWHDQVLRRLAHVAPSLVIQAGIGTVPHVHPVAAAVIGNVAVALTVLQLVRTLIALLDAVLHEHEQAPDGVPTATRSIKSYVQLGKLLLALVGTIVIVAALVDRSPLILLSGLGAMSAVLMLVFKDTILSFTAGVQLSSNDMLRVGDWIEMPQVGADGFVVDIALHTVKVQNWDKTITTIPTWRLMSESFKNWRGMFSSGGRRIRRALRLDTNSVRFLTEAEIERLSRIALLRPYLEGKLRDVQQTNAALQAQLGAQALEPANQRRLTNIGTFRAYCEAYVRAHPRIHQQMLLIVRTLEPTAEGVPLELYCFTATTAWVEYEAIQGDIFDHLIAVLPEFGLHLFQSPTGNDIRAGLRPGAPTAMAALQ

SEQ ID NO: 155484 - DNA, 1218 bp, Bartonella henselae str. Houston-1
  CDS (1)..(1218): transl_table=11
atgataaaatttcttgttcaatatccatggttagagacgatttcttggctgattattcttattcttattgcacttttcattaattttttagcacgaaaatcactcattcacggagtaaaaactcttggttcttttcttcccaagaagacaactaatgatattagaaacgccattcaattcatggctaatattgtttcagcctttatgctttcaattggtgttaattttatacctacattgcccaaaacattcagcaccatcatcagcaatgttgctaacgccttaatcattttttttgttgtcctcacaatttctgctcttctcaatgtcattaataccctttacgaacaaagaccagcagcacgggtaaaaccaataaaaggttacattcaaatcgcgaaaattgcactttttactgtcgcagttgttttaatgatagccaccttgattgaccgctcacctcttattctcttctctggtcttggtgcaatggcagctgtcctcatgttgatttttcaagatacgctgctttctctcgttgcaggcatccaaatttcatctaccgatatgatacgtgtcggcgattggattgaagttcccaatctcggtgcagatggtgatgtcattgaaattgctcttcacactgtcaaagttcaaaatttcgataacacaatcacttcagtgcctatccgtaaactcgtgaccgatccatttaagaattggcgtggaatgcaagaagcaggtggacgacgcatcaaacgttctctcttcattgaccaatcaagcatccgctttcacacagaaaaagaacaaaagtatctttctcgttttaatttgttagaagattattttacacaaaaaataccagaaattacagaatggaacgctcgattagaaaaaaatcatgatgttttagccaacactcgccgtttaactaacattgggactttccgtgcttatattgttgcttacctacagaaaaatcaaagcatcgcacaaaatatgacacttatggcacgacaattacctccaacagaaaatggtttacctttggaaatctattgctttaccaacacaacagtttggttggaatatgaacaaattcaatgtgatatttttgaccacctctattccattcttcctaattttggtctaaagatttttcaaaatccaagcggctatgattttaatcatttattagaaaagaaagcaaagtaa

SEQ ID NO: 155485 - protein, 405 aa, Bartonella henselae str. Houston-1
MIKFLVQYPWLETISWLIILILIALFINFLARKSLIHGVKTLGSFLPKKTTNDIRNAIQFMANIVSAFMLSIGVNFIPTLPKTFSTIISNVANALIIFFVVLTISALLNVINTLYEQRPAARVKPIKGYIQIAKIALFTVAVVLMIATLIDRSPLILFSGLGAMAAVLMLIFQDTLLSLVAGIQISSTDMIRVGDWIEVPNLGADGDVIEIALHTVKVQNFDNTITSVPIRKLVTDPFKNWRGMQEAGGRRIKRSLFIDQSSIRFHTEKEQKYLSRFNLLEDYFTQKIPEITEWNARLEKNHDVLANTRRLTNIGTFRAYIVAYLQKNQSIAQNMTLMARQLPPTENGLPLEIYCFTNTTVWLEYEQIQCDIFDHLYSILPNFGLKIFQNPSGYDFNHLLEKKAK

SEQ ID NO: 155486 - DNA, 1275 bp, Pectobacterium atrosepticum SCRI1043
  CDS (1)..(1275): transl_table=11
atgcaacaaaacctcgagctgtggttgagagaagcagatatacaacacgctggcatcattgcattactgattgttcttggactgatattgctcatttctgccgtcattcacctgattctgcatcaggttgtgctgaaaagaatggttctgcgctcactcaataaaccaggaaagacagaaggccacgggtggaagcaggctctgacgcaacacaacttgtttaatcggctggccttcttgctacaaggggtgatcctcaatattcaagtctttgtgtggcttcccgcgcaaagtgaaacccgtgaagcgctcatcatctgctcccaagtgtggattatgatttttgcgctgctgtctctcttctcgctactcgatgtgctgctcaatgtctccgcccggaccaaagtcgcggcacagttgccgctgcgcggtatcttccagagcctgaaactgatcgccactatcgtcattagcatcatggtggtgtcattgctcatcgggaaatcaccgctgattctgattagtggtttaggtgcgatggccgccgtactgatgttggtgttcaaagatccgatcatggggctagtcgctggcatccagctttccgccaacgatatgctgacgctgggagactggctcgaaatgccgaaatacggcgctgacggtgccgtcatcgacatcgggctgacgacggtaaaagtgaaaaactgggacaataccgtcaccaccattcccacttactcactggtgtccgattccttcaaaaactggcgttcgatgtcggaatctggtggacgacgcatcaagcgcagcatcaatatcgataccaccagtgtgcatttcatgacggaagacgaacagtcgcgattgctgcgcagcaagctactgtcagcttatattcagaacaagaagagcgagttagagcagcacaattcgcaatccgattctgacctgacatcaccgctgaacggccgtcgtctgacgaatttgggtacgttccgtgcctaccttcaggtttacctgcgcacccatccagggattcataaagggatgacgctgatggtgcgacaacttgaaccaacgtctgaaggggtaccgctggaaatttacgcgtttaccaacaccaccgcctgggttgattacgaaagcatacaatctgacattttcgaccatatctttgcgatcttaccggagttcgatctccgcattcaccaagctccgaccggccacgatatgcggataatggcgcggcaaatgaccgttccgaaagcatag

SEQ ID NO: 155487 - protein, 424 aa, Pectobacterium atrosepticum SCRI1043
MQQNLELWLREADIQHAGIIALLIVLGLILLISAVIHLILHQVVLKRMVLRSLNKPGKTEGHGWKQALTQHNLFNRLAFLLQGVILNIQVFVWLPAQSETREALIICSQVWIMIFALLSLFSLLDVLLNVSARTKVAAQLPLRGIFQSLKLIATIVISIMVVSLLIGKSPLILISGLGAMAAVLMLVFKDPIMGLVAGIQLSANDMLTLGDWLEMPKYGADGAVIDIGLTTVKVKNWDNTVTTIPTYSLVSDSFKNWRSMSESGGRRIKRSINIDTTSVHFMTEDEQSRLLRSKLLSAYIQNKKSELEQHNSQSDSDLTSPLNGRRLTNLGTFRAYLQVYLRTHPGIHKGMTLMVRQLEPTSEGVPLEIYAFTNTTAWVDYESIQSDIFDHIFAILPEFDLRIHQAPTGHDMRIMARQMTVPKA

SEQ ID NO: 155488 - DNA, 1245 bp, Yersinia pseudotuberculosis IP 32953
  CDS (1)..(1245): transl_table=11
atgcaacaaagaataagccagtggctggaaagattggggatggagttctccaatgtgatgtcattgacgatggtgattgggctaatattattgatttctgtgatgatccatctggtgctacaccgtgtagttctggccgccctccagcgccgtgggcagcaatcgcaacgcatctggcaacaggccatcacaaaacacaaactgttccaacgcgtagcgctactgctgcaagggatcatcatcaatctccaggccgtactgtggttgcaaaacggcagccagacgcaggcagttatcgttaccgccgcgcaggtgtggattatggccttcgccctgctggctctattttctttacttgataccttgctagccctgctccgccagagttcagttgctcatcaattacccctgcgcggtatctgccaagggctgaaactggtggctgcgatatttatcggcatcatgatcgtttcgctgttgatgggccgatcacccctgttgctactcagcggcttaggggccatgacggcagtactgatgttggtgttcaaagacccaatccttggtctggtggccggtattcagctctctgctaacgatatgctaaaaattggcgattggctggagatgccaaaatatggggctgatggcgcagtgaccgatattggcctgactacagtaaaagtaagaaattgggataacaccgtcacgaccatcccaacttatgcgcttatttccgattccttcaagaactggcgctcaatgtcggaatccggtggccgacgtataaaacgcagcatcaatattgataccaccagcgtacattttctgtcagaacaggaacaacagcgcctcaccctcaacccgctgttacaacactacctcagtgaaaaatcgcaggaactgaaccaatataatcagcagatagccctcgacctcagttcaccactcaatggccgccgcctgactaacatcggaacgttgcgcgcctatctggtggcttatctgcgggcacatctggggatccatcagtcgatgacattaatggtgcgccaacttgccccaacacccgagggcttgccgctagaagtttatgcttttaccaacaccacgatatgggcagaatacgaaggtattcaggcagatatttttgaccacatctttgccgtggtgagtgagtttgatctgcgaatccaccaaacaccaagcggtaacgatatgcgcagtatgcttgccaaagtctaa

SEQ ID NO: 155489 - protein, 414 aa, Yersinia pseudotuberculosis IP 32953
MQQRISQWLERLGMEFSNVMSLTMVIGLILLISVMIHLVLHRVVLAALQRRGQQSQRIWQQAITKHKLFQRVALLLQGIIINLQAVLWLQNGSQTQAVIVTAAQVWIMAFALLALFSLLDTLLALLRQSSVAHQLPLRGICQGLKLVAAIFIGIMIVSLLMGRSPLLLLSGLGAMTAVLMLVFKDPILGLVAGIQLSANDMLKIGDWLEMPKYGADGAVTDIGLTTVKVRNWDNTVTTIPTYALISDSFKNWRSMSESGGRRIKRSINIDTTSVHFLSEQEQQRLTLNPLLQHYLSEKSQELNQYNQQIALDLSSPLNGRRLTNIGTLRAYLVAYLRAHLGIHQSMTLMVRQLAPTPEGLPLEVYAFTNTTIWAEYEGIQADIFDHIFAVVSEFDLRIHQTPSGNDMRSMLAKV

SEQ ID NO: 155490 - DNA, 1248 bp, Bacteroides fragilis YCH46
  CDS (1)..(1248): transl_table=11
atggaacagataaccgaaaaaataaatgacttattcgtttcctggggatttgactccagtgaagtaggtcccattatgacactggtactgattattggcattgcctttttagccgatcttatttgtcgtaacattcttttaagagtagttgccaaactagtgaaaaagaccaaagcaacctgggatgatattgtgttcgaccgtaaagttttgatttacctcagtcatcttgtcccccccatcattatttatgtgttgattcctttggcaattccgaatgtaagtgccctcgattttatccgtcgtatctgcatgatttatatcattgcggtttttctgcgttttatcagtgcatttctgtcggctgtttatcatgtatacagtgagcgagaacagtttcgtgatcgaccattgaaaggtttgttgcaaacagcacaagtgatactatttttcattggaggaattgttgttatcagtgtattgatagataaatctccgatggtattgctcaccgggcttggtgcttcggctgccatcctgatgttggtgtttaaagacagtatcatgggatttgtgtccggcattcaactttctgcaaataatatgctgaaagtaggtgactggattgctatgcccaaatacggagccgacggtacggtgattgaagtgacgctcaataccgtgaaggtgcgcaattgggacaataccatcactaccatccctccctatctgctggtcagcgattcttttcagaattggcggggtatgcaagagtccggtggacggcgtgtgaagcgttctatcaatatcgatatgaacagtgtaagattctgtacccccgaaatgttggctaaatataagaaaatccaattgttgaccgattatgtggagcagaccgagcaggtggtgaaagagtataataaagaacatcacatagacaactctatcttggtcaatgggcgacgccagaccaatctcggagtattccgtgcctatctgaccaactacttgaaaagtcttcccgatgtcaataagaacctcacttgtatggtacggtatcttcagcccaccgaacaaggtattccggtcgaactttactttttttctgctgtgaaagagtgggtaccttacgaaggaattcaggccgatgtattcgatcatctgcttgccattgttccggaatttggtttgcgcgtattccagaatcctacgggagaagattttcgggagtggaatagaagaaattaa

SEQ ID NO: 155491 - protein, 415 aa, Bacteroides fragilis YCH46
MEQITEKINDLFVSWGFDSSEVGPIMTLVLIIGIAFLADLICRNILLRVVAKLVKKTKATWDDIVFDRKVLIYLSHLVPPIIIYVLIPLAIPNVSALDFIRRICMIYIIAVFLRFISAFLSAVYHVYSEREQFRDRPLKGLLQTAQVILFFIGGIVVISVLIDKSPMVLLTGLGASAAILMLVFKDSIMGFVSGIQLSANNMLKVGDWIAMPKYGADGTVIEVTLNTVKVRNWDNTITTIPPYLLVSDSFQNWRGMQESGGRRVKRSINIDMNSVRFCTPEMLAKYKKIQLLTDYVEQTEQVVKEYNKEHHIDNSILVNGRRQTNLGVFRAYLTNYLKSLPDVNKNLTCMVRYLQPTEQGIPVELYFFSAVKEWVPYEGIQADVFDHLLAIVPEFGLRVFQNPTGEDFREWNRRN

SEQ ID NO: 155492 - DNA, 1257 bp, Aromatoleum aromaticum EbN1
  CDS (1)..(1257): transl_table=11
atgtccaacgaactcgccctggctgccgcctggctcgagcgctacccggttacctacaccgtgttcgcgatctccgcgctgctcgcaggtgcctggatcgcccactggatcacccgccacatcgtgctgcgcggcctgcggcgcctgctgcaggcgacgtcgctgaaaggtgatcccgcagttgcgcagatgttcgccgtcacgcctctgtccagcctgatcccggcgctgatcgtgttcgccggcgtggggatggtgcccgatctgtccgtggctgcggtgaccgtggtgcgcaatgtgtgcgctgcgctcatcatcctcatgctggcgagggcaatcggtagcgcgctcgaactgctcaatgcgttctacatgcgccggcccgacgcgcatcggcgcccgatcaagggttatctcgaagtcgtgaagatcgcgatctatgtgatcgcggcgatcctgatggtggctgcattggtggatcgctcgccgctgatcctgctgtccggtctcggtgcgatggcggcagtgctgatgctgatcttccaggacacgctgctgtcgctggtcgcgagcgtgcagatctcgacgaacgacatgctgcgcgtcggcgactggatcgagatgccgcaattcaatgccgacggcgacgtgatcgacatcgcgctgcacacggtgaaggtgcagaactgggacaagacgatcaccaccatcccgaccaagcgcctgatcagcgactcgttcaggaactggcgcggcatgcgcgagtcgggcggacgccgcatcaagcgcagcctgtacctcgaccagcagagcgtgcgcttcctgaccgacgaggagcgccgccgtctcgatcgcttcgccctgctcgacggctatctgccggccaaggaggcagagctcgacgcctggaatcgtgcgctcaagggcgggtcgcgcgatgttgtgaaccggcgccgggtgaccaacatcgggacgttccgcgcctatgtcgagcgttatctgcggcatcatccgggcgtccatccgggcatgacgctgatggtgcggcagctcgccccgacgtccgacggtctgccgctggaggtgtattgcttcgcgaatacgatcgcgtgggtgaattacgaggcgatccagtccgacatcttcgaccatctcctggcgatcgtgcccgagttcggcctgcgggtgttccagcatccgggcggcgccgacatgcgtgcgctcgtcgcgccctcgtaccccgtgcgcgcggcctga

SEQ ID NO: 155493 - protein, 418 aa, Aromatoleum aromaticum EbN1
MSNELALAAAWLERYPVTYTVFAISALLAGAWIAHWITRHIVLRGLRRLLQATSLKGDPAVAQMFAVTPLSSLIPALIVFAGVGMVPDLSVAAVTVVRNVCAALIILMLARAIGSALELLNAFYMRRPDAHRRPIKGYLEVVKIAIYVIAAILMVAALVDRSPLILLSGLGAMAAVLMLIFQDTLLSLVASVQISTNDMLRVGDWIEMPQFNADGDVIDIALHTVKVQNWDKTITTIPTKRLISDSFRNWRGMRESGGRRIKRSLYLDQQSVRFLTDEERRRLDRFALLDGYLPAKEAELDAWNRALKGGSRDVVNRRRVTNIGTFRAYVERYLRHHPGVHPGMTLMVRQLAPTSDGLPLEVYCFANTIAWVNYEAIQSDIFDHLLAIVPEFGLRVFQHPGGADMRALVAPSYPVRAA

SEQ ID NO: 155494 - DNA, 1248 bp, Bacteroides fragilis NCTC 9343
  CDS (1)..(1248): transl_table=11
atggaacagataaccgaaaaaataaatgacttattcgtttcctggggatttgactccagtgaagtaggtcccattatgacactggtactgattattggcattgcctttttagccgatcttatttgtcgtaacattcttttaagagtagttgccaaactagtgaaaaagaccaaagcaacctgggatgatattgtgttcgaccgtaaagttttgatttacctcagtcatcttgtccctcccatcattatttatgtgttgattcctttggctattccgaatgtaagtgccctcgattttatccgtcgtatctgcatgatttatatcattgcggtttttctgcgttttatcagtgcatttctgtcggctgtttatcatgtatacagtgagcgagaacagtttcgtgatcgaccattgaaaggtttgttgcaaacggcacaagtgatactatttttcattggaggaattgttgttatcagtgtattgatagataaatctccgatggtattgctcaccgggcttggtgcttcggctgccatcctgatgttggtgtttaaagacagtatcatgggatttgtgtccggcattcaactttctgcaaataatatgctgaaagtaggtgactggattgctatgcccaaatacggagccgacggtacggtgattgaagtgacgctcaatacggtgaaagtgcgcaattgggacaataccatcactaccatccctccctatctgctggtcagcgattcttttcagaattggcggggtatgcaagagtccggtggacggcgtgtgaagcgttctatcaatatcgatatgaacagtgtaagattctgtacctccgaaatgttggctaaatataagaaaatccaattgttgaccgattatgtggagcagaccgagcaggtggtgaaagagtataataaagaacatcacatagacaactctattttggtcaatgggcgacgtcagaccaatctcggagtattccgtgcctatctgaccaactacttgaaaagtcttcccgatgtcaataagaacctcacttgtatggtacggtatcttcagcccaccgaacaaggtattccggtcgaactttactttttttctgctgtgaaagagtgggtaccttacgaaggaattcaggccgatgtattcgatcatctgcttgccattgttccggaatttggtttgcgcgtattccagaatcctacgggagaagattttcgggagtggaatagaagaaattaa

SEQ ID NO: 155495 - protein, 415 aa, Bacteroides fragilis NCTC 9343
MEQITEKINDLFVSWGFDSSEVGPIMTLVLIIGIAFLADLICRNILLRVVAKLVKKTKATWDDIVFDRKVLIYLSHLVPPIIIYVLIPLAIPNVSALDFIRRICMIYIIAVFLRFISAFLSAVYHVYSEREQFRDRPLKGLLQTAQVILFFIGGIVVISVLIDKSPMVLLTGLGASAAILMLVFKDSIMGFVSGIQLSANNMLKVGDWIAMPKYGADGTVIEVTLNTVKVRNWDNTITTIPPYLLVSDSFQNWRGMQESGGRRVKRSINIDMNSVRFCTSEMLAKYKKIQLLTDYVEQTEQVVKEYNKEHHIDNSILVNGRRQTNLGVFRAYLTNYLKSLPDVNKNLTCMVRYLQPTEQGIPVELYFFSAVKEWVPYEGIQADVFDHLLAIVPEFGLRVFQNPTGEDFREWNRRN

SEQ ID NO: 155496 - DNA, 1248 bp, Salmonella enterica
  subsp. enterica serovar Choleraesuis str. SC-B67
  CDS (1)..(1248): transl_table=11
atgcaggaattgatatcccgggtagaagatttagcgggaattgaaatgaatcacaccacgtcgctggtggtgatatttggtattatttttctgacagcagttgtcgtgcatattattttgcactggatagtactgcgcgctttcgaaaaacgcgccatcgccagttcccgcctgtggctgcaaattattacccagaataaattattccatcgtctggcttttacgctgcaaggcatcattgtcaatattcaggccgcgctctggctacaaaaaggcagtgaggcagcggatatcctgacgacctgcgcgcagttatggattatgacctacgccctgctgtcgttattttccttgctggacgtgattttcaatctatcgcaaaaatggcccgccgcctctcagttaccgctaaaaggaatatttcagggtattaagctcatcggcgcaattatcgtcggcattctgatgatctcactgctgattggccagtcaccagcaattttaatcagcgggctgggcgcgatggccgcggtattaatgctggtctttaaagacccgattcttggcctggttgccggtatccagctttccgccaacgatatgctcaaactaggcgactggctggaaatgccgaaatatggcgcagatggcgcggtcattgatattggcttaaccacggtaaaagtacgcaactgggataataccatcaccaccattcccacctggtcgctggtttccgactcattcaaaaactggagcggcatgtctgcgtccggcggacgccggattaaacgcagcattaatattgacgcgaccagtatccattttctggatgatgatgaaaaacagcggctgttaaccgcgcaactgttaaagccgtaccttaccagccgtcatcaggaaatcgatgaatggaataaacaactggatgcgccggaatcagccttaaatcaccgccgcatgaccaatatcgggacatttcgcgcctatctgaacgaatatttacgccaccatccgcgcatccgtaaagacatgacgctgatggtacgccaactggcgcctgacgatcatggtttgccgatagagatctacgcctttaccaataccgtcgtgtggctggaatatgagagcattcaggccgatattttcgaccatatttttgccgtggtggaagagtttggcttgcgtattcatcagacgccgaccggcagcgatattcgcgcgctgtcagggacattgcgccattaa

SEQ ID NO: 155497 - protein, 415 aa, Salmonella enterica
  subsp. enterica serovar Choleraesuis str. SC-B67
MQELISRVEDLAGIEMNHTTSLVVIFGIIFLTAVVVHIILHWIVLRAFEKRAIASSRLWLQIITQNKLFHRLAFTLQGIIVNIQAALWLQKGSEAADILTTCAQLWIMTYALLSLFSLLDVIFNLSQKWPAASQLPLKGIFQGIKLIGAIIVGILMISLLIGQSPAILISGLGAMAAVLMLVFKDPILGLVAGIQLSANDMLKLGDWLEMPKYGADGAVIDIGLTTVKVRNWDNTITTIPTWSLVSDSFKNWSGMSASGGRRIKRSINIDATSIHFLDDDEKQRLLTAQLLKPYLTSRHQEIDEWNKQLDAPESALNHRRMTNIGTFRAYLNEYLRHHPRIRKDMTLMVRQLAPDDHGLPIEIYAFTNTVVWLEYESIQADIFDHIFAVVEEFGLRIHQTPTGSDIRALSGTLRH

SEQ ID NO: 155498 - DNA, 1254 bp, Colwellia psychrerythraea 34H
  CDS (1)..(1254): transl_table=11
atgaatgaactgatcagtatttggttgagtgagcaaggtatcagctcgaaatatttagccagtagcgcaactgctgtcggtattggtatgattttgttgatttctagcctaagttattatattgcgaaacatcaagtcttaggtttgatgaataagatcattattaatagtaaaaatacctgggatgatgcattgatggagcatggcgtgctcagtcgaatggctttactactaccgctagtattaatgctcttcttaacgccacttatcttagaaaccaccagtattgccagtactttactcattttattgagtaaagtgttacttacttttcaaatttcacgttgtattagcgccttacttaatgtcagtcgaagcatctataaagaaagtgccaagcaacggtttttaccgttaagcgctattattcaaatcattaaattagctttatatttagtgaccagtattatcattatttcgcttatcattgaccgctcaccggtttatctattaagtggtttaggtgctttgaccgcggtactcttgttagtttttcaagacaccattaaaggtttggttgctagtattcaaatatcagcgaatagaatggttgttgctggcgactgggttgagttacccaaatatggtgccgatggcgatgtgctagaaataggtctaagtacggtgaaaatagaaaattttgataaaaccattaccacagtacctacttacgcgctgattagtgattcctttaaaaactggcgcaatatgtatcataccggcgcacgacggattaagcgtaccattattattgatattgctagtattgatttctgtagtgctgaaaaaataaaccaactgactaatgcgtatttattacaagattaccttagtgataaaaagcaagagctggcacagagcgaacacggccacaacagcggtgagatcacccaatcgtttacttctttaaatagtcgacaactgactaacataggaacttttcgagcttatattaccaagtacttacaacaaaatagtcatattcgtaatgatcttacgtgtatggtgaggcagttaaccgccacgcaaactggcttgccattggaaatttactgttttgctaacaccactgattggcttgcttacgagacaatccaagctgatatctttgatcacctttttgccatagcaccacagtttgatttgcgtgtttttcaacatcctagtggacatgactggcaacagaattcataa

SEQ ID NO: 155499 - protein, 417 aa, Colwellia psychrerythraea 34H
MNELISIWLSEQGISSKYLASSATAVGIGMILLISSLSYYIAKHQVLGLMNKIIINSKNTWDDALMEHGVLSRMALLLPLVLMLFLTPLILETTSIASTLLILLSKVLLTFQISRCISALLNVSRSIYKESAKQRFLPLSAIIQIIKLALYLVTSIIIISLIIDRSPVYLLSGLGALTAVLLLVFQDTIKGLVASIQISANRMVVAGDWVELPKYGADGDVLEIGLSTVKIENFDKTITTVPTYALISDSFKNWRNMYHTGARRIKRTIIIDIASIDFCSAEKINQLTNAYLLQDYLSDKKQELAQSEHGHNSGEITQSFTSLNSRQLTNIGTFRAYITKYLQQNSHIRNDLTCMVRQLTATQTGLPLEIYCFANTTDWLAYETIQADIFDHLFAIAPQFDLRVFQHPSGHDWQQNS

SEQ ID NO: 155500 - DNA, 1272 bp, Pseudoalteromonas haloplanktis TAC125
  CDS (1)..(1272): transl_table=11
atgacagatataagagctgaactacgtgagtatttactggggtggtttggccaatatttacccgccaaccctcttttatggtacgacattttagtactttgctggctcgccatttttgccataattttacatttaattatcagaaactcagctaagcactttcttaaaggtcgctttagcgaaagaattgttcagcctgatgcaaaaactcccgccgatttagcatttaaacttgcaaaacatatctcttttgtaattcaaggtgcggttgtcgttattcaagctaggctttggatccccgaagggagtagctttttacatattattgaaatggttaccgaccaatggatcattctcttctctttactatcactgttttcgttgctcgatatttttcaggttatttctgataggcgcgcagtcagagcccacttcccgatacgagggttattacaaaccattaagttaattgccagtgtattaaccggtattttagctgtgtcgttattaatgaataaatcaccattaattttattaagtggtttaggtgcgttatcagccgttatgctgttggtgtttaaggatgctattttaggtttagtggcaggtattcagctctctgctaataatatgttagcggtaggtgattggctagaaatgcccaagtatggcgctgatggcgatgtaattgacattgcacttaccacggtaaaggtaagaaactgggataaaaccatcactacaatacctacgtatgcgcttatttctgattcattcaaaaactggcgcggcatgtcggaatcgggcggtcgtagaataaaacgtagtattcatttagaaatgaacagtgtgcgctttttaaatgaacaagagctcactgagcttagaaaagcaaatttactaaccaaatatatagataccacaatatcatctattagcgccgaaaacgctagcaaagatatgagttgcctacttaatggccgccgcttaactaacgtcggtacctttaggcattatttaatagaactgttaaaacaacaccctaaaatccatcaaaatatgaccctaatggtaaggcaattagagccaactaataaaggcttacctatcgagatttacacctttaccaacaccacagtgtgggcagagtacgaaggtattcaagctgatatttttgaccatatactggctattttaccggtgttttaccttaaagcacatgagtcgccaacaggtaacgatgtgcgatctttgtcgataggtaagctctaa

SEQ ID NO: 155501 - protein, 423 aa, Pseudoalteromonas haloplanktis TAC125
MTDIRAELREYLLGWFGQYLPANPLLWYDILVLCWLAIFAIILHLIIRNSAKHFLKGRFSERIVQPDAKTPADLAFKLAKHISFVIQGAVVVIQARLWIPEGSSFLHIIEMVTDQWIILFSLLSLFSLLDIFQVISDRRAVRAHFPIRGLLQTIKLIASVLTGILAVSLLMNKSPLILLSGLGALSAVMLLVFKDAILGLVAGIQLSANNMLAVGDWLEMPKYGADGDVIDIALTTVKVRNWDKTITTIPTYALISDSFKNWRGMSESGGRRIKRSIHLEMNSVRFLNEQELTELRKANLLTKYIDTTISSISAENASKDMSCLLNGRRLTNVGTFRHYLIELLKQHPKIHQNMTLMVRQLEPTNKGLPIEIYTFTNTTVWAEYEGIQADIFDHILAILPVFYLKAHESPTGNDVRSLSIGKL

SEQ ID NO: 155502 - DNA, 1314 bp, Pelodictyon luteolum DSM 273
  CDS (1)..(1314): transl_table=11
atgattccattgatgcagccactctttgattttttctcttcctacggtcttgacgccggcctctccgccctgttcgccaccctttcggccgtggccgtcgcccttcttctcatcatcgttctcgaactcggcttcaagcgggtgcttcttgaaatgataagcgcctttgcccttaggacggtgacgacgttcgacgatatcctggtccggcgcaacgtgttttcggggctggcacggcttctgccgccgattttcctgcacatcctttccgatccgctcctccagtactacccggcgtttgtgccgttcgtgaaggacgctgccgtcctctacctgacggttgctcttgtcatgctggtattttccctgcttgatgccctgcaggattttctctcaacccgtccttcagccgcacgccttcctgtgaagagcttcatgcaggtgctgaaggcgctggccctcgcagtggctctcgttgtggtggtatcgaagctgatgggcaagtctccggtggtgttcctcagcggccttggtgcattcacggccgtgctgctgctggtgttcaaggattcgattctcggcctcgtagccggcgtgcagctttcggccaacaaccttgtacgggtcggcgactggatcgaaatgccccagtacggggcagacggtgatgttatcgatatttcgcttgtgacggtgtcggtgcagaactgggacaagaccatcagtaccattccggcctattcactgatttcccagggcttcaagaactggcgcgggatgagtgagggtgggggtcggcgcatcaagcgctcggtgcacatcgacatgaacagcgtccgtttctgcgacgaagcgctgctcatgcaactcagggaagtgcgcctgctgaaaggctaccttgaggaaaaggaacgggagctcagcgagtggaacagcaggttccaggacggcaccgcctctccggtcaacgcccgccggctcaccaacctgggtacgttccgtgcctatcttgcagcctacctcaggagccatcccaatatcaacacatccatgaccctcatcatacgccagctgcagccgaccgccgggggcattccgatcgagatttacgtattctgccgggaaaaggagtgggcggtgtatgaaggggtgcaggccgacatcttcgaccatgtgctggcagtgcttccatggtttgagctgcgggtcttccagaatcccggcgggtacgacatcgagcgcgcggggagccgtcttgccggggccctcagtccggaaagtcgtggggagggggcggcttcaggctctctttga

SEQ ID NO: 155503 - protein, 437 aa, Pelodictyon luteolum DSM 273
MIPLMQPLFDFFSSYGLDAGLSALFATLSAVAVALLLIIVLELGFKRVLLEMISAFALRTVTTFDDILVRRNVFSGLARLLPPIFLHILSDPLLQYYPAFVPFVKDAAVLYLTVALVMLVFSLLDALQDFLSTRPSAARLPVKSFMQVLKALALAVALVVVVSKLMGKSPVVFLSGLGAFTAVLLLVFKDSILGLVAGVQLSANNLVRVGDWIEMPQYGADGDVIDISLVTVSVQNWDKTISTIPAYSLISQGFKNWRGMSEGGGRRIKRSVHIDMNSVRFCDEALLMQLREVRLLKGYLEEKERELSEWNSRFQDGTASPVNARRLTNLGTFRAYLAAYLRSHPNINTSMTLIIRQLQPTAGGIPIEIYVFCREKEWAVYEGVQADIFDHVLAVLPWFELRVFQNPGGYDIERAGSRLAGALSPESRGEGAASGSL

SEQ ID NO: 155504 - DNA, 1188 bp, Sulfurimonas denitrificans DSM 1251
  CDS (1)..(1188): transl_table=11
atgcaaaatctaatcaatattctctccattgaaaccatttttgaactctttatattggcggtagtaaccctttttatctcaatactgctctactatctatcaaaaaaatatctcctaagagtcatacacaaatttatccataaaacaaaaaatagctgggatgatatcttcttaaagattggtttttttgaagagctcataaagattatcccacctcttataattctattttcactaaagttttatcctcaaaacataagtagcgccatctccaatatagtagaattttggatagcaatagtcgcaataaagatagtagataaatttttatcaggaatcttagaaatttacagcgcctatgatatatctaaagataagcccataaaaggttatatccaactaatcaaaatggttgtatatattctaggcactattgttgcgatatgtatattatttggcatatctctgtggggcgttttaagcggagtaggggcgtttacagcagttcttatgtttatatttaaagatactattctctctcttgttgcaagtgttcaaatcacagcaaacgatttatttaaagtaggtgactggatagaagctccaaattttggtgctgatggagaggttatagatatcgcactccactcggtaaaagttcaaaactgggataaaacaatcgttactatccccacatataagtttatggaaaactcttttaaaaactggagaggaatgtcacaaagtggaggaaggcgcataaagcgctctctttttatagatgccaactccataaaattttgtacaccagagcttttagaaaaactctctgagatagagattttaaaagattacctccatgaaaaaacaaaagtagtcgatacaacccataaagttacactaaatgagagaaaactgacaaatataggaacatttagagagtatgtaaagagatatttgataaacaacccaaacatcgataacaaaaatttcacctttcttgtaagacagctacagccaacttcaaaaggaatcccactcgaagtatatgcttttagcaacaaaaataagtgggcagagtatgaagatatccagtccgatattttcgaccatcttctagtggcgcttagggagtttgagttaaagttatatcaagagccctcaggagagattggcactctaaaatag

SEQ ID NO: 155505 - protein, 395 aa, Sulfurimonas denitrificans DSM 1251
MQNLINILSIETIFELFILAVVTLFISILLYYLSKKYLLRVIHKFIHKTKNSWDDIFLKIGFFEELIKIIPPLIILFSLKFYPQNISSAISNIVEFWIAIVAIKIVDKFLSGILEIYSAYDISKDKPIKGYIQLIKMVVYILGTIVAICILFGISLWGVLSGVGAFTAVLMFIFKDTILSLVASVQITANDLFKVGDWIEAPNFGADGEVIDIALHSVKVQNWDKTIVTIPTYKFMENSFKNWRGMSQSGGRRIKRSLFIDANSIKFCTPELLEKLSEIEILKDYLHEKTKVVDTTHKVTLNERKLTNIGTFREYVKRYLINNPNIDNKNFTFLVRQLQPTSKGIPLEVYAFSNKNKWAEYEDIQSDIFDHLLVALREFELKLYQEPSGEIGTLK

SEQ ID NO: 155506 - DNA, 1248 bp, Shigella dysenteriae Sd197
  CDS (1)..(1248): transl_table=11
atgcaggatttaatatcccaggttgaagatttagcgggtattgagatcgatcacaccacctcgatggtgatgattttcggtattatttttctgaccgccgtcgtggtgcatattattttgcattgggtggtactgcggaccttcgaaaaacgtgccatcgccagttcacggctttggttgcaaatcattacccagaataaactcttccaccgtttagcttttaccctgcaggggattatcgtcaatattcaggcggtattctggctgcaaaaaggcaccgaagcggcagatattctgactacctgcgcgcagttgtggatcatgatgtatgcgctgctttcagtcttctcgttgctggatgttattttgaatctggcgcagaaattcccggcagcatcccagctaccgctgaaagggatatttcaggggattaaactgatcggcgcgattctggtcggcattttgatgatctcgctgctgattggtcagtcgccagcgattctgatcagcggtcttggtgcaatggctgccgtgctgatgttggtatttaaagatccgattcttggtctggtggcaggtattcagctttccgcgaacgatatgctgaaactgggcgattggctggagatgccgaaatacggcgcggatggcgcggtgatcgatattgggttaaccaccgtcaaagtgcgtaactgggacaataccattaccactattcccacctggtctctggtttctgactcctttaaaaactggagcgggatgtcagcatctggcgggcgacgtattaagcgcagtatcagtattgatgtcaccagtattcgttttcttgatgaagacgaaatgcaacgtctgaataaagcgcatttgttaaagccttatttaaccagccgccatcaggaaattaatgagtggaatcgccagcaaggttctacggagtcggtattaaaccagcgccgaatgaccaatattggaacctttcgtgcctatctgaacgaatatctgcgtaaccatccgcggattcgtaaagatatgaccttaatggtacgccaactggctccaggtgataacggtttaccgctcgagatctatgcgtttaccaacaccgtggtgtggctggaatatgaaagcattcaggctgatatattcgatcacatatttgcgattgtcgaagagtttggtctgcgacttcatcagtcgccaaccggcaatgatattcgctctctggcgggtgcatttaagcagtaa

SEQ ID NO: 155507 - protein, 415 aa, Shigella dysenteriae Sd197
MQDLISQVEDLAGIEIDHTTSMVMIFGIIFLTAVVVHIILHWVVLRTFEKRAIASSRLWLQIITQNKLFHRLAFTLQGIIVNIQAVFWLQKGTEAADILTTCAQLWIMMYALLSVFSLLDVILNLAQKFPAASQLPLKGIFQGIKLIGAILVGILMISLLIGQSPAILISGLGAMAAVLMLVFKDPILGLVAGIQLSANDMLKLGDWLEMPKYGADGAVIDIGLTTVKVRNWDNTITTIPTWSLVSDSFKNWSGMSASGGRRIKRSISIDVTSIRFLDEDEMQRLNKAHLLKPYLTSRHQEINEWNRQQGSTESVLNQRRMTNIGTFRAYLNEYLRNHPRIRKDMTLMVRQLAPGDNGLPLEIYAFTNTVVWLEYESIQADIFDHIFAIVEEFGLRLHQSPTGNDIRSLAGAFKQ

SEQ ID NO: 155508 - DNA, 1248 bp, Shigella boydii Sb227
  CDS (1)..(1248): transl_table=11
atgcaggatttaatatcccaggttggggatttagcgggtattgagatcgatcacaccacctcgatggtgatgattttcggtattatttttctgaccgccgtcgtggtgcatattattttgcattgggtggtactgcggaccttcgaaaaacgtgccatcgccagttcacggctttggttgcaaatcattacccagaataaactcttccaccgtttagcttttaccctgcaggggattatcgtcaatattcaggcggtattctggctgcaaaaaggcaccgaagcggcagatattctgactacctgcgcgcagttgtggatcatgatgtatgcgctgctttcagtcttctcgttgctggatgttattttgaatctggcgcagaaattcccggcggcatctcagttaccgctgaaagggatatttcaggggattaaactgatcggcgcaatcctggtcggcattttgatgatctcgctgctgattggtcagtcgccagcgattctgatcagcggtcttggtgcaatggctgccgtgctgatgttggtatttaaagatccgattcttggtctggtggcaggtattcagctttccgcgaacgatatgctgaaactgggcgactggctggagatgccgaaatacggcgcggatggcacggtgatcgatattgggttaaccaccgtcaaagtgcgtaactgggacaataccattaccactattcccacctggtctctggtttctgactcctttaaaaactggagcgggatgtcagcatctggcgggcgacgtattaagcgcagtatcagtattgatgtcaccagtattcgttttcttgatgaagacgaaatgcaacgtctgaataaagcgcacttgttaaaaccttatttaaccagccgccatcaggaaattaatgagtggaatcgccagcaaggttctacggagtcgatattaaacctgcgccgaatgaccaatattggaacctttcgtgcctatctgaacgaatatctgcgtaaccatccgcggattcgtaaagatatgaccttaatggtacgccaactggctccaggtgataacggtttaccgctcgagatctacgcgtttaccaacaccgtggtgtggctggaatatgaaagcattcaggctgatatattcgatcacatatttgcgattgtcgaagagtttggtctgcgacttcatcagtcgccagccggcaatgatattcgctctctggcgggtgcatttaagcagtaa

SEQ ID NO: 155509 - protein, 415 aa, Shigella boydii Sb227
MQDLISQVGDLAGIEIDHTTSMVMIFGIIFLTAVVVHIILHWVVLRTFEKRAIASSRLWLQIITQNKLFHRLAFTLQGIIVNIQAVFWLQKGTEAADILTTCAQLWIMMYALLSVFSLLDVILNLAQKFPAASQLPLKGIFQGIKLIGAILVGILMISLLIGQSPAILISGLGAMAAVLMLVFKDPILGLVAGIQLSANDMLKLGDWLEMPKYGADGTVIDIGLTTVKVRNWDNTITTIPTWSLVSDSFKNWSGMSASGGRRIKRSISIDVTSIRFLDEDEMQRLNKAHLLKPYLTSRHQEINEWNRQQGSTESILNLRRMTNIGTFRAYLNEYLRNHPRIRKDMTLMVRQLAPGDNGLPLEIYAFTNTVVWLEYESIQADIFDHIFAIVEEFGLRLHQSPAGNDIRSLAGAFKQ

SEQ ID NO: 155510 - DNA, 1251 bp, Methylobacillus flagellatus KT
  CDS (1)..(1251): transl_table=11
atgacagaagattggaataattttatagggtggctgcaaggccatcaggaagtgtacagcctgatgtgcgttgtgctgttgatcgcaggcgcctgggttgcgaactggatcgtcaaacatatcctggtgcgcggtttgcacaaggtgttacgttctgccaatgttggacaggctattgcaagaagccgcgtggtcgctaggctctcgaatatcgtccctgccttgatcatttcggtgggcatcgcctggattcctgggctgccggaagcgctggtgacggtagtgcgcaatgtggcgcatggtttcattgtactgacgataggcctggcaattgctggcatgctggatattgtgaatgatgtctggcaacagcggccagacgcccaccgcaagccgatcaaggggtatgtgcaggtggtgaagctggtgatctatatcattgcagccatcttggtggtcgcgacgctgatggatcgttcccccgtgattctgttatccggtatcggcgccatggcagcggtgctcatgctgattttccaggataccctcttgtcgctggtggccagcgtgcagattacttccaatgacattatccgcgtgggtgactgggtggagatgccgcagctcaatgcggatggggatgtgatcgatattgcgctgcatacggtcaaggtgcagaactgggataagaccatcacgacaattcccaccaagcgctttatcaccgattcgttcaagaactggcgtggcatgttcgagtccggggggcgccgcatcaagcgcagtattttcatcgatcagaacagtattcatttcctgaccaatgaagaattggcgcatttgcgccaattcagtctgctggatgattatttgaaaaagaagcaggatgagctggatgagtggaacagggcgttgggagagaagggcaagcagccgatcaatacgcgccgcgtgaccaatatcggcacattccgtgcctatgtcgaacaatatttgaaaaaccacccgcgtgtaaaccagaacatgaccatggtcgtacgccagcagaacttgtcagccgagggcatcccgctggaaatatggtgttttaccaatacgacggtatgggtgcagtacgaggctatccaggctgatatcttcgaccatttgttggcgatcctgccggagtttggcttgcgtgtattccagaatccgagcggagcggatttccaggctttgcgtccatcacccgctcgatccggagacagttga

SEQ ID NO: 155511 - protein, 416 aa, Methylobacillus flagellatus KT
MTEDWNNFIGWLQGHQEVYSLMCVVLLIAGAWVANWIVKHILVRGLHKVLRSANVGQAIARSRVVARLSNIVPALIISVGIAWIPGLPEALVTVVRNVAHGFIVLTIGLAIAGMLDIVNDVWQQRPDAHRKPIKGYVQVVKLVIYIIAAILVVATLMDRSPVILLSGIGAMAAVLMLIFQDTLLSLVASVQITSNDIIRVGDWVEMPQLNADGDVIDIALHTVKVQNWDKTITTIPTKRFITDSFKNWRGMFESGGRRIKRSIFIDQNSIHFLTNEELAHLRQFSLLDDYLKKKQDELDEWNRALGEKGKQPINTRRVTNIGTFRAYVEQYLKNHPRVNQNMTMVVRQQNLSAEGIPLEIWCFTNTTVWVQYEAIQADIFDHLLAILPEFGLRVFQNPSGADFQALRPSPARSGDS

SEQ ID NO: 155512 - DNA, 1281 bp, Shewanella denitrificans OS217
  CDS (1)..(1281): transl_table=11
atggatcaagatttacgaatgcaaatagtgtcatggttacaagagattggcatcaatagtcagcctacagacggattagcgacgtctttgctgctttcattgtgctttttggcggctatgctggcgtactttatcgtgaagcgggtggttatcgaaggcgtcaacatcatcatactgagatccaaagcaacctgggatgatgtatttgttcgctttagggtgttggaaaaactggctattttagtgcctgcagtcgtgctaaacttgtttattcctgtcgccataaaagagcaagcggtattggcgcacctcttcgatagaatactcagtatggtgctcgccattttaattattcgggctatctatgcagccctggatgccatcaatgaaattgccgatatcaatttagttaatcggcgcttaccgataaagagctttgttcagctcactaaattattcttgtttttcattggcttgattatttgtatctctatccttgcggaccagagcccggtgtatttcttaagtggcttaggtgtagcaaccggttttgtgatgttggtgtttcgcgacactattctgggctttgtcgcggggattcagctcgcagcaaaccgcatggtgagcaaaggtgattggatccagatggacaaatacggcgccgatggtgccgtcgaggaagtgtcattaaataccgttaaagtgcgcaattgggataacaccatcacaatgatcccagcttatgctctagtgtctgatgccttcaaaaactggcgcggtatgtctgaatccggtggcagacggatcaagcgttcggtcaatattgatgtcaacagcattaagtttttaaccgatgatgaaagaattcgcctcggtaaagtgaatcatcttaaagagtatttgcctaagatattttcagagatttccgaagccaacgccagcgtgagtgatatcgatatgccggtgaatggccgcaggcttaccaatgtaggcaccttcagggcctacttgcagcaatatttgaaccatcatgagcgagttcataaagacatgaccttgatggtgcgccagcttgcacccaccacagagggtctacccatagagctgtatatcttcaccaatgatgtgcgctggacccattatgaagcgattcaggccgacatattcgaccatgtgttcgccatattgcctgagtttggcctgcgggcgttccaaaaccccacagggaatgacattcgcagccttaaaagtgtgagccttggccttgatggcgggaaataa

SEQ ID NO: 155513 - protein, 426 aa, Shewanella denitrificans OS217
MDQDLRMQIVSWLQEIGINSQPTDGLATSLLLSLCFLAAMLAYFIVKRVVIEGVNIIILRSKATWDDVFVRFRVLEKLAILVPAVVLNLFIPVAIKEQAVLAHLFDRILSMVLAILIIRAIYAALDAINEIADINLVNRRLPIKSFVQLTKLFLFFIGLIICISILADQSPVYFLSGLGVATGFVMLVFRDTILGFVAGIQLAANRMVSKGDWIQMDKYGADGAVEEVSLNTVKVRNWDNTITMIPAYALVSDAFKNWRGMSESGGRRIKRSVNIDVNSIKFLTDDERIRLGKVNHLKEYLPKIFSEISEANASVSDIDMPVNGRRLTNVGTFRAYLQQYLNHHERVHKDMTLMVRQLAPTTEGLPIELYIFTNDVRWTHYEAIQADIFDHVFAILPEFGLRAFQNPTGNDIRSLKSVSLGLDGGK

SEQ ID NO: 155514 - DNA, 1344 bp, Ralstonia metallidurans CH34
  CDS (1)..(1344): transl_table=11
atgactttcgacgccctgcttgaactgttcgagcaacgcatcccggcccacccgtgggcacagatcaccttgtacgtcctggcgctggtcctgctggccggcatcgcgcaatggctcgtggcgcgcgtggtcggccgggtggtctatcgcgtattgagtctttccggccacggcaactgggccggggcgctgctgcaccaccggacctatcgccggctgggctacgcggtattcctggccgtggtcacggtcggcatcagccaggtgccgaacctgggtaagttctcggcggccatcgagcggctggctcatgccggcacctggatcagcgtgttcctgatgctgtctggcgtgctcgatgcgtggcagaccgtgttttccggcagccgcagcgcgcagacgcattcgatcaagggctacatccaggtggcccagctcgcgctgtggctggtctgcggtgtgctggtgctgtcgatcctgatcgaccgctcgccgctctggatgctgtccggtatcggcgcgctatctgcggtgctgctgctcgtgttcaaggacacgctgctgtccctggtggccagcacgcagctcacctcgaacgacatgctgcgcattggcgactggatcgaaatgccccagtccaatgccgatggtttcgtcatggacgtggcgctgcatacggtcaaggtcaagaattgggacaacaccgtgacgacggtgccaacctacaagctgttctcggagagctaccgcaactaccggcacatgttcgagtccggcgcgcgccgcatcaaacggacgctccggatcgatgccaccagcgtgcggttcctggacgaggaggaggtcagggcgctgatgcggttcaagctgctgcatgactatctcgaggtcaagcaggaggaggtcgatcgggccaaccgggagatcctgcgtgccgacacagacccggtcaaccgccgtcggctgaccaacctgggcacgttccgcgcctatggcatcgccttcctgcgcgcgcatccggaaattcatcacgatctgctgctgaacctgcggatgatggaatccgactcgcagggcattccgatcgagatttactgctttaccacgctcacgaactggacggactacgaacgtatccagggcgatatcttcgaccacctgttcgcgattctgccggagctgggtttgcgggtgtatcaggcgccgtcaggcgcggacctgagcgggctgcgcagcggtgcgacgatggccgaccagcacgccgcactggccgtggccgccgcggactcggggatgcgccagccgccatcggccccgacggatcgggccgacagggtggcttag

SEQ ID NO: 155515 - protein, 447 aa, Ralstonia metallidurans CH34
MTFDALLELFEQRIPAHPWAQITLYVLALVLLAGIAQWLVARVVGRVVYRVLSLSGHGNWAGALLHHRTYRRLGYAVFLAVVTVGISQVPNLGKFSAAIERLAHAGTWISVFLMLSGVLDAWQTVFSGSRSAQTHSIKGYIQVAQLALWLVCGVLVLSILIDRSPLWMLSGIGALSAVLLLVFKDTLLSLVASTQLTSNDMLRIGDWIEMPQSNADGFVMDVALHTVKVKNWDNTVTTVPTYKLFSESYRNYRHMFESGARRIKRTLRIDATSVRFLDEEEVRALMRFKLLHDYLEVKQEEVDRANREILRADTDPVNRRRLTNLGTFRAYGIAFLRAHPEIHHDLLLNLRMMESDSQGIPIEIYCFTTLTNWTDYERIQGDIFDHLFAILPELGLRVYQAPSGADLSGLRSGATMADQHAALAVAAADSGMRQPPSAPTDRADRVA

SEQ ID NO: 155516 - DNA, 1293 bp, Pseudomonas entomophila L48
  CDS (1)..(1293): transl_table=11
atggacatccaacgcatctggcacgacaccctcgacctctgggggaccctcgaccaacatccactgctgcatgccgcgctcgggctgggcgtgctgctgctcgtctcgctgctggttggccgcctggcccgcttcctggtcctgcatgccagccgcctgctggcccgccagcccgcgctgcggtggctcgacgacctgcgccagaacaaggtgttccaccgcctggcccagaccaccccctcgctggtgatccagttcggcctgaagctggtgccggagctctccgacaccgcccagcacttcctcggcaacttcgccctggccttcaccctgctgttcatgaccatggccctgtcgtgcctgctcgatgccctgctggacatctatgcccgcaccgagcatgcccgcacccgctcgatcaagggctacgtgcaactggccaagatgatgctgtggatcttcgccgccatcgtgatcgtcgccacgctcatcgaccgctcgccgctgttgctgctgtcgggcctgggcgccatgtcggcggtactgctgctggtgtacaaagacacattgctgtcgttcgtcgccagcgtgcagctcaccagcaacgacatgctgcacgtgggcgactggatcgagatgccccaggtcggcgccgacggcgatgtggtggatatcaccctgcacacggtcaaggtgcagaacttcgacaagaccatcgtctccatccccacctggcgcctgatgagcgagtcgttccgcaactaccgggggatgcagcagtcgggcggtcgacgcatcaagcgcagcctgttcatcgatgccgccggggtgcgcttcctcacgccggaagaagagcagcgcctgggccaggtgcgcctgctcggcgactacctggcgcaaaagcgccaggagctgcacagctggaacgaggcccttggcccggtggcggagctggccgccaaccggcgcaagctgaccaacatcggcaccttccgcgccttcgccctggcctacctgaaaaaccaccccaatgtgcacgccggcatgacctgcatggtccggcagatgcagaccaccgccgaaggcgtgccgctggagatctactgcttcaccaccaccacggcctgggccgagtacgagcgtatccagggcgatatcttcgactacctgctggcggtgctgccggaatttgggctgagcctgtatcagcaaccgagtggcaacgacatgcgcgtcggtttggctggccggtctcaacgtgagcaggaacctcgcgccttcagcaacgcctga

SEQ ID NO: 155517 - protein, 430 aa, Pseudomonas entomophila L48
MDIQRIWHDTLDLWGTLDQHPLLHAALGLGVLLLVSLLVGRLARFLVLHASRLLARQPALRWLDDLRQNKVFHRLAQTTPSLVIQFGLKLVPELSDTAQHFLGNFALAFTLLFMTMALSCLLDALLDIYARTEHARTRSIKGYVQLAKMMLWIFAAIVIVATLIDRSPLLLLSGLGAMSAVLLLVYKDTLLSFVASVQLTSNDMLHVGDWIEMPQVGADGDVVDITLHTVKVQNFDKTIVSIPTWRLMSESFRNYRGMQQSGGRRIKRSLFIDAAGVRFLTPEEEQRLGQVRLLGDYLAQKRQELHSWNEALGPVAELAANRRKLTNIGTFRAFALAYLKNHPNVHAGMTCMVRQMQTTAEGVPLEIYCFTTTTAWAEYERIQGDIFDYLLAVLPEFGLSLYQQPSGNDMRVGLAGRSQREQEPRAFSNA

SEQ ID NO: 155518 - DNA, 1272 bp, Myxococcus xanthus DK 1622
  CDS (1)..(1272): transl_table=11
atgacgatcctgccgtggctgagcgcgcttcaacgccagctggagccctggccgatggcctggccggtcactgtgctggcggcgctgctgggggtggcctggctggccaacttcgtcaccaagaagatcctgctgcgcggcctgcaccatgtgatcgagcggctgtccggccccgagcacgacacccggctggccttgcgcgcggtggagcgcctgtccaacgtggtgccgtcggtggtgatcgcctccgggctgtcgctggtgccgggtctgccggcagcgctggtggtcctgctccagggcgcctgccacgtgtggacagtggccacgctcgcgctggccgccagccatgccttcgacgcttccaacgcgttctacgaacgccgcccggatgcgcggaacaagccgatcaagggctacctgcaggtggccaagatcatcgtcttcgtactggccggcctgtccatcgtggccaccctggccggcgtgaagctgctgcatgtgctcaccggtctgggcgcggccacggcggtgctgatgctgatcttccaggacacgctcctgtcgctggtggccagcgtgcagatcagcggcgatggtcgcgtgcgcatcggtgactggatcgagatgcccagccagaacgccgacggtgatgtgatcgatattgccctgcacacggtgacggtgcagaactgggacaagaccatcaccaccatcccgaccaagaagttgatcagcgactcgttcaagaactggcgcggcatgcggcagagcggtggccgccggatcaagcgctcgatctacctggatcagcacagcgtgcgcttcctggatgatgcgttgcagccacgcatctaccagttcgcattgctcgatgattacctggccagcaagcgcgaggagctggggcagtggaatgcccaagtggccgccgtgcatcccgagcccgtcaatgcccgccggctgaccaacctgggcacgttccgcgcctatgtggagcgctacctgcgcacccacccgcgcatcaaccagaacatgaccctactggtgcgtcagatggcaccgaccgagcacggcctgcccctggagatctactgtttcaccgcctccacggcctgggccgagtacgaggcgacccagtcggacatcttcgaccacctgctggcgatcctgcccgagttcggtctgcgcgtgttccagcagtcctccgatgcgatgttcatgggcctgcagcgcgcccaggactgtgccacgccggtggtgcgcggctga

SEQ ID NO: 155519 - protein, 423 aa, Myxococcus xanthus DK 1622
MTILPWLSALQRQLEPWPMAWPVTVLAALLGVAWLANFVTKKILLRGLHHVIERLSGPEHDTRLALRAVERLSNVVPSVVIASGLSLVPGLPAALVVLLQGACHVWTVATLALAASHAFDASNAFYERRPDARNKPIKGYLQVAKIIVFVLAGLSIVATLAGVKLLHVLTGLGAATAVLMLIFQDTLLSLVASVQISGDGRVRIGDWIEMPSQNADGDVIDIALHTVTVQNWDKTITTIPTKKLISDSFKNWRGMRQSGGRRIKRSIYLDQHSVRFLDDALQPRIYQFALLDDYLASKREELGQWNAQVAAVHPEPVNARRLTNLGTFRAYVERYLRTHPRINQNMTLLVRQMAPTEHGLPLEIYCFTASTAWAEYEATQSDIFDHLLAILPEFGLRVFQQSSDAMFMGLQRAQDCATPVVRG

SEQ ID NO: 155520 - DNA, 1245 bp, Yersinia pestis Antiqua
  CDS (1)..(1245): transl_table=11
atgcaacaaagaataagccagtggctggaaagattggggatggagttctccgatgtgatgtcattgacgatggtgattgggctaatattattgatttctgtgatgatccatctggtgctacaccgtgtagttctggccgccctccagcgccgtgggcagcaatcgcaacgcatctggcaacaggccatcacaaaacacaaactgttccaacgcgtagcgctactgctgcaagggatcatcatcaatctccaggccgtactgtggttgcaaaacggcagccagacgcaggcagttatcgttaccgccgcgcaggtgtggattatggccttcgctctgctggctctattttctttacttgataccttgctagccctgctccgccagagttcagttgctcatcaattacccctgcgcggtatctgccaagggctgaaactggtggctgcgatatttatcggcatcatgatcgtttcgctgttgatgggccgatcacccctgttgctactcagcggcttaggggccatgacggcagtattgatgttggtgttcaaagacccaatccttggtctggtggccggtattcagctctctgctaacgatatgctaaaaattggcgattggctggaaatgccaaaatacggggctgatggcgcagtgaccgatattggcctgactacagtaaaagtaagaaattgggataacaccgtcacgaccatcccaacttatgcgcttatttccgattccttcaagaactggcgctcaatgtcggaatccggtggccgacgtataaaacgcagcatcaatattgataccaccagcgtacattttctgtcagaacaggaacaacagcgcctcaccctcaacccgctgttacaacactacctcagtgaaaaatcgcaggaactgaaccaatataatcagcagatagccctcgacctcagttcaccactcaatggccgccgcctgactaacattggaacgttgcgcgcctatctggtggcttatctgcgggcacatctggggatccatcagtcgatgacattaatggtgcgccaacttgccccaacacccgagggcttgccgctagaagtttatgcttttaccaacaccacgatatgggcagaatacgaaggtattcaggcagatatttttgaccacatctttgccgtggtgagtgagtttgatctgcgaatccaccaaacaccaagcggtaacgatatgcgcagtatgcttgccaaagtctaa

SEQ ID NO: 155521 - protein, 414 aa, Yersinia pestis Antiqua
MQQRISQWLERLGMEFSDVMSLTMVIGLILLISVMIHLVLHRVVLAALQRRGQQSQRIWQQAITKHKLFQRVALLLQGIIINLQAVLWLQNGSQTQAVIVTAAQVWIMAFALLALFSLLDTLLALLRQSSVAHQLPLRGICQGLKLVAAIFIGIMIVSLLMGRSPLLLLSGLGAMTAVLMLVFKDPILGLVAGIQLSANDMLKIGDWLEMPKYGADGAVTDIGLTTVKVRNWDNTVTTIPTYALISDSFKNWRSMSESGGRRIKRSINIDTTSVHFLSEQEQQRLTLNPLLQHYLSEKSQELNQYNQQIALDLSSPLNGRRLTNIGTLRAYLVAYLRAHLGIHQSMTLMVRQLAPTPEGLPLEVYAFTNTTIWAEYEGIQADIFDHIFAVVSEFDLRIHQTPSGNDMRSMLAKV

SEQ ID NO: 155522 - DNA, 1269 bp, Shewanella frigidimarina NCIMB 400
  CDS (1)..(1269): transl_table=11
atgaatacagaagtgcggattgaaattgcggcttggttaacccgtttgggtattaatagccaaccatcggatggtgtcgcgacatcgatattaattttggcttgtgtgattgtggcaggtttaagttattacattacccatcgatttgtagttcacggtgtgaatgcagtgatccgccggtcttcggtcacttgggacgatattttcatgcgctttaatgtgtttgaacgtctcgctattttgatccccattttaatcctcgatttattgatccctattgtgctcaccgagcatgagttgatcagcgcttttattgatcgtttccttagcgcgttgttagtgttttttattattcgagctgtgtatagcgggttaaatgcgattgatgaaattgctgatattaatcatgttaatcgccgtttaccggtaaaaagttttgttcagttgactaagttattcctattttttattgggttaattgttgtttttgccattctagccgaccagtcgcctatttatttctttagtggtttaggtgttgctaccggtttggtcatgttggtgtttcgagacaccattttgggcttcgttgctgggattcagcttgctgctaaccgcatggtgagtaaaggcgattggatccaaatggataaatacgctgcagatggcgcagttgaagatgtaacgttgaccacagttaaagtacgaaactgggacaataccatcaccatgatcccagcttatgcattggtgtcagatgcatttaagaactggcgcggcatgtccgagtcgggtggtcgacggattaagcgatcaatcaatatcgacgtaaatagcattcagtttttgaccgatgacgaacgtatccgcttaggcaaagtcaattatttgaaagagtatttaccacaagtgttcagtgaaatcagtgttgccaatgccaacgtgagcgatattgatatgaaggtgaatggccgccgcttaactaatatcggaacattcagagcatacttacaagagtatttacgtcgtcatgacaaagtacataaagacatgaccttaatggtaaggcagctagcaccaaccactgaaggtttgccgatagagctgtatatttttaccaatgacattcgctggacctactatgaagcaattcaggcagacatttttgaccacatttttgccgtgctacctgagtttggtttgcgtgcattccaaaacccgacaggtacagaccttcgcagtataaagcaatggaccgaacagcattga

SEQ ID NO: 155523 - protein, 422 aa, Shewanella frigidimarina NCIMB 400
MNTEVRIEIAAWLTRLGINSQPSDGVATSILILACVIVAGLSYYITHRFVVHGVNAVIRRSSVTWDDIFMRFNVFERLAILIPILILDLLIPIVLTEHELISAFIDRFLSALLVFFIIRAVYSGLNAIDEIADINHVNRRLPVKSFVQLTKLFLFFIGLIVVFAILADQSPIYFFSGLGVATGLVMLVFRDTILGFVAGIQLAANRMVSKGDWIQMDKYAADGAVEDVTLTTVKVRNWDNTITMIPAYALVSDAFKNWRGMSESGGRRIKRSINIDVNSIQFLTDDERIRLGKVNYLKEYLPQVFSEISVANANVSDIDMKVNGRRLTNIGTFRAYLQEYLRRHDKVHKDMTLMVRQLAPTTEGLPIELYIFTNDIRWTYYEAIQADIFDHIFAVLPEFGLRAFQNPTGTDLRSIKQWTEQH

SEQ ID NO: 155524 - DNA, 1329 bp, Pseudomonas aeruginosa UCBPP-PA14
  CDS (1)..(1329): transl_table=11
atggactccacatcccttctcgaccagctctccgggtactggtcggcgctcgaccaacaccctatcctgcacgccggcctggccttcggcctgctgctggtgggcgccctgattctcggccgggtggcccgctacatcgtcctctacgccgccaacctgctcgcccgccagcccgcgctgcactggctcggcgacctgatccgcaacaaggtgttccagcgcctggcacagaccacgccctcgctgctggtgcaattcggcctgccatggatcccggagatgccggacaaggccgcgcacttcctcggcaacctggcactggccttcaccgtgctgttcctgatcctcgccctcaccgcgctgctgaatgccctgctggacatctacgcgcgtaccgagcatgcccgcacccgttcgatcaagggctacgtgcaactggcgaagatcgccgtgttcgtgttcggcgcgatcatcatcgtctcgatcatcatcgaccgctcgccgctcctgctgctgtccggcctcggcgcgatgtcggcggtcctcctgctggtctacaaggacaccctgatgtccttcgtcgccagcgtgcagctcaccagcaacgacatgctgcgggtcggcgactggatcgagatgccgcaggtcggcgccgacggcgacgtggtggacatcaccctgtacaccgtgaaggtgcagaacttcgacaagaccatcgtctcggtgccgacctggcgcctgatgtcggagtcgttcaagaactggcgcggcatgcagcagtccggcggacggcggatcaagcgggcaatctacgtcgactccagccaggtgcgtttcctcgacgagaaggaagagcggcgcctgagccaggtgcgcctgctcaccgaatacatggcccgcaagcagaccgagttgcaggagtggaatgccgccaacggcggggtcgccccgctggccgccaaccgccgccggctgaccaacatcggtacgttccgcgcctacgccctcgcctacctgcagaaccacccggacatccatccgcacatgacctgcatggtccgccagttgcagccgacagcccagggcatcccgctggagatatactgcttcacccgcaccaccgcctgggtcgactacgagcgcatccagggcgacgtgttcgactacctgctggcggtgatgccggagttcggcctcggcgcctaccagcagcccagcggccaggacctgcgccaggggctgcaaggcatgctcgaagggcgtgacgccggggcccgctcgttcgaggcgctggccgcgccgagccgcagcgacgaagccaccgcctga

SEQ ID NO: 155525 - protein, 442 aa, Pseudomonas aeruginosa UCBPP-PA14
MDSTSLLDQLSGYWSALDQHPILHAGLAFGLLLVGALILGRVARYIVLYAANLLARQPALHWLGDLIRNKVFQRLAQTTPSLLVQFGLPWIPEMPDKAAHFLGNLALAFTVLFLILALTALLNALLDIYARTEHARTRSIKGYVQLAKIAVFVFGAIIIVSIIIDRSPLLLLSGLGAMSAVLLLVYKDTLMSFVASVQLTSNDMLRVGDWIEMPQVGADGDVVDITLYTVKVQNFDKTIVSVPTWRLMSESFKNWRGMQQSGGRRIKRAIYVDSSQVRFLDEKEERRLSQVRLLTEYMARKQTELQEWNAANGGVAPLAANRRRLTNIGTFRAYALAYLQNHPDIHPHMTCMVRQLQPTAQGIPLEIYCFTRTTAWVDYERIQGDVFDYLLAVMPEFGLGAYQQPSGQDLRQGLQGMLEGRDAGARSFEALAAPSRSDEATA

SEQ ID NO: 155526 - DNA, 1242 bp, Aeromonas hydrophila subsp. hydrophila ATCC 7966
  CDS (1)..(1242): transl_table=11
atgaaggagatgttttttcgctggctggccgggctcgggctggaggtaaccggcatgatggggctggtgatcgctctgggctttatcgtgctcacctcgctgctgctgcacatgctgctgcaccgggtgctgctggtgcggctggtgggggtgctcggcaagaccaagcaggtgtggctgccgccccagctgcaacagcggctgttctaccggctcgccttcgtgctgcagggggccgtgctgctcggccaggccgagatctggctgccgcgcaactccgacagcctgcaactgatcgagatggtggcccagctctggatcctgctgttcctgctgctctccctgtttgccctgctcgactgcatgctgtcggtgagccgctacacccggctcgggcgggatctgcccctgcgcggtatcttccagggggtgaaactggtgggcagcatcctggtgggcatcctgatgatcgccctgctgctcggcaagtcgccgctgttcctgttcagcggtctgggtgccatgaccgcggtgttgatgttggtgttcaaggatcccatcctcgggctggtggccggcatccagctctccgccaaccgcatgctgagcgtcggtgactggctgcagatggacaagtacggcgccgatggcgaggtgaccgacatcggcctcaccacggtcaaggtgtcgaactgggacaagaccatcaccaccatccccacctatgccctcatctccgactccttcaagaactggcaggggatgacggagtcgggtggccggcgcatcaagcgcagtgtcaacatcgacatgaccagcgtgcgtttcctgacggcggacgagcagctgcagctcaagcaggcccagctactggcgccctatctgagccgcaaggagcaggagctgagcgcctacaaccagcagttgagcgacgccatcagctgccccatcaacggtcgtcacctcaccaacctcggtaccctgcgcgcctatctggacgcctacctgcgcgcccaccccggcattcgcaaggacatgaccctgatggtgcgccagctggcaccgacctcggacggcctgccgctggagatctactgcttcacggcgaccaccgcctgggccgattacgaagggatccaggccgacattttcgaccacatctttgccatcattgagcaatttcatctgcggttgcaccaatctcccacaggttacgatatgcgcgcctggcaaaaggggtaa

SEQ ID NO: 155527 - protein, 413 aa, Aeromonas hydrophila subsp. hydrophila ATCC 7966
MKEMFFRWLAGLGLEVTGMMGLVIALGFIVLTSLLLHMLLHRVLLVRLVGVLGKTKQVWLPPQLQQRLFYRLAFVLQGAVLLGQAEIWLPRNSDSLQLIEMVAQLWILLFLLLSLFALLDCMLSVSRYTRLGRDLPLRGIFQGVKLVGSILVGILMIALLLGKSPLFLFSGLGAMTAVLMLVFKDPILGLVAGIQLSANRMLSVGDWLQMDKYGADGEVTDIGLTTVKVSNWDKTITTIPTYALISDSFKNWQGMTESGGRRIKRSVNIDMTSVRFLTADEQLQLKQAQLLAPYLSRKEQELSAYNQQLSDAISCPINGRHLTNLGTLRAYLDAYLRAHPGIRKDMTLMVRQLAPTSDGLPLEIYCFTATTAWADYEGIQADIFDHIFAIIEQFHLRLHQSPTGYDMRAWQKG

SEQ ID NO: 155528 - DNA, 1287 bp, Gramella forsetii KT0803
  CDS (1)..(1287): transl_table=11
atgaatattgaagaaggcttaatagatattatctgcttttttgaagagttatttgtagactacggaatgaatgccgtggctgctcagtatcttaatcttctcattaatcttgtggttcttaccctgattgttctgggaatcaattatctcatcaaaaattttataatagaagggtttaagttatttacaaataagacaaaaaccacgctcgatgactttcttataaaaagtaactttccaaggtatgttgggcgatttcttccattgtttgtggtttacaagctcttcccattaatattttctgaatttccggaagtccttgagattttttataagctggtagaaatttatgtcatcatacttattgtatggatttgtagaagtgtacttaggtctaccaggaattatttaaaaacgagagaagaatttaatgataaaccattagaaagttttagccagatcatcatgatctttatctggattataggcttaatgtttatcttttcaactctttttaatagatctgtattaggatttgctatttctttaggtgcggcttccgctgtaattcttttaatattcaaggatactatactgggattagtagcttccattcaggtttctgttaacgatatcgttagaattggagactggatcacttttgaaaaattcggggcagatggtacggtaaccgaaattaatcttgccacagttcgagtacaaaactgggataatacttttaccacgatcccaacatacagcctaatttccgattcattccaaaactggagaggaatgcaggaatctcccggaagaagaataaaacgttcggtttatatcaaacaaaattctgtaaaattccttacttccgaagagattgatagattaaagaaaattaaacttatcgcgccctatttggaaaacagacaggcagaaatcgataaatacaatgagtctaacggcaccgataaaagcttactcatcaatggtcgcaaccagaccaatcttggaatctttagaaaatatgccgactcatacctgcatgagcattctgccgtacataaggaaatgtatatcatcgtaagacatatggctcccactgccaatggtattcctttagaaatactttgttttagcaaggataaacgctgggaaaattttgagtatatttcggctgatatttttgaccatcttatagcggctatcccctattttgatcttaaactatttgaagctccttcaggagatgatattcgtagttttctggaaagaaaatcagaaatttaa

SEQ ID NO: 155529 - protein, 428 aa, Gramella forsetii KT0803
MNIEEGLIDIICFFEELFVDYGMNAVAAQYLNLLINLVVLTLIVLGINYLIKNFIIEGFKLFTNKTKTTLDDFLIKSNFPRYVGRFLPLFVVYKLFPLIFSEFPEVLEIFYKLVEIYVIILIVWICRSVLRSTRNYLKTREEFNDKPLESFSQIIMIFIWIIGLMFIFSTLFNRSVLGFAISLGAASAVILLIFKDTILGLVASIQVSVNDIVRIGDWITFEKFGADGTVTEINLATVRVQNWDNTFTTIPTYSLISDSFQNWRGMQESPGRRIKRSVYIKQNSVKFLTSEEIDRLKKIKLIAPYLENRQAEIDKYNESNGTDKSLLINGRNQTNLGIFRKYADSYLHEHSAVHKEMYIIVRHMAPTANGIPLEILCFSKDKRWENFEYISADIFDHLIAAIPYFDLKLFEAPSGDDIRSFLERKSEI

SEQ ID NO: 155530 - DNA, 1269 bp, Shewanella sp. ANA-3
  CDS (1)..(1269): transl_table=11
atggatcaagaaattcgccttgaaatctcgggctggttatcgagtgtcgggatcgacagccaaccgtccgacagcatttcaacgagcattatgctgcttgcctgtgtgctggtggcggccattgcctattttattatgcgccgaggggtgatccgcgcggtgaacatggtgatcctgcgctccaaggcgacgtgggacgatgtgtttatgcgctataaagtgctcgaaaagctggcgatgttagtccccgcgatagtgcttaacctgctagtgcccattaccttaaccgagcaccccgtgcttagcagtttagtcgaccgtctattgagtatttggttggttatcctgatgatccgcgccatttacgctgggctcgatgcggttaatgagatttccgatgtcaatctggtcagtcgccgcttgccggtaaaaagctttgtgcagctgattaaactcttcctgttcttcgtcggtctgatcgtgtcgatttccgtactggcggatcagtcccccgtgtacttcctcagcggtttaggtgtggcaacgggttttgtgatgttagtgttccgcgacaccattttgggctttgtggcgggcattcagctcgccgccaaccgcatggtgagcaagggcgactggatccaaatggacaagtacggcgctgacggtgcggtggaggaagtgtccttaaccacggtcaaagtgcgtaactgggataagaccatcaccatgatccccgcttatgccttagtgtcggatgcgtttcgtaactggcgcggtatgtctgaatcgggcggtcgccgtatcaagcgtgcggtcaatatcgatatcaacagcattaagtttttatctgaggaagagcgaaatcgcctcagtaaaatcaattgcttgaaagagtatttccccgccaagatcagtgaaattcaagagtcgaatgccaaagtgtcggatctggacatgaaggtcaacggtcgccatctgaccaatgtcggcaccttccgcgcctatttgcaggagtacctgcaacgccacgataaagtacataaggatatgaccctgatggtgcgccaactggcccccacgaccgaaggtttaccgatagagatttatatctttaccaatgacacccgttgggctttttatgaggcgatacaagcggatatcttcgaccatatctttgccgtattgcccgagtttggtttacaggccttccaagcgccgacaggcaacgatatccgcagtctaaaatcggtgaaagtcgagggctaa

SEQ ID NO: 155531 - protein, 422 aa, Shewanella sp. ANA-3
MDQEIRLEISGWLSSVGIDSQPSDSISTSIMLLACVLVAAIAYFIMRRGVIRAVNMVILRSKATWDDVFMRYKVLEKLAMLVPAIVLNLLVPITLTEHPVLSSLVDRLLSIWLVILMIRAIYAGLDAVNEISDVNLVSRRLPVKSFVQLIKLFLFFVGLIVSISVLADQSPVYFLSGLGVATGFVMLVFRDTILGFVAGIQLAANRMVSKGDWIQMDKYGADGAVEEVSLTTVKVRNWDKTITMIPAYALVSDAFRNWRGMSESGGRRIKRAVNIDINSIKFLSEEERNRLSKINCLKEYFPAKISEIQESNAKVSDLDMKVNGRHLTNVGTFRAYLQEYLQRHDKVHKDMTLMVRQLAPTTEGLPIEIYIFTNDTRWAFYEAIQADIFDHIFAVLPEFGLQAFQAPTGNDIRSLKSVKVEG

SEQ ID NO: 155532 - DNA, 1263 bp, Chlorobium phaeobacteroides DSM 266
  CDS (1)..(1263): transl_table=11
atgaagcaatcaatcatcaggtatcttgaacattttcctgcaataacggcggatcaggcgattctgatctatacgattttcgcctcaacactctcattgctcatcattgttctggtatccggcattatccgccgcgcgatgctgcgagttctgaaacgttttgccgattcgagcaccacaatactcgatgatcttatggtgcgccataaagtattcaaggggctctccaatctccttgcacctgtgcttgtacatctctttgcggcaccggttctcgaatactacccgggtctcattcctctggtgcgaaatggggcgacgctctatctgacggttgttattattcttgttaccctttcagccattgacgccttcttcgaatatttccaggagcaccgaaatcttgcccgtctgccgctgaagagctttatacaggtcatcaagaccgtcatcgtgtttcttggcgccattactgttctctcaaaacttatcggcgaatccccgattgttttcatcagcggtctgggtgcatttaccgccctgcttcttctgattttcaaggattcaatcctcggtcttgttgccggtatacagctttcaaccaatgaccttgtaaggctgggcgactggattgagcttccaaaatacggcgcggatggagacgttatcgatatatcgctggttaccgtttcggtgcggaacgcagacagaagcatcagtacgataccggcatacgcgcttatttcagaaggctttaaaaactggagaggaatgagcgaatccgaaggtcgcagaatcaagcgctcgctcaacattgacatgaccagcgtcgccttttgcgatgaagcgatgtttgaaaggctttttcacatcgagctgcttcagcgttatcttcttgaaaaaaaagaggagctcaacgcctataacaaggagaacttcctgaaccccgaggttccggtaaacgggaggcggctaaccaatctgggtacctttcgggcctatcttcttgcctatctgcgacgacttccggtagtcaacgccgaaatgacgctcatggtgaggtacctgcagtcaacagagcacggtcttcctctcgaaatctatctcttcagcaaagaaaaagacatcgtggcttatgaagccgttcaggctgacgtcatggaccatctgcttgccgttctgccctttttcgggcttcgcgtctaccagtccccaacagggtacgttcctgtgcaagctgtttccgaatcagccggttcataa

SEQ ID NO: 155533 - protein, 420 aa, Chlorobium phaeobacteroides DSM 266
MKQSIIRYLEHFPAITADQAILIYTIFASTLSLLIIVLVSGIIRRAMLRVLKRFADSSTTILDDLMVRHKVFKGLSNLLAPVLVHLFAAPVLEYYPGLIPLVRNGATLYLTVVIILVTLSAIDAFFEYFQEHRNLARLPLKSFIQVIKTVIVFLGAITVLSKLIGESPIVFISGLGAFTALLLLIFKDSILGLVAGIQLSTNDLVRLGDWIELPKYGADGDVIDISLVTVSVRNADRSISTIPAYALISEGFKNWRGMSESEGRRIKRSLNIDMTSVAFCDEAMFERLFHIELLQRYLLEKKEELNAYNKENFLNPEVPVNGRRLTNLGTFRAYLLAYLRRLPVVNAEMTLMVRYLQSTEHGLPLEIYLFSKEKDIVAYEAVQADVMDHLLAVLPFFGLRVYQSPTGYVPVQAVSESAGS

SEQ ID NO: 155534 - DNA, 1182 bp, Shewanella amazonensis SB2B
  CDS (1)..(1182): transl_table=11
atgatcgccatgttgggtgtctctttcgtcatcgctgcagttgcttatcttatagttcgccgtggtgtggtgaaggccatgaacctggtcatccagcgttccagtgtgacttgggacgatgtgtttatgaagtacaaggtactggaaaagctgtccatgctggtacctgccatggtgctcgatttgttgctgcccatcgtgctggctgagcacaaactggctgcgaatctggccgaccgtcttattaatgtcgccttggtaatattgcttatcagagctatttattcggcgttggacgctgtgaatgaaattgcggaaatccgtgatatcagtcgccgcttaccggtaaaaagtgttgtgcagctgattaagcttttcctgttctttgttggggtgattatcggcatctcggtgctggccgatcagtcaccggtcatcttcctttccggtttgggtgtggcgactggtttggtgatgttggtgttcaaggacaccatcctgggctttgtggcgggtatacagcttgccgccaaccgtatggtgagcaagggtgactggatccagatggacaagtacggtgccgacggtgccgtggaggaagtatcactcaccacggtaaaggtgcgtaactgggacaataccctgaccatgatcccggcctatgctctggtctccgatgccttccgtaactggcgtggcatgtctgagtcgggtggccgtcgtattaagcgggcgctgaatatcgacatcaacagcatacgttttctgactgaagaagacagggtacgactgtcgcgcatcaattacctgaaagactacctgccccgtaagataattgaggtgacggaagccaatgccggcattgccgatatcgatgtacctgtaaacggcaggcgtctcaccaatgtggggacctttcgtgcttatttgactgaatatctgcgtcatcacgacaaggtgcacaaggatatgactttgatggtgcgtcagcttgcgcccaccactgaaggtctgccgctggagctttatatttttaccaacgacacccgttgggtggtttacgaggggatccaggcagacatttttgaccacatctttgcgattctgccggaatttggtttgacggcattccaaaatcccaccggggaagatattcgcagtttacggccggttaattcttga

SEQ ID NO: 155535 - protein, 393 aa, Shewanella amazonensis SB2B
MIAMLGVSFVIAAVAYLIVRRGVVKAMNLVIQRSSVTWDDVFMKYKVLEKLSMLVPAMVLDLLLPIVLAEHKLAANLADRLINVALVILLIRAIYSALDAVNEIAEIRDISRRLPVKSVVQLIKLFLFFVGVIIGISVLADQSPVIFLSGLGVATGLVMLVFKDTILGFVAGIQLAANRMVSKGDWIQMDKYGADGAVEEVSLTTVKVRNWDNTLTMIPAYALVSDAFRNWRGMSESGGRRIKRALNIDINSIRFLTEEDRVRLSRINYLKDYLPRKIIEVTEANAGIADIDVPVNGRRLTNVGTFRAYLTEYLRHHDKVHKDMTLMVRQLAPTTEGLPLELYIFTNDTRWVVYEGIQADIFDHIFAILPEFGLTAFQNPTGEDIRSLRPVNS

SEQ ID NO: 155536 - DNA, 1266 bp, Psychromonas ingrahamii 37
  CDS (1)..(1266): transl_table=11
atgattaataccgttattaataagtatcaaacaattttttcagatcaagcattagcaatagatatttcagttatctcaatgctgttaatgcttatcttaatctcgatgatcgcaaattatattaccaaaaaaataataactgtttttgttaaaaaatttattgataagacgagaagtcaatgggataacatcttttacgactgtcatgtattcacccgtttatcccacttgataccaatattgttctttagtgtcggttcaacaatcatttttccagcagatgcttacccgcttttattggataatctttctaaatttacttcgctgtatttgattcttgcctttgcccttgtcattcatagcctactggcggcatttgatgctatttaccgtacctacaaaatgtcaaagcaacggccaatcaacaattatgttcaagttctaaagattattctgtggatttttaccacggttgcctccatctcacttctgctcagcaaggatctttgggcattatttttaggtatgagcggcatgatggcgatcattatgctggtctttaaagacactctccttggacttgtggccggtatgcagattactgctaatgatatgttacgtcttgatgattggttggaaatgccaagtcgtaatgcggatggtgatgtgattgatataacccttaatacggttaaggtcagaaactgggataaaacgatcacgactattcctacccatgctttgatgtcggagtcgttcaaaaattggcggggaatgaccgagtcgggagggcggagaatcaagcgttctatctcaattgatatgacatcggtaaaattttgcgatcaagaaatgcttcagtcttttatgaaaattgagattcttaaggattatttacttaagaaacaaaaagaaatagagacttacaataaagaaacaggaaacgatttaagtaaccctgctaatggcaggcggctcactaatataggtacctttagggcatatctatccgcttatttgaaaaaaaatcctaaaatacatcaagagttgacttttatggtgaggcagttgtcaccaagttctacgggcgtacctattgaagtttatgtttttagtaacgatcaggattgggttaattatgagggaattcaagcggacatttttgaccatattttagccgttattcctgagtttggcctgagagtttttcaggatcctactggttctaattttgaaaaagccttcagtcgatccgctaataattaa

SEQ ID NO: 155537 - protein, 421 aa, Psychromonas ingrahamii 37
MINTVINKYQTIFSDQALAIDISVISMLLMLILISMIANYITKKIITVFVKKFIDKTRSQWDNIFYDCHVFTRLSHLIPILFFSVGSTIIFPADAYPLLLDNLSKFTSLYLILAFALVIHSLLAAFDAIYRTYKMSKQRPINNYVQVLKIILWIFTTVASISLLLSKDLWALFLGMSGMMAIIMLVFKDTLLGLVAGMQITANDMLRLDDWLEMPSRNADGDVIDITLNTVKVRNWDKTITTIPTHALMSESFKNWRGMTESGGRRIKRSISIDMTSVKFCDQEMLQSFMKIEILKDYLLKKQKEIETYNKETGNDLSNPANGRRLTNIGTFRAYLSAYLKKNPKIHQELTFMVRQLSPSSTGVPIEVYVFSNDQDWVNYEGIQADIFDHILAVIPEFGLRVFQDPTGSNFEKAFSRSANN

SEQ ID NO: 155538 - DNA, 1281 bp, Acidovorax sp. JS42
  CDS (1)..(1281): transl_table=11
ttgcctgtgtccgtgcccccgctgattgccgatctggatccttggctgcaggccgccctgggcctgtgcggcctggtgctgctggccttcgccctccagtccgtcgcccaatacgtgctgctgaacaccgtgccgcgcctgcgcgaacgcctgggcgcgcgctgggcgcgggtgttctggcacgaccaggtgttgcggcgtctggcgcatgtggcaccgtcgctcgtcatccaggcaggcatcggcgccgtgccccatgtgcaccccgtggcggccgcagtgatcggcaacgtggccgtggcgctcaccgtgctgcagctggtgcggacgctgatcgcgctgctggacgccgtgctgcacgagcatgagcaggccccggacggcgtgcccacggccacgcgctcgatcaagagctatgtgcagctgggcaagctgctgctggcgctggtgggcaccatcgtcatcgtggcggcgctggtggaccgctcgccgctgatcctgctgtccggcctgggcgccatgtcggcggtgctgatgctggtgttcaaggacaccatcctctcgttcaccgccggcgtgcaactgtcgtccaacgacatgctgcgcgtgggcgactggatcgagatgccccaggtgggcgcggacggcttcgtggtggacatcgcactgcacaccgtgaaggtgcagaactgggacaagaccatcaccaccatccccacctggcggctgatgagcgagagcttcaagaactggcgcggcatgttcagctcgggcgggcggcgcatccgccgcgcgttgcggctggacacgaactcgatccgctttctcaccgaggcggagatcgagcgcctgtcgcgcatcgcgctgctgcgcccctacctggaaggcaagctgcgcgacgtgcagcagaccaacgccgccctgcaggcgcagctgggtgcacaggcgctggagcccgccaaccagcgccgcctgaccaacatcggcaccttccgcgcctactgcgaagcctatgtgcgcgcgcacccgcgcatccaccagcagatgctgctcatcgtgcgcacgctggagcccacggccgagggggtgccgctggagctgtactgcttcacggccaccaccgcctgggtggagtacgaagccatccagggcgacatcttcgaccacctgatcgccgtgctgccggagttcggcctgcacctgttccagagccccacgggcaacgacatccgcgcgggactgcgccccggcgccccaacagccatggccgcgttgccataa

SEQ ID NO: 155539 - protein, 426 aa, Acidovorax sp. JS42
MPVSVPPLIADLDPWLQAALGLCGLVLLAFALQSVAQYVLLNTVPRLRERLGARWARVFWHDQVLRRLAHVAPSLVIQAGIGAVPHVHPVAAAVIGNVAVALTVLQLVRTLIALLDAVLHEHEQAPDGVPTATRSIKSYVQLGKLLLALVGTIVIVAALVDRSPLILLSGLGAMSAVLMLVFKDTILSFTAGVQLSSNDMLRVGDWIEMPQVGADGFVVDIALHTVKVQNWDKTITTIPTWRLMSESFKNWRGMFSSGGRRIRRALRLDTNSIRFLTEAEIERLSRIALLRPYLEGKLRDVQQTNAALQAQLGAQALEPANQRRLTNIGTFRAYCEAYVRAHPRIHQQMLLIVRTLEPTAEGVPLELYCFTATTAWVEYEAIQGDIFDHLIAVLPEFGLHLFQSPTGNDIRAGLRPGAPTAMAALP

SEQ ID NO: 155540 - DNA, 1203 bp, Yersinia intermedia ATCC 29909
  CDS (1)..(1203): transl_table=11
atgtcactgacaatggttattgggcttattttattaatttctgttgtcatccatctgatactacaccgcgtggtattggcatccctccaacgtaacactcaacaatcgaaacacctctggcaacgggttgtcacccaacacaaactttttcagcgcatggcattattgctgcaagggattatcatcaatcttcaggcagttctgtggttacaaaacgatagccaagcgcaggtgattatcgcgacagccgcgcaagtgtggatcatggtcttcggactactagccctattttcattgcttgatacgttgctcgcactgctacgccaaaattcaatcgctcatcaactacctttgcgtggtatttttcaagggttaaagctaatcgcagcgatatttatcggtatcatgattgtttcactgttgatggggcgatcccccttattgttgctaagtggcttgggtgccatgacggcaatactgatgttagttttcaaagacccaattctaggcttggtagccggtattcagctctcagccaataatatgctaaatgtaggcgactggttggaaatgccaaaatacggtgcggacggtgccgtgatagacattggtttgaccacagtaaaagtcagaaactgggacaataccgtcactactattccaacttacgcactgatttccgactctttcaaaaactggcgctcgatgtctgaatccggcgggaggcgtatcaaacgctgcataaatattgataccaccagcgtgcattttctctcagagaaagaacaacaaaaccttaatcgccatccatcgttacaacgttaccttaacgaaaaatctcaggaactgaatcagtataatcagcaaattgctctcgatctgagttcgccgctaaatggccgacgtctaactaatcttggtacgctacgcgcttatttaacaggatatttacgcgatcatcctggtattcataaatcaatgacgctaatggtgcgccaactggcccccactccagagggcctgcccttggagatttacgcatttaccaatacgactgtctgggcagaatatgaaggtattcagtcagatatttttgatcatatctttgccatcgcaagtgagtttgatctgcgtatccaccaaacgccaagtagctacgatatgcgtaatatgctaacactcgcaactccctcaaatagttag

SEQ ID NO: 155541 - protein, 400 aa, Yersinia intermedia ATCC 29909
MSLTMVIGLILLISVVIHLILHRVVLASLQRNTQQSKHLWQRVVTQHKLFQRMALLLQGIIINLQAVLWLQNDSQAQVIIATAAQVWIMVFGLLALFSLLDTLLALLRQNSIAHQLPLRGIFQGLKLIAAIFIGIMIVSLLMGRSPLLLLSGLGAMTAILMLVFKDPILGLVAGIQLSANNMLNVGDWLEMPKYGADGAVIDIGLTTVKVRNWDNTVTTIPTYALISDSFKNWRSMSESGGRRIKRCINIDTTSVHFLSEKEQQNLNRHPSLQRYLNEKSQELNQYNQQIALDLSSPLNGRRLTNLGTLRAYLTGYLRDHPGIHKSMTLMVRQLAPTPEGLPLEIYAFTNTTVWAEYEGIQSDIFDHIFAIASEFDLRIHQTPSSYDMRNMLTLATPSNS

SEQ ID NO: 155542 - DNA, 1209 bp, Erythrobacter sp. NAP1
  CDS (1)..(1209): transl_table=11
atggaacagctcctcgacactttctacgctcagccgctctggctccagtccttgctgggcctgacgttgctcttcaccgccgcgttgctggtgaactatgtcctcaaacatgtgatcctgcgtatcgccgcgccgtatctcgaccggaagaccaagacgatcgacaaggcggctgcatggctcgccaccgccgcgccattgctcatcatttcgcgcgggatcgcgttggtccccaacctgccggatgaggtttacacgctggtccgcaactccgcgcaggcgctgatcgtgatttcggtcgcgatggcgatcgtgaaggggctgacttacgcaaacgagctgtatgagcgccttccgcgatccaagaaccgcccgatcaaggggtttgttcaggtcgtgaagatcgtcgtgctgtgcggcgcggcgattatcctcatctccgtcctgatcgacgaatctccgcttctcctgctttcggggcttggcgcggtgacggcagtgctgctgctggtgttcaaggacacgatcctaagcctcgtcgcgagtgtgcagctgaccacacaggacatgctgcgcgtcggcgactggatcacgatgccaagcatgggcgcagatggtgatgtgatcgacatctcgcttcacaccgtgaaggtgcagaatttcgacaagaccatcgtcaccatcccgacccatcggctggtgtccgatagctaccagaactggcgcgggatgagcgagagcggtgggcgccggatcaaacgttcaatcgcattagaccaaaactcggtgcgcttcctgagcgatgaggaagtggtggacctcaagaaattcaagatgctcaaggactatctcgtcgcgaagcgcgaggagatcaccgagtggaacgcaaaggaacttgccggcgaagatgcgccggtcaatgcgcggcggctgaccaatatcggcacgttgcgcgcctacatcgccgcctatctcgaatggcatccgcggatcgataaaaagttcacgctgatggtccgccaattgccgtcgggaccgcaaggtctgcccctggaagtgtattgcttcaccgacacgacgtcatggccgatctacgaaggtattcaggcggacattttcgaccacctcgtcgcgatcctgccagagttcgacctgaggcttttccaggagccgacgggcaaggatctggcagagggcctggcggcctga

SEQ ID NO: 155543 - protein, 402 aa, Erythrobacter sp. NAP1
MEQLLDTFYAQPLWLQSLLGLTLLFTAALLVNYVLKHVILRIAAPYLDRKTKTIDKAAAWLATAAPLLIISRGIALVPNLPDEVYTLVRNSAQALIVISVAMAIVKGLTYANELYERLPRSKNRPIKGFVQVVKIVVLCGAAIILISVLIDESPLLLLSGLGAVTAVLLLVFKDTILSLVASVQLTTQDMLRVGDWITMPSMGADGDVIDISLHTVKVQNFDKTIVTIPTHRLVSDSYQNWRGMSESGGRRIKRSIALDQNSVRFLSDEEVVDLKKFKMLKDYLVAKREEITEWNAKELAGEDAPVNARRLTNIGTLRAYIAAYLEWHPRIDKKFTLMVRQLPSGPQGLPLEVYCFTDTTSWPIYEGIQADIFDHLVAILPEFDLRLFQEPTGKDLAEGLAA

SEQ ID NO: 155544 - DNA, 1257 bp, Idiomarina baltica OS145
  CDS (1)..(1257): transl_table=11
gtgaattacccggattggtttattgagtgggccgacggacgcccttatgcctatactctgagtgcctgcattctgcttgctcttgctgtttggcttgcacagttttttactaaacacattcttttacgtggtgtcgctcgtctattatcacgcaccgagttaggacgcgatccaagcgtgggtcttaaaaagattatcagccgactttctcaagtggttcctgcgttactactaacagccggtattcattggattccagagttatccgataccgtcattaccatcgtccaaaatgtcgctgtcgcttatatcgtgctcaccattgctcgtgcctttagtgcagcaatgagcagtgtaaatgagatttatagccgccgtcccgatgcgcatttaaaacccattaagggttatttacaaatcgccactatcgcggtttatttaattgcggccattcttattatcgcagcattaattgataagtcaccggttattctattatccggtatcggtgcgatgggtgcggtaaccatgttggtttttcaggacactatcctttcatttgttgcgagtattcagctatcgtcaaatgacatgatccgcgtcggtgactggattgaaatgccgcagttaaatgctgatggtgacgtcatcgacatggcactacacacggtaagagtgcagaactgggataaaacaattaccaccattcctaccaagcgcctcatttctgaatcatttaagaactggcgcggcatgcaagaggccggtggtcgtcgtatcaagcgcagtctatttatcgaccaaaccagcattggctttttgagcgatgaagataagacccgccttcgcaaattcaaaatactgagtcaatatctcaacgaaaaagaacaagatattaaacagtggaatgaacaattagtgagtgagggacatgaccccattaatagccgtaatgtcactaatattggtacgtttcgagcttatgtgcaaaagtatctgcaaagccatccgcaaatccaccaggatatgacgttaatggttagacaactcagtcccaccgcacaaggcttacccttagagatttattgtttcaccaatacaattgcctgggttgaatatgagggcatccaagcggatatttttgaccatctattagctatcttaccggcatttggtctgaatgttttccaagagacctctggtcaggatctgcgttccagtattcgtgagtttgggcgtcagtcgttgcagtcttaa

SEQ ID NO: 155545 - protein, 418 aa, Idiomarina baltica OS145
MNYPDWFIEWADGRPYAYTLSACILLALAVWLAQFFTKHILLRGVARLLSRTELGRDPSVGLKKIISRLSQVVPALLLTAGIHWIPELSDTVITIVQNVAVAYIVLTIARAFSAAMSSVNEIYSRRPDAHLKPIKGYLQIATIAVYLIAAILIIAALIDKSPVILLSGIGAMGAVTMLVFQDTILSFVASIQLSSNDMIRVGDWIEMPQLNADGDVIDMALHTVRVQNWDKTITTIPTKRLISESFKNWRGMQEAGGRRIKRSLFIDQTSIGFLSDEDKTRLRKFKILSQYLNEKEQDIKQWNEQLVSEGHDPINSRNVTNIGTFRAYVQKYLQSHPQIHQDMTLMVRQLSPTAQGLPLEIYCFTNTIAWVEYEGIQADIFDHLLAILPAFGLNVFQETSGQDLRSSIREFGRQSLQS

SEQ ID NO: 155546 - DNA, 1272 bp, Dokdonia donghaensis MED134
  CDS (1)..(1272): transl_table=11
atggattataaaaaggaaataagctgttttttctttgatcattttattgattggggattatcagaaaccttctctaagtatctcaatgcctttgtactaggtgttatcgtgctagtgttggtttttctggcagatatgctcgtgcgcaaagtactgcgcaacctcgctgcatatatttcaaaaagttcaaaaacaaactttgatgatctcctcatcaaaaaccgcgtacctagaagactagcacacatactcccgttatacttacttataggagcgcttccatttgtactagatgattttcttgaaattgaacacgtctttagtgtcatactcaatcttataggagtcattcttgcgctacgtattataagagcccttttacacacccttagagattactttaaaacagtaccaggtttacgtgataaacctatagatagctacatacaggtctttatgatttttgcgtgggtgtttactatattctatgcaataagtcttctcacacctgtatcactagggcaagccctggggacttttggtgccgcctcagccattatattactcatttttaaggatactattcttgggtttgtagcaagcattcaagttgctattaatgatatggtgcgcataggcgactggatcacttttgaaaagtatggagcagatggtgatgtggtagagattaacctcgcaacggtaaaggttcaaaactttgatatgaccatcacaaccatacctacctacgcgcttatctcagactcttttaagaactggcgtggtatgacagacagtcctggtcgtcgtataaaacgttctttatatataaaacaagacagcataaagtttcttacagacgaggatatacaacgctttaagagaataggactcatcacagattacctcacaaatatggaggaaaaactggctcgcattaacgagcgagatgattctgataagtctatacagattaatggtagcaacctgactaacgtaggtctttttagaaaatatatggagacctatattcaaaaccacagcgccatacacaaagaaatgcttcttatgtgtcgccagctggctcctactgcacaaggtatcccactagaggtgtattgcttcagcaaggacaaaaaatgggaaaactacgagtacataatggcagatctttttgaccattttttggccgctgtaccttactttgatcttgagctctttgagtaccctagtagtcctaatcgtgataactttatagacgtttctcagtag

SEQ ID NO: 155547 - protein, 423 aa, Dokdonia donghaensis MED134
MDYKKEISCFFFDHFIDWGLSETFSKYLNAFVLGVIVLVLVFLADMLVRKVLRNLAAYISKSSKTNFDDLLIKNRVPRRLAHILPLYLLIGALPFVLDDFLEIEHVFSVILNLIGVILALRIIRALLHTLRDYFKTVPGLRDKPIDSYIQVFMIFAWVFTIFYAISLLTPVSLGQALGTFGAASAIILLIFKDTILGFVASIQVAINDMVRIGDWITFEKYGADGDVVEINLATVKVQNFDMTITTIPTYALISDSFKNWRGMTDSPGRRIKRSLYIKQDSIKFLTDEDIQRFKRIGLITDYLTNMEEKLARINERDDSDKSIQINGSNLTNVGLFRKYMETYIQNHSAIHKEMLLMCRQLAPTAQGIPLEVYCFSKDKKWENYEYIMADLFDHFLAAVPYFDLELFEYPSSPNRDNFIDVSQ

SEQ ID NO: 155548 - DNA, 1284 bp, Polaribacter irgensii 23-P
  CDS (1)..(1284): transl_table=11
ttgactttaatgaatctacaacatttggtaaacgattatttagttactcttggagcctctgagaatgctgctaaatatttaaatatggtgtttttacttttaattttgttaatcttggcgttctcaatagattatatcattcgtaaaattatactaaaactattttcacagctctcagataaaacaaaaaccaattttgatgatttattagtaaaaaataaaacacctcgaattatagcgcatattattccattacttcttgtaatgaaattaattccctttgtttttgttgattttatagttactgcattattagtttcgaaagggttgtatttattggccattgttctaattctttgggttgttcgcagtcttttaagcacactcaaagattattttaaaacattagaaagcttaagagacaagcccatagacagttttatacaagtctttacgattttctcttgggtgattggtgctttgtctgcctttactattgtctcaggaattgcgtttgttgaatttatcgcaactattggtgctgcctcggcagtgattatactgatatttaaagatactattttgggatttgttgctagtattcaagtatctataaacgatatggtaagaattggagattgggtaacctttgagaaatatggtgcagatggtgatattacagaaattaatttgtctaccgtgaaagttcaaaattttgacatgacaattacgaccattcctacgtacgcgttaatttcagattcttttcaaaactggagaggaatgcaagattctggaggaagatgtataaaaagggcaatcaatatcaaaatggcaagcatccattatttgtcgaatgaagagattacagcattcaaaaaaatacaatcaattacatcctatctaaatacccgccaaaaagatattgagatttataatactcaaaataacatcgataaagaattgcttttaaacggacggcatttaacaaacattggagtgtttagaaagtatgctgaaacctatattgaaaatcactcgggtatccataaaaaaatgactttaatggtgcgccaattagcaccagggacacagggaatcccaattgaaatctatgcttttagtaaggacaaacgttgggagaattacgaatatattatggctgatatctttgatcatgtcattgcagccgttccttattttaatttagaaatttttgagttaccgagcaatactagttttatggactctaaaaaagatttgaattccgatttgctcggttaa

SEQ ID NO: 155549 - protein, 427 aa, Polaribacter irgensii 23-P
MTLMNLQHLVNDYLVTLGASENAAKYLNMVFLLLILLILAFSIDYIIRKIILKLFSQLSDKTKTNFDDLLVKNKTPRIIAHIIPLLLVMKLIPFVFVDFIVTALLVSKGLYLLAIVLILWVVRSLLSTLKDYFKTLESLRDKPIDSFIQVFTIFSWVIGALSAFTIVSGIAFVEFIATIGAASAVIILIFKDTILGFVASIQVSINDMVRIGDWVTFEKYGADGDITEINLSTVKVQNFDMTITTIPTYALISDSFQNWRGMQDSGGRCIKRAINIKMASIHYLSNEEITAFKKIQSITSYLNTRQKDIEIYNTQNNIDKELLLNGRHLTNIGVFRKYAETYIENHSGIHKKMTLMVRQLAPGTQGIPIEIYAFSKDKRWENYEYIMADIFDHVIAAVPYFNLEIFELPSNTSFMDSKKDLNSDLLG

SEQ ID NO: 155550 - DNA, 1260 bp, Photobacterium sp. SKA34
  CDS (1)..(1260): transl_table=11
gtgagcaaggaaattagagttgatattgcccacattttatccgaaattggtgtcaatattgaaccacatgacaatatatcaacggtctttttcttagtattgtgttgtggggccgcttttatttcttatgtgatcgttcgctggggattactgaaaattgttaatgccatgcttaggcgttcaaaagcctcatggggttcagtgatcgtcaaacatgcggtatttgaaaaactgtcacttatcattcctgccgttgtgcttaacttactcatcccattagtgcttgatcaacatattatccttagtggattaatagaccgtcttctaagtttatggcttattttggctcttattcgaagtagttatgcttttttagatgccagtaatgatattgctgacatcaaattaatgagccgtgatctacctataaaaagttttgttcaattatttaagttaatcatctttttaattggttttatcattgctatttcagtgctcacaaatcgctctcccgtttatttcttaagtggcttaggtgttgcgacaggcttagtgttattagtcttccgcgatactattctaggctttgttgctggtatccagttatcagcaaaccaaatggtaaaagtgggtgattggatccaaatggataaatatggtgctaatggcagtattgaagaggtctcattaaccacggtaaaggttaaaaactgggataacaccgtgacaaatattcctgcatatgcgcttgttcaagattcctttattaactggcgtcaaatgcaagaatctggtggtcgtcgtattaaacgttctgtgttaatcgatattgataccatcaagtttatcgacagcaatgatgaagcacagttagcaacaatagattttgttcctgcaattctggcaaagaaaaaacaaaacctaccaccaaatactggcttaaccaacgtcgcgatatttcgaggttatcttgatgtgtatctcaaacaacatcctcaaatacgtcaggatatgacttttctcgtgcgtgaattagagccgacacctaatggattacctatccaaatttatgtttttgtgaatgatacgcgatgggctttttatgaagatgtgcaatcagatatttttgatcatgtctttgcgatgatccctaaatttggtctatcggtttaccaaagccctgcttcgtcagatattagaagtttgcagccaattacagcaatggaacaacagactattgctaaaaaacaaaacttttaa

SEQ ID NO: 155551 - protein, 419 aa, Photobacterium sp. SKA34
MSKEIRVDIAHILSEIGVNIEPHDNISTVFFLVLCCGAAFISYVIVRWGLLKIVNAMLRRSKASWGSVIVKHAVFEKLSLIIPAVVLNLLIPLVLDQHIILSGLIDRLLSLWLILALIRSSYAFLDASNDIADIKLMSRDLPIKSFVQLFKLIIFLIGFIIAISVLTNRSPVYFLSGLGVATGLVLLVFRDTILGFVAGIQLSANQMVKVGDWIQMDKYGANGSIEEVSLTTVKVKNWDNTVTNIPAYALVQDSFINWRQMQESGGRRIKRSVLIDIDTIKFIDSNDEAQLATIDFVPAILAKKKQNLPPNTGLTNVAIFRGYLDVYLKQHPQIRQDMTFLVRELEPTPNGLPIQIYVFVNDTRWAFYEDVQSDIFDHVFAMIPKFGLSVYQSPASSDIRSLQPITAMEQQTIAKKQNF

SEQ ID NO: 155552 - DNA, 1251 bp, Flavobacteria bacterium BBFL7
  CDS (1)..(1251): transl_table=11
atgaatacaaagcattttatatacgattaccttattgaaacgggaatgtctactgtgtatgctaagtatttgaatatgattattctattaatagcgctgctggttatagcctttttaatagactatatcattaaaaagattttcattcaattatttactcagtttacggttaagactaaaactaattttgacaattttttagtatcaaataaagtacctcaaaatatagcgcacatcatcccgcttatttttgggttagaatttatacctatcgtttttcaggacttcccatattttgagaatattgtagaaaaaggctttaaggtctttgcgattatcctgtcactatggatcgcccgcagcctattaaacgcactcaaagattactttaaaacggtaccacaacttaaggataagcccatagacagttatatacaggtgtttatgatctttgcttgggtgataggtacattatctgcaattgcgataataaccagtattgagtttattaaattctttaccacattaggtgcagcgtctgcaattataatccttgtttttagagataccatattaggctttgtagccagcatacaagtgtccattaatgatatggtacgtataggcgactggatcacttttgaaaagtacggtgcagatggtgatgtgattgagatcaacttatctaccgtaaaggttcagaactttgataaaaccataactaccattcctacttatgcattgatttcagactcttttaaaaactggcgtggtatggaaagagcagctggaagacgtattaaaagatccttaagtataaaattagatagtgttagttatttaactgtagatgaagttaatacattgaaaaatattgatttaatatcctcatatctagaaaacaaacaatctgatattgatcaatacaatatggagaatcatatcaataaagaagtcttactaaatggacgtaaccttaccaatataggcgtttttagaaagtacttagagacctacatagaaaatcatagtggtgtgaataaagacatgatgattatggtacgacagctcgctcctactgctcacgggattcctatagagatttatgcttttagtagtgataaacgttggaaaaattatgaatacatcatggcagatatatttgatcataccattgctgctgtaccttacttcaatcttgaaatatttgaatatcctagtaattctagtttcaaagattatgctggataa

SEQ ID NO: 155553 - protein, 416 aa, Flavobacteria bacterium BBFL7
MNTKHFIYDYLIETGMSTVYAKYLNMIILLIALLVIAFLIDYIIKKIFIQLFTQFTVKTKTNFDNFLVSNKVPQNIAHIIPLIFGLEFIPIVFQDFPYFENIVEKGFKVFAIILSLWIARSLLNALKDYFKTVPQLKDKPIDSYIQVFMIFAWVIGTLSAIAIITSIEFIKFFTTLGAASAIIILVFRDTILGFVASIQVSINDMVRIGDWITFEKYGADGDVIEINLSTVKVQNFDKTITTIPTYALISDSFKNWRGMERAAGRRIKRSLSIKLDSVSYLTVDEVNTLKNIDLISSYLENKQSDIDQYNMENHINKEVLLNGRNLTNIGVFRKYLETYIENHSGVNKDMMIMVRQLAPTAHGIPIEIYAFSSDKRWKNYEYIMADIFDHTIAAVPYFNLEIFEYPSNSSFKDYAG

SEQ ID NO: 155554 - DNA, 1266 bp, delta proteobacterium MLMS-1
  CDS (1)..(1266): transl_table=11
atgaaggatctgctttttcaagggctgcgcggcctgggcctggaaatcaccccgctgctgggtaccggcatcatcctggttttgatcgccctgatctcgctgctgatccatctgctgctgcaccatgtggtgctgcggttgctggaacgtaagctgctggagcgccacagcctcttcaaccgcctggcccttactctgcaaggggtgatcctggccttccaggttcgtatctggctggagccggaatcactaatccggccgctgctggagctggccacctggctctggattgtcttctttgcgctgctctccttttatgccctgctcaataccgtggagtactatacccagcgctccgacaagatcaataagctgccgctgcgcggccttttccagagtgccaagctgctggccgcgatcctggcgctgatctttgccctctccctgctgatcggcaaatccccggtgatcctgttcagcggcctgggcgccatgacggcggttttgatgctggttttcaaggatccgctgatggggctggtggccggtatccagctctcggccaacaacatgctgcaggtgggcgactggctggagatgcccaagtacggggccgatggcgatgtcgtcgatatcaatctcaccaccgtcaaggtccgcaactgggaccgcacctacaccaccgtccccacctacgccctgatctccgactccttcaagaactggcgggggatgcaggaagccggcgggcggcggatcaagcgcgcgatccatatcgatgccaccagcgtgcgctttctggacgaggatgatatcaagcgcctgcacaaggccgatttactgggggcttatctcgatggcaaactggcggagatcaaagagcacaaccaggcccagcaaatcgaccccagctcaccgatcaacggccggcacctgaccaacctcggcaccttccgggcctatctgaacaactacctcaaggcccacccccatatccatcccggcctgatccagatggtccgccaactggccccgggccccgacgggatcccgctggaggtctacggcttcagcagcaaaatcggctgggtggattacgaagggatccaggccgatatctttgatcatatcttcgcggtggtaccggagttcggtctgcgggtcttccagaaccccaccggccatgatctccagcgcctgttggcaaccgagcaccaaaacagggtaggcggccacggggcaccgcagaccagcaagggcccatag

SEQ ID NO: 155555 - protein, 421 aa, delta proteobacterium MLMS-1
MKDLLFQGLRGLGLEITPLLGTGIILVLIALISLLIHLLLHHVVLRLLERKLLERHSLFNRLALTLQGVILAFQVRIWLEPESLIRPLLELATWLWIVFFALLSFYALLNTVEYYTQRSDKINKLPLRGLFQSAKLLAAILALIFALSLLIGKSPVILFSGLGAMTAVLMLVFKDPLMGLVAGIQLSANNMLQVGDWLEMPKYGADGDVVDINLTTVKVRNWDRTYTTVPTYALISDSFKNWRGMQEAGGRRIKRAIHIDATSVRFLDEDDIKRLHKADLLGAYLDGKLAEIKEHNQAQQIDPSSPINGRHLTNLGTFRAYLNNYLKAHPHIHPGLIQMVRQLAPGPDGIPLEVYGFSSKIGWVDYEGIQADIFDHIFAVVPEFGLRVFQNPTGHDLQRLLATEHQNRVGGHGAPQTSKGP

SEQ ID NO: 155556 - DNA, 1239 bp, Vibrio cholerae V52
  CDS (1)..(1239): transl_table=11
atgcttgaaacattaaccttgtggttacagaagtttgatattgaaattgaacgcgtgatccagcttgcggaagcgctcgggctgatcgcagccatttcgattgccattcatctcgtgttacaccgtggagtgctgctgtggctcaaacgccatacccaccatgagcaaagcgtttggcgcaatgcactgtttaaagagcacctatttagccgcgttgccttactgatccaaggtgtggtgattgcggtgcaaacccagttgtggctaagccctaacacctttgcttacgatgttctgcacaccctaacctcactgtggattgtggtgtttggcatgctggccacttattccgtactcaacgtgctggagctgctgatcagccgaacccaagtgggtaaaaacctgccaacacgcggcattttgcaaagcatcaagctgattgtgtttattatcgcggcgctgtttttcacctcaattttgatcggtaaatcgccagttattctgctcagcggcttaggtgcgatgaccgcggtctttatgttggtgtttaaagatccgatcctcggcttagttgcaggggtacaactttcggccaacaaaatgctctcagtcggtgactggttggaaatgcccaaatatggcgcagatggctcagtgattgatatcagcctaaccacagtcaaagtgcagaactgggataaaaccatcaccaccattccaagctacgccctgatttcagattcatttaaaaactggaaagggatgcaagagtccggtggtcgccgcatcaaacgcagtattttgattgatgccaccagcgtgcattttttaacagaagaagagaaacaaacgctgaaaaaagcgcaactgcttgagccctacttggtcgagaaagagcaagagatcagcagctacaaccaacaaaaacattgggatttggcctgccgtatcaatggccgccgcctgaccaacatcggcagtttccgcgcttatttagagcgctacctgcgcactcaccccaatattcaccaagatatgacgctgatggtgcgtcagttagcgcccactcacgatggcatttcgctagaggtgtattgctttaccagcaccacagtgtgggtggagtatgagcgtattcagtcggatatttttgaccatatctacgcggtactgcctgagtttgacctacgcgtctcgcaagcccccacaggcaatgactttcgcgctctgagaggctaa

SEQ ID NO: 155557 - protein, 412 aa, Vibrio cholerae V52
MLETLTLWLQKFDIEIERVIQLAEALGLIAAISIAIHLVLHRGVLLWLKRHTHHEQSVWRNALFKEHLFSRVALLIQGVVIAVQTQLWLSPNTFAYDVLHTLTSLWIVVFGMLATYSVLNVLELLISRTQVGKNLPTRGILQSIKLIVFIIAALFFTSILIGKSPVILLSGLGAMTAVFMLVFKDPILGLVAGVQLSANKMLSVGDWLEMPKYGADGSVIDISLTTVKVQNWDKTITTIPSYALISDSFKNWKGMQESGGRRIKRSILIDATSVHFLTEEEKQTLKKAQLLEPYLVEKEQEISSYNQQKHWDLACRINGRRLTNIGSFRAYLERYLRTHPNIHQDMTLMVRQLAPTHDGISLEVYCFTSTTVWVEYERIQSDIFDHIYAVLPEFDLRVSQAPTGNDFRALRG

SEQ ID NO: 155558 - DNA, 1266 bp, Shewanella baltica OS223
  CDS (1)..(1266): transl_table=11
atggatcaggaaataaggctcgaaatttcggcatggctagcgggctttgggattgatagccaaccctcggacggcatatcaaccagcatcatgatcattgcctgcttactgctcgcgggcattgcttatttcattgttcgacgcgtggtcatacgtgcggtcaacatggtgatcctgcgctccaaagttacctgggacgatgtgttcatgcgttacaaggtgctcgaaaagctggccatgctagtgcctgcaatcgtgctcaatctattagtgcccatcgccttaaccgagcatcaaatcttaagtaatttagtcgatcggctactgagtatttggctggtggtgctgatgatccgcgctatttatgcgggtttagatgcggtcgatgaaatttcagatgtgaatctggtgagtcggcgtttacccgttaaaagctttgtgcagttaactaagctgtttttattctttgtcggtattatcgtttctatctcaatcttggccgatcagtcccctgtgtacttcctcagcggcttaggtgtggcgacgggttttgtgatgttagtgttccgcgacactatcttaggtttcgtggcgggcattcagttagcggctaaccgtatggtgagcaagggcgactggatccagatggacaaatacggcgccgacggtgcggtagaagaagtctcgctgaccacggtcaaagtgcgcaactgggacaaaaccatcactatgatccccgcctatgccttagtgtcggatgcgtttcgtaactggcggggcatgtctgagtcgggtggtcgtaggatcaaacgcgccatcaatatcgatatcaacagcattaagtttttgagcgaggaagagcgcgagcgtctgagtaagatcaattgcttaaaagaatatttccccgcgaagatcaacgaaatccgtgagtcgaatgccagagtgtctgacctcgacatgaaagtgaacggtcgccatctgaccaacgtcggcaccttccgtgcttacctgcaggaatacctacagcgtcacgataaaatccataaggaaatgaccttaatggtgcgccaattagcgccgaccactgagggattgccgatcgaggtttatatcttcaccaacgacacccgctgggcattttatgaggcgatacaagcggatatcttcgaccatatttttgcgatattgcctgagtttggtctgcaggcattccaagcgccaacgggcaacgatattcgcagcttaaagtcggttaaggttgactag

SEQ ID NO: 155559 - protein, 421 aa, Shewanella baltica OS223
MDQEIRLEISAWLAGFGIDSQPSDGISTSIMIIACLLLAGIAYFIVRRVVIRAVNMVILRSKVTWDDVFMRYKVLEKLAMLVPAIVLNLLVPIALTEHQILSNLVDRLLSIWLVVLMIRAIYAGLDAVDEISDVNLVSRRLPVKSFVQLTKLFLFFVGIIVSISILADQSPVYFLSGLGVATGFVMLVFRDTILGFVAGIQLAANRMVSKGDWIQMDKYGADGAVEEVSLTTVKVRNWDKTITMIPAYALVSDAFRNWRGMSESGGRRIKRAINIDINSIKFLSEEERERLSKINCLKEYFPAKINEIRESNARVSDLDMKVNGRHLTNVGTFRAYLQEYLQRHDKIHKEMTLMVRQLAPTTEGLPIEVYIFTNDTRWAFYEAIQADIFDHIFAILPEFGLQAFQAPTGNDIRSLKSVKVD

SEQ ID NO: 155560 - DNA, 1224 bp, Erythrobacter sp. SD-21
  CDS (1)..(1224): transl_table=11
atggatgatattctactcgactatctcgccctcgcgccctggatgcaggcggcaatcgcccttttcgcgctcttgctcgtcgcgctggcgatcaactggcttatcaagcgcgtacttctgaagttcgccgcgccctatctcgatacacgcagcgacaccgccgaccgcgcggccgcatggctggctacggtcgttccgctgctggtcatgtcgcgcggtgtgctgctggtgccgcacctgccggaggcggtcgttaccgtcacgatcaacgtgttgcaggcgcttatcgtgttctccgtcgcgatggggatcagctgggcgctcaattacgtgaacgagctctacgcgcgccgcccggaggcccgcagccgacccatcaagggctatgtccaggtcctcaagatcgcggtgttctgcggcgcggcgatcctgatgatcgcggtgctgatcgaggaatcgccgctgctcctgctctccgggctgggtgcgatggccgccgtgttgctgctggtgttcaaggacacgatcctcagcctcgtcgccagcgtccagctgaccagcaacgacatgctgcgcgtgggcgactggatcgagatgccgagcatgaacgccgacggcgacgtgatcgacatcgcgctgcacacggtgaaggtccagaatttcgacaaaaccatcaccaccatcccgacccatcgcctcatcgccgacagctatcgcaactggcgcggtatgagtgagagcggcggacggcggatcaagcgcagcctcgtgatcgaccagaactcggttcgtttcctcggcgaagaggagatcgccgggctgcggcggttcaagctgctggacgattatctcgcgcgcaaagcggaggagatcgccgaatggaaccggcacgagctgtcgagcgattgcgacacgatcaacgcgcggcgcatcaccaacatcggcacgctgcgcgcctatgtgatcgcctatctcaaaagccacccacggattgcaggcgagcgtttcactttgctggtgcgccagctgccgcccggaccggaagggcttccaatcgaaatctattgcttcaccgacacggtcgactggggtgaatacgaggcgatccaggcggacatcttcgaccatatgctcgccatactgcccgaattcggcctgcgcatcttccagcagccgagcggtctggacttcgctgtagccttaggcacacgaggcgagcactag

SEQ ID NO: 155561 - protein, 407 aa, Erythrobacter sp. SD-21
MDDILLDYLALAPWMQAAIALFALLLVALAINWLIKRVLLKFAAPYLDTRSDTADRAAAWLATVVPLLVMSRGVLLVPHLPEAVVTVTINVLQALIVFSVAMGISWALNYVNELYARRPEARSRPIKGYVQVLKIAVFCGAAILMIAVLIEESPLLLLSGLGAMAAVLLLVFKDTILSLVASVQLTSNDMLRVGDWIEMPSMNADGDVIDIALHTVKVQNFDKTITTIPTHRLIADSYRNWRGMSESGGRRIKRSLVIDQNSVRFLGEEEIAGLRRFKLLDDYLARKAEEIAEWNRHELSSDCDTINARRITNIGTLRAYVIAYLKSHPRIAGERFTLLVRQLPPGPEGLPIEIYCFTDTVDWGEYEAIQADIFDHMLAILPEFGLRIFQQPSGLDFAVALGTRGEH

SEQ ID NO: 155562 - DNA, 1263 bp, Moritella sp. PE36
  CDS (1)..(1263): transl_table=11
ttggatcaagaattaaggttaatcatttcccagtggctcgccgatagcgatacattaaacaatgcagattcaaacacttataacttaatactggtttttctatgtttaagtttggctgctgcctcatacttattggtaaaacgtgttgtcattaaagccatgaaggtgatgtcggagcgctctaaagtaacttgggatgataccttcgtggcccatggcgtattagagaagttttccttgttagtgccgctattggtcattgatattctattaccactgtttacggtattctccccctttattaccgaagtcttaggtcgtctgcttagcgcgatgttagtgatcttatttatccgcggtgtttatgcggttcttaatgccattgctgaaataacagacaagcatgaggcaacacagcgattaccgatcaccagctttctgcaattaattaagctttttttattttttgtgaccgccgttattaccatctcaattttgtccaaccaatcgcccctctacttcttaagtggccttggtgtcgcgactggtttcatcatgctgatattcaaagataccattttgggttttgtcgctggtattcaattagccaccaaccagatggtgaccagaggtgattggatccaaatggataaatacggcgctgatggtaccgttgaggaagtctcactaacgacagtgaaagtgcgtaactttgataaaaccattaccatgttgcctgcctatgctttagtgtctgacgccttcaaaaactggcgtggcatgagtgaatcgggcggccgtcgtatcaaacgtagcctctttattgatattcaaagcatcggttttttaaccaaagatgagttacaacgtcttagtaaaattcatttattaaaaaactaccttgcagacaaaagctttgatatcaataccttcaatctagattttaatgaagatgaacaagcagtaaacagccgaggtttgaccaatataggcacattccgtgcttatttattagcgtatttacagctgcatccaaaagtacgtaaagacatgacgctattggtcagacaattagcaccaacaacacaaggcatgccaatcgagatctatatctttaccgatgaaattcgctgggcgttttatgaagacatacaagccgatatctttgaccatatcttctcggtattaccggcatttggtttgcaggcttttcagcaaccaagtggcaatgatgtgcaagcgctacgtcctaagcaatcttaa

SEQ ID NO: 155563 - protein, 420 aa, Moritella sp. PE36
MDQELRLIISQWLADSDTLNNADSNTYNLILVFLCLSLAAASYLLVKRVVIKAMKVMSERSKVTWDDTFVAHGVLEKFSLLVPLLVIDILLPLFTVFSPFITEVLGRLLSAMLVILFIRGVYAVLNAIAEITDKHEATQRLPITSFLQLIKLFLFFVTAVITISILSNQSPLYFLSGLGVATGFIMLIFKDTILGFVAGIQLATNQMVTRGDWIQMDKYGADGTVEEVSLTTVKVRNFDKTITMLPAYALVSDAFKNWRGMSESGGRRIKRSLFIDIQSIGFLTKDELQRLSKIHLLKNYLADKSFDINTFNLDFNEDEQAVNSRGLTNIGTFRAYLLAYLQLHPKVRKDMTLLVRQLAPTTQGMPIEIYIFTDEIRWAFYEDIQADIFDHIFSVLPAFGLQAFQQPSGNDVQALRPKQS

SEQ ID NO: 155564 - DNA, 1332 bp, Bacteroides caccae ATCC 43185
  CDS (1)..(1332): transl_table=11
atgaaagaagtaattgatacggtgagtgtagcattagcgagtggggaagtggaagaattgggaggagcagtgatgcaggaagtcaaccgctcgttactatcggcaggagtgaacgaagaatgggctgacaagattgacaatctgatagtgctgctgtttattatcggaatcgctttactggctaacgtaatctgccgcaggatcatcttgcgggtagtggcaaaactggtgaagcaaactaaggcgacgtgggatgatatcgtattcgatcataaggtaatggtacatcttagcagaatggtggcaccgattctgatttatattgccattcctattgctttccccgaacatgctgattccgggttgctcgatttcttacgcaggctttgcatgatttatatccttgcagtgttcctgcggtttgtcagttcgttgtttactgccatttatcaggtatacagccggaaagagcaatatagggacaagcctttgaagggacttttgcagacggcacaagtcatccttttctttataggggctattatcatcatcagtattctgattaatcaaagtccggtggtgttgttgacgggactcggagcttctgctgccgtcctgatgttggtattcaaagacagtattatgggatttgtgtccggtattcagctttctgccaacaatatgctgaaagtgggcgattggattaccatgccaaagtacggtgcggatggtacggtgatagaagtaaccttgaacaccgtgaaagtgcgcaacttcgataataccataaccactattccgccttacctgctggttagtgactctttccagaactggcagggaatgcaggagtccggtgggcgccgcgtgaaacgctctatcaatatagacatgagcagcgtgcgtttctgtactccggagatgttggcgaagtatcgaaagatacagttgttgaaagattacgtagaccggacggagaaagtagtggaagaatataacaaagaacataatattgacaattcagtactcgtaaacgggcgtcgtcagacaaatttgggcgtttttcgcgcttacctgactaattatctgaaaagccttcctaccgttaatcaggaactgacttgcatggtccgccagctccagccgacggaaaccggtatccctctggaactctatttcttttcggccaataaagtctgggttgcctatgaaggcatacaggcagacgtattcgatcatgtgcttgccattattcccgaatttgacttgcaagtattccagaatccttcgggtgccgacctgcgccggataggagtaaaaatagagaaataa

SEQ ID NO: 155565 - protein, 443 aa, Bacteroides caccae ATCC 43185
MKEVIDTVSVALASGEVEELGGAVMQEVNRSLLSAGVNEEWADKIDNLIVLLFIIGIALLANVICRRIILRVVAKLVKQTKATWDDIVFDHKVMVHLSRMVAPILIYIAIPIAFPEHADSGLLDFLRRLCMIYILAVFLRFVSSLFTAIYQVYSRKEQYRDKPLKGLLQTAQVILFFIGAIIIISILINQSPVVLLTGLGASAAVLMLVFKDSIMGFVSGIQLSANNMLKVGDWITMPKYGADGTVIEVTLNTVKVRNFDNTITTIPPYLLVSDSFQNWQGMQESGGRRVKRSINIDMSSVRFCTPEMLAKYRKIQLLKDYVDRTEKVVEEYNKEHNIDNSVLVNGRRQTNLGVFRAYLTNYLKSLPTVNQELTCMVRQLQPTETGIPLELYFFSANKVWVAYEGIQADVFDHVLAIIPEFDLQVFQNPSGADLRRIGVKIEK

SEQ ID NO: 155566 - DNA, 1239 bp, Vibrio cholerae NCTC 8457
  CDS (1)..(1239): transl_table=11
atgcttgaaacattaaccttgtggttacagaagtttgatattgaaattgaacgcgtgatccagcttgcggaagcgctcgggctgatcgcagccatttcgattgccattcatctcgtgttacaccgtggagtgctgctgtggctcaaacgccatacccaccatgagcaaagcgtttggcgcaatgctctgtttaaagagcacctatttagccgcgttgccttactgatccaaggtgtggtgattgcggtgcaaacccagttgtggctaagccctaacacctttgcttacgatgttctgcacaccctaacctcattgtggattgtggtgtttggcatgctggccacttactccgtactcaacgtgctggaactgctgatcagccgaacccaagtgggtaaaaacctgccgacacgcggcattttgcaaagcatcaagctgattgtgtttattatcgcggcgctgtttttcacctcaattttgatcggtaaatcgccagtgattctgctcagcggcttaggtgcgatgaccgccgtctttatgttggtatttaaagacccgatcctcggcttagttgcaggggtacaactttcggccaacaaaatgctctcggtcggtgactggttggaaatgcccaaatatggcgcagatggctctgtgattgatatcagcctaaccacagtcaaagtgcagaactgggataaaaccatcaccaccattccaagctacgccctgatttcagattcctttaaaaactggaaaggcatgcaagagtctggcggtcgccgtatcaaacgcagcattttgattgatgccaccagcgtgcattttttaacagaagaagagaaacaagcgctgaaaaaagcgcaactgcttgagccctacttggtcgagaaagagcaagagatcagcagctacaaccaacaaaaacattgggatttggcctgccgtatcaatggccgccgcatgaccaacatcggcagtttccgcgcttatttagagcgctacctgcgtactcaccccaatattcaccaagatatgacgctgatggtgcgtcagttagcgcccactcacgatggcatttcgctagaggtgtactgctttaccagcaccacagtgtgggtggagtatgagcgtattcagtcggatatttttgatcatatttacgcggtactgcctgagtttgacctgcgcgtctcgcaagcccccacaggcaatgactttcgcgctctgagaggctaa

SEQ ID NO: 155567 - protein, 412 aa, Vibrio cholerae NCTC 8457
MLETLTLWLQKFDIEIERVIQLAEALGLIAAISIAIHLVLHRGVLLWLKRHTHHEQSVWRNALFKEHLFSRVALLIQGVVIAVQTQLWLSPNTFAYDVLHTLTSLWIVVFGMLATYSVLNVLELLISRTQVGKNLPTRGILQSIKLIVFIIAALFFTSILIGKSPVILLSGLGAMTAVFMLVFKDPILGLVAGVQLSANKMLSVGDWLEMPKYGADGSVIDISLTTVKVQNWDKTITTIPSYALISDSFKNWKGMQESGGRRIKRSILIDATSVHFLTEEEKQALKKAQLLEPYLVEKEQEISSYNQQKHWDLACRINGRRMTNIGSFRAYLERYLRTHPNIHQDMTLMVRQLAPTHDGISLEVYCFTSTTVWVEYERIQSDIFDHIYAVLPEFDLRVSQAPTGNDFRALRG

SEQ ID NO: 155568 - DNA, 1341 bp, Bacteroides ovatus ATCC 8483
  CDS (1)..(1341): transl_table=11
atgaaagaagtaaaagaagtggttgatacagtgagtgtggcattagcaaacgggcaaccggaagaagcaggtaatgtggtgatgcaagaagtgaatcatgctttgctctcgatgggagtggatgaagctatggctgataagattgataactttatcatcttattgtttattattggaatagcattacttgccaatctgatttgccgcaagattattctgcgtaccgtatccaaattggtgaaacagacgaaggccacttgggatgatattgtatttaatgataaagtaatggtgaatatcagcaggatggtggcacctatattgatctatatatctattcctattgcttttcccgaacatgcagactctgctttgcttgattttcttcgaagactttgcatgatttatatccttgcagtctttcttcgcttcgtcagtgctttgttcacggctgtgtatctggtatatagcgcgcgtgagcaatataaagacaaacctttgaaggggcttttgcagacagcacaagtcattctcttctttataggagctatcatcattatcagtattctgataaagcagagtccggtggtgttgctgaccggattgggagcttctgctgcggttctgatgttggttttcaaagatagtatcatgggatttgtctccggcatccagctttctgccaataatatgctgaaggtgggtgattggatcacgatgccgaaatacggtgcggacggtacagtgatagaagtaacattgaataccgtaaaagtacgtaacttcgacaatactatcaccaccattcctccttatctattgattagtgattctttccaaaactggcagggaatgcaggaatccggcggacgtcgtgtgaaacgttccatcaatatagacatgaccagtgtgcatttctgtacaccggagatgttggcaaaataccggaagatacaactgttgaaagactatgtggatgaaacggaaaaggtagtggaagaatataataaggaacatcatatcgacaactctgtgttagtgaatggacgccggcaaacaaacctgggagttttccgtgcctatctgactaactatctgaagaatctgcctaccgtcaaccaagacctgacctgtatggtacgtcagcttcagcctactgaaaccggtatcccattggaactttatttcttttctgccaataaagtatgggttgcctacgaaggcatacaggcagatgttttcgatcatgtgcttgccattattcccgaattcgacttgcgtgtcttccaaaacccgtcgggggcagacctgcatcggataggggtaaagatagaaaactaa

SEQ ID NO: 155569 - protein, 446 aa, Bacteroides ovatus ATCC 8483
MKEVKEVVDTVSVALANGQPEEAGNVVMQEVNHALLSMGVDEAMADKIDNFIILLFIIGIALLANLICRKIILRTVSKLVKQTKATWDDIVFNDKVMVNISRMVAPILIYISIPIAFPEHADSALLDFLRRLCMIYILAVFLRFVSALFTAVYLVYSAREQYKDKPLKGLLQTAQVILFFIGAIIIISILIKQSPVVLLTGLGASAAVLMLVFKDSIMGFVSGIQLSANNMLKVGDWITMPKYGADGTVIEVTLNTVKVRNFDNTITTIPPYLLISDSFQNWQGMQESGGRRVKRSINIDMTSVHFCTPEMLAKYRKIQLLKDYVDETEKVVEEYNKEHHIDNSVLVNGRRQTNLGVFRAYLTNYLKNLPTVNQDLTCMVRQLQPTETGIPLELYFFSANKVWVAYEGIQADVFDHVLAIIPEFDLRVFQNPSGADLHRIGVKIEN

SEQ ID NO: 155570 - DNA, 1278 bp, Bacteroides uniformis ATCC 8492
  CDS (1)..(1278): transl_table=11
atggagatattgaagaagatagacgaccttttaatcgggtggggcatatccccttcccgggctgatatgctcgaccaattcattgcctttgcactgatacttgccgttgctttcctggcggatgccctatgccggaaaatcctgctgaaggtagtggcacaactggtgaagaagaccaaggctacgtgggacgacatcgtattcgaccgtaaagtgatggtgcacctcagccgcatggtggctcccgttatcatctatctgtttgttccattggcatttgtcgaagtcggttcatcggcaatggatttcatccggcgtatctgccttatttacatcatcattactttcctgagtttcgttaactcgttcctgaaggctgtttatagcgtatacagcgagagggagcagttccgcgaccgccctttgaaggggatgttgcagaccatgcaggtcattctgtggctggtgggtggcattgtggtcgtgggcgaactgataggccgcgacccgctttcgctgcttgccggattgggtgcctcggcagccatcctgatgctggtattcaaggattccattatgggctttgtctccggtgtgcagctttcggccaacgacatgctgaaggtgggcgactggattgagatgcccaagtacggtgccaacggtacggtgatagaggtaacgttgaacaccgtaaaagtgcgcaactgggacaataccattaccaccatccctccttacctgcttgtcagcgactccttccagaactggcgcggcatgcgcgagagcggtgggcggcgagtgaagcgcagtatcaatatcgacatgaccagcgtccgtttctgcaccccggagatgctggcaaaatatcgcaagatacagctactgaaagattatgtggagcaaacggaggaagtgattgaaaagtacaatgtggaaaacggcatcgataactccatcctcgtcaacggacgccgccagaccaatctgggtgtgttccgggcgtatctgacggcttatttgaaaagtcttcccgacgtaaatcaggaactgacctgcatggtgcgccaactccagcctaccgaccgcggtatcccgatagaactttatttcttctgtgcgctgaaggattgggtgccctatgaaggggtgcaggcggatgtattcgaccatgtgctggcaatcatccccgaattcgatttgcaggtattccagtctccgtccggcagagatttccagcgggtactgcctgctgcttccgaagaaaaaggagcttga

SEQ ID NO: 155571 - protein, 425 aa, Bacteroides uniformis ATCC 8492
MEILKKIDDLLIGWGISPSRADMLDQFIAFALILAVAFLADALCRKILLKVVAQLVKKTKATWDDIVFDRKVMVHLSRMVAPVIIYLFVPLAFVEVGSSAMDFIRRICLIYIIITFLSFVNSFLKAVYSVYSEREQFRDRPLKGMLQTMQVILWLVGGIVVVGELIGRDPLSLLAGLGASAAILMLVFKDSIMGFVSGVQLSANDMLKVGDWIEMPKYGANGTVIEVTLNTVKVRNWDNTITTIPPYLLVSDSFQNWRGMRESGGRRVKRSINIDMTSVRFCTPEMLAKYRKIQLLKDYVEQTEEVIEKYNVENGIDNSILVNGRRQTNLGVFRAYLTAYLKSLPDVNQELTCMVRQLQPTDRGIPIELYFFCALKDWVPYEGVQADVFDHVLAIIPEFDLQVFQSPSGRDFQRVLPAASEEKGA

SEQ ID NO: 155572 - DNA, 1269 bp, Desulfatibacillum alkenivorans AK-01
  CDS (1)..(1269): transl_table=11
atggcccagcttcaatggatcgaacaaatactgatgaaggcggagttatcgcaggcgaccgccgaattcctggcaagaatcatcgtggccctggcgacggtcattctcagcgccgccgccctttatgcggcccgccggttggccgacaccgtcatccccaagttgaaagcggccaccaaaaccaccctggacgacgtcctggttgagcataaggtgttcaggcggctttccctattggcgcccgccctggttgtgcatttcgccctgcccctgctggccgcgggatacccccaggcccggctggctttgcaaggcggactcaggctgtatttcatcattacgggcatgttggtgatcacggctttgatcaacgccttgcacgccatgtatcaaaacctggccgtttccagggaaatccccctgaccagcatcgtccaggtcgttaagattgcggtttacttcatcgcccttattttgggcatttccgtggtcttcaacaaaaccccggtgtatttcataagcggtcttggcgccatgaccgcggttctccttttggtgttcaaggatccccttttgggctttgtggcgggcattcaattgatctacaacaaaatgctcaagcaccgggactggattgaaatgcccaaatacggcgcggacggagacgtggaggaaatcaccctcaccaccgtcaaggtgcgcaatttcgacaagaccatcagcaccgtgcccacctacgcgctcatcagcgattccttcaagaactggcggggcatgcaggagtccggcggcagacggatcaagcgggccatacacattgatatgaacaccatcaaattctgcacggaagacatgatgcagcggttctcccgcatccgttacatctccaagtacatggaagacaaaggcgttgaactggccgaacacaacgccgccctgggatcggacggagaaaataagatcaattgccgccagctgaccaacatcggcacgttccgggcctatgtcagcgcgtacctgaaaaaccaccccctggttcatccggacatgacattcctggtgaggcagcttccgcccggagaaaacggcctgcccctggaaatctacgtattttgcatagacaaggtttgggccaattacgaggccgcccaatccgatatattcgaccatttgctggcgattctgccggaattcgacctgggagtctttcaaaaccccacgggcagggatatgcgcaactggggcgcattccaaaacaaggaaggataa

SEQ ID NO: 155573 - protein, 422 aa, Desulfatibacillum alkenivorans AK-01
MAQLQWIEQILMKAELSQATAEFLARIIVALATVILSAAALYAARRLADTVIPKLKAATKTTLDDVLVEHKVFRRLSLLAPALVVHFALPLLAAGYPQARLALQGGLRLYFIITGMLVITALINALHAMYQNLAVSREIPLTSIVQVVKIAVYFIALILGISVVFNKTPVYFISGLGAMTAVLLLVFKDPLLGFVAGIQLIYNKMLKHRDWIEMPKYGADGDVEEITLTTVKVRNFDKTISTVPTYALISDSFKNWRGMQESGGRRIKRAIHIDMNTIKFCTEDMMQRFSRIRYISKYMEDKGVELAEHNAALGSDGENKINCRQLTNIGTFRAYVSAYLKNHPLVHPDMTFLVRQLPPGENGLPLEIYVFCIDKVWANYEAAQSDIFDHLLAILPEFDLGVFQNPTGRDMRNWGAFQNKEG

SEQ ID NO: 155574 - DNA, 1260 bp, Shewanella benthica KT99
  CDS (1)..(1260): transl_table=11
atggatcaagaaatcaggttacagatttctcagtggttatctaactggggcattaatactacgccatcagacagcgtatctacgtctttgatggtcattgtcagtctcgttattgctatgctggcttatctgttcgttaagcgtggcgtagtgcgggcgatgaatattatcatacagaggtcaaaagtgagttgggacgatatcttcatgcgccataaggtgttggagaattttgctattataattcccgctctggtactcagcatattgatccctttggcattgattcagtatgcattcatgagcagcatgattcatcgcgtcttgagtgtaacgatattggttctcctgatacgtgcagtgtatagctcattagatgcagccaatgaaattgcagatgttaatctggtgagccgccgccttcccataaagagcttcgtgcaactgtttaaactgttcctcttctttgtcgcgatcatagtgtctatatcgatactggctaatcagtctccagtctatttcctcagtggcttaggcgtgatgacgggtttggttatgttggtgttcagagataccattctcggcttcgtagccggaattcagctggccgctaaccgtatggtcagtccgggtgattggattcagatggataagtatggcgccgacggctcggtggaagaggtttctttgactacggtcaaggtacgaaactgggaccagaccataaccatgatccccgcctatgcactggtttccgattccttcaagaactggcgcggtatgtctgagtctggtggccgccggatcaagcgctcgatactcatagatattcattcgattcgcttcctcaccgaggaggatcaagcgagactcggtaagattaatctattgaaaaattacctggcggaaaaatctcaggaactcaatgagtttaatggtcatgtccaagatgcggatatgccagtcaacagccgtaaattgaccaatatcggtacttttagggcatatttgaaggcgttcgtcgctaatcacgacagaatacgccaagacatgaccttgctgattcgtcaactagcctcgacaaaagagggggtgcccatcgagatctatgtcttcactaatgacactcgctggacggtttatgaggatattcagggagacatcttcgatcatgtgttagccatcttgccggaatttggcctgcaagcattccaggctcccacaggatcggatattagaagtttgcaaggacaaagttaa

SEQ ID NO: 155575 - protein, 419 aa, Shewanella benthica KT99
MDQEIRLQISQWLSNWGINTTPSDSVSTSLMVIVSLVIAMLAYLFVKRGVVRAMNIIIQRSKVSWDDIFMRHKVLENFAIIIPALVLSILIPLALIQYAFMSSMIHRVLSVTILVLLIRAVYSSLDAANEIADVNLVSRRLPIKSFVQLFKLFLFFVAIIVSISILANQSPVYFLSGLGVMTGLVMLVFRDTILGFVAGIQLAANRMVSPGDWIQMDKYGADGSVEEVSLTTVKVRNWDQTITMIPAYALVSDSFKNWRGMSESGGRRIKRSILIDIHSIRFLTEEDQARLGKINLLKNYLAEKSQELNEFNGHVQDADMPVNSRKLTNIGTFRAYLKAFVANHDRIRQDMTLLIRQLASTKEGVPIEIYVFTNDTRWTVYEDIQGDIFDHVLAILPEFGLQAFQAPTGSDIRSLQGQS

SEQ ID NO: 155576 - DNA, 1242 bp, Flavobacteriales bacterium ALC-1
  CDS (1)..(1242): transl_table=11
atgcttaattacaaacactttatatacgacttgctaattgaaaaaggtatgtctgaaaatgctgctaagtatcttaatatgatagcgcttttattagctgtcttattaattgcaattataattgactttattaccaagcgtttactttggaaattttctgcggaaatagcaaagcgtacaaaaactagttttgatgatattttaattaaaaataagctcccaagaaatattgcacatattattccgctcatcatcttaattgaatttgtaccacaagtgttttcagattttcaatatgccgaagatattattgaaaaaacattaaaagttataaccatacttcttgcactacaaattattagaagttttttaaactctataaaagactatgtaaagacattaccaaggtataaggacaaacctatagatagctatatacaggtctttatgatttttgcatggttattgggtgttttttccatgttcgccatagttacgggtatctcatttataacattcgcatcaacattaggtgcagcttcagctattatcttattaatttttaaggataccattcttggttttgttgctagtattcaggtgtctataaacgatatggtgcgtattggtgattggataacatttgaaaaatatggtgcagatggtgatgttaccgaaattaatttagccactgtaaaagttcagaattgggataaaaccattaccactattccgacttatgccttaatatccgattcgtttagaaactggcgtggtatgatggcttctggtgggcgtcgtataaaacgttcggtaattgttaagacatctacaattaaattcttaacagatgctgatatagaacgttataaaaaaattgagttagttacagaatacttacataatcaatcacaagagattgaaaaacacaatgcagagcataacattaataaatcggttttaattaatggtcgtaaccttaccaactttggtgtgtttagaaagtaccttcaaacgtatattgaaaatcactctgctataaacaaggatatgacattgatggtacgtcaattagaacctacagctcaaggtattcctatggaaatttatgcgtttagtaaagatcaacgttggataaattacgaatatattattggagatatctttgaccatgtattagcatcagttacctatttcgatttagaaatctacgaattagctgtggtttcgtcagaaatataa

SEQ ID NO: 155577 - protein, 413 aa, Flavobacteriales bacterium ALC-1
MLNYKHFIYDLLIEKGMSENAAKYLNMIALLLAVLLIAIIIDFITKRLLWKFSAEIAKRTKTSFDDILIKNKLPRNIAHIIPLIILIEFVPQVFSDFQYAEDIIEKTLKVITILLALQIIRSFLNSIKDYVKTLPRYKDKPIDSYIQVFMIFAWLLGVFSMFAIVTGISFITFASTLGAASAIILLIFKDTILGFVASIQVSINDMVRIGDWITFEKYGADGDVTEINLATVKVQNWDKTITTIPTYALISDSFRNWRGMMASGGRRIKRSVIVKTSTIKFLTDADIERYKKIELVTEYLHNQSQEIEKHNAEHNINKSVLINGRNLTNFGVFRKYLQTYIENHSAINKDMTLMVRQLEPTAQGIPMEIYAFSKDQRWINYEYIIGDIFDHVLASVTYFDLEIYELAVVSSEI

SEQ ID NO: 155578 - DNA, 1281 bp, Alistipes putredinis DSM 17216
  CDS (1)..(1281): transl_table=11
atgctgcaacaaaccatccggagttggatcgaccaactgctcgtttacatcggaatctctgcggacagcgcccgcggcatcgaccaatgggtcatcctggccatcatcgtcgccatcggcgtagggctggacttcctgatccgcctgctgttgttgcaggtcgtgcgacgcgtcgtcaagcagaccaaagtcacgtgggacgacatcatcttcgacgacaaagtcctgcggcggctgtgccacatcgtcaccccgatcctggtggtggtgatgctgcccatcgcctttcccgatcaaaacggcctcgtcgtcctgatcacgcggctggtacagatagcgatcgtcatcgccgtcctgcgcttcgtcaattccctgctggaagccatatttcaactgatgggccgccgggaggagtggaaaggcaagccgctgaagggcttgatgcagaccggacaggtcatcgccttcctggtcgccgtcatcctcgtcttctcgattcttctcgaccgctctccggcgatgttcctcaccggtctgggcgcttcggccgcgatcttcatgctggtcttccgcgacagcatcctgggtttcgtatcgggcatccaactgtcggccaacaacatgctcaaagtcggcgactggatcagcatgcccaagtacggcgccgacggcacggtggaggaggtcacgctcaacacggtcaaagtccgcaactgggacaacacgatcgtcaccctcccgccctacctgctggtgagcgactcgttccaaaactgggaaggaatgcgttcctcgggagggcgccgcgtcaagcgctcgatcaatatcgacatgaccagcatccgtttctgcacacccgaaatgctggagcgatacaagcgcatcgacctgctgaaagattacatcgcccggacccagcagcgggtcgaggagtataaccggcaacacgacatcccctccggtgaagacaaaatcaacggactgcaccaaaccaacatcggagtcttccgaaactacctgaacctctatctcaggcagaacgaacgggtcaatcaaaacatgatggtactcgtccggcaactgcagcccaccgaacaaggcctcccgatggagctttacttcttcaccgacacggtggactgggtcccgtacgaaggcattcaggccgacgtattcgatcacgtgctggccgtcatccccgaattcgacctgcgcgttttccaaaacccttcgggcaacgacctgcggacgctgaccggaaaaaccgataccaaccattaa

SEQ ID NO: 155579 - protein, 426 aa, Alistipes putredinis DSM 17216
MLQQTIRSWIDQLLVYIGISADSARGIDQWVILAIIVAIGVGLDFLIRLLLLQVVRRVVKQTKVTWDDIIFDDKVLRRLCHIVTPILVVVMLPIAFPDQNGLVVLITRLVQIAIVIAVLRFVNSLLEAIFQLMGRREEWKGKPLKGLMQTGQVIAFLVAVILVFSILLDRSPAMFLTGLGASAAIFMLVFRDSILGFVSGIQLSANNMLKVGDWISMPKYGADGTVEEVTLNTVKVRNWDNTIVTLPPYLLVSDSFQNWEGMRSSGGRRVKRSINIDMTSIRFCTPEMLERYKRIDLLKDYIARTQQRVEEYNRQHDIPSGEDKINGLHQTNIGVFRNYLNLYLRQNERVNQNMMVLVRQLQPTEQGLPMELYFFTDTVDWVPYEGIQADVFDHVLAVIPEFDLRVFQNPSGNDLRTLTGKTDTNH

SEQ ID NO: 155580 - DNA, 1248 bp, Salmonella enterica
  subsp. enterica serovar Schwarzengrund str. SL480
  CDS (1)..(1248): transl_table=11
atgcaggaattgatatcccaggtagaagatttagcgggaattgaaatgaatcacaccacgtcgctggtggtgatatttggtattatttttctgacggcagttgtcgtgcatattattttgcactggatagtactgcgcgctttcgaaaaacgtgccagcgccagttcccgcctgtggctgcaaattattacccagaataaattattccatcgtctggcttttacgctgcaaggcatcattgtcaatattcaggccgcgctctggctacaaaaaggcagtgaggctgcggatatcctgacgacctgcgcgcagttatggattatgacctacgccctgctgtcgttattttctctgctggacgtgattttcaatctatcgcaaaaatggcccgccgcctctcagttaccgctaaaaggaatatttcagggcattaagctcatcggcgctattatcgtcggcattctgatgatctcactgctgattggccagtcaccagcaattttaatcagcgggctgggcgcgatggccgcggtattaatgctggtctttaaagacccgattcttggcctggttgccggtatccagctttccgccaacgatatgctcaaactgggcgactggctggaaatgccgaaatatggcgcagatggcgcggtcattgatattggcttaaccacggtaaaagtacgcaactgggataataccatcaccaccattcccacctggtcactggtttccgactcgttcaaaaactggagcggcatgtctgcgtccggcggacgccggattaaacgcagcattaatattgacgcgaccagtatccattttctggatgctgatgaaaaacagcggctgttaaccgcgcaactgttaaagccgtaccttaccagccgtcatcaggaaatcgatgaatggaataaacaactggatgcgccggaatcagccttaaatcaccgccgaatgaccaatatcgggacatttcgcgcctatctgaacgaatatttacgccaccatccgcgcatccgtaaagatatgacgctgatggtacgccaactggcgcctgacgatcatggtttgccgatagagatctacgcctttaccaataccgtcgtgtggctggaatatgagagcattcaggccgatattttcgaccatatatttgcggtggtggaagagttcggcttgcgtattcatcagacgccgaccggcagcgatattcgcgcgctgtcagggacattgcggcattaa

SEQ ID NO: 155581 - protein, 415 aa, Salmonella enterica
  subsp. enterica serovar Schwarzengrund str. SL480
MQELISQVEDLAGIEMNHTTSLVVIFGIIFLTAVVVHIILHWIVLRAFEKRASASSRLWLQIITQNKLFHRLAFTLQGIIVNIQAALWLQKGSEAADILTTCAQLWIMTYALLSLFSLLDVIFNLSQKWPAASQLPLKGIFQGIKLIGAIIVGILMISLLIGQSPAILISGLGAMAAVLMLVFKDPILGLVAGIQLSANDMLKLGDWLEMPKYGADGAVIDIGLTTVKVRNWDNTITTIPTWSLVSDSFKNWSGMSASGGRRIKRSINIDATSIHFLDADEKQRLLTAQLLKPYLTSRHQEIDEWNKQLDAPESALNHRRMTNIGTFRAYLNEYLRHHPRIRKDMTLMVRQLAPDDHGLPIEIYAFTNTVVWLEYESIQADIFDHIFAVVEEFGLRIHQTPTGSDIRALSGTLRH

SEQ ID NO: 155582 - DNA, 1248 bp, Salmonella enterica subsp. enterica serovar Newport str. SL317
  CDS (1)..(1248): transl_table=11
atgcaggaattgatatcccgggtagaagatttagcgggaattgaaatgaatcaaaccacgtcgctggtggtgatatttggtattatttttctgacagcagttgtcgtgcatattattttgcactggatagtactgcgcgctttcgaaaaacgtgccagcgccagttcccgcctgtggctgcaaattattacccagaataaattattccatcgtctggcttttacgctgcaaggcatcattgtcaatattcaggccgcgctctggctacaaaaaggcagtgaggctgcggatatcctgacgacctgcgcgcagttatggattatgacctacgccctgctgtcgttattttctctgctggacgtgattttcaatctatcgcaaaaatggcccgccgcctctcagttaccgctaaaaggaatatttcagggtattaagctcatcggcgcaattatcgtcggcattctgatgatctcactgctgattggccagtcaccagcaattttaatcagcgggcttggcgcgatggccgcggtattaatgctggtctttaaagacccgattcttggcctggttgccggtatacagctttccgccaacgatatgctcaaactgggcgactggctggagatgccgaaatatggcgcagatggcgcggtcattgatattggcttaaccacggtaaaagtacgcaactgggataataccatcaccaccattcccacctggtcgctggtttccgattcgttcaaaaactggagcggcatgtctgcgtccggcggacgccggattaaacgcagcattaatattgacgcgaccagtatccattttctggatgatgatgaaaaacagcggctgttaaccgcgcaactgttaaagccgtaccttaccagccgtcatcaggaaatcgatgaatggaataaacaactggatgcgccggaatcagccttaaatcaccgccgaatgaccaatatcgggacatttcgcgcctatctgaacgaatatttacgccaccatccgcgcatccgtaaagatatgacgctgatggtacgccaactggcgcctgacgatcatggtttgccgatagagatctacgcctttaccaataccgtcatatggctggaatatgagagcattcaggccgatattttcgaccatatttttgccgtggtggaagagttcggcttgcgtattcatcagacgccgaccggcagcgatattcgcgcgctgtcagggacattgcgccattaa

SEQ ID NO: 155583 - protein, 415 aa, Salmonella enterica subsp. enterica serovar Newport str. SL317
MQELISRVEDLAGIEMNQTTSLVVIFGIIFLTAVVVHIILHWIVLRAFEKRASASSRLWLQIITQNKLFHRLAFTLQGIIVNIQAALWLQKGSEAADILTTCAQLWIMTYALLSLFSLLDVIFNLSQKWPAASQLPLKGIFQGIKLIGAIIVGILMISLLIGQSPAILISGLGAMAAVLMLVFKDPILGLVAGIQLSANDMLKLGDWLEMPKYGADGAVIDIGLTTVKVRNWDNTITTIPTWSLVSDSFKNWSGMSASGGRRIKRSINIDATSIHFLDDDEKQRLLTAQLLKPYLTSRHQEIDEWNKQLDAPESALNHRRMTNIGTFRAYLNEYLRHHPRIRKDMTLMVRQLAPDDHGLPIEIYAFTNTVIWLEYESIQADIFDHIFAVVEEFGLRIHQTPTGSDIRALSGTLRH

SEQ ID NO: 155584 - DNA, 1248 bp, Escherichia coli O157:H7 str. EC4076
  CDS (1)..(1248): transl_table=11
atgcaggatttaatatcccatgttgaagatttagcgggtattgagatcgatcacaccacctcgatggtgatgattttcggtattatttttctgaccgccgtcgtggtgcatattattttgcattgggtggtactgcggaccttcgaaaaacgtgccatcgccagttcacggctttggttgcaaatcattacccagaataaactcttccaccgtttagcttttaccctgcaggggattatcgtcaatattcaggcggtattctggctgcaaaaaggcaccgaagcggcagatattctgactacctgcgcgcagttgtggatcatgatgtatgcgctgctttcagtcttctcgctgctggatgttattttgaatctggcgcagaaattcccggcagcatctcagttaccgctgaaagggatatttcaggggattaaactgatcggcgcgattctggtcggcattttgatgatctcgctgctgattggtcagtcgccagcgattctgatcagcggtcttggtgcaatggctgccgtgctgatgttggtatttaaagatccgattcttggtctggtggcaggtattcagctttccgcgaacgatatgctgaaactgggcgactggctggagatgccgaaatacggcgcggatggcgcggtgatcgatattgggttaaccaccgtcaaggtgcgtaactgggacaataccattaccactattcccacctggtctctggtttctgactcctttaaaaactggagcgggatgtcagcatctggcgggcgacgtattaagcgcagtatcagtattgatgtcaccagtattcgttttcttgatgaagacgaaatgcaacgtctgaataaagcgcatttgttaaagccttatttaaccagccgccatcaggaaattaatgagtggaatcgccagcaaggttctacggagtcggtattaaacctgcgccgaatgaccaatattggaacctttcgtgcctatctgaacgaatatctgcgtaaccatccgcggattcgtaaagatatgaccttaatggtacgccaactggctccaggtgataacggtttaccgctcgagatctatgcgtttaccaacaccgtggtgtggctggaatatgaaagcattcacgctgatatattcgatcacatatttgcgattgtcgaagagtttggtctgcgacttcatcagtcgccaaccggcaatgatattcgctctctggcgggtgcatttaagcagtaa

SEQ ID NO: 155585 - protein, 415 aa, Escherichia coli O157:H7 str. EC4076
MQDLISHVEDLAGIEIDHTTSMVMIFGIIFLTAVVVHIILHWVVLRTFEKRAIASSRLWLQIITQNKLFHRLAFTLQGIIVNIQAVFWLQKGTEAADILTTCAQLWIMMYALLSVFSLLDVILNLAQKFPAASQLPLKGIFQGIKLIGAILVGILMISLLIGQSPAILISGLGAMAAVLMLVFKDPILGLVAGIQLSANDMLKLGDWLEMPKYGADGAVIDIGLTTVKVRNWDNTITTIPTWSLVSDSFKNWSGMSASGGRRIKRSISIDVTSIRFLDEDEMQRLNKAHLLKPYLTSRHQEINEWNRQQGSTESVLNLRRMTNIGTFRAYLNEYLRNHPRIRKDMTLMVRQLAPGDNGLPLEIYAFTNTVVWLEYESIHADIFDHIFAIVEEFGLRLHQSPTGNDIRSLAGAFKQ

SEQ ID NO: 155586 - DNA, 1248 bp, Escherichia albertii TW07627
  CDS (1)..(1248): transl_table=11
atgcaggatttaatatcccaggttgaagatttagcgggtattgagctcgatcacaccacctcgatggtgatgattttcggcattatttttctgaccgctgtcgtggtgcatattattttgcactgggtggtactgcggacctttgaaaaacgcgccatcgccagttcgcggttatggctgcaaattattacccagaataaactcttccaccgtttagcttttaccctgcaggggattatcgtcaacattcaggcggtattctggctgcaaaaaggcaccgaagcggctgatattttgaccacctgtgcgcagttgtggatcatgatgtatgcgctactttcagtcttctctttgctggatgttattttaaatctggcgcaaaaattccccgctgcaaaacaattaccgctgaaagggatatttcagggaatcaaactactcggcgcaattctggtcggcattttgatgatatcgctgctgattggtcagtcaccggcgattctgatcagcggtcttggcgccatggccgccgtgctgatgttagtgtttaaagatccgattctcggtctggtagccggtattcagctttctgcgaacgatatgctgaaattaggcgactggctggagatgccgaaatacggtgcagatggttcggtgattgatatcgggttaaccaccgtcaaagtgcgcaactgggacaataccatcaccaccattcctacctggtcgctggtatccgactcctttaaaaactggagcggaatgtcggcttccggcgggcgacgaattaaacgcagtatcaatattgatgtcaccagtattcgttttcttgatgaagacgaaatgcagcggctgaataaagcgcatttgctaaagccttatttaacccgtcgccatcaggaaattaacgactggaatcgccagcaaggttcgacggagtcggtattaaacctgcgacggatgaccaatattgggacgtttcgcgcctatctgaatgaatatctgcgcaaccatccacggattcgtaaggatatgaccttaatggtgcgtcagcttgcaccgggagataccgggttgccgcttgaaatatatgcgttcaccaataccgtagtctggctggaatatgaaagtattcaggccgacattttcgaccatatatttgctatcgtcgaagagtttggtctgcgacttcatcagtcaccaaccagcaacgatattcgctctctggcgggtacatttaagcagtaa

SEQ ID NO: 155587 - protein, 415 aa, Escherichia albertii TW07627
MQDLISQVEDLAGIELDHTTSMVMIFGIIFLTAVVVHIILHWVVLRTFEKRAIASSRLWLQIITQNKLFHRLAFTLQGIIVNIQAVFWLQKGTEAADILTTCAQLWIMMYALLSVFSLLDVILNLAQKFPAAKQLPLKGIFQGIKLLGAILVGILMISLLIGQSPAILISGLGAMAAVLMLVFKDPILGLVAGIQLSANDMLKLGDWLEMPKYGADGSVIDIGLTTVKVRNWDNTITTIPTWSLVSDSFKNWSGMSASGGRRIKRSINIDVTSIRFLDEDEMQRLNKAHLLKPYLTRRHQEINDWNRQQGSTESVLNLRRMTNIGTFRAYLNEYLRNHPRIRKDMTLMVRQLAPGDTGLPLEIYAFTNTVVWLEYESIQADIFDHIFAIVEEFGLRLHQSPTSNDIRSLAGTFKQ

SEQ ID NO: 155588 - DNA, 1293 bp, Providencia stuartii ATCC 25827
  CDS (1)..(1293): transl_table=11
atggatgccaataaagaaggagaacacatgcagcagcaactgctagactgggtacgccagttcaaccaagattatgccgaaattgcttcactgttaatcgtattaggcttaattcttgttgtcgccttaattttgcattttattctgcacaaaattatccttcctcggatagagaaaagtggtcagaaaaaaggcagtggctggcaacgtcaattaacccagtttaatctatttaatcgcattgcgtttattatccaaggtgttgtcgtcaacatccaagccgttctatggcttcattcaggctctaccgcacaacagatattaagtgttgcttcacaggcttggtgcttactgtttgggttacttacgtttttctctattctcgatattttgcttagcgtattacagcgcgccgcaaaaacagctcacctgccgttacgtgggatcttccaaagcgtaaaacttatcgcatccgtactcattgcaattatgatcattgcactgctaatcggaaaatctcctctgatcctactcagtggattaggtgcaatgacggcggtcatgatgttggtctttaaagacccaatcatggggttagtcgcagggatccaactctctgcaaacaatatggttaacattggcgattggcttgaaatgcctaaatatggcgccgatggtgctgtcaccgacattggtttaacaaccgttaaagtgcgtaactgggataacactgttacaactattccaacttatgccttgatttcagactcattcaaaaactggaaagggatgactgaatcaggggggcgtcgtattaaacgtagtattcgcctagataccacgagtatccattttcttgaccaagagcagattgactctttagttaaggcgaatcttttagagccctacattggtgataaaatttctgaaattaaagtctttaactcgtctattcccgaagatagagtgacaccacttaaccagcgtaggctaaccaatattggtactttccgtgcctatgttgaagcttatttgaaggcacatcctaaaatccataaaaatatgacaattatggtaaggcagcttgaatctgactcaaatgggttacctattgaaatttatgcctttaccaataccactgtttgggttgagtatgaagggatccaatctgatatctttgaccatattttctccattctgccacagtttgaactgcgcgttcaccagtcaccaacaggcacagatatgcgagctatcggtcaaacagtcactggatctaatacccaacagtga

SEQ ID NO: 155589 - protein, 430 aa, Providencia stuartii ATCC 25827
MDANKEGEHMQQQLLDWVRQFNQDYAEIASLLIVLGLILVVALILHFILHKIILPRIEKSGQKKGSGWQRQLTQFNLFNRIAFIIQGVVVNIQAVLWLHSGSTAQQILSVASQAWCLLFGLLTFFSILDILLSVLQRAAKTAHLPLRGIFQSVKLIASVLIAIMIIALLIGKSPLILLSGLGAMTAVMMLVFKDPIMGLVAGIQLSANNMVNIGDWLEMPKYGADGAVTDIGLTTVKVRNWDNTVTTIPTYALISDSFKNWKGMTESGGRRIKRSIRLDTTSIHFLDQEQIDSLVKANLLEPYIGDKISEIKVFNSSIPEDRVTPLNQRRLTNIGTFRAYVEAYLKAHPKIHKNMTIMVRQLESDSNGLPIEIYAFTNTTVWVEYEGIQSDIFDHIFSILPQFELRVHQSPTGTDMRAIGQTVTGSNTQQ

SEQ ID NO: 155590 - DNA, 1194 bp, Bacteroides coprocola DSM 17136
  CDS (1)..(1194): transl_table=11
atggaagatttgtatgtagagatagcccaacaattatcagatatgggcattgacaaagagaatataagctggagcacccgtcttacacttatcgcacttatcctgctgatttcatatatcataaccaaattattcagacacttggtcataccagcagttcacaaaataacatctcgcaccaaagctacatgggacgactacttgttcaacgaaagaatgatgaccagcttttgccgcatgattcctcctatcatgttttacttgttactgccattcgtctttaacaatataccccaagtccttgatatattattaaaaggatgtcttatatatctggtaatcacaactctcatgcttgttaattcgttcttaaattcactatacgaaatttccaatgagcatgaaacgctacgcaaccgcccgctgaaaggaatctatcagatgattaatttggttgccatcggtataggaatcatattaatcatcagcatactgatcgaccaaaatgcagcaaccatcctagctggtctgggagcttcggccgctgtcctgatgttgattttcaaagacagtatattgggacttgtagcaggcgtacagctttcggccaacgatatgctgcgcccgggagactggattaccatgcccaagtacggagcagacggtgatgtactggaagtttcactgactaccgtcaaggtacgtaacttcgacaagacgattacaaccatacctccctacgcactagtcagcgattcatttcagaattggcgaggaatgcgtgaaacaggaggacgacgcatcaaacgttcaatattcatagacatgacaaccgtacatttctgttccgacaaagaaaagataatgtttgcctctcgcggatggatagatgaagcacaagctaaacctgaaacacaagtggtaaacctatatgttttccgcagctatctccagaattacctgcgagaacaccctcgtacacataaagaattaatgatcatggtacgtcagatgcaacctacttctgaaggacttccattggaaatatattgtttctcgaacaccactgtatggcccgagtatgaacaaattcaaggagaaatcttcgatcatattcttgctgtaattcccgaattcggcttgcgaatattccaacgtccttcaggaaacgacttaagtacaaccatcaaataa

SEQ ID NO: 155591 - protein, 397 aa, Bacteroides coprocola DSM 17136
MEDLYVEIAQQLSDMGIDKENISWSTRLTLIALILLISYIITKLFRHLVIPAVHKITSRTKATWDDYLFNERMMTSFCRMIPPIMFYLLLPFVFNNIPQVLDILLKGCLIYLVITTLMLVNSFLNSLYEISNEHETLRNRPLKGIYQMINLVAIGIGIILIISILIDQNAATILAGLGASAAVLMLIFKDSILGLVAGVQLSANDMLRPGDWITMPKYGADGDVLEVSLTTVKVRNFDKTITTIPPYALVSDSFQNWRGMRETGGRRIKRSIFIDMTTVHFCSDKEKIMFASRGWIDEAQAKPETQVVNLYVFRSYLQNYLREHPRTHKELMIMVRQMQPTSEGLPLEIYCFSNTTVWPEYEQIQGEIFDHILAVIPEFGLRIFQRPSGNDLSTTIK

SEQ ID NO: 155592 - DNA, 1254 bp, Bacteroides intestinalis DSM 17393
  CDS (1)..(1254): transl_table=11
atgagcattgtacaacaaattaacgaaggacttcagactttaggtttcagccagtcattggccgaccagttagatcaatttattgcatttctgggagttctcctggtggcttatctggcagattccatttgccggaaagtcttgctgaaagtcgtttcgcgtttggtaaaacaaacaaaagctacctgggatgacattgttttcgaccggaaggtgatggtgcaccttagccgcatggtggcacctattcttatttatatcctgctgcccctggctttttccgatgcgggatcggcaacgttggcgcttattatgcgtttctgcctcatctttattattataatgtttcttagctttatcagcgctttgcttactgcggtttataccgtatatagcgagaaggaacagtttcgcgaccgccctctgaagggacttttgcagactgtgcaggtaattctttattttgtcgggggcatcatcgtcgtcagcatactgatcgaccgctcacccggtgtattgctcaccggtctgggagcttcggctgccgtgttgatgttagtgttcaaagacagtatcatgggctttgtttccggtgtgcaactttctgccaacaatatgctgaaagtgggagactggattaccatgcctaagtatggagcggatggtgacgtaatagaagtatcattgaacacggtgaaggtgcgcaatttcgacaagaccatcactaccattcctccttacctgcttgtaagcgactctttccagaactggcgtggtatgcaggagagtggcggacgccgcatcaagcgttctatcaatatcgatatgaacagtgtacggttctgtactcccgaaatgttggcaaagtatcgcaagatacagctcttggcaaactacgttgaacagacggaacaagtgataaaggagtataatgaagaacatcatatcgataactccatccttgtgaacgggcgtcgccagacgaatctcggtgtcttccgtgcttacctgaattgctacttgaagagccatccgggtgtaaatcatgatatgacctgtatggtgcgtcagcttcaacctaccgaccacggtataccgttggaactgtatttcttttctgcaaccacatcctggataccatacgaggacttgcagtccgacgttttcgaccatctgctggctattatttcagagtttgatctgcacgtattccagtcaccgtccggtgaagatttccgtgaaaggcttggttga

SEQ ID NO: 155593 - protein, 417 aa, Bacteroides intestinalis DSM 17393
MSIVQQINEGLQTLGFSQSLADQLDQFIAFLGVLLVAYLADSICRKVLLKVVSRLVKQTKATWDDIVFDRKVMVHLSRMVAPILIYILLPLAFSDAGSATLALIMRFCLIFIIIMFLSFISALLTAVYTVYSEKEQFRDRPLKGLLQTVQVILYFVGGIIVVSILIDRSPGVLLTGLGASAAVLMLVFKDSIMGFVSGVQLSANNMLKVGDWITMPKYGADGDVIEVSLNTVKVRNFDKTITTIPPYLLVSDSFQNWRGMQESGGRRIKRSINIDMNSVRFCTPEMLAKYRKIQLLANYVEQTEQVIKEYNEEHHIDNSILVNGRRQTNLGVFRAYLNCYLKSHPGVNHDMTCMVRQLQPTDHGIPLELYFFSATTSWIPYEDLQSDVFDHLLAIISEFDLHVFQSPSGEDFRERLG

SEQ ID NO: 155594 - DNA, 1254 bp, Geobacillus sp. Y412MC10
  CDS (1)..(1254): transl_table=11
atggactttatcaaaaatcaactagacggatatggcatgagcgaacaaaccattggatatctctcgaatatgatcatggtcgtttttatcgcggtggtctccatactggccaattttattaccaaaaaaatcgtgctgaagacgattattcatatcgtcaacaacaatcggtacacatgggacaatatcatcgtggagaaaaaagtgttccacaagctgtcgcatcttgtgccggcaatcattatttatttttcggcgtccatctttccggcgtaccaaattctgattgaaaaagcggccatgacgtacatgattatcgtcaccatcacggtgttgaatgcgctgcttaatgcttttgatgacatttatcgttcatttgaagtttccaaaatcaggccgattaagggatacattcaggtggtgaaaatcgttttgttcatcatcggcggcattgtggtgatctcgaacctcatcgggcagaatcctttgatcattctcagcgggcttggtgctctatcggctgttctgatgctggtgttcaaggactccatactgggcttggtggcaggcgttcaattatcatccaatgatatggtgcgtgtcggcgattggattgaaatgccgaaatacaatgcggacggcgacgtcatcgacattacgttgaatacggtaaaagtgatgaatttcgataaaacgatcacgatgattcccagctatgccctcatctcggactcgttcaagaactggagaggcatgcaggtatccggcggccgaagaattaagcgaagcttctatgtcgatacgagcagcatctgcttttgcaccaaggaaatgattgaggaatttcagaagatacactaccttaccgattatgtcacgactcgattacacgaaattaacgcatacaacatcgagcatcagatcaatacggaaagcaacgtgaacggcagacagcttacgaatgtgggcgtattcagggagtatatccatcaatacctgcggaatcatccgaaaatccataaggatatgacgctgattgtcaggcagttagcgccgggagataacggactgcccttggaaatctatgcgttcagcaatgataccaactggggtgtgtatgaatcgattcaagcggatatctttgaccatatctttgccgttgcgccgaccttcgggctccgtgccttccaaaatccaaccggccacgatatcgtccatctcaaagaaagcccggaatattcccggggatattga

SEQ ID NO: 155595 - protein, 417 aa, Geobacillus sp. Y412MC10
MDFIKNQLDGYGMSEQTIGYLSNMIMVVFIAVVSILANFITKKIVLKTIIHIVNNNRYTWDNIIVEKKVFHKLSHLVPAIIIYFSASIFPAYQILIEKAAMTYMIIVTITVLNALLNAFDDIYRSFEVSKIRPIKGYIQVVKIVLFIIGGIVVISNLIGQNPLIILSGLGALSAVLMLVFKDSILGLVAGVQLSSNDMVRVGDWIEMPKYNADGDVIDITLNTVKVMNFDKTITMIPSYALISDSFKNWRGMQVSGGRRIKRSFYVDTSSICFCTKEMIEEFQKIHYLTDYVTTRLHEINAYNIEHQINTESNVNGRQLTNVGVFREYIHQYLRNHPKIHKDMTLIVRQLAPGDNGLPLEIYAFSNDTNWGVYESIQADIFDHIFAVAPTFGLRAFQNPTGHDIVHLKESPEYSRGY

SEQ ID NO: 155596 - DNA, 1248 bp, Escherichia coli E110019
  CDS (1)..(1248): transl_table=11
atgcaggatttaatatcccaggttgaagatttagcgggtattgagatcgattacaccacctcgatggtgatgattttcggtattatttttctgaccgccgtcgtggtgcatattattttgcattgggtggtactgcggaccttcgaaaaacgtgccatcgccagttcacggctttggttgcaaatcattacccagaataaactcttccaccgtttagcttttaccctgcaggggattatcgtcaatattcaggcggtattctggctgcaaaaaggcaccgaagcggcagatattctgactacctgcgcgcagttgtggatcatgatgtatgcgctgctttcagtcttctcgttgctggatgttattttgaatctggcgcagaaattcccggcggcatctcagttaccgctgaaagggatatttcaggggattaaactgatcggcgcaatcctggtcggcattttgatgatctcgctgctgattggtcagtcgccagcgattctgatcagcggtcttggtgcaatggctgccgtgctgatgttggtttttaaagatccgattcttggtctggtggcaggtattcagctttccgcgaacgatatgctgaaactgggcgactggctggagatgccgaaatacggcgcggatggcgcggtgatcgatattgggttaaccaccgtcaaagtgcgtaactgggacaataccattaccactattcccacctggtctctggtttctgactcctttaaaaactggagcgggatgtcagcatctggcgggcgacgtattaagcgcagtatcagtattgatgtcaccagtattcgttttcttgatgaagacgaaatgcaacgtctgaataaagcgcacttgttaaaaccttatttaaccagccgccatcaggaaattaatgagtggaatcgccagcaaggttctacggagtcgatattaaacctgcgccgaatgaccaatattggaacctttcgtgcctatctgaacgaatatctgcgtaaccatccgcggattcgtaaagatatgaccttaatggtacgccaactggctccaggtgataacggtttaccgctcgagatctacgcgtttactaacaccgtggtgtggctggaatatgaaagcattcaggctgatatattcgatcacatatttgcgattgtcgaagagtttggtctgcgacttcatcagtcgccaaccggcaatgatattcgctctctggcgggtgcatttaagcagtaa

SEQ ID NO: 155597 - protein, 415 aa, Escherichia coli E110019
MQDLISQVEDLAGIEIDYTTSMVMIFGIIFLTAVVVHIILHWVVLRTFEKRAIASSRLWLQIITQNKLFHRLAFTLQGIIVNIQAVFWLQKGTEAADILTTCAQLWIMMYALLSVFSLLDVILNLAQKFPAASQLPLKGIFQGIKLIGAILVGILMISLLIGQSPAILISGLGAMAAVLMLVFKDPILGLVAGIQLSANDMLKLGDWLEMPKYGADGAVIDIGLTTVKVRNWDNTITTIPTWSLVSDSFKNWSGMSASGGRRIKRSISIDVTSIRFLDEDEMQRLNKAHLLKPYLTSRHQEINEWNRQQGSTESILNLRRMTNIGTFRAYLNEYLRNHPRIRKDMTLMVRQLAPGDNGLPLEIYAFTNTVVWLEYESIQADIFDHIFAIVEEFGLRLHQSPTGNDIRSLAGAFKQ

SEQ ID NO: 155598 - DNA, 1248 bp, Escherichia coli 101-1
  CDS (1)..(1248): transl_table=11
atgcaggatttaatatcccaggttgaagatttagcgggtattgagatcgatcacaccacctcgatggtgatgattttcggtattatttttctgaccgccgtcgtggtgcatattattttgcattgggtggtactgcggaccttcgaaaaacgtgccatcgccagttcacggctttggttgcaaatcattacccagaataaactcttccaccgtttagcttttaccctgcaggggattatcgtcaatattcaggcggtattctggctgcaaaaaggcaccgaagcggcagatattctgactacctgcgcgcagttgtggatcatgatgtatgcgctgctttcagtcttctcgttgctggatgttattttgaatctggcgcagaaattcccgacagcatctcagttaccgctgaaagggatatttcaggggattaaactgatcggcgcgattctggtcggcattttgatgatctcgctgctgattggtcagtcgccagcgattctgatcagcggtcttggtgcaatggctgccgtgctgatgttggtatttaaagatccgattcttggtctggtggcaggtattcagctttccgcgaacgatatgctgaaactgggcgactggctggagatgccgaaatacggcgcggatggcgcggtgatcgatattgggttaaccaccgtcaaagtgcgtaactgggacaataccattaccactattcccacctggtctctggtttctgactcctttaaaaactggagcgggatgtcagcatctggcgggcgacgtattaagcgcagtatcagtattgatgtcaccagtattcgttttcttgatgaagacgaaatgcaacgtctgaataaagcgcatttgttaaagccttatttaaccagccgccatcaggaaattaatgagtggaatcgccagcaaggttctacggagtcggtattaaacctgcgccgaatgaccaatattggaacctttcgtgcctatctgaacgaatatctgcgtaaccatccgcggattcgtaaagatatgactttaatggtacgccaactggctccaggtgataatggtttaccgctcgagatctatgcgtttaccaacaccgtggtgtggctggaatatgaaagcattcaggctgatatattcgatcacatatttgcgattgtcgaagagtttggtctgcgacttcatcagtcgccaaccggcaatgatattcgctctctggcgggtgcatttaagcagtaa

SEQ ID NO: 155599 - protein, 415 aa, Escherichia coli 101-1
MQDLISQVEDLAGIEIDHTTSMVMIFGIIFLTAVVVHIILHWVVLRTFEKRAIASSRLWLQIITQNKLFHRLAFTLQGIIVNIQAVFWLQKGTEAADILTTCAQLWIMMYALLSVFSLLDVILNLAQKFPTASQLPLKGIFQGIKLIGAILVGILMISLLIGQSPAILISGLGAMAAVLMLVFKDPILGLVAGIQLSANDMLKLGDWLEMPKYGADGAVIDIGLTTVKVRNWDNTITTIPTWSLVSDSFKNWSGMSASGGRRIKRSISIDVTSIRFLDEDEMQRLNKAHLLKPYLTSRHQEINEWNRQQGSTESVLNLRRMTNIGTFRAYLNEYLRNHPRIRKDMTLMVRQLAPGDNGLPLEIYAFTNTVVWLEYESIQADIFDHIFAIVEEFGLRLHQSPTGNDIRSLAGAFKQ

SEQ ID NO: 155600 - DNA, 1245 bp, Enterobacter cancerogenus ATCC 35316
  CDS (1)..(1245): transl_table=11
atgcaggaattaattgctcaggttgaagagttagggattgaaattaatcacaccacatcgctggtgattatctttggtattatttttctgactgcccttatcgtgcattttatattgcacaaactggtgctgcgcgcctttgaaaagcgtgcgcaggccagcagccatttgtggctgcaaatcattacccagaataagttatttcaccgtctggcctttaccattcaggggataatcgtcaacgttcaggcggcgctgtggttacaaaaaggcagtgaagcggcggaaatactcaccacctgcgcgaagctgtgggtgatggtgtatgccctgctgtccttcttctcgctgctggacgtgatctttaatctgtcgcaaaaaatggcgaccgcgtcccagctgccgctgaaaggcattttccagggcgttaagctggtgagcgccattctggttgggattttgattatctccctgctgatcggtcagtctcccgcgattctgattagcggcctgggtgccatggccgcggtcctgatgctggtgtttaaagacccgatccttggccttgtggcgggcattcagctttcggctaacgatatgctcaagctcggtgactggctggagatgccgaaatatggcgctaacggcacggtgacggacatcggcctgaccaccgtgaaggtgcgtaatttcgataacaccatcaccaccattccgacgtgggcgctggtgtccgacgcgttcatcaactggagcggcatgtcagcttcgggcggccgccgcattaagcgcagcctgaatattgataccaccagcattcatttcctcgacgagcaggagcagcagaaactgattcaggcgaagctgctgaaaccttatctggccgcgcgtcacgaggaaattaacctgtggaatcagcaaaacggcgaaggggaatcggtattaaacctgcgcaagatgaccaatatcggcaccttccgcgcctatctgaatgaatatctgcgcaatcacccgcgcatccgtaaagatatgacattgatggtgcgccagctcgcgccggacgccaacggtcttcccatagaaatatatgccttcaccaatacggtggtctgggcggaatatgaagatatccaggccgatatcttcgaccatatttttgccgtggtggatgagtttggtctgcggatccatcagtcgccgaccgggaacgatattcgctcgctggcggttgtttcagcaaactaa

SEQ ID NO: 155601 - protein, 414 aa, Enterobacter cancerogenus ATCC 35316
MQELIAQVEELGIEINHTTSLVIIFGIIFLTALIVHFILHKLVLRAFEKRAQASSHLWLQIITQNKLFHRLAFTIQGIIVNVQAALWLQKGSEAAEILTTCAKLWVMVYALLSFFSLLDVIFNLSQKMATASQLPLKGIFQGVKLVSAILVGILIISLLIGQSPAILISGLGAMAAVLMLVFKDPILGLVAGIQLSANDMLKLGDWLEMPKYGANGTVTDIGLTTVKVRNFDNTITTIPTWALVSDAFINWSGMSASGGRRIKRSLNIDTTSIHFLDEQEQQKLIQAKLLKPYLAARHEEINLWNQQNGEGESVLNLRKMTNIGTFRAYLNEYLRNHPRIRKDMTLMVRQLAPDANGLPIEIYAFTNTVVWAEYEDIQADIFDHIFAVVDEFGLRIHQSPTGNDIRSLAVVSAN

SEQ ID NO: 155602 - DNA, 1281 bp, Providencia rustigianii DSM 4541
  CDS (1)..(1281): transl_table=11
atggatgttctgaaccaaaaaggagaacctatgcagcagcaactgctcaactgggtacaccagtttaatcaagactatgccaacctcgcttcactactgatggttcttgggttgattctcattgttgccctcgtcttacacctgattctacataaaatacttttacctacccttgaaaaaagagggaaaaaactgggatccggctggcagcatcaactaacacaacataatttattcaatcgtattgcctttattattcaaggtgttgtggttaatattcaatcgacactgtggctacaatcaggctcgacgccacaaattgttcttaatgtagcttcccaagcgtggtgcttgttatttggtttgcttgccatttattcgatcctagatatcgtactggaagtactacaacgcgcagcgaaaacagctcacctgcccttgagagggattttccaaagtatcaaattaatcgccaccctactgatctcaataatgatcattgcgctactcattggtaaatcaccactgatcattctgagtggcttaggggcaatgactgcggtcatgatgttagtatttaaagacccaattatgggactcgttgctggtatccaattatcagcaaacaatatggtcaacatcggcgattggctagaaatgccgaaatatggtgctgatggagcagtgattgacattggattgactacggtgaaagtccgaaattgggacaataccgtgacgacaatcccaacctacgctctaatttctgactcttttaaaaactggaaagggatgacggaatctggtgggcgtagaatcaaacgaagcctgcgtatagacgccaacagtatccattttttgcaatcagatgaaattgcctatctagagaaagcaaacttgcttgaaccttatatagataaaaaaatctctgaaattcaatcatataataattcattacccgaagataaagcggttccattaaatcagcgacgtttgaccaatattggtacatttcgcgcttatatagaagcctacttacgttctcatcctaatatccataaaggaatgacgatcatggttaggcagctagaatctgattccaatggtattccaatcgagatttacgcctttaccaatactaccgtatggctagaatatgagcgcattcaatcggatatttttgatcatatattctctatattgcctcagttcaatttacacgttcatcagtcacctaccggaaatgatgttcgattaataggccattcaacagttaaatag

SEQ ID NO: 155603 - protein, 426 aa, Providencia rustigianii DSM 4541
MDVLNQKGEPMQQQLLNWVHQFNQDYANLASLLMVLGLILIVALVLHLILHKILLPTLEKRGKKLGSGWQHQLTQHNLFNRIAFIIQGVVVNIQSTLWLQSGSTPQIVLNVASQAWCLLFGLLAIYSILDIVLEVLQRAAKTAHLPLRGIFQSIKLIATLLISIMIIALLIGKSPLIILSGLGAMTAVMMLVFKDPIMGLVAGIQLSANNMVNIGDWLEMPKYGADGAVIDIGLTTVKVRNWDNTVTTIPTYALISDSFKNWKGMTESGGRRIKRSLRIDANSIHFLQSDEIAYLEKANLLEPYIDKKISEIQSYNNSLPEDKAVPLNQRRLTNIGTFRAYIEAYLRSHPNIHKGMTIMVRQLESDSNGIPIEIYAFTNTTVWLEYERIQSDIFDHIFSILPQFNLHVHQSPTGNDVRLIGHSTVK

SEQ ID NO: 155604 - DNA, 1251 bp, Providencia alcalifaciens DSM 30120
  CDS (1)..(1251): transl_table=11
atgcagcagcaactgctcgactgggctcgccagtttaatcaagactatgccactctcgcctctctcttaatggtccttgggttgatactgattgtcgcccttattttgcacttgttcctccacaagatactgctgcctagcattgaaaaacgggggctaaaagcgggttctggttggcaacatcaactcacgcaatacaatttatttaaccgcattgcctttattattcagggtattgtggtcaatatacaatccaccttgtggctatcttctggttccacgccacagatggtgttaaatgtggcctctcaagcatggtgtttactctttggcttgttaaccatttattccatcttagatatcacattaggcatattacaaagagcggcgaaaacagcgcatcttcctctgcgtggcatttttcaaagtatcaaattaatcgctaccgtcttaatttctattatgatcatcgcactactgatcggaaaatctccgttgattatcctcagtggtttaggggcaatgactgctgtgatgatgttggtgtttaaagatcctatcatggggttagttgcaggtatccagctttctgcgaacaacatggtcaacattggtgactggctagaaatgcctaaatatggggccgatggtgcagtcattgatattgggctcactaccgttaaggtccgtaattgggataatactgtcacaactatcccaacgtatgcattaatttcagattcattcaaaaactggaaagggatgacagaatctggaggacgaagaattaaacgtagtctgcgtatcgatgccaatagcattcatttcttacagcctgaagagataaaaaaccttgaaaaggcaaacttgcttgagccttatctcgatcagaaagtctctgaaattcaggtctataactctgcattacctgaagataaagcgactccacttaaccaacgccgtctaacgaatatcgggacattccgagcttacgttgaggcgtatttacgtgcgcacccacagattcacaaaaatatgaccatcatggttcgtcaacttgaatcagactcaaatggtattcctattgaaatctacgcattcacaaataccacggtttggttggaatatgagcgtattcaatcggatatttttgaccatattttttcgattcttcctcagttcaatctacacatacatcaatcacctaccggtaatgatgttcgattcctcagtcattcaacaattaaataa

SEQ ID NO: 155605 - protein, 416 aa, Providencia alcalifaciens DSM 30120
MQQQLLDWARQFNQDYATLASLLMVLGLILIVALILHLFLHKILLPSIEKRGLKAGSGWQHQLTQYNLFNRIAFIIQGIVVNIQSTLWLSSGSTPQMVLNVASQAWCLLFGLLTIYSILDITLGILQRAAKTAHLPLRGIFQSIKLIATVLISIMIIALLIGKSPLIILSGLGAMTAVMMLVFKDPIMGLVAGIQLSANNMVNIGDWLEMPKYGADGAVIDIGLTTVKVRNWDNTVTTIPTYALISDSFKNWKGMTESGGRRIKRSLRIDANSIHFLQPEEIKNLEKANLLEPYLDQKVSEIQVYNSALPEDKATPLNQRRLTNIGTFRAYVEAYLRAHPQIHKNMTIMVRQLESDSNGIPIEIYAFTNTTVWLEYERIQSDIFDHIFSILPQFNLHIHQSPTGNDVRFLSHSTIK

SEQ ID NO: 155606 - DNA, 25 bp, Artificial sequence
  primer
atgcaggatttaatatcccaggttg

SEQ ID NO: 155607 - DNA, 23 bp, Artificial sequence
  primer
ttactgcttaaatgcacccgcca

SEQ ID NO: 155608 - protein, 313 aa, Artificial sequence
  consensus sequence
  Variant (2)..(14): Xaa in position 2 to 14 is any amino acid
  Variant (15)..(20): Xaa in position 15 to 20 is any or no amino acid
  Variant (22)..(26): Xaa in position 22 to 26 is any amino acid
  Variant (28)..(29): Xaa in position 28 to 29 is any amino acid
  Variant (31)..(44): Xaa in position 31 to 44 is any amino acid
  Variant (46)..(48): Xaa in position 46 to 48 is any amino acid
  Variant (51)..(54): Xaa in position 51 to 54 is any amino acid
  Variant (60)..(61): Xaa in position 60 to 61 is any amino acid
  Variant (63)..(65): Xaa in position 63 to 65 is any amino acid
  Variant (69)..(69): Xaa in position 69 is any amino acid
  Variant (71)..(71): Xaa in position 71 is any amino acid
  Variant (74)..(75): Xaa in position 74 to 75 is any amino acid
  Variant (78)..(79): Xaa in position 78 to 79 is any amino acid
  Variant (82)..(83): Xaa in position 82 to 83 is any amino acid
  Variant (85)..(85): Xaa in position 85 is any amino acid
  Variant (87)..(89): Xaa in position 87 to 89 is any amino acid
  Variant (93)..(94): Xaa in position 93 to 94 is any amino acid
  Variant (96)..(98): Xaa in position 96 to 98 is any amino acid
  Variant (103)..(103): Xaa in position 103 is any amino acid
  Variant (105)..(108): Xaa in position 105 to 108 is any amino acid
  Variant (110)..(110): Xaa in position 110 is any amino acid
  Variant (115)..(115): Xaa in position 115 is any amino acid
  Variant (117)..(117): Xaa in position 117 is any amino acid
  Variant (119)..(119): Xaa in position 119 is any amino acid
  Variant (122)..(123): Xaa in position 122 to 123 is any amino acid
  Variant (126)..(128): Xaa in position 126 to 128 is any amino acid
  Variant (130)..(130): Xaa in position 130 is any amino acid
  Variant (132)..(133): Xaa in position 132 to 133 is any amino acid
  Variant (135)..(135): Xaa in position 135 is any amino acid
  Variant (138)..(138): Xaa in position 138 is any amino acid
  Variant (141)..(142): Xaa in position 141 to 142 is any amino acid
  Variant (151)..(153): Xaa in position 151 to 153 is any amino acid
  Variant (156)..(157): Xaa in position 156 to 157 is any amino acid
  Variant (159)..(160): Xaa in position 159 to 160 is any amino acid
  Variant (162)..(165): Xaa in position 162 to 165 is any amino acid
  Variant (166)..(169): Xaa in position 166 to 169 is any or no amino acid
  Variant (171)..(175): Xaa in position 171 to 175 is any amino acid
  Variant (177)..(178): Xaa in position 177 to 178 is any amino acid
  Variant (180)..(185): Xaa in position 180 to 185 is any amino acid
  Variant (186)..(190): Xaa in position 186 to 190 is any or no amino acid
  Variant (192)..(195): Xaa in position 192 to 195 is any amino acid
  Variant (196)..(206): Xaa in position 196 to 206 is any or no amino acid
  Variant (208)..(208): Xaa in position 208 is any amino acid
  Variant (210)..(210): Xaa in position 210 is any amino acid
  Variant (211)..(211): Xaa in position 211 is any or no amino acid
  Variant (214)..(214): Xaa in position 214 is any amino acid
  Variant (216)..(216): Xaa in position 216 is any amino acid
  Variant (221)..(223): Xaa in position 221 to 223 is any amino acid
  Variant (226)..(227): Xaa in position 226 to 227 is any amino acid
  Variant (229)..(234): Xaa in position 229 to 234 is any amino acid
  Variant (235)..(235): Xaa in position 235 is any or no amino acid
  Variant (238)..(239): Xaa in position 238 to 239 is any amino acid
  Variant (244)..(244): Xaa in position 244 is any amino acid
  Variant (246)..(248): Xaa in position 246 to 248 is any amino acid
  Variant (250)..(250): Xaa in position 250 is any amino acid
  Variant (252)..(252): Xaa in position 252 is any amino acid
  Variant (254)..(254): Xaa in position 254 is any amino acid
  Variant (256)..(256): Xaa in position 256 is any amino acid
  Variant (258)..(262): Xaa in position 258 to 262 is any amino acid
  Variant (264)..(265): Xaa in position 264 to 265 is any amino acid
  Variant (268)..(268): Xaa in position 268 is any amino acid
  Variant (271)..(271): Xaa in position 271 is any amino acid
  Variant (277)..(278): Xaa in position 277 to 278 is any amino acid
  Variant (280)..(283): Xaa in position 280 to 283 is any amino acid
  Variant (285)..(285): Xaa in position 285 is any amino acid
  Variant (287)..(289): Xaa in position 287 to 289 is any amino acid
  Variant (291)..(291): Xaa in position 291 is any amino acid
  Variant (293)..(293): Xaa in position 293 is any amino acid
  Variant (294)..(310): Xaa in position 294 to 310 is any or no amino acid
  Variant (312)..(312): Xaa in position 312 is any amino acid
LXXXXXXXXXXXXXXXXXXXPXXXXXQXXKXXXXXXXXXXXXXXLXXXSPXXXXSGLGAXXAXXXLVFXDXILXXVAXXQLXXNXMXXXGDWXXMXXXGADGXVXXXXLXTVKVXNXDXTIXXIPXXXLXSXXFXNWXGMXXSGGRRIKRXXXIDXXSXXFXXXXXXXXLXXXXXLXXYXXXXXXXXXXXNXXXXXXXXXXXXXXXNXRXXTNXGXFRAYXXXYLXXHXXXXXXXMTXXVRQLXPXXXGXPXEXYXFXXXXXWXXYEXIQXDIFDHXXAXXXXFXLXXXQXPXXXXXXXXXXXXXXXXXXGXD

SEQ ID NO: 155609 - protein, 57 aa, Artificial sequence
  protein pattern
  Variant (2)..(4): Xaa in position 2 to 4 is any amino acid
  Variant (5)..(5): Xaa in position 5 is Ala, Asp, Glu, Gly or Asn
  Variant (6)..(6): Xaa in position 6 is Ala or Val
  Variant (7)..(7): Xaa in position 7 is Asp or Asn
  Variant (9)..(9): Xaa in position 9 is any amino acid
  Variant (10)..(10): Xaa in position 10 is Ile or Val
  Variant (11)..(11): Xaa in position 11 is any amino acid
  Variant (12)..(12): Xaa in position 12 is Asp or Glu
  Variant (13)..(13): Xaa in position 13 is Ile, Met or Val
  Variant (14)..(14): Xaa in position 14 is Ala, Gly, Asn, Ser or Thr
  Variant (16)..(16): Xaa in position 16 is any amino acid
  Variant (17)..(17): Xaa in position 17 is Asn, Thr or Val
  Variant (18)..(18): Xaa in position 18 is Ile or Val
  Variant (19)..(19): Xaa in position 19 is any amino acid
  Variant (21)..(21): Xaa in position 21 is any amino acid
  Variant (23)..(23): Xaa in position 23 is Phe or Trp
  Variant (25)..(25): Xaa in position 25 is any amino acid
  Variant (27)..(27): Xaa in position 27 is any amino acid
  Variant (28)..(28): Xaa in position 28 is any or no amino acid
  Variant (30)..(30): Xaa in position 30 is any amino acid
  Variant (31)..(31): Xaa in position 31 is any or no amino acid
  Variant (33)..(35): Xaa in position 33 to 35 is any amino acid
  Variant (36)..(36): Xaa in position 36 is Phe or Leu
  Variant (37)..(37): Xaa in position 37 is any amino acid
  Variant (38)..(38): Xaa in position 38 is Ala, Gln, Ser or Thr
  Variant (39)..(39): Xaa in position 39 is Ala, Asp, Glu, Gly or Gln
  Variant (40)..(40): Xaa in position 40 is Ala, Gly, Pro, Ser or Thr
  Variant (41)..(42): Xaa in position 41 to 42 is any amino acid
  Variant (44)..(44): Xaa in position 44 is Trp or Tyr
  Variant (45)..(46): Xaa in position 45 to 46 is any amino acid
  Variant (48)..(49): Xaa in position 48 to 49 is any amino acid
  Variant (50)..(50): Xaa in position 50 is Ala, Gly, Ser or Thr
  Variant (52)..(52): Xaa in position 52 is Ala, Cys or Gly
  Variant (54)..(54): Xaa in position 54 is Gln or Arg
  Variant (55)..(55): Xaa in position 55 is Ile, Met or Val
  Variant (56)..(56): Xaa in position 56 is Lys or Arg
MXXXXXXGXXXXXXLXXXXVXNXDXTXXTXXPXXXXXXXXXXNXXXMXXXGXRXXXR

SEQ ID NO: 155610 - protein, 56 aa, Artificial sequence
  protein pattern
  Variant (2)..(4): Xaa in position 2 to 4 is any amino acid
  Variant (7)..(7): Xaa in position 7 is Leu or Met
  Variant (8)..(12): Xaa in position 8 to 12 is any amino acid
  Variant (14)..(14): Xaa in position 14 is Ile, Leu, Met or Val
  Variant (15)..(15): Xaa in position 15 is Pro or Ser
  Variant (16)..(16): Xaa in position 16 is Ile, Leu or Met
  Variant (18)..(18): Xaa in position 18 is Ile, Leu or Val
  Variant (20)..(20): Xaa in position 20 is any amino acid
  Variant (22)..(22): Xaa in position 22 is Ala, Cys, Ser or Thr
  Variant (23)..(26): Xaa in position 23 to 26 is any amino acid
  Variant (28)..(29): Xaa in position 28 to 29 is any amino acid
  Variant (32)..(34): Xaa in position 32 to 34 is any amino acid
  Variant (35)..(35): Xaa in position 35 is Ala, Cys, Gly or Ser
  Variant (37)..(37): Xaa in position 37 is Ile, Leu or Val
  Variant (40)..(40): Xaa in position 40 is His or Tyr
  Variant (41)..(41): Xaa in position 41 is Ile, Leu, Met or Val
  Variant (42)..(42): Xaa in position 42 is any amino acid
  Variant (43)..(43): Xaa in position 43 is Ala, Ser, Thr or Val
  Variant (44)..(47): Xaa in position 44 to 47 is any amino acid
  Variant (49)..(49): Xaa in position 49 is any amino acid
  Variant (50)..(50): Xaa in position 50 is Ile or Leu
  Variant (51)..(51): Xaa in position 51 is any amino acid
  Variant (52)..(52): Xaa in position 52 is Ala, Ile, Leu, Pro or Val
  Variant (53)..(53): Xaa in position 53 is any amino acid
  Variant (54)..(54): Xaa in position 54 is Glu or Gln
  Variant (55)..(55): Xaa in position 55 is any amino acid
  Variant (56)..(56): Xaa in position 56 is Ala, Asp, Gly, Pro, Ser or Thr
TXXXRQXXXXXXGXXXEXYXFXXXXXWXXYEXXXXDXFDXXXXXXXXFXXXXXXXX

SEQ ID NO: 155611 - protein, 39 aa, Artificial sequence
  protein pattern
  Variant (3)..(4): Xaa in position 3 to 4 is any amino acid
  Variant (5)..(6): Xaa in position 5 to 6 is Phe, Ile or Leu
  Variant (7)..(7): Xaa in position 7 is Ser or Thr
  Variant (9)..(9): Xaa in position 9 is Ile, Leu or Val
  Variant (11)..(11): Xaa in position 11 is Ala or Val
  Variant (12)..(12): Xaa in position 12 is any amino acid
  Variant (13)..(13): Xaa in position 13 is Ala, Gly, Ser or Thr
  Variant (14)..(14): Xaa in position 14 is Ala or Gly
  Variant (15)..(15): Xaa in position 15 is Phe, Ile, Leu or Val
  Variant (16)..(16): Xaa in position 16 is any amino acid
  Variant (17)..(17): Xaa in position 17 is Ile, Leu or Met
  Variant (19)..(19): Xaa in position 19 is Ile or Val
  Variant (20)..(20): Xaa in position 20 is Phe or Tyr
  Variant (21)..(21): Xaa in position 21 is any amino acid
  Variant (23)..(23): Xaa in position 23 is any amino acid
  Variant (24)..(24): Xaa in position 24 is Ile or Leu
  Variant (25)..(25): Xaa in position 25 is any amino acid
  Variant (26)..(26): Xaa in position 26 is Gly or Ser
  Variant (27)..(27): Xaa in position 27 is Phe or Leu
  Variant (28)..(28): Xaa in position 28 is Ser, Thr or Val
  Variant (29)..(29): Xaa in position 29 is Ala, Ser or Thr
  Variant (30)..(30): Xaa in position 30 is Gly, Asn or Ser
  Variant (31)..(31): Xaa in position 31 is Ile, Leu, Met or Val
  Variant (33)..(33): Xaa in position 33 is Ile, Leu or Val
  Variant (34)..(35): Xaa in position 34 to 35 is Ala, Ser or Thr
  Variant (36)..(38): Xaa in position 36 to 38 is any amino acid
  Variant (39)..(39): Xaa in position 39 is Ile, Leu or Val
SPXXXXXGXGXXXXXXXLXXXDXXXXXXXXXQXXXXXXX

SEQ ID NO: 155612 - protein, 25 aa, Artificial sequence
  protein pattern
  Variant (2)..(2): Xaa in position 2 is any amino acid
  Variant (4)..(4): Xaa in position 4 is His, Lys or Arg
  Variant (5)..(5): Xaa in position 5 is any amino acid
  Variant (8)..(8): Xaa in position 8 is Ile, Leu or Val
  Variant (10)..(10): Xaa in position 10 is Ser, Thr or Val
  Variant (11)..(11): Xaa in position 11 is Phe or Leu
  Variant (13)..(13): Xaa in position 13 is any amino acid
  Variant (14)..(14): Xaa in position 14 is Phe or Tyr
  Variant (15)..(17): Xaa in position 15 to 17 is any amino acid
  Variant (18)..(18): Xaa in position 18 is Phe or Tyr
  Variant (19)..(19): Xaa in position 19 is Ile, Leu or Val
  Variant (20)..(24): Xaa in position 20 to 24 is any amino acid
  Variant (25)..(25): Xaa in position 25 is Ile or Val
NXRXXTNXGXXRXXXXXXXXXXXXX

SEQ ID NO: 155613 - DNA, 714 bp, ESCHERICHIA COLI
  CDS (1)..(714): transl_table=11
atggaatcatactcgcaaaacagcaataaattagattttcagcacgaggccaggatattaaacggtatatggctcattaccgctttaggtttggtggcaaccgcaggactagcctggggagctaagtatatcgaaattacggcaaccaaatatgattcaccaccaatgtatgtcgccatagggttattattactttgtatgtatggcttaagtaaggatatcaacaagataaatgccgccatcgcgggcgtaatatatctgtttttactctctttggtggcgattgtcgttgcaagtttagttcctgtatatgccattatcatcgtgttcagcactgcgggcgcgatgtttttaatcagtatgctggccggtttattatttaatgttgatcctggttctcaccgttttatcattatgatgacgttgacagggttggccctggtaatcatcgtgaatgcggcattaatgagtgaacggcccatttggataataagttgcttaatgattgtgttatggtcaggcattatctcgcatggacgaaataagctccttgaattggcggggaaatgccatagtgaagagttgtggagtccggttcgttgcgcttttacaggtgcattaacactctattactattttatcggcttctttgggatacttgccgcgatagctataacgcttgtctggcaaaggcatacgcgtttttttcattaa

SEQ ID NO: 155614 - protein, 237 aa, ESCHERICHIA COLI
MESYSQNSNKLDFQHEARILNGIWLITALGLVATAGLAWGAKYIEITATKYDSPPMYVAIGLLLLCMYGLSKDINKINAAIAGVIYLFLLSLVAIVVASLVPVYAIIIVFSTAGAMFLISMLAGLLFNVDPGSHRFIIMMTLTGLALVIIVNAALMSERPIWIISCLMIVLWSGIISHGRNKLLELAGKCHSEELWSPVRCAFTGALTLYYYFIGFFGILAAIAITLVWQRHTRFFH

SEQ ID NO: 155615 - DNA, 714 bp, Escherichia coli O157:H7 EDL933
  CDS (1)..(714): transl_table=11
atggaatcatacttgcaaaacagcaataaattagattttcagcacgagaccaggatattaaacggtatatggctcattaccgctttaggtttggtggcaaccgcagggctggcctggggggctaagtatctcgaaattacggcaaccaaatatgattcaccaccaatgtatgtcgccatagggttattattactttgtatgtatggcttaattaaggatatcaacaagataaatgccgccatcgcaggcgtaatatatctgtttttactctctttggtggcgattgtcgttgcaagtttagttcctgtatatgccattatcgtcgtgttcagcactgcgggcgcgatgtttttaatcagtatgctggccggtttattatttaatattgatcctggttctcaccgttttatgattatgatgacgttgacagggttggccctggtaatcatcgtgaatgccgcattaatgagtgaacggcccatttgggtaataagttgcttaatgattgtgttatggtcaggcattatcttgcatggacgaaataagctccttgaattggcggggaaatgccatagtgaagagttgtggagtccggttcgttgcgcttttacaggtgcattaacactctattactattttatcggcttctttgggatacttgccgcgatagctataacgcttgtctggcaaaggcatacgcgtttttttcattag

SEQ ID NO: 155616 - protein, 237 aa, Escherichia coli O157:H7 EDL933
MESYLQNSNKLDFQHETRILNGIWLITALGLVATAGLAWGAKYLEITATKYDSPPMYVAIGLLLLCMYGLIKDINKINAAIAGVIYLFLLSLVAIVVASLVPVYAIIVVFSTAGAMFLISMLAGLLFNIDPGSHRFMIMMTLTGLALVIIVNAALMSERPIWVISCLMIVLWSGIILHGRNKLLELAGKCHSEELWSPVRCAFTGALTLYYYFIGFFGILAAIAITLVWQRHTRFFH

SEQ ID NO: 155617 - DNA, 741 bp, Escherichia coli CFT073
  CDS (1)..(741): transl_table=11
atgttttttctaaggacaactaaaagaatggaatcatactcgcaaaatagcaataaattagattttcagcacgaagccaggatattaaacagcatatggctcattaccgctttgggtttggtggcaaccgcagggctggcctggggcgctaagtatctcgaaattacggcaacaaaatatgattcaccgcaaatgtatgttgctataggattattattactttctatgtatggcttgagtaaagatatcaacaagataaataccgccatcgcgggcgtaatatatttgtttttaatctctttggtggcgattgtcgttgcgagtttagcgcctgtatctgccattatcgtcgtgttcagcactgcgggatcgatgtttttaatcagtatgctggcaggtctattgtttaaatttgatcctggttctcaccgttttatcattatgatgacgttgacagggttggccctggtaatcatcgtgaatgccacattaatgagtgaacgacccatttgggtaataagttgcttaatgattgtcttatggtcaggcattatctcgcatggacgaaataagctccttgaactgacaggaaaaagccatagtgaagaattatggagttcggttcgttgtgcttttataggtgcattaacactctattactattttatcggcttctttgggattcttgccgctatagctataacgcttgtctggcaaaggcatacgcggttttttcattag

SEQ ID NO: 155618 - protein, 246 aa, Escherichia coli CFT073
MFFLRTTKRMESYSQNSNKLDFQHEARILNSIWLITALGLVATAGLAWGAKYLEITATKYDSPQMYVAIGLLLLSMYGLSKDINKINTAIAGVIYLFLISLVAIVVASLAPVSAIIVVFSTAGSMFLISMLAGLLFKFDPGSHRFIIMMTLTGLALVIIVNATLMSERPIWVISCLMIVLWSGIISHGRNKLLELTGKSHSEELWSSVRCAFIGALTLYYYFIGFFGILAAIAITLVWQRHTRFFH

SEQ ID NO: 155619 - DNA, 714 bp, Escherichia coli HS
  CDS (1)..(714): transl_table=11
atggaatcatactcgaaaaacagcaataaattagattttcagcacgaggccaggatattaaacggtatatggctcattaccgctttaggtttggtggcaaccgcaggactagcctggggagctaagtatctcgaaattacggcaaccaaatatgattcaccaccaatgtatgtcgccatagggttattattactttgtatgtatggcttaagtaaggatatcaacaagataaatgccgccatcgcgggcgtaatatatctgtttttactctctttggtggcgattgtcgttgcaagtttagttcctgtatatgccattatcatcgtgttcagcactgcgggcgcgatgtttttaatcagtatgctggccggtttattatttaatgttgatcctggttctcaccgttttatcattatgatgacgttgacagggttggccctggtaatcatcgtgaatgcggcattaatgagtgaacggcccatttgggtaataagttgcttaatgattgtgttatggccaggcattatctcgcatggacgaaataagctccttgaactggcaggaaaatgccatagtgaagagttgtggagtccggttcgttgcgcttttacaggtgcattaacactctattactattttatcggcttctttgggatacttgccgcgatagctataacgcttgtctggcaaaggcatacgcgtttttttcattag

SEQ ID NO: 155620 - protein, 237 aa, Escherichia coli HS
MESYSKNSNKLDFQHEARILNGIWLITALGLVATAGLAWGAKYLEITATKYDSPPMYVAIGLLLLCMYGLSKDINKINAAIAGVIYLFLLSLVAIVVASLVPVYAIIIVFSTAGAMFLISMLAGLLFNVDPGSHRFIIMMTLTGLALVIIVNAALMSERPIWVISCLMIVLWPGIISHGRNKLLELAGKCHSEELWSPVRCAFTGALTLYYYFIGFFGILAAIAITLVWQRHTRFFH

SEQ ID NO: 155621 - DNA, 714 bp, Escherichia coli E24377A
  CDS (1)..(714): transl_table=11
atggaatcatactcacaaaacagcaataaattagattttcagcacgagaccaggatattaaacggtatatggctcattaccgctttaggtttggtggcaaccgcaggactggcctggggagctaagtatctcgaaattacggcaaccaaatatgattcaccaacaatgtatgtcgccatagggttattattagtttgtatgtatggcttaagtaaggatatcaacaagataaatgccgtcatcgcaggcgtaatatatctgtttttactctctttggtggcgattgtcgttgcaagtttagctcctgtacctgccattatcgtcgtgttcagcactgcgggcgcgatgtttttaatcagtatgctggccggtttattatttaatgttgatcctggttctcaccgttttatcattatgatgacgttgacagggttggccctggtgatcatcatgaatgccgcattaatgagtgaacgacccgtttgggtaataagttgcttaatgattgtgttatggtcaggcattatctcgcatgggcgaaataagctccttgaattggcggggaaatgccatagtgaagagttgtggagtccggttcgttgcgctgttacaggtgcattaacactctattactattttatcggcttctttgggatacttgccgcgatagctataacgcttgtctggcaaaggcatacgcgtttttttcattag

SEQ ID NO: 155622 - protein, 237 aa, Escherichia coli E24377A
MESYSQNSNKLDFQHETRILNGIWLITALGLVATAGLAWGAKYLEITATKYDSPTMYVAIGLLLVCMYGLSKDINKINAVIAGVIYLFLLSLVAIVVASLAPVPAIIVVFSTAGAMFLISMLAGLLFNVDPGSHRFIIMMTLTGLALVIIMNAALMSERPVWVISCLMIVLWSGIISHGRNKLLELAGKCHSEELWSPVRCAVTGALTLYYYFIGFFGILAAIAITLVWQRHTRFFH

SEQ ID NO: 155623 - DNA, 714 bp, Escherichia coli ATCC 8739
  CDS (1)..(714): transl_table=11
atggaatcatactcgcaaaacagcaataaattagattttcagcacgaggccaggatattaaacggtatatggctcattaccgctttaggtttggtggcaaccgcaggactagcctggggagctaagtatctcgaaattacggcaaccaaatatgattcaccaccaatgtatgtcgccatagggttattattactttgtatgtatggcttaagtaaggatatcaacaagataaatgccgccatcgcgggcgtaatatatctgtttttactctctttggtggcgattgtcgttgcaagtttagttcctgtatatgccattatcatcgtgttcagcactgcgggcgcgatgtttttaatcagtatgctggccggtttattatttaatgttgatcctggttctcaccgttttatcattatgatgacgttgacagggttggccctggtaatcatcgtgaatgcggcattaatgagtgaacggcccatttgggtaataagttgcttaatgattgtgttatggtcaggcattatctcgcatggacgaaataagctccttgaattggcggggaaatgccatagtgaagagttgtggagtccggttcgttgcgcttttacaggtgcattaacactctattactattttatcggcttctttgggatacttgccgcgatagctataacgcttgtctggcaaaggcatacgcgtttttttcattag

SEQ ID NO: 155624 - protein, 237 aa, Escherichia coli ATCC 8739
MESYSQNSNKLDFQHEARILNGIWLITALGLVATAGLAWGAKYLEITATKYDSPPMYVAIGLLLLCMYGLSKDINKINAAIAGVIYLFLLSLVAIVVASLVPVYAIIIVFSTAGAMFLISMLAGLLFNVDPGSHRFIIMMTLTGLALVIIVNAALMSERPIWVISCLMIVLWSGIISHGRNKLLELAGKCHSEELWSPVRCAFTGALTLYYYFIGFFGILAAIAITLVWQRHTRFFH

SEQ ID NO: 155625 - DNA, 714 bp, Escherichia coli SMS-3-5
  CDS (1)..(714): transl_table=11
atggaatcatactcgcaaaatagcaataaattagattttcagcacgaagccaggatattaaacggcatatggctcattaccgctttgggtttggtggcaaccgcagggctggcctggggcgctaagtatctcgaaattacggcaacaaaatatgattcaccggaaatgtatattgctataggattattattactttctatgtatggcttaagtaaagatatcaacaagataaataccgccatcgcgggcgtaatatatttgtttttaatctctttggtggcgattgtcgttgcgagtttagcgcctgtatctgccattatcgtcgtattcagcacagcgggcgcgatgttttttatcagtatgctggctggtttattattcaatgttgatcctggctctcaccgttttaccattatgatgacgttgacagggttggccctggtaatcatcgtgaatgccacattaatgagtgaacgacccatttgggtaataagttgcttaatgattgtcttatggtcaggcattatctcgcatggacgaaataagctccttgaactggcaggaaaatgccatagtgaagaattatggagtccggttcgttgtgcttttataggtgcattaacactctattactattttatcggcttctttgggattcttgccgctatagctataacgcttgtctggcaaaggcatacgcggttttttcattag

SEQ ID NO: 155626 - protein, 237 aa, Escherichia coli SMS-3-5
MESYSQNSNKLDFQHEARILNGIWLITALGLVATAGLAWGAKYLEITATKYDSPEMYIAIGLLLLSMYGLSKDINKINTAIAGVIYLFLISLVAIVVASLAPVSAIIVVFSTAGAMFFISMLAGLLFNVDPGSHRFTIMMTLTGLALVIIVNATLMSERPIWVISCLMIVLWSGIISHGRNKLLELAGKCHSEELWSPVRCAFIGALTLYYYFIGFFGILAAIAITLVWQRHTRFFH

SEQ ID NO: 155627 - DNA, 714 bp, Shigella boydii CDC 3083-94
  CDS (1)..(714): transl_table=11
atggaatcatactcacaaaacagcaataaattagattttcagcacgagaccaggatattaaacggtatatggctcattaccgctttaggtttggtggcaaccgcaggactggcctggggagctaagtatctcgaaattacggcaaccaaatatgattcaccaacaatgtatgtcgccatagggttattattagtttgtatgtatggcttaagtaaggatatcaacaagataaatgccgtcatcgcaggcgtaatatatctgtttttactctctttggtggcgattgtcgttgcaagtttagttcctgtatatgccattatcattgtgttcagcactgcgggcgcgatgtttttaatcagtatgctggccggtttattatttaatgttgatcctggttctcaccgttttatcattatgatgacgttgacagggttggccctggtaatcatcgtgaatgcggcattaatgagtgaacggcccatttgggtaataagttgcttagtgattgtgttatggccaggcattatctcgcatggacgaaataagctccttgaactggcaggaaaatgccatagtgaagagttgtggagtccggttcgttgcgcttttacaggtgcattaacactctattactattttatcggcttctttgggatacttgccgcgatagctataacgcttgtctggcaaaggcatacgcgtttttttcattag

SEQ ID NO: 155628 - protein, 237 aa, Shigella boydii CDC 3083-94
MESYSQNSNKLDFQHETRILNGIWLITALGLVATAGLAWGAKYLEITATKYDSPTMYVAIGLLLVCMYGLSKDINKINAVIAGVIYLFLLSLVAIVVASLVPVYAIIIVFSTAGAMFLISMLAGLLFNVDPGSHRFIIMMTLTGLALVIIVNAALMSERPIWVISCLVIVLWPGIISHGRNKLLELAGKCHSEELWSPVRCAFTGALTLYYYFIGFFGILAAIAITLVWQRHTRFFH

SEQ ID NO: 155629 - DNA, 714 bp, Escherichia coli S88
  CDS (1)..(714): transl_table=11
atggaatcatactcgcaaaatagcaataaagtagattttcagcacgaagccaggatattaaacggcatatggctcattaccgctttgggtttggtggcaaccgcagggctggcctggggcgctaagtatctcgaaattacggcaacaaaatatgattcaccgcaaatgtatgttgctataggattattattactttctatgtatggcttaagtaaagatatcaacaagataaataccgccatcgcgggcgtaatatatttgtttttaatctctttggtggcgattgtcgttgcgagtttagcgcctgtatctgccattatcgtcgtgttcagcactgcgggatcgatgtttttaatcagtatgctggcaggtctattgtttaaatttgatcctggttctcaccgttttatcattatgatgacgttgacagggttggccctggtaatcatcgtgaatgccacattaatgagtgaacgacccatttgggtaataagttgcttaatgattgtcttatggtcaggcattatctcgcatggacgaaataagctccttgaactgacaggaaaaagccatagtgaagaattatggagtccggttcgttgtgcttttgtaggtgcattaacactctattactattttatcggcttctttgggattcttgccactatagctataacgcttgtctggcaaaggcatacgcggttttttcattag

SEQ ID NO: 155630 - protein, 237 aa, Escherichia coli S88
MESYSQNSNKVDFQHEARILNGIWLITALGLVATAGLAWGAKYLEITATKYDSPQMYVAIGLLLLSMYGLSKDINKINTAIAGVIYLFLISLVAIVVASLAPVSAIIVVFSTAGSMFLISMLAGLLFKFDPGSHRFIIMMTLTGLALVIIVNATLMSERPIWVISCLMIVLWSGIISHGRNKLLELTGKSHSEELWSPVRCAFVGALTLYYYFIGFFGILATIAITLVWQRHTRFFH

SEQ ID NO: 155631 - DNA, 714 bp, Escherichia coli ED1a
  CDS (1)..(714): transl_table=11
atggaatcatactcgcaaaatagcaataaagtagattttcagcacgaagccaggatattaaacggcatatgtctcattaccgctttgggtttggtggcaaccgcagggctggcctggggcgctaagtatctcgaaattacggcaacaaaatatgattcaccgcaaatgtatgttgctataggattattattactttctatgtatggcttaagtaaagatatcaacaagataaataccgccatcgcgggcgtaatatatttgtttttaatctctttggtggcgattgtcgttgcgagtttagcgcctgtatctgccattatcgtcgtgttcagcactgcgggatcgatgtttttaatcagtatgctggcaggtctattgtttaaatttgatcctggttctcaccgttttatcattatgatgacgttgacagggttggccctggtaatcatcgtgaatgccacattaatgagtgaacgacccatttgggtaataagttgcttaatgattgtcttatggtcaggcattatctcgcatggacgaaataagctccttgaactgacaggaaaaagccatagtgaagaattatggagtccggttcgttgtgcttttgtaggtgcattaacactctattattattttatcggcttctttgggattcttgccgctatagctataacgcttgtctggcaaaggcatacgcggttttttcattag

SEQ ID NO: 155632 - protein, 237 aa, Escherichia coli ED1a
MESYSQNSNKVDFQHEARILNGICLITALGLVATAGLAWGAKYLEITATKYDSPQMYVAIGLLLLSMYGLSKDINKINTAIAGVIYLFLISLVAIVVASLAPVSAIIVVFSTAGSMFLISMLAGLLFKFDPGSHRFIIMMTLTGLALVIIVNATLMSERPIWVISCLMIVLWSGIISHGRNKLLELTGKSHSEELWSPVRCAFVGALTLYYYFIGFFGILAAIAITLVWQRHTRFFH

SEQ ID NO: 155633 - DNA, 714 bp, Shigella sonnei Ss046
  CDS (1)..(714): transl_table=11
atggaatcatactcgcaaaacagcaataaattagattttcagcacgaggccaggatattaaacggtatatggctcattaccgctttaggtttggtggcaaccgcaggactagcctggggagctaagtatctcgaaattacggcaaccaaatatgattcaccaccaatgtatgtcgctatagggttattattactttgtatgtatggcttaagtaaggatatcaacaagataaatgccgccatcgcgggcgtaatatatctgtttttactctctttggtggcgattgtcgttgcaagtttagttcctgtatatgccattatcatcgtgttcagcactgcgggcgcgatgtttttaatcagtatgctggccggtttattatttaatgttgagcctggttctcaccgttttatcattatgatgacgttgacagggttggccctggtaatcatcgtgaatgcggcattaatgagtgaacggcccatttgggtaataagttgcttaatgattgtgttatggccaggcattatctcgcatggacgaaataagctccttgaactggcaggaaaatgccatagtgaagagttgtggagtccggttcgttgcgcttttacaggtgcattaacactctattactattttatcggcttctttgggatacttgccgcgatagctataacgcttgtctggcaaaggcatacgcgtttttttcattag

SEQ ID NO: 155634 - protein, 237 aa, Shigella sonnei Ss046
MESYSQNSNKLDFQHEARILNGIWLITALGLVATAGLAWGAKYLEITATKYDSPPMYVAIGLLLLCMYGLSKDINKINAAIAGVIYLFLLSLVAIVVASLVPVYAIIIVFSTAGAMFLISMLAGLLFNVEPGSHRFIIMMTLTGLALVIIVNAALMSERPIWVISCLMIVLWPGIISHGRNKLLELAGKCHSEELWSPVRCAFTGALTLYYYFIGFFGILAAIAITLVWQRHTRFFH

SEQ ID NO: 155635 - DNA, 741 bp, Escherichia coli UTI89
  CDS (1)..(741): transl_table=11
atgttttttctaaggacaactaaaagaatggaatcatactcgcaaaatagcaataaagtagattttcagcacgaagccaggatattaaacggcatatggctcattaccgctttgggtttggtggcaaccgcagggctggcctggggcgctaagtatctcgaaattacggcaacaaaatatgattcaccgcaaatgtatgttgctataggattattattactttctatgtatggcttaagtaaagatatcaacaagataaataccgccatcgcgggcgtaatatatttgtttttaatctctttggtggcgattgtcgttgcgagtttagcgcctgtatctgccattatcgtcgtgttcagcactgcgggatcgatgtttttaatcagtatgctggcaggtctattgtttaaatttgatcctggttctcaccgttttatcattatgatgacgttgacagggttggccctggtaatcatcgtgaatgccacattaatgagtgaacgacccatttgggtaataagttgcttaatgattgtcttatggtcaggcattatctcgcatggacgaaataagctccttgaactgacaggaaaaagccatagtgaagaattatggagtccggttcgttgtgcttttgtaggtgcattaacactctattactattttatcggcttctttgggattcttgccactatagctataacgcttgtctggcaaaggcatacgcggttttttcattag

SEQ ID NO: 155636 - protein, 246 aa, Escherichia coli UTI89
MFFLRTTKRMESYSQNSNKVDFQHEARILNGIWLITALGLVATAGLAWGAKYLEITATKYDSPQMYVAIGLLLLSMYGLSKDINKINTAIAGVIYLFLISLVAIVVASLAPVSAIIVVFSTAGSMFLISMLAGLLFKFDPGSHRFIIMMTLTGLALVIIVNATLMSERPIWVISCLMIVLWSGIISHGRNKLLELTGKSHSEELWSPVRCAFVGALTLYYYFIGFFGILATIAITLVWQRHTRFFH

SEQ ID NO: 155637 - DNA, 714 bp, Escherichia coli 536
  CDS (1)..(714): transl_table=11
atggaatcatactcgcaaaatagcaataaattagattttcagcacgaagccaggatattaaacagcatatggctcattaccgctttgggtttggtggcaaccgcagggctggcctggggcgctaagtatctcgaaattacggcaacaaaatatgattcaccgcaaatgtatgttgctataggattattattactttctatgtatggcttgagtaaagatatcaacaagataaataccgccatcgcgggcgtaatatatttgtttttaatctctttggtggcgattgtcgttgcgagtttagcgcctgtatctgccattatcgtcgtgttcagcactgcgggatcgatgtttttaatcagtatgctggcaggtctattgtttaaatttgatcctggttctcaccgttttatcattatgatgacgttgacagggttggccctggtaatcatcgtgaatgccacattaatgagtgaacgacccatttgggtaataagttgcttaatgattgtcttatggtcaggcattatctcgcatggacgaaataagctccttgaactgacaggaaaaagccatagtgaagaattatggagttcagttcgttgtgcttttataggtgcattaacactctattactattttatcggcttctttgggattcttgccgctatagctataacgcttgtctggcaaaggcatacgcggttttttcattag

SEQ ID NO: 155638 - protein, 237 aa, Escherichia coli 536
MESYSQNSNKLDFQHEARILNSIWLITALGLVATAGLAWGAKYLEITATKYDSPQMYVAIGLLLLSMYGLSKDINKINTAIAGVIYLFLISLVAIVVASLAPVSAIIVVFSTAGSMFLISMLAGLLFKFDPGSHRFIIMMTLTGLALVIIVNATLMSERPIWVISCLMIVLWSGIISHGRNKLLELTGKSHSEELWSSVRCAFIGALTLYYYFIGFFGILAAIAITLVWQRHTRFFH

SEQ ID NO: 155639 - DNA, 702 bp, Escherichia coli O157:H7 str. EC4113
  CDS (1)..(702): transl_table=11
ttgcaaaacagcaataaattagattttcagcacgagaccaggatattaaacggtatatggctcattaccgctttaggtttggtggcaaccgcagggctggcctggggggctaagtatctcgaaattacggcaaccaaatatgattcaccaccaatgtatgtcgccatagggttattattactttgtatgtatggcttaattaaggatatcaacaagataaatgccgccatcgcaggcgtaatatatctgtttttactctctttggtggcgattgtcgttgcaagtttagttcctgtatatgccattatcgtcgtgttcagcactgcgggcgcgatgtttttaatcagtatgctggccggtttattatttaatattgatcctggttctcaccgttttatgattatgatgacgttgacagggttggccctggtaatcatcgtgaatgccgcattaatgagtgaacggcccatttgggtaataagttgcttaatgattgtgttatggtcaggcattatcttgcatggacgaaataagctccttgaattggcggggaaatgccatagtgaagagttgtggagtccggttcgttgcgcttttacaggtgcattaacactctattactattttatcggcttctttgggatacttgccgcgatagctataacgcttgtctggcaaaggcatacgcgtttttttcattag

SEQ ID NO: 155640 - protein, 233 aa, Escherichia coli O157:H7 str. EC4113
MQNSNKLDFQHETRILNGIWLITALGLVATAGLAWGAKYLEITATKYDSPPMYVAIGLLLLCMYGLIKDINKINAAIAGVIYLFLLSLVAIVVASLVPVYAIIVVFSTAGAMFLISMLAGLLFNIDPGSHRFMIMMTLTGLALVIIVNAALMSERPIWVISCLMIVLWSGIILHGRNKLLELAGKCHSEELWSPVRCAFTGALTLYYYFIGFFGILAAIAITLVWQRHTRFFH

SEQ ID NO: 155641 - DNA, 714 bp, Escherichia coli 53638
  CDS (1)..(714): transl_table=11
atggaatcatactcgcaaaacagcaataaattagattttcagcacgaggccaggatattaaacggtatatggctcattaccgctttaggtttggtggcaaccgcaggactagcctggggagctaagtatctcgaaattacggcaaccaaatatgattcaccaccaatgtatgtcgccatagggttattattactttgtatgtatggcttaagtaaggatatcaacaagataaatgccgccatcgcgggcgtaatatatctgtttttactctctttggtggcgattgtcgttgcaagtttagttcctgtatatgccattatcatcgtgttcagcactgcgggcgcgatgtttttaatcagtatgctggccggtttattatttaatgttgatcctggttctcaccgttttatcattatgatgacgttgacagggttggccctggtaatcatcgtgaatgcggcattaatgagtgaacggcccatttgggtaataagttgcttaatgattgtgttatggtcaggcattatctcgcatggacgaaataagctccttgaattggcggggaaatgccatagtgaagagttgtggagtccggttcgttgcgcttttacaggtgcattaacactctattactattttatctgcttctttgggatacttgccgcgatagctataacgcttgtctggcaaaggcatacgcgtttttttcattag

SEQ ID NO: 155642 - protein, 237 aa, Escherichia coli 53638
MESYSQNSNKLDFQHEARILNGIWLITALGLVATAGLAWGAKYLEITATKYDSPPMYVAIGLLLLCMYGLSKDINKINAAIAGVIYLFLLSLVAIVVASLVPVYAIIIVFSTAGAMFLISMLAGLLFNVDPGSHRFIIMMTLTGLALVIIVNAALMSERPIWVISCLMIVLWSGIISHGRNKLLELAGKCHSEELWSPVRCAFTGALTLYYYFICFFGILAAIAITLVWQRHTRFFH

SEQ ID NO: 155643 - DNA, 714 bp, Escherichia coli E110019
  CDS (1)..(714): transl_table=11
atggaatcatactcacaaaacagcaataaattagattttcagcacgagaccaggatattaaacggtatatggctcattaccgctttaggtttggtggcaaccgcaggactggcctggggagctaagtatctcgaaattacggcaaccaaatatgattcaccaacaatgtatgtcgccatagggttattattagtttgtatgtatggcttaagtaaggatatcaacaagataaatgccgtcatcgcaggcgtaatatatctgtttttactctctttggtggcgattgtcgttgcaagtttagctcctgtacctgccattatcgtcgtgttcagcactgcgggcgcgatgtttttaatcagtatgctggccggtttattatttaatgttgatcctagttctcaccgttttatcattatgatgacgttgacaggtttggccctggtgatcatcatgaatgccgcattaatgagtgaacgacccgtttgggtaataagttgcttaatgattgtgttatggccaggcattatctcgcatggacgaaataagctccttgaactggcaggaaaatgccatagtgaagagttgtggagtccggttcgttgcgcttttacaggtgcattaacactctattactattttatcggcttctttgggatacttgccgcgatagctataacgcttgtctggcaaaggcatacgcgtttttttcattag

SEQ ID NO: 155644 - protein, 237 aa, Escherichia coli E110019
MESYSQNSNKLDFQHETRILNGIWLITALGLVATAGLAWGAKYLEITATKYDSPTMYVAIGLLLVCMYGLSKDINKINAVIAGVIYLFLLSLVAIVVASLAPVPAIIVVFSTAGAMFLISMLAGLLFNVDPSSHRFIIMMTLTGLALVIIMNAALMSERPVWVISCLMIVLWPGIISHGRNKLLELAGKCHSEELWSPVRCAFTGALTLYYYFIGFFGILAAIAITLVWQRHTRFFH

SEQ ID NO: 155645 - DNA, 714 bp, Escherichia coli 101-1
  CDS (1)..(714): transl_table=11
atggaatcatactcgaaaaacagcaataaattagattttcagcacgaggccaggatattaaacggtatatggctcattaccgctttaggtttggtggcaaccgcaggactggcctggggagctaagtatctcgaaattacggcaaccaaatatgattcactaccaatgtatgtcgccatagggttattattactttgtatgtatggcttaagtaaggatatcaacaagataaatgccgccatcgcaggcgtaatatatctgtttttactctctttggtggcgattgtcgttgcaagtttagttcctgtatatgccattatcatcgtgtttagcactgcgggcgcgatgtttttaatcagtatgctggccggtttattatttaatgttgatcctggttctcaccgttttatcattatgatgacgttgacaggggtggccctggtaatcatcgtgaatgcggcattaatgagtgaacggcccatttgggtaataagttgcttaatgattgtgttatggtcaggcattatctcgcatggacgaaataagctccttgaactggcgggaaaatgccatagtgaagagttatggagtccggttcgttgcgcttttataggcgcattaacactctattactattttatcggcttctttgggatacttgcagcaatagcgataacgcttgtctggcaaaggcatacgcggttttttcattag

SEQ ID NO: 155646 - protein, 237 aa, Escherichia coli 101-1
MESYSKNSNKLDFQHEARILNGIWLITALGLVATAGLAWGAKYLEITATKYDSLPMYVAIGLLLLCMYGLSKDINKINAAIAGVIYLFLLSLVAIVVASLVPVYAIIIVFSTAGAMFLISMLAGLLFNVDPGSHRFIIMMTLTGVALVIIVNAALMSERPIWVISCLMIVLWSGIISHGRNKLLELAGKCHSEELWSPVRCAFIGALTLYYYFIGFFGILAAIAITLVWQRHTRFFH

SEQ ID NO: 155647 - DNA, 747 bp, Escherichia coli O157:H7 str. EC4206
  CDS (1)..(747): transl_table=11
atggaatcatacttgcaaaacagcaataaattagattttcagcacgagaccaggatattaaacggtatatggctcattaccgctttaggtttggtggcaaccgcagggctggcctggggggctaagtatctcgaaattacggcaaccaaatatgattcaccaccaatgtatgtcgccatagggttattattactttgtatgtatggcttaattaaggatatcaacaagataaatgccgccatcgcaggcgtaatatatctgtttttactctctttggtggcgattgtcgttgcaagtttagttcctgtatatgccattatcgtcgtgttcagcactgcgggcgcgatgtttttaatcagtatgctggccggtttattatttaatattgatcctggttctcaccgttttatgattatgatgacgttgacagggttggccctggtaatcatcgtgaatgccgcattaatgagtgaacggcccatttgggtaataagttgcttaatgattgtgttatggtcaggcattatcttgcatggacgaaataagctccttgaattggcggggaaatgccatagtgaagagttgtggagtccggttcgttgcgcttttacaggtgcattaacactctattactattttatcggcttctttgggatacttgccgcgatagctataacgcttgtctggcaaaggcatacgtcgtttttttcattagtcgtaaatgcacatactaaagaacttaactaa

SEQ ID NO: 155648 - protein, 248 aa, Escherichia coli O157:H7 str. EC4206
MESYLQNSNKLDFQHETRILNGIWLITALGLVATAGLAWGAKYLEITATKYDSPPMYVAIGLLLLCMYGLIKDINKINAAIAGVIYLFLLSLVAIVVASLVPVYAIIVVFSTAGAMFLISMLAGLLFNIDPGSHRFMIMMTLTGLALVIIVNAALMSERPIWVISCLMIVLWSGIILHGRNKLLELAGKCHSEELWSPVRCAFTGALTLYYYFIGFFGILAAIAITLVWQRHTSFFSLVVNAHTKELN

SEQ ID NO: 155649 - DNA, 24 bp, Artificial sequence
  primer
atggaatcatactcgcaaaacagc

SEQ ID NO: 155650 - DNA, 27 bp, Artificial sequence
  primer
ttaatgaaaaaaacgcgtatgcctttg
